United States Patent Application Publication US 2025/0311734 A1 - sequence listing, part 4

SEQ ID NO: 16080 - protein, 245 aa, Synthetic construct
WSAYDKHNEGINSHLWIVNRAIDIMSRNTTIVNPNETALLNEWRADLENGIYSADYENPYYDNSTYASHFYDPDTGTTYIPFAKHAKETGAKYFNLAGQAYQNQDMQQAFFYLGLSLHYLGDVNQPMHAANFTNLSYPWGFHSKYENFVDTIKNNYIVSDSNGYWNWKGANPEDWIEGAAVAAKQDYPGVVNDTTKDWFVKAAVSQEYADKWRAEVTPVTGKRLMEAQRVTAGYIHLWFDTYVNR

SEQ ID NO: 16081 - protein, 245 aa, Synthetic construct
WSAEDKHNEGINSHLWIVNRAIDIMSRNTTIVNPNETALLNEWRADLENGIYSADYENPYYDYSTYASHFYDPDTGTTYIPFAKHAKETGAKYFNLAGQAYQNQDMQQAFFYLGLSLHYLGDVNQPMHAANFTNLSYPMGFHSKYENFVDTIKNNYIVSDSNGYWNWKGANPEDWIEGAAVAAKQDYPGVVNDTTKDWFVKAAVSQEYADKWRAEVTPVTGKRLMEAQRVTAGYIHLWFDTYVNR

SEQ ID NO: 16082 - protein, 245 aa, Synthetic construct
WSAEDKHNEGINSHLWIVNRAIDIMSRNTTIVNPNETALLNEWRADLENGIYSADYENPYYDNSTYASHFYDPDTGTTYIPFAKHAKETGAKYFNLAGQAYQNQDMQQAFFYLGLSLHYLGDVNQPMHAANFTELSYPWGFHSKYENFVDTIKNNYIVSDSNGYWNWKGANPEDWIEGAAVAAKQDYPGVVNDTTKDWFVKAAVSQEYADKWRAEVTPVTGKRLMEAQRVTAGYIHLWFDTYVNR

SEQ ID NO: 16083 - protein, 245 aa, Synthetic construct
WSAEDKHNEGINSHLWIVNRAIDIMSRNTTIVNPNETALLNEWRADLENGIYSADYENPYYDWSTYASHFYDPDTGTTYIPFAKHAKETGAKYFNLAGQAYQNQDMQQAFFYLGLSLHYLGDVNQPMHAANFTNLSYPMGFHSKYENFVDTIKNNYIVSDSNGYWNWKGANPEDWIEGAAVAAKQDYPGVVNDTTKDWFVKAAVSQEYADKWRAEVTPVTGKRLMEAQRVTAGYIHLWFDTYVNR

SEQ ID NO: 16084 - protein, 245 aa, Synthetic construct
WSAEDKHNEGINSHLWIVNRAIDIMSRNTTIVNPNETALLNEWRADLENGIYSADYENPYYDNSTYASHFYDPDTGTTYIPFAKHAKETGAKYFNLAGQAYQNQDMQQAFFYLGLSLHYLGDVNQPMHAASFTNLSYPWGFHSKYENFVDTIKNNYIVSDSNGYWNWKGANPEDWIEGAAVAAKQDYPGVVNDTTKDWFVKAAVSQEYADKWRAEVTPVTGKRLMEAQRVTAGYIHLWFDTYVNR

SEQ ID NO: 16085 - protein, 245 aa, Synthetic construct
WSAWDKHNEGINSHLWIVNRAIDIMSRNTTIVNPNETALLNEWRADLENGIYSADYENPYYDNSTYASHFYDPDTGTTYIPFAKHAKETGAKYFNLAGQAYQNQDMQQAFFYLGLSLHYLGDVNQPMHAANFTNLSYPMGFHSKYENFVDTIKNNYIVSDSNGYWNWKGANPEDWIEGAAVAAKQDYPGVVNDTTKDWFVKAAVSQEYADKWRAEVTPVTGKRLMEAQRVTAGYIHLWFDTYVNR

SEQ ID NO: 16086 - protein, 245 aa, Synthetic construct
WSAEDKHNEGINSHLWIVNRAIDIMSRNTTIVNPNETALLNEWRADLENGIYSADYENPYYDFSTYASHFYDPDTGTTYIPFAKHAKETGAKYFNLAGQAYQNQDMQQAFFYLGLSLHYLGDVNQPMHAANFTNLSYPMGFHSKYENFVDTIKNNYIVSDSNGYWNWKGANPEDWIEGAAVAAKQDYPGVVNDTTKDWFVKAAVSQEYADKWRAEVTPVTGKRLMEAQRVTAGYIHLWFDTYVNR

SEQ ID NO: 16087 - protein, 245 aa, Synthetic construct
WSAEDKHNEGINSHLWIVNRAIDIMSRNTTIVNPNETALLNEWRADLENGIYSADYENPYYDWSTYASHFYDPDTGTTYIPFAKHAKETGAKYFNLAGQAYQNQDMQQAFFYLGLSLHYLGDVNQPMHAANFTNLSYPWGFHSKYENFVDTIKNNYIVSDSNGYWNWKGANPEDWIEGAAVAAKQDYPGVVNDTTKDWFVKAAVSQEYADKWRAEVTPVTGKRLMEAQRVTAGYIHLWFDTYVNR

SEQ ID NO: 16088 - protein, 245 aa, Synthetic construct
WSAWDKHNEGINSHLWIVNRAIDIMSRNTTIVNPNETALLNEWRADLENGIYSADYENPYYDNSTYASHFYDPDTGTTYIPFAKHAKETGAKYFNLAGQAYQNQDMQQAFFYLGLSLHYLGDVNQPMHAANFTNLSYPWGFHSKYENFVDTIKNNYIVSDSNGYWNWKGANPEDWIEGAAVAAKQDYPGVVNDTTKDWFVKAAVSQEYADKWRAEVTPVTGKRLMEAQRVTAGYIHLWFDTYVNR

SEQ ID NO: 16089 - protein, 245 aa, Synthetic construct
WSAFDKHNEGINSHLWIVNRAIDIMSRNTTIVNPNETALLNEWRADLENGIYSADYENPYYDNSTYASHFYDPDTGTTYIPFAKHAKETGAKYFNLAGQAYQNQDMQQAFFYLGLSLHYLGDVNQPMHAANFTNLSYPWGFHSKYENFVDTIKNNYIVSDSNGYWNWKGANPEDWIEGAAVAAKQDYPGVVNDTTKDWFVKAAVSQEYADKWRAEVTPVTGKRLMEAQRVTAGYIHLWFDTYVNR

SEQ ID NO: 16090 - protein, 245 aa, Synthetic construct
WSAEDKHNEGINSHLWIVNRAIDIMSRNTTIVNPNETALLNEWRADLENGIYSADYENPYYDNSTYASHFYDPDTGTTYIPFAKHAKETGAKYFNLAGQAYQNQDMQQAFFYLGLSLHYLGDVNQPMHAASFTELSYPMGFHSKYENFVDTIKNNYIVSDSNGYWNWKGANPEDWIEGAAVAAKQDYPGVVNDTTKDWFVKAAVSQEYADKWRAEVTPVTGKRLMEAQRVTAGYIHLWFDTYVNR

SEQ ID NO: 16091 - protein, 245 aa, Synthetic construct
WSARDKHNEGINSHLWIVNRAIDIMSRNTTIVNPNETALLNEWRADLENGIYSADYENPYYDWSTYASHFYDPDTGTTYIPFAKHAKETGAKYFNLAGQAYQNQDMQQAFFYLGLSLHYLGDVNQPMHAANFTNLSYPWGFHSKYENFVDTIKNNYIVSDSNGYWNWKGANPEDWIEGAAVAAKQDYPGVVNDTTKDWFVKAAVSQEYADKWRAEVTPVTGKRLMEAQRVTAGYIHLWFDTYVNR

SEQ ID NO: 16092 - protein, 245 aa, Synthetic construct
WSAWDKHNEGINSHLWIVNRAIDIMSRNTTIVNPNETALLNEWRADLENGIYSADYENPYYDFSTYASHFYDPDTGTTYIPFAKHAKETGAKYFNLAGQAYQNQDMQQAFFYLGLSLHYLGDVNQPMHAANFTNLSYPMGFHSKYENFVDTIKNNYIVSDSNGYWNWKGANPEDWIEGAAVAAKQDYPGVVNDTTKDWFVKAAVSQEYADKWRAEVTPVTGKRLMEAQRVTAGYIHLWFDTYVNR

SEQ ID NO: 16093 - protein, 245 aa, Synthetic construct
WSAWDKHNEGINSHLWIVNRAIDIMSRNTTIVNPNETALLNEWRADLENGIYSADYENPYYDMSTYASHFYDPDTGTTYIPFAKHAKETGAKYFNLAGQAYQNQDMQQAFFYLGLSLHYLGDVNQPMHAANFTNLSYPWGFHSKYENFVDTIKNNYIVSDSNGYWNWKGANPEDWIEGAAVAAKQDYPGVVNDTTKDWFVKAAVSQEYADKWRAEVTPVTGKRLMEAQRVTAGYIHLWFDTYVNR

SEQ ID NO: 16094 - protein, 245 aa, Synthetic construct
WSAEDKHNEGINSHLWIVNRAIDIMSRNTTIVNPNETALLNEWRADLENGIYSADYENPYYDLSTYASHFYDPDTGTTYIPFAKHAKETGAKYFNLAGQAYQNQDMQQAFFYLGLSLHYLGDVNQPMHAASFTNLSYPMGFHSKYENFVDTIKNNYIVSDSNGYWNWKGANPEDWIEGAAVAAKQDYPGVVNDTTKDWFVKAAVSQEYADKWRAEVTPVTGKRLMEAQRVTAGYIHLWFDTYVNR

SEQ ID NO: 16095 - protein, 245 aa, Synthetic construct
WSAFDKHNEGINSHLWIVNRAIDIMSRNTTIVNPNETALLNEWRADLENGIYSADYENPYYDNSTYASHFYDPDTGTTYIPFAKHAKETGAKYFNLAGQAYQNQDMQQAFFYLGLSLHYLGDVNQPMHAANFTELSYPWGFHSKYENFVDTIKNNYIVSDSNGYWNWKGANPEDWIEGAAVAAKQDYPGVVNDTTKDWFVKAAVSQEYADKWRAEVTPVTGKRLMEAQRVTAGYIHLWFDTYVNR

SEQ ID NO: 16096 - protein, 245 aa, Synthetic construct
WSAWDKHNEGINSHLWIVNRAIDIMSRNTTIVNPNETALLNEWRADLENGIYSADYENPYYDWSTYASHFYDPDTGTTYIPFAKHAKETGAKYFNLAGQAYQNQDMQQAFFYLGLSLHYLGDVNQPMHAANFTNLSYPWGFHSKYENFVDTIKNNYIVSDSNGYWNWKGANPEDWIEGAAVAAKQDYPGVVNDTTKDWFVKAAVSQEYADKWRAEVTPVTGKRLMEAQRVTAGYIHLWFDTYVNR

SEQ ID NO: 16097 - protein, 245 aa, Synthetic construct
WSAFDKHNEGINSHLWIVNRAIDIMSRNTTIVNPNETALLNEWRADLENGIYSADYENPYYDNSTYASHFYDPDTGTTYIPFAKHAKETGAKYFNLAGQAYQNQDMQQAFFYLGLSLHYLGDVNQPMHAASFTNLSYPWGFHSKYENFVDTIKNNYIVSDSNGYWNWKGANPEDWIEGAAVAAKQDYPGVVNDTTKDWFVKAAVSQEYADKWRAEVTPVTGKRLMEAQRVTAGYIHLWFDTYVNR

SEQ ID NO: 16098 - protein, 245 aa, Synthetic construct
WSAFDKHNEGINSHLWIVNRAIDIMSRNTTIVNPNETALLNEWRADLENGIYSADYENPYYDMSTYASHFYDPDTGTTYIPFAKHAKETGAKYFNLAGQAYQNQDMQQAFFYLGLSLHYLGDVNQPMHAANFTNLSYPMGFHSKYENFVDTIKNNYIVSDSNGYWNWKGANPEDWIEGAAVAAKQDYPGVVNDTTKDWFVKAAVSQEYADKWRAEVTPVTGKRLMEAQRVTAGYIHLWFDTYVNR

SEQ ID NO: 16099 - protein, 245 aa, Synthetic construct
WSAADKHNEGINSHLWIVNRAIDIMSRNTTIVNPNETALLNEWRADLENGIYSADYENPYYDNSTYASHFYDPDTGTTYIPFAKHAKETGAKYFNLAGQAYQNQDMQQAFFYLGLSLHYLGDVNQPMHAASFTNLSYPMGFHSKYENFVDTIKNNYIVSDSNGYWNWKGANPEDWIEGAAVAAKQDYPGVVNDTTKDWFVKAAVSQEYADKWRAEVTPVTGKRLMEAQRVTAGYIHLWFDTYVNR

SEQ ID NO: 16100 - protein, 245 aa, Synthetic construct
WSAADKHNEGINSHLWIVNRAIDIMSRNTTIVNPNETALLNEWRADLENGIYSADYENPYYDLSTYASHFYDPDTGTTYIPFAKHAKETGAKYFNLAGQAYQNQDMQQAFFYLGLSLHYLGDVNQPMHAANFTNLSYPMGFHSKYENFVDTIKNNYIVSDSNGYWNWKGANPEDWIEGAAVAAKQDYPGVVNDTTKDWFVKAAVSQEYADKWRAEVTPVTGKRLMEAQRVTAGYIHLWFDTYVNR

SEQ ID NO: 16101 - protein, 245 aa, Synthetic construct
WSAWDKHNEGINSHLWIVNRAIDIMSRNTTIVNPNETALLNEWRADLENGIYSADYENPYYDNSTYASHFYDPDTGTTYIPFAKHAKETGAKYFNLAGQAYQNQDMQQAFFYLGLSLHYLGDVNQPMHAANFTELSYPMGFHSKYENFVDTIKNNYIVSDSNGYWNWKGANPEDWIEGAAVAAKQDYPGVVNDTTKDWFVKAAVSQEYADKWRAEVTPVTGKRLMEAQRVTAGYIHLWFDTYVNR

SEQ ID NO: 16102 - protein, 245 aa, Synthetic construct
WSAEDKHNEGINSHLWIVNRAIDIMSRNTTIVNPNETALLNEWRADLENGIYSADYENPYYDWSTYASHFYDPDTGTTYIPFAKHAKETGAKYFNLAGQAYQNQDMQQAFFYLGLSLHYLGDVNQPMHAASFTNLSYPMGFHSKYENFVDTIKNNYIVSDSNGYWNWKGANPEDWIEGAAVAAKQDYPGVVNDTTKDWFVKAAVSQEYADKWRAEVTPVTGKRLMEAQRVTAGYIHLWFDTYVNR

SEQ ID NO: 16103 - protein, 245 aa, Synthetic construct
WSAWDKHNEGINSHLWIVNRAIDIMSRNTTIVNPNETALLNEWRADLENGIYSADYENPYYDNSTYASHFYDPDTGTTYIPFAKHAKETGAKYFNLAGQAYQNQDMQQAFFYLGLSLHYLGDVNQPMHAASFTNLSYPWGFHSKYENFVDTIKNNYIVSDSNGYWNWKGANPEDWIEGAAVAAKQDYPGVVNDTTKDWFVKAAVSQEYADKWRAEVTPVTGKRLMEAQRVTAGYIHLWFDTYVNR

SEQ ID NO: 16104 - protein, 245 aa, Synthetic construct
WSAYDKHNEGINSHLWIVNRAIDIMSRNTTIVNPNETALLNEWRADLENGIYSADYENPYYDNSTYASHFYDPDTGTTYIPFAKHAKETGAKYFNLAGQAYQNQDMQQAFFYLGLSLHYLGDVNQPMHAASFTNLSYPWGFHSKYENFVDTIKNNYIVSDSNGYWNWKGANPEDWIEGAAVAAKQDYPGVVNDTTKDWFVKAAVSQEYADKWRAEVTPVTGKRLMEAQRVTAGYIHLWFDTYVNR

SEQ ID NO: 16105 - protein, 245 aa, Synthetic construct
WSAFDKHNEGINSHLWIVNRAIDIMSRNTTIVNPNETALLNEWRADLENGIYSADYENPYYDYSTYASHFYDPDTGTTYIPFAKHAKETGAKYFNLAGQAYQNQDMQQAFFYLGLSLHYLGDVNQPMHAANFTNLSYPWGFHSKYENFVDTIKNNYIVSDSNGYWNWKGANPEDWIEGAAVAAKQDYPGVVNDTTKDWFVKAAVSQEYADKWRAEVTPVTGKRLMEAQRVTAGYIHLWFDTYVNR

SEQ ID NO: 16106 - protein, 245 aa, Synthetic construct
WSARDKHNEGINSHLWIVNRAIDIMSRNTTIVNPNETALLNEWRADLENGIYSADYENPYYDMSTYASHFYDPDTGTTYIPFAKHAKETGAKYFNLAGQAYQNQDMQQAFFYLGLSLHYLGDVNQPMHAANFTNLSYPMGFHSKYENFVDTIKNNYIVSDSNGYWNWKGANPEDWIEGAAVAAKQDYPGVVNDTTKDWFVKAAVSQEYADKWRAEVTPVTGKRLMEAQRVTAGYIHLWFDTYVNR

SEQ ID NO: 16107 - protein, 245 aa, Synthetic construct
WSAEDKHNEGINSHLWIVNRAIDIMSRNTTIVNPNETALLNEWRADLENGIYSADYENPYYDWSTYASHFYDPDTGTTYIPFAKHAKETGAKYFNLAGQAYQNQDMQQAFFYLGLSLHYLGDVNQPMHAANFTELSYPMGFHSKYENFVDTIKNNYIVSDSNGYWNWKGANPEDWIEGAAVAAKQDYPGVVNDTTKDWFVKAAVSQEYADKWRAEVTPVTGKRLMEAQRVTAGYIHLWFDTYVNR

SEQ ID NO: 16108 - protein, 245 aa, Synthetic construct
WSAEDKHNEGINSHLWIVNRAIDIMSRNTTIVNPNETALLNEWRADLENGIYSADYENPYYDDSTYASHFYDPDTGTTYIPFAKHAKETGAKYFNLAGQAYQNQDMQQAFFYLGLSLHYLGDVNQPMHAANFTDLSYPMGFHSKYENFVDTIKNNYIVSDSNGYWNWKGANPEDWIEGAAVAAKQDYPGVVNDTTKDWFVKAAVSQEYADKWRAEVTPVTGKRLMEAQRVTAGYIHLWFDTYVNR

SEQ ID NO: 16109 - protein, 245 aa, Synthetic construct
WSAFDKHNEGINSHLWIVNRAIDIMSRNTTIVNPNETALLNEWRADLENGIYSADYENPYYDWSTYASHFYDPDTGTTYIPFAKHAKETGAKYFNLAGQAYQNQDMQQAFFYLGLSLHYLGDVNQPMHAANFTNLSYPMGFHSKYENFVDTIKNNYIVSDSNGYWNWKGANPEDWIEGAAVAAKQDYPGVVNDTTKDWFVKAAVSQEYADKWRAEVTPVTGKRLMEAQRVTAGYIHLWFDTYVNR

SEQ ID NO: 16110 - protein, 245 aa, Synthetic construct
WSAEDKHNEGINSHLWIVNRAIDIMSRNTTIVNPNETALLNEWRADLENGIYSADYENPYYDMSTYASHFYDPDTGTTYIPFAKHAKETGAKYFNLAGQAYQNQDMQQAFFYLGLSLHYLGDVNQPMHAASFTNLSYPMGFHSKYENFVDTIKNNYIVSDSNGYWNWKGANPEDWIEGAAVAAKQDYPGVVNDTTKDWFVKAAVSQEYADKWRAEVTPVTGKRLMEAQRVTAGYIHLWFDTYVNR

SEQ ID NO: 16111 - protein, 245 aa, Synthetic construct
WSAEDKHNEGINSHLWIVNRAIDIMSRNTTIVNPNETALLNEWRADLENGIYSADYENPYYDYSTYASHFYDPDTGTTYIPFAKHAKETGAKYFNLAGQAYQNQDMQQAFFYLGLSLHYLGDVNQPMHAASFTNLSYPWGFHSKYENFVDTIKNNYIVSDSNGYWNWKGANPEDWIEGAAVAAKQDYPGVVNDTTKDWFVKAAVSQEYADKWRAEVTPVTGKRLMEAQRVTAGYIHLWFDTYVNR

SEQ ID NO: 16112 - protein, 245 aa, Synthetic construct
WSAYDKHNEGINSHLWIVNRAIDIMSRNTTIVNPNETALLNEWRADLENGIYSADYENPYYDMSTYASHFYDPDTGTTYIPFAKHAKETGAKYFNLAGQAYQNQDMQQAFFYLGLSLHYLGDVNQPMHAANFTNLSYPMGFHSKYENFVDTIKNNYIVSDSNGYWNWKGANPEDWIEGAAVAAKQDYPGVVNDTTKDWFVKAAVSQEYADKWRAEVTPVTGKRLMEAQRVTAGYIHLWFDTYVNR

SEQ ID NO: 16113 - protein, 245 aa, Synthetic construct
WSARDKHNEGINSHLWIVNRAIDIMSRNTTIVNPNETALLNEWRADLENGIYSADYENPYYDYSTYASHFYDPDTGTTYIPFAKHAKETGAKYFNLAGQAYQNQDMQQAFFYLGLSLHYLGDVNQPMHAANFTNLSYPMGFHSKYENFVDTIKNNYIVSDSNGYWNWKGANPEDWIEGAAVAAKQDYPGVVNDTTKDWFVKAAVSQEYADKWRAEVTPVTGKRLMEAQRVTAGYIHLWFDTYVNR

SEQ ID NO: 16114 - protein, 245 aa, Synthetic construct
WSAWDKHNEGINSHLWIVNRAIDIMSRNTTIVNPNETALLNEWRADLENGIYSADYENPYYDLSTYASHFYDPDTGTTYIPFAKHAKETGAKYFNLAGQAYQNQDMQQAFFYLGLSLHYLGDVNQPMHAANFTNLSYPWGFHSKYENFVDTIKNNYIVSDSNGYWNWKGANPEDWIEGAAVAAKQDYPGVVNDTTKDWFVKAAVSQEYADKWRAEVTPVTGKRLMEAQRVTAGYIHLWFDTYVNR

SEQ ID NO: 16115 - protein, 245 aa, Synthetic construct
WSAADKHNEGINSHLWIVNRAIDIMSRNTTIVNPNETALLNEWRADLENGIYSADYENPYYDFSTYASHFYDPDTGTTYIPFAKHAKETGAKYFNLAGQAYQNQDMQQAFFYLGLSLHYLGDVNQPMHAANFTNLSYPMGFHSKYENFVDTIKNNYIVSDSNGYWNWKGANPEDWIEGAAVAAKQDYPGVVNDTTKDWFVKAAVSQEYADKWRAEVTPVTGKRLMEAQRVTAGYIHLWFDTYVNR

SEQ ID NO: 16116 - protein, 245 aa, Synthetic construct
WSAEDKHNEGINSHLWIVNRAIDIMSRNTTIVNPNETALLNEWRADLENGIYSADYENPYYDMSTYASHFYDPDTGTTYIPFAKHAKETGAKYFNLAGQAYQNQDMQQAFFYLGLSLHYLGDVNQPMHAANFTELSYPMGFHSKYENFVDTIKNNYIVSDSNGYWNWKGANPEDWIEGAAVAAKQDYPGVVNDTTKDWFVKAAVSQEYADKWRAEVTPVTGKRLMEAQRVTAGYIHLWFDTYVNR

SEQ ID NO: 16117 - protein, 245 aa, Synthetic construct
WSAADKHNEGINSHLWIVNRAIDIMSRNTTIVNPNETALLNEWRADLENGIYSADYENPYYDLSTYASHFYDPDTGTTYIPFAKHAKETGAKYFNLAGQAYQNQDMQQAFFYLGLSLHYLGDVNQPMHAANFTNLSYPWGFHSKYENFVDTIKNNYIVSDSNGYWNWKGANPEDWIEGAAVAAKQDYPGVVNDTTKDWFVKAAVSQEYADKWRAEVTPVTGKRLMEAQRVTAGYIHLWFDTYVNR

SEQ ID NO: 16118 - protein, 245 aa, Synthetic construct
WSAYDKHNEGINSHLWIVNRAIDIMSRNTTIVNPNETALLNEWRADLENGIYSADYENPYYDNSTYASHFYDPDTGTTYIPFAKHAKETGAKYFNLAGQAYQNQDMQQAFFYLGLSLHYLGDVNQPMHAASFTNLSYPMGFHSKYENFVDTIKNNYIVSDSNGYWNWKGANPEDWIEGAAVAAKQDYPGVVNDTTKDWFVKAAVSQEYADKWRAEVTPVTGKRLMEAQRVTAGYIHLWFDTYVNR

SEQ ID NO: 16119 - protein, 245 aa, Synthetic construct
WSAEDKHNEGINSHLWIVNRAIDIMSRNTTIVNPNETALLNEWRADLENGIYSADYENPYYDLSTYASHFYDPDTGTTYIPFAKHAKETGAKYFNLAGQAYQNQDMQQAFFYLGLSLHYLGDVNQPMHAASFTNLSYPWGFHSKYENFVDTIKNNYIVSDSNGYWNWKGANPEDWIEGAAVAAKQDYPGVVNDTTKDWFVKAAVSQEYADKWRAEVTPVTGKRLMEAQRVTAGYIHLWFDTYVNR

SEQ ID NO: 16120 - protein, 245 aa, Synthetic construct
WSAWDKHNEGINSHLWIVNRAIDIMSRNTTIVNPNETALLNEWRADLENGIYSADYENPYYDLSTYASHFYDPDTGTTYIPFAKHAKETGAKYFNLAGQAYQNQDMQQAFFYLGLSLHYLGDVNQPMHAANFTNLSYPMGFHSKYENFVDTIKNNYIVSDSNGYWNWKGANPEDWIEGAAVAAKQDYPGVVNDTTKDWFVKAAVSQEYADKWRAEVTPVTGKRLMEAQRVTAGYIHLWFDTYVNR

SEQ ID NO: 16121 - protein, 245 aa, Synthetic construct
WSAFDKHNEGINSHLWIVNRAIDIMSRNTTIVNPNETALLNEWRADLENGIYSADYENPYYDLSTYASHFYDPDTGTTYIPFAKHAKETGAKYFNLAGQAYQNQDMQQAFFYLGLSLHYLGDVNQPMHAANFTNLSYPWGFHSKYENFVDTIKNNYIVSDSNGYWNWKGANPEDWIEGAAVAAKQDYPGVVNDTTKDWFVKAAVSQEYADKWRAEVTPVTGKRLMEAQRVTAGYIHLWFDTYVNR

SEQ ID NO: 16122 - protein, 245 aa, Synthetic construct
WSAADKHNEGINSHLWIVNRAIDIMSRNTTIVNPNETALLNEWRADLENGIYSADYENPYYDNSTYASHFYDPDTGTTYIPFAKHAKETGAKYFNLAGQAYQNQDMQQAFFYLGLSLHYLGDVNQPMHAANFTELSYPMGFHSKYENFVDTIKNNYIVSDSNGYWNWKGANPEDWIEGAAVAAKQDYPGVVNDTTKDWFVKAAVSQEYADKWRAEVTPVTGKRLMEAQRVTAGYIHLWFDTYVNR

SEQ ID NO: 16123 - protein, 245 aa, Synthetic construct
WSAFDKHNEGINSHLWIVNRAIDIMSRNTTIVNPNETALLNEWRADLENGIYSADYENPYYDFSTYASHFYDPDTGTTYIPFAKHAKETGAKYFNLAGQAYQNQDMQQAFFYLGLSLHYLGDVNQPMHAANFTNLSYPMGFHSKYENFVDTIKNNYIVSDSNGYWNWKGANPEDWIEGAAVAAKQDYPGVVNDTTKDWFVKAAVSQEYADKWRAEVTPVTGKRLMEAQRVTAGYIHLWFDTYVNR

SEQ ID NO: 16124 - protein, 245 aa, Synthetic construct
WSAEDKHNEGINSHLWIVNRAIDIMSRNTTIVNPNETALLNEWRADLENGIYSADYENPYYDFSTYASHFYDPDTGTTYIPFAKHAKETGAKYFNLAGQAYQNQDMQQAFFYLGLSLHYLGDVNQPMHAASFTNLSYPWGFHSKYENFVDTIKNNYIVSDSNGYWNWKGANPEDWIEGAAVAAKQDYPGVVNDTTKDWFVKAAVSQEYADKWRAEVTPVTGKRLMEAQRVTAGYIHLWFDTYVNR

SEQ ID NO: 16125 - protein, 245 aa, Synthetic construct
WSAYDKHNEGINSHLWIVNRAIDIMSRNTTIVNPNETALLNEWRADLENGIYSADYENPYYDFSTYASHFYDPDTGTTYIPFAKHAKETGAKYFNLAGQAYQNQDMQQAFFYLGLSLHYLGDVNQPMHAANFTNLSYPWGFHSKYENFVDTIKNNYIVSDSNGYWNWKGANPEDWIEGAAVAAKQDYPGVVNDTTKDWFVKAAVSQEYADKWRAEVTPVTGKRLMEAQRVTAGYIHLWFDTYVNR

SEQ ID NO: 16126 - protein, 245 aa, Synthetic construct
WSAEDKHNEGINSHLWIVNRAIDIMSRNTTIVNPNETALLNEWRADLENGIYSADYENPYYDYSTYASHFYDPDTGTTYIPFAKHAKETGAKYFNLAGQAYQNQDMQQAFFYLGLSLHYLGDVNQPMHAASFTNLSYPMGFHSKYENFVDTIKNNYIVSDSNGYWNWKGANPEDWIEGAAVAAKQDYPGVVNDTTKDWFVKAAVSQEYADKWRAEVTPVTGKRLMEAQRVTAGYIHLWFDTYVNR

SEQ ID NO: 16127 - protein, 245 aa, Synthetic construct
WSARDKHNEGINSHLWIVNRAIDIMSRNTTIVNPNETALLNEWRADLENGIYSADYENPYYDNSTYASHFYDPDTGTTYIPFAKHAKETGAKYFNLAGQAYQNQDMQQAFFYLGLSLHYLGDVNQPMHAANFTELSYPWGFHSKYENFVDTIKNNYIVSDSNGYWNWKGANPEDWIEGAAVAAKQDYPGVVNDTTKDWFVKAAVSQEYADKWRAEVTPVTGKRLMEAQRVTAGYIHLWFDTYVNR

SEQ ID NO: 16128 - protein, 245 aa, Synthetic construct
WSAWDKHNEGINSHLWIVNRAIDIMSRNTTIVNPNETALLNEWRADLENGIYSADYENPYYDMSTYASHFYDPDTGTTYIPFAKHAKETGAKYFNLAGQAYQNQDMQQAFFYLGLSLHYLGDVNQPMHAANFTNLSYPMGFHSKYENFVDTIKNNYIVSDSNGYWNWKGANPEDWIEGAAVAAKQDYPGVVNDTTKDWFVKAAVSQEYADKWRAEVTPVTGKRLMEAQRVTAGYIHLWFDTYVNR

SEQ ID NO: 16129 - protein, 245 aa, Synthetic construct
WSAWDKHNEGINSHLWIVNRAIDIMSRNTTIVNPNETALLNEWRADLENGIYSADYENPYYDYSTYASHFYDPDTGTTYIPFAKHAKETGAKYFNLAGQAYQNQDMQQAFFYLGLSLHYLGDVNQPMHAANFTNLSYPMGFHSKYENFVDTIKNNYIVSDSNGYWNWKGANPEDWIEGAAVAAKQDYPGVVNDTTKDWFVKAAVSQEYADKWRAEVTPVTGKRLMEAQRVTAGYIHLWFDTYVNR

SEQ ID NO: 16130 - protein, 245 aa, Synthetic construct
WSAFDKHNEGINSHLWIVNRAIDIMSRNTTIVNPNETALLNEWRADLENGIYSADYENPYYDMSTYASHFYDPDTGTTYIPFAKHAKETGAKYFNLAGQAYQNQDMQQAFFYLGLSLHYLGDVNQPMHAANFTNLSYPWGFHSKYENFVDTIKNNYIVSDSNGYWNWKGANPEDWIEGAAVAAKQDYPGVVNDTTKDWFVKAAVSQEYADKWRAEVTPVTGKRLMEAQRVTAGYIHLWFDTYVNR

SEQ ID NO: 16131 - protein, 245 aa, Synthetic construct
WSAYDKHNEGINSHLWIVNRAIDIMSRNTTIVNPNETALLNEWRADLENGIYSADYENPYYDNSTYASHFYDPDTGTTYIPFAKHAKETGAKYFNLAGQAYQNQDMQQAFFYLGLSLHYLGDVNQPMHAANFTELSYPMGFHSKYENFVDTIKNNYIVSDSNGYWNWKGANPEDWIEGAAVAAKQDYPGVVNDTTKDWFVKAAVSQEYADKWRAEVTPVTGKRLMEAQRVTAGYIHLWFDTYVNR

SEQ ID NO: 16132 - protein, 245 aa, Synthetic construct
WSAYDKHNEGINSHLWIVNRAIDIMSRNTTIVNPNETALLNEWRADLENGIYSADYENPYYDLSTYASHFYDPDTGTTYIPFAKHAKETGAKYFNLAGQAYQNQDMQQAFFYLGLSLHYLGDVNQPMHAANFTNLSYPWGFHSKYENFVDTIKNNYIVSDSNGYWNWKGANPEDWIEGAAVAAKQDYPGVVNDTTKDWFVKAAVSQEYADKWRAEVTPVTGKRLMEAQRVTAGYIHLWFDTYVNR

SEQ ID NO: 16133 - protein, 245 aa, Synthetic construct
WSAYDKHNEGINSHLWIVNRAIDIMSRNTTIVNPNETALLNEWRADLENGIYSADYENPYYDFSTYASHFYDPDTGTTYIPFAKHAKETGAKYFNLAGQAYQNQDMQQAFFYLGLSLHYLGDVNQPMHAANFTNLSYPMGFHSKYENFVDTIKNNYIVSDSNGYWNWKGANPEDWIEGAAVAAKQDYPGVVNDTTKDWFVKAAVSQEYADKWRAEVTPVTGKRLMEAQRVTAGYIHLWFDTYVNR

SEQ ID NO: 16134 - protein, 245 aa, Synthetic construct
WSARDKHNEGINSHLWIVNRAIDIMSRNTTIVNPNETALLNEWRADLENGIYSADYENPYYDWSTYASHFYDPDTGTTYIPFAKHAKETGAKYFNLAGQAYQNQDMQQAFFYLGLSLHYLGDVNQPMHAANFTNLSYPMGFHSKYENFVDTIKNNYIVSDSNGYWNWKGANPEDWIEGAAVAAKQDYPGVVNDTTKDWFVKAAVSQEYADKWRAEVTPVTGKRLMEAQRVTAGYIHLWFDTYVNR

SEQ ID NO: 16135 - protein, 245 aa, Synthetic construct
WSAADKHNEGINSHLWIVNRAIDIMSRNTTIVNPNETALLNEWRADLENGIYSADYENPYYDNSTYASHFYDPDTGTTYIPFAKHAKETGAKYFNLAGQAYQNQDMQQAFFYLGLSLHYLGDVNQPMHAASFTNLSYPWGFHSKYENFVDTIKNNYIVSDSNGYWNWKGANPEDWIEGAAVAAKQDYPGVVNDTTKDWFVKAAVSQEYADKWRAEVTPVTGKRLMEAQRVTAGYIHLWFDTYVNR

SEQ ID NO: 16136 - protein, 245 aa, Synthetic construct
WSARDKHNEGINSHLWIVNRAIDIMSRNTTIVNPNETALLNEWRADLENGIYSADYENPYYDMSTYASHFYDPDTGTTYIPFAKHAKETGAKYFNLAGQAYQNQDMQQAFFYLGLSLHYLGDVNQPMHAANFTNLSYPWGFHSKYENFVDTIKNNYIVSDSNGYWNWKGANPEDWIEGAAVAAKQDYPGVVNDTTKDWFVKAAVSQEYADKWRAEVTPVTGKRLMEAQRVTAGYIHLWFDTYVNR

SEQ ID NO: 16137 - protein, 245 aa, Synthetic construct
WSAEDKHNEGINSHLWIVNRAIDIMSRNTTIVNPNETALLNEWRADLENGIYSADYENPYYDNSTYASHFYDPDTGTTYIPFAKHAKETGAKYFNLAGQAYQNQDMQQAFFYLGLSLHYLGDVNQPMHAASFTELSYPWGFHSKYENFVDTIKNNYIVSDSNGYWNWKGANPEDWIEGAAVAAKQDYPGVVNDTTKDWFVKAAVSQEYADKWRAEVTPVTGKRLMEAQRVTAGYIHLWFDTYVNR

SEQ ID NO: 16138 - protein, 245 aa, Synthetic construct
WSAFDKHNEGINSHLWIVNRAIDIMSRNTTIVNPNETALLNEWRADLENGIYSADYENPYYDLSTYASHFYDPDTGTTYIPFAKHAKETGAKYFNLAGQAYQNQDMQQAFFYLGLSLHYLGDVNQPMHAANFTNLSYPMGFHSKYENFVDTIKNNYIVSDSNGYWNWKGANPEDWIEGAAVAAKQDYPGVVNDTTKDWFVKAAVSQEYADKWRAEVTPVTGKRLMEAQRVTAGYIHLWFDTYVNR

SEQ ID NO: 16139 - protein, 245 aa, Synthetic construct
WSARDKHNEGINSHLWIVNRAIDIMSRNTTIVNPNETALLNEWRADLENGIYSADYENPYYDYSTYASHFYDPDTGTTYIPFAKHAKETGAKYFNLAGQAYQNQDMQQAFFYLGLSLHYLGDVNQPMHAANFTNLSYPWGFHSKYENFVDTIKNNYIVSDSNGYWNWKGANPEDWIEGAAVAAKQDYPGVVNDTTKDWFVKAAVSQEYADKWRAEVTPVTGKRLMEAQRVTAGYIHLWFDTYVNR

SEQ ID NO: 16140 - protein, 245 aa, Synthetic construct
WSAYDKHNEGINSHLWIVNRAIDIMSRNTTIVNPNETALLNEWRADLENGIYSADYENPYYDYSTYASHFYDPDTGTTYIPFAKHAKETGAKYFNLAGQAYQNQDMQQAFFYLGLSLHYLGDVNQPMHAANFTNLSYPMGFHSKYENFVDTIKNNYIVSDSNGYWNWKGANPEDWIEGAAVAAKQDYPGVVNDTTKDWFVKAAVSQEYADKWRAEVTPVTGKRLMEAQRVTAGYIHLWFDTYVNR

SEQ ID NO: 16141 - protein, 245 aa, Synthetic construct
WSARDKHNEGINSHLWIVNRAIDIMSRNTTIVNPNETALLNEWRADLENGIYSADYENPYYDNSTYASHFYDPDTGTTYIPFAKHAKETGAKYFNLAGQAYQNQDMQQAFFYLGLSLHYLGDVNQPMHAASFTNLSYPWGFHSKYENFVDTIKNNYIVSDSNGYWNWKGANPEDWIEGAAVAAKQDYPGVVNDTTKDWFVKAAVSQEYADKWRAEVTPVTGKRLMEAQRVTAGYIHLWFDTYVNR

SEQ ID NO: 16142 - protein, 245 aa, Synthetic construct
WSAADKHNEGINSHLWIVNRAIDIMSRNTTIVNPNETALLNEWRADLENGIYSADYENPYYDNSTYASHFYDPDTGTTYIPFAKHAKETGAKYFNLAGQAYQNQDMQQAFFYLGLSLHYLGDVNQPMHAANFTELSYPWGFHSKYENFVDTIKNNYIVSDSNGYWNWKGANPEDWIEGAAVAAKQDYPGVVNDTTKDWFVKAAVSQEYADKWRAEVTPVTGKRLMEAQRVTAGYIHLWFDTYVNR

SEQ ID NO: 16143 - protein, 245 aa, Synthetic construct
WSAEDKHNEGINSHLWIVNRAIDIMSRNTTIVNPNETALLNEWRADLENGIYSADYENPYYDYSTYASHFYDPDTGTTYIPFAKHAKETGAKYFNLAGQAYQNQDMQQAFFYLGLSLHYLGDVNQPMHAANFTELSYPMGFHSKYENFVDTIKNNYIVSDSNGYWNWKGANPEDWIEGAAVAAKQDYPGVVNDTTKDWFVKAAVSQEYADKWRAEVTPVTGKRLMEAQRVTAGYIHLWFDTYVNR

SEQ ID NO: 16144 - protein, 245 aa, Synthetic construct
WSAADKHNEGINSHLWIVNRAIDIMSRNTTIVNPNETALLNEWRADLENGIYSADYENPYYDWSTYASHFYDPDTGTTYIPFAKHAKETGAKYFNLAGQAYQNQDMQQAFFYLGLSLHYLGDVNQPMHAANFTNLSYPWGFHSKYENFVDTIKNNYIVSDSNGYWNWKGANPEDWIEGAAVAAKQDYPGVVNDTTKDWFVKAAVSQEYADKWRAEVTPVTGKRLMEAQRVTAGYIHLWFDTYVNR

SEQ ID NO: 16145 - protein, 245 aa, Synthetic construct
WSAADKHNEGINSHLWIVNRAIDIMSRNTTIVNPNETALLNEWRADLENGIYSADYENPYYDWSTYASHFYDPDTGTTYIPFAKHAKETGAKYFNLAGQAYQNQDMQQAFFYLGLSLHYLGDVNQPMHAANFTNLSYPMGFHSKYENFVDTIKNNYIVSDSNGYWNWKGANPEDWIEGAAVAAKQDYPGVVNDTTKDWFVKAAVSQEYADKWRAEVTPVTGKRLMEAQRVTAGYIHLWFDTYVNR

SEQ ID NO: 16146 - protein, 245 aa, Synthetic construct
WSARDKHNEGINSHLWIVNRAIDIMSRNTTIVNPNETALLNEWRADLENGIYSADYENPYYDNSTYASHFYDPDTGTTYIPFAKHAKETGAKYFNLAGQAYQNQDMQQAFFYLGLSLHYLGDVNQPMHAANFTELSYPMGFHSKYENFVDTIKNNYIVSDSNGYWNWKGANPEDWIEGAAVAAKQDYPGVVNDTTKDWFVKAAVSQEYADKWRAEVTPVTGKRLMEAQRVTAGYIHLWFDTYVNR

SEQ ID NO: 16147 - protein, 245 aa, Synthetic construct
WSARDKHNEGINSHLWIVNRAIDIMSRNTTIVNPNETALLNEWRADLENGIYSADYENPYYDLSTYASHFYDPDTGTTYIPFAKHAKETGAKYFNLAGQAYQNQDMQQAFFYLGLSLHYLGDVNQPMHAANFTNLSYPMGFHSKYENFVDTIKNNYIVSDSNGYWNWKGANPEDWIEGAAVAAKQDYPGVVNDTTKDWFVKAAVSQEYADKWRAEVTPVTGKRLMEAQRVTAGYIHLWFDTYVNR

SEQ ID NO: 16148 - protein, 245 aa, Synthetic construct
WSAWDKHNEGINSHLWIVNRAIDIMSRNTTIVNPNETALLNEWRADLENGIYSADYENPYYDWSTYASHFYDPDTGTTYIPFAKHAKETGAKYFNLAGQAYQNQDMQQAFFYLGLSLHYLGDVNQPMHAANFTNLSYPMGFHSKYENFVDTIKNNYIVSDSNGYWNWKGANPEDWIEGAAVAAKQDYPGVVNDTTKDWFVKAAVSQEYADKWRAEVTPVTGKRLMEAQRVTAGYIHLWFDTYVNR

SEQ ID NO: 16149 - protein, 245 aa, Synthetic construct
WSAYDKHNEGINSHLWIVNRAIDIMSRNTTIVNPNETALLNEWRADLENGIYSADYENPYYDLSTYASHFYDPDTGTTYIPFAKHAKETGAKYFNLAGQAYQNQDMQQAFFYLGLSLHYLGDVNQPMHAANFTNLSYPMGFHSKYENFVDTIKNNYIVSDSNGYWNWKGANPEDWIEGAAVAAKQDYPGVVNDTTKDWFVKAAVSQEYADKWRAEVTPVTGKRLMEAQRVTAGYIHLWFDTYVNR

SEQ ID NO: 16150 - protein, 245 aa, Synthetic construct
WSAADKHNEGINSHLWIVNRAIDIMSRNTTIVNPNETALLNEWRADLENGIYSADYENPYYDFSTYASHFYDPDTGTTYIPFAKHAKETGAKYFNLAGQAYQNQDMQQAFFYLGLSLHYLGDVNQPMHAANFTNLSYPWGFHSKYENFVDTIKNNYIVSDSNGYWNWKGANPEDWIEGAAVAAKQDYPGVVNDTTKDWFVKAAVSQEYADKWRAEVTPVTGKRLMEAQRVTAGYIHLWFDTYVNR

SEQ ID NO: 16151 - protein, 245 aa, Synthetic construct
WSAWDKHNEGINSHLWIVNRAIDIMSRNTTIVNPNETALLNEWRADLENGIYSADYENPYYDFSTYASHFYDPDTGTTYIPFAKHAKETGAKYFNLAGQAYQNQDMQQAFFYLGLSLHYLGDVNQPMHAANFTNLSYPWGFHSKYENFVDTIKNNYIVSDSNGYWNWKGANPEDWIEGAAVAAKQDYPGVVNDTTKDWFVKAAVSQEYADKWRAEVTPVTGKRLMEAQRVTAGYIHLWFDTYVNR

SEQ ID NO: 16152 - protein, 245 aa, Synthetic construct
WSAEDKHNEGINSHLWIVNRAIDIMSRNTTIVNPNETALLNEWRADLENGIYSADYENPYYDMSTYASHFYDPDTGTTYIPFAKHAKETGAKYFNLAGQAYQNQDMQQAFFYLGLSLHYLGDVNQPMHAANFTELSYPWGFHSKYENFVDTIKNNYIVSDSNGYWNWKGANPEDWIEGAAVAAKQDYPGVVNDTTKDWFVKAAVSQEYADKWRAEVTPVTGKRLMEAQRVTAGYIHLWFDTYVNR

SEQ ID NO: 16153 - protein, 245 aa, Synthetic construct
WSAWDKHNEGINSHLWIVNRAIDIMSRNTTIVNPNETALLNEWRADLENGIYSADYENPYYDNSTYASHFYDPDTGTTYIPFAKHAKETGAKYFNLAGQAYQNQDMQQAFFYLGLSLHYLGDVNQPMHAASFTNLSYPMGFHSKYENFVDTIKNNYIVSDSNGYWNWKGANPEDWIEGAAVAAKQDYPGVVNDTTKDWFVKAAVSQEYADKWRAEVTPVTGKRLMEAQRVTAGYIHLWFDTYVNR

SEQ ID NO: 16154 - protein, 245 aa, Synthetic construct
WSAADKHNEGINSHLWIVNRAIDIMSRNTTIVNPNETALLNEWRADLENGIYSADYENPYYDYSTYASHFYDPDTGTTYIPFAKHAKETGAKYFNLAGQAYQNQDMQQAFFYLGLSLHYLGDVNQPMHAANFTNLSYPMGFHSKYENFVDTIKNNYIVSDSNGYWNWKGANPEDWIEGAAVAAKQDYPGVVNDTTKDWFVKAAVSQEYADKWRAEVTPVTGKRLMEAQRVTAGYIHLWFDTYVNR

SEQ ID NO: 16155 - protein, 245 aa, Synthetic construct
WSAEDKHNEGINSHLWIVNRAIDIMSRNTTIVNPNETALLNEWRADLENGIYSADYENPYYDWSTYASHFYDPDTGTTYIPFAKHAKETGAKYFNLAGQAYQNQDMQQAFFYLGLSLHYLGDVNQPMHAANFTELSYPWGFHSKYENFVDTIKNNYIVSDSNGYWNWKGANPEDWIEGAAVAAKQDYPGVVNDTTKDWFVKAAVSQEYADKWRAEVTPVTGKRLMEAQRVTAGYIHLWFDTYVNR

SEQ ID NO: 16156 - protein, 245 aa, Synthetic construct
WSAYDKHNEGINSHLWIVNRAIDIMSRNTTIVNPNETALLNEWRADLENGIYSADYENPYYDNSTYASHFYDPDTGTTYIPFAKHAKETGAKYFNLAGQAYQNQDMQQAFFYLGLSLHYLGDVNQPMHAANFTELSYPWGFHSKYENFVDTIKNNYIVSDSNGYWNWKGANPEDWIEGAAVAAKQDYPGVVNDTTKDWFVKAAVSQEYADKWRAEVTPVTGKRLMEAQRVTAGYIHLWFDTYVNR

SEQ ID NO: 16157 - protein, 245 aa, Synthetic construct
WSAEDKHNEGINSHLWIVNRAIDIMSRNTTIVNPNETALLNEWRADLENGIYSADYENPYYDLSTYASHFYDPDTGTTYIPFAKHAKETGAKYFNLAGQAYQNQDMQQAFFYLGLSLHYLGDVNQPMHAANFTELSYPWGFHSKYENFVDTIKNNYIVSDSNGYWNWKGANPEDWIEGAAVAAKQDYPGVVNDTTKDWFVKAAVSQEYADKWRAEVTPVTGKRLMEAQRVTAGYIHLWFDTYVNR

SEQ ID NO: 16158 - protein, 245 aa, Synthetic construct
WSAYDKHNEGINSHLWIVNRAIDIMSRNTTIVNPNETALLNEWRADLENGIYSADYENPYYDWSTYASHFYDPDTGTTYIPFAKHAKETGAKYFNLAGQAYQNQDMQQAFFYLGLSLHYLGDVNQPMHAANFTNLSYPWGFHSKYENFVDTIKNNYIVSDSNGYWNWKGANPEDWIEGAAVAAKQDYPGVVNDTTKDWFVKAAVSQEYADKWRAEVTPVTGKRLMEAQRVTAGYIHLWFDTYVNR

SEQ ID NO: 16159 - protein, 245 aa, Synthetic construct
WSARDKHNEGINSHLWIVNRAIDIMSRNTTIVNPNETALLNEWRADLENGIYSADYENPYYDFSTYASHFYDPDTGTTYIPFAKHAKETGAKYFNLAGQAYQNQDMQQAFFYLGLSLHYLGDVNQPMHAANFTNLSYPWGFHSKYENFVDTIKNNYIVSDSNGYWNWKGANPEDWIEGAAVAAKQDYPGVVNDTTKDWFVKAAVSQEYADKWRAEVTPVTGKRLMEAQRVTAGYIHLWFDTYVNR

SEQ ID NO: 16160 - protein, 245 aa, Synthetic construct
WSARDKHNEGINSHLWIVNRAIDIMSRNTTIVNPNETALLNEWRADLENGIYSADYENPYYDNSTYASHFYDPDTGTTYIPFAKHAKETGAKYFNLAGQAYQNQDMQQAFFYLGLSLHYLGDVNQPMHAASFTNLSYPMGFHSKYENFVDTIKNNYIVSDSNGYWNWKGANPEDWIEGAAVAAKQDYPGVVNDTTKDWFVKAAVSQEYADKWRAEVTPVTGKRLMEAQRVTAGYIHLWFDTYVNR

SEQ ID NO: 16161 - protein, 245 aa, Synthetic construct
WSAEDKHNEGINSHLWIVNRAIDIMSRNTTIVNPNETALLNEWRADLENGIYSADYENPYYDWSTYASHFYDPDTGTTYIPFAKHAKETGAKYFNLAGQAYQNQDMQQAFFYLGLSLHYLGDVNQPMHAASFTNLSYPWGFHSKYENFVDTIKNNYIVSDSNGYWNWKGANPEDWIEGAAVAAKQDYPGVVNDTTKDWFVKAAVSQEYADKWRAEVTPVTGKRLMEAQRVTAGYIHLWFDTYVNR

SEQ ID NO: 16162 - protein, 245 aa, Synthetic construct
WSAWDKHNEGINSHLWIVNRAIDIMSRNTTIVNPNETALLNEWRADLENGIYSADYENPYYDNSTYASHFYDPDTGTTYIPFAKHAKETGAKYFNLAGQAYQNQDMQQAFFYLGLSLHYLGDVNQPMHAANFTELSYPWGFHSKYENFVDTIKNNYIVSDSNGYWNWKGANPEDWIEGAAVAAKQDYPGVVNDTTKDWFVKAAVSQEYADKWRAEVTPVTGKRLMEAQRVTAGYIHLWFDTYVNR

SEQ ID NO: 16163 - protein, 245 aa, Synthetic construct
WSAEDKHNEGINSHLWIVNRAIDIMSRNTTIVNPNETALLNEWRADLENGIYSADYENPYYDFSTYASHFYDPDTGTTYIPFAKHAKETGAKYFNLAGQAYQNQDMQQAFFYLGLSLHYLGDVNQPMHAANFTELSYPMGFHSKYENFVDTIKNNYIVSDSNGYWNWKGANPEDWIEGAAVAAKQDYPGVVNDTTKDWFVKAAVSQEYADKWRAEVTPVTGKRLMEAQRVTAGYIHLWFDTYVNR

SEQ ID NO: 16164 - protein, 245 aa, Synthetic construct
WSAFDKHNEGINSHLWIVNRAIDIMSRNTTIVNPNETALLNEWRADLENGIYSADYENPYYDWSTYASHFYDPDTGTTYIPFAKHAKETGAKYFNLAGQAYQNQDMQQAFFYLGLSLHYLGDVNQPMHAANFTNLSYPWGFHSKYENFVDTIKNNYIVSDSNGYWNWKGANPEDWIEGAAVAAKQDYPGVVNDTTKDWFVKAAVSQEYADKWRAEVTPVTGKRLMEAQRVTAGYIHLWFDTYVNR

SEQ ID NO: 16165 - protein, 245 aa, Synthetic construct
WSAYDKHNEGINSHLWIVNRAIDIMSRNTTIVNPNETALLNEWRADLENGIYSADYENPYYDWSTYASHFYDPDTGTTYIPFAKHAKETGAKYFNLAGQAYQNQDMQQAFFYLGLSLHYLGDVNQPMHAANFTNLSYPMGFHSKYENFVDTIKNNYIVSDSNGYWNWKGANPEDWIEGAAVAAKQDYPGVVNDTTKDWFVKAAVSQEYADKWRAEVTPVTGKRLMEAQRVTAGYIHLWFDTYVNR

SEQ ID NO: 16166 - protein, 245 aa, Synthetic construct
WSAADKHNEGINSHLWIVNRAIDIMSRNTTIVNPNETALLNEWRADLENGIYSADYENPYYDMSTYASHFYDPDTGTTYIPFAKHAKETGAKYFNLAGQAYQNQDMQQAFFYLGLSLHYLGDVNQPMHAANFTNLSYPWGFHSKYENFVDTIKNNYIVSDSNGYWNWKGANPEDWIEGAAVAAKQDYPGVVNDTTKDWFVKAAVSQEYADKWRAEVTPVTGKRLMEAQRVTAGYIHLWFDTYVNR

SEQ ID NO: 16167 - protein, 245 aa, Synthetic construct
WSAEDKHNEGINSHLWIVNRAIDIMSRNTTIVNPNETALLNEWRADLENGIYSADYENPYYDFSTYASHFYDPDTGTTYIPFAKHAKETGAKYFNLAGQAYQNQDMQQAFFYLGLSLHYLGDVNQPMHAASFTNLSYPMGFHSKYENFVDTIKNNYIVSDSNGYWNWKGANPEDWIEGAAVAAKQDYPGVVNDTTKDWFVKAAVSQEYADKWRAEVTPVTGKRLMEAQRVTAGYIHLWFDTYVNR

SEQ ID NO: 16168 - protein, 245 aa, Synthetic construct
WSAFDKHNEGINSHLWIVNRAIDIMSRNTTIVNPNETALLNEWRADLENGIYSADYENPYYDNSTYASHFYDPDTGTTYIPFAKHAKETGAKYFNLAGQAYQNQDMQQAFFYLGLSLHYLGDVNQPMHAASFTNLSYPMGFHSKYENFVDTIKNNYIVSDSNGYWNWKGANPEDWIEGAAVAAKQDYPGVVNDTTKDWFVKAAVSQEYADKWRAEVTPVTGKRLMEAQRVTAGYIHLWFDTYVNR

SEQ ID NO: 16169 - protein, 245 aa, Synthetic construct
WSAADKHNEGINSHLWIVNRAIDIMSRNTTIVNPNETALLNEWRADLENGIYSADYENPYYDMSTYASHFYDPDTGTTYIPFAKHAKETGAKYFNLAGQAYQNQDMQQAFFYLGLSLHYLGDVNQPMHAANFTNLSYPMGFHSKYENFVDTIKNNYIVSDSNGYWNWKGANPEDWIEGAAVAAKQDYPGVVNDTTKDWFVKAAVSQEYADKWRAEVTPVTGKRLMEAQRVTAGYIHLWFDTYVNR

SEQ ID NO: 16170 - protein, 245 aa, Synthetic construct
WSAEDKHNEGINSHLWIVNRAIDIMSRNTTIVNPNETALLNEWRADLENGIYSADYENPYYDMSTYASHFYDPDTGTTYIPFAKHAKETGAKYFNLAGQAYQNQDMQQAFFYLGLSLHYLGDVNQPMHAASFTNLSYPWGFHSKYENFVDTIKNNYIVSDSNGYWNWKGANPEDWIEGAAVAAKQDYPGVVNDTTKDWFVKAAVSQEYADKWRAEVTPVTGKRLMEAQRVTAGYIHLWFDTYVNR

SEQ ID NO: 16171 - protein, 245 aa, Synthetic construct
WSAWDKHNEGINSHLWIVNRAIDIMSRNTTIVNPNETALLNEWRADLENGIYSADYENPYYDYSTYASHFYDPDTGTTYIPFAKHAKETGAKYFNLAGQAYQNQDMQQAFFYLGLSLHYLGDVNQPMHAANFTNLSYPWGFHSKYENFVDTIKNNYIVSDSNGYWNWKGANPEDWIEGAAVAAKQDYPGVVNDTTKDWFVKAAVSQEYADKWRAEVTPVTGKRLMEAQRVTAGYIHLWFDTYVNR

SEQ ID NO: 16172 - protein, 245 aa, Synthetic construct
WSAFDKHNEGINSHLWIVNRAIDIMSRNTTIVNPNETALLNEWRADLENGIYSADYENPYYDYSTYASHFYDPDTGTTYIPFAKHAKETGAKYFNLAGQAYQNQDMQQAFFYLGLSLHYLGDVNQPMHAANFTNLSYPMGFHSKYENFVDTIKNNYIVSDSNGYWNWKGANPEDWIEGAAVAAKQDYPGVVNDTTKDWFVKAAVSQEYADKWRAEVTPVTGKRLMEAQRVTAGYIHLWFDTYVNR

SEQ ID NO: 16173 - protein, 245 aa, Synthetic construct
WSARDKHNEGINSHLWIVNRAIDIMSRNTTIVNPNETALLNEWRADLENGIYSADYENPYYDLSTYASHFYDPDTGTTYIPFAKHAKETGAKYFNLAGQAYQNQDMQQAFFYLGLSLHYLGDVNQPMHAANFTNLSYPWGFHSKYENFVDTIKNNYIVSDSNGYWNWKGANPEDWIEGAAVAAKQDYPGVVNDTTKDWFVKAAVSQEYADKWRAEVTPVTGKRLMEAQRVTAGYIHLWFDTYVNR

SEQ ID NO: 16174 - protein, 245 aa, Synthetic construct
WSAADKHNEGINSHLWIVNRAIDIMSRNTTIVNPNETALLNEWRADLENGIYSADYENPYYDYSTYASHFYDPDTGTTYIPFAKHAKETGAKYFNLAGQAYQNQDMQQAFFYLGLSLHYLGDVNQPMHAANFTNLSYPWGFHSKYENFVDTIKNNYIVSDSNGYWNWKGANPEDWIEGAAVAAKQDYPGVVNDTTKDWFVKAAVSQEYADKWRAEVTPVTGKRLMEAQRVTAGYIHLWFDTYVNR

SEQ ID NO: 16175 - protein, 245 aa, Synthetic construct
WSAFDKHNEGINSHLWIVNRAIDIMSRNTTIVNPNETALLNEWRADLENGIYSADYENPYYDFSTYASHFYDPDTGTTYIPFAKHAKETGAKYFNLAGQAYQNQDMQQAFFYLGLSLHYLGDVNQPMHAANFTNLSYPWGFHSKYENFVDTIKNNYIVSDSNGYWNWKGANPEDWIEGAAVAAKQDYPGVVNDTTKDWFVKAAVSQEYADKWRAEVTPVTGKRLMEAQRVTAGYIHLWFDTYVNR

SEQ ID NO: 16176 - protein, 245 aa, Synthetic construct
WSAEDKHNEGINSHLWIVNRAIDIMSRNTTIVNPNETALLNEWRADLENGIYSADYENPYYDYSTYASHFYDPDTGTTYIPFAKHAKETGAKYFNLAGQAYQNQDMQQAFFYLGLSLHYLGDVNQPMHAANFTELSYPWGFHSKYENFVDTIKNNYIVSDSNGYWNWKGANPEDWIEGAAVAAKQDYPGVVNDTTKDWFVKAAVSQEYADKWRAEVTPVTGKRLMEAQRVTAGYIHLWFDTYVNR

SEQ ID NO: 16177 - protein, 245 aa, Synthetic construct
WSARDKHNEGINSHLWIVNRAIDIMSRNTTIVNPNETALLNEWRADLENGIYSADYENPYYDFSTYASHFYDPDTGTTYIPFAKHAKETGAKYFNLAGQAYQNQDMQQAFFYLGLSLHYLGDVNQPMHAANFTNLSYPMGFHSKYENFVDTIKNNYIVSDSNGYWNWKGANPEDWIEGAAVAAKQDYPGVVNDTTKDWFVKAAVSQEYADKWRAEVTPVTGKRLMEAQRVTAGYIHLWFDTYVNR

SEQ ID NO: 16178 - protein, 245 aa, Synthetic construct
WSAYDKHNEGINSHLWIVNRAIDIMSRNTTIVNPNETALLNEWRADLENGIYSADYENPYYDYSTYASHFYDPDTGTTYIPFAKHAKETGAKYFNLAGQAYQNQDMQQAFFYLGLSLHYLGDVNQPMHAANFTNLSYPWGFHSKYENFVDTIKNNYIVSDSNGYWNWKGANPEDWIEGAAVAAKQDYPGVVNDTTKDWFVKAAVSQEYADKWRAEVTPVTGKRLMEAQRVTAGYIHLWFDTYVNR

SEQ ID NO: 16179 - protein, 245 aa, Synthetic construct
WSAEDKHNEGINSHLWIVNRAIDIMSRNTTIVNPNETALLNEWRADLENGIYSADYENPYYDLSTYASHFYDPDTGTTYIPFAKHAKETGAKYFNLAGQAYQNQDMQQAFFYLGLSLHYLGDVNQPMHAANFTELSYPMGFHSKYENFVDTIKNNYIVSDSNGYWNWKGANPEDWIEGAAVAAKQDYPGVVNDTTKDWFVKAAVSQEYADKWRAEVTPVTGKRLMEAQRVTAGYIHLWFDTYVNR

SEQ ID NO: 16180 - protein, 245 aa, Synthetic construct
WSAEDKHNEGINSHLWIVNRAIDIMSRNTTIVNPNETALLNEWRADLENGIYSADYENPYYDFSTYASHFYDPDTGTTYIPFAKHAKETGAKYFNLAGQAYQNQDMQQAFFYLGLSLHYLGDVNQPMHAANFTELSYPWGFHSKYENFVDTIKNNYIVSDSNGYWNWKGANPEDWIEGAAVAAKQDYPGVVNDTTKDWFVKAAVSQEYADKWRAEVTPVTGKRLMEAQRVTAGYIHLWFDTYVNR

SEQ ID NO: 16181 - protein, 245 aa, Synthetic construct
WSAYDKHNEGINSHLWIVNRAIDIMSRNTTIVNPNETALLNEWRADLENGIYSADYENPYYDMSTYASHFYDPDTGTTYIPFAKHAKETGAKYFNLAGQAYQNQDMQQAFFYLGLSLHYLGDVNQPMHAANFTNLSYPWGFHSKYENFVDTIKNNYIVSDSNGYWNWKGANPEDWIEGAAVAAKQDYPGVVNDTTKDWFVKAAVSQEYADKWRAEVTPVTGKRLMEAQRVTAGYIHLWFDTYVNR

SEQ ID NO: 16182 - protein, 245 aa, Synthetic construct
WSAYDKHNEGINSHLWIVNRAIDIMSRNTTIVNPNETALLNEWRADLENGIYSADYENPYYDWSTYASHFYDPDTGTTYIPFAKHAKETGAKYFNLAGQAYQNQDMQQAFFYLGLSLHYLGDVNQPMHAASFTNLSYPWGFHSKYENFVDTIKNNYIVSDSNGYWNWKGANPEDWIEGAAVAAKQDYPGVVNDTTKDWFVKAAVSQEYADKWRAEVTPVTGKRLMEAQRVTAGYIHLWFDTYVNR

SEQ ID NO: 16183 - protein, 245 aa, Synthetic construct
WSAFDKHNEGINSHLWIVNRAIDIMSRNTTIVNPNETALLNEWRADLENGIYSADYENPYYDWSTYASHFYDPDTGTTYIPFAKHAKETGAKYFNLAGQAYQNQDMQQAFFYLGLSLHYLGDVNQPMHAANFTELSYPWGFHSKYENFVDTIKNNYIVSDSNGYWNWKGANPEDWIEGAAVAAKQDYPGVVNDTTKDWFVKAAVSQEYADKWRAEVTPVTGKRLMEAQRVTAGYIHLWFDTYVNR

SEQ ID NO: 16184 - protein, 245 aa, Synthetic construct
WSAEDKHNEGINSHLWIVNRAIDIMSRNTTIVNPNETALLNEWRADLENGIYSADYENPYYDYSTYASHFYDPDTGTTYIPFAKHAKETGAKYFNLAGQAYQNQDMQQAFFYLGLSLHYLGDVNQPMHAASFTDLSYPMGFHSKYENFVDTIKNNYIVSDSNGYWNWKGANPEDWIEGAAVAAKQDYPGVVNDTTKDWFVKAAVSQEYADKWRAEVTPVTGKRLMEAQRVTAGYIHLWFDTYVNR

SEQ ID NO: 16185 - protein, 245 aa, Synthetic construct
WSAYDKHNEGINSHLWIVNRAIDIMSRNTTIVNPNETALLNEWRADLENGIYSADYENPYYDLSTYASHFYDPDTGTTYIPFAKHAKETGAKYFNLAGQAYQNQDMQQAFFYLGLSLHYLGDVNQPMHAASFTNLSYPWGFHSKYENFVDTIKNNYIVSDSNGYWNWKGANPEDWIEGAAVAAKQDYPGVVNDTTKDWFVKAAVSQEYADKWRAEVTPVTGKRLMEAQRVTAGYIHLWFDTYVNR

SEQ ID NO: 16186 - protein, 245 aa, Synthetic construct
WSAFDKHNEGINSHLWIVNRAIDIMSRNTTIVNPNETALLNEWRADLENGIYSADYENPYYDYSTYASHFYDPDTGTTYIPFAKHAKETGAKYFNLAGQAYQNQDMQQAFFYLGLSLHYLGDVNQPMHAASFTNLSYPWGFHSKYENFVDTIKNNYIVSDSNGYWNWKGANPEDWIEGAAVAAKQDYPGVVNDTTKDWFVKAAVSQEYADKWRAEVTPVTGKRLMEAQRVTAGYIHLWFDTYVNR

SEQ ID NO: 16187 - protein, 245 aa, Synthetic construct
WSAFDKHNEGINSHLWIVNRAIDIMSRNTTIVNPNETALLNEWRADLENGIYSADYENPYYDYSTYASHFYDPDTGTTYIPFAKHAKETGAKYFNLAGQAYQNQDMQQAFFYLGLSLHYLGDVNQPMHAANFTELSYPMGFHSKYENFVDTIKNNYIVSDSNGYWNWKGANPEDWIEGAAVAAKQDYPGVVNDTTKDWFVKAAVSQEYADKWRAEVTPVTGKRLMEAQRVTAGYIHLWFDTYVNR

SEQ ID NO: 16188 - protein, 245 aa, Synthetic construct
WSARDKHNEGINSHLWIVNRAIDIMSRNTTIVNPNETALLNEWRADLENGIYSADYENPYYDNSTYASHFYDPDTGTTYIPFAKHAKETGAKYFNLAGQAYQNQDMQQAFFYLGLSLHYLGDVNQPMHAASFTELSYPWGFHSKYENFVDTIKNNYIVSDSNGYWNWKGANPEDWIEGAAVAAKQDYPGVVNDTTKDWFVKAAVSQEYADKWRAEVTPVTGKRLMEAQRVTAGYIHLWFDTYVNR

SEQ ID NO: 16189 - protein, 245 aa, Synthetic construct
WSAWDKHNEGINSHLWIVNRAIDIMSRNTTIVNPNETALLNEWRADLENGIYSADYENPYYDFSTYASHFYDPDTGTTYIPFAKHAKETGAKYFNLAGQAYQNQDMQQAFFYLGLSLHYLGDVNQPMHAANFTELSYPMGFHSKYENFVDTIKNNYIVSDSNGYWNWKGANPEDWIEGAAVAAKQDYPGVVNDTTKDWFVKAAVSQEYADKWRAEVTPVTGKRLMEAQRVTAGYIHLWFDTYVNR

SEQ ID NO: 16190 - protein, 245 aa, Synthetic construct
WSAEDKHNEGINSHLWIVNRAIDIMSRNTTIVNPNETALLNEWRADLENGIYSADYENPYYDLSTYASHFYDPDTGTTYIPFAKHAKETGAKYFNLAGQAYQNQDMQQAFFYLGLSLHYLGDVNQPMHAASFTELSYPMGFHSKYENFVDTIKNNYIVSDSNGYWNWKGANPEDWIEGAAVAAKQDYPGVVNDTTKDWFVKAAVSQEYADKWRAEVTPVTGKRLMEAQRVTAGYIHLWFDTYVNR

SEQ ID NO: 16191 - protein, 245 aa, Synthetic construct
WSAFDKHNEGINSHLWIVNRAIDIMSRNTTIVNPNETALLNEWRADLENGIYSADYENPYYDNSTYASHFYDPDTGTTYIPFAKHAKETGAKYFNLAGQAYQNQDMQQAFFYLGLSLHYLGDVNQPMHAASFTELSYPMGFHSKYENFVDTIKNNYIVSDSNGYWNWKGANPEDWIEGAAVAAKQDYPGVVNDTTKDWFVKAAVSQEYADKWRAEVTPVTGKRLMEAQRVTAGYIHLWFDTYVNR

SEQ ID NO: 16192 - protein, 245 aa, Synthetic construct
WSAWDKHNEGINSHLWIVNRAIDIMSRNTTIVNPNETALLNEWRADLENGIYSADYENPYYDYSTYASHFYDPDTGTTYIPFAKHAKETGAKYFNLAGQAYQNQDMQQAFFYLGLSLHYLGDVNQPMHAASFTNLSYPMGFHSKYENFVDTIKNNYIVSDSNGYWNWKGANPEDWIEGAAVAAKQDYPGVVNDTTKDWFVKAAVSQEYADKWRAEVTPVTGKRLMEAQRVTAGYIHLWFDTYVNR

SEQ ID NO: 16193 - protein, 245 aa, Synthetic construct
WSAEDKHNEGINSHLWIVNRAIDIMSRNTTIVNPNETALLNEWRADLENGIYSADYENPYYDWSTYASHFYDPDTGTTYIPFAKHAKETGAKYFNLAGQAYQNQDMQQAFFYLGLSLHYLGDVNQPMHAASFTELSYPWGFHSKYENFVDTIKNNYIVSDSNGYWNWKGANPEDWIEGAAVAAKQDYPGVVNDTTKDWFVKAAVSQEYADKWRAEVTPVTGKRLMEAQRVTAGYIHLWFDTYVNR

SEQ ID NO: 16194 - protein, 245 aa, Synthetic construct
WSAEDKHNEGINSHLWIVNRAIDIMSRNTTIVNPNETALLNEWRADLENGIYSADYENPYYDDSTYASHFYDPDTGTTYIPFAKHAKETGAKYFNLAGQAYQNQDMQQAFFYLGLSLHYLGDVNQPMHAASFTELSYPMGFHSKYENFVDTIKNNYIVSDSNGYWNWKGANPEDWIEGAAVAAKQDYPGVVNDTTKDWFVKAAVSQEYADKWRAEVTPVTGKRLMEAQRVTAGYIHLWFDTYVNR

SEQ ID NO: 16195 - protein, 245 aa, Synthetic construct
WSARDKHNEGINSHLWIVNRAIDIMSRNTTIVNPNETALLNEWRADLENGIYSADYENPYYDYSTYASHFYDPDTGTTYIPFAKHAKETGAKYFNLAGQAYQNQDMQQAFFYLGLSLHYLGDVNQPMHAANFTELSYPMGFHSKYENFVDTIKNNYIVSDSNGYWNWKGANPEDWIEGAAVAAKQDYPGVVNDTTKDWFVKAAVSQEYADKWRAEVTPVTGKRLMEAQRVTAGYIHLWFDTYVNR

SEQ ID NO: 16196 - protein, 245 aa, Synthetic construct
WSAYDKHNEGINSHLWIVNRAIDIMSRNTTIVNPNETALLNEWRADLENGIYSADYENPYYDYSTYASHFYDPDTGTTYIPFAKHAKETGAKYFNLAGQAYQNQDMQQAFFYLGLSLHYLGDVNQPMHAANFTELSYPWGFHSKYENFVDTIKNNYIVSDSNGYWNWKGANPEDWIEGAAVAAKQDYPGVVNDTTKDWFVKAAVSQEYADKWRAEVTPVTGKRLMEAQRVTAGYIHLWFDTYVNR

SEQ ID NO: 16197 - protein, 245 aa, Synthetic construct
WSARDKHNEGINSHLWIVNRAIDIMSRNTTIVNPNETALLNEWRADLENGIYSADYENPYYDYSTYASHFYDPDTGTTYIPFAKHAKETGAKYFNLAGQAYQNQDMQQAFFYLGLSLHYLGDVNQPMHAASFTNLSYPWGFHSKYENFVDTIKNNYIVSDSNGYWNWKGANPEDWIEGAAVAAKQDYPGVVNDTTKDWFVKAAVSQEYADKWRAEVTPVTGKRLMEAQRVTAGYIHLWFDTYVNR

SEQ ID NO: 16198 - protein, 245 aa, Synthetic construct
WSAEDKHNEGINSHLWIVNRAIDIMSRNTTIVNPNETALLNEWRADLENGIYSADYENPYYDLSTYASHFYDPDTGTTYIPFAKHAKETGAKYFNLAGQAYQNQDMQQAFFYLGLSLHYLGDVNQPMHAASFTDLSYPMGFHSKYENFVDTIKNNYIVSDSNGYWNWKGANPEDWIEGAAVAAKQDYPGVVNDTTKDWFVKAAVSQEYADKWRAEVTPVTGKRLMEAQRVTAGYIHLWFDTYVNR

SEQ ID NO: 16199 - protein, 245 aa, Synthetic construct
WSAADKHNEGINSHLWIVNRAIDIMSRNTTIVNPNETALLNEWRADLENGIYSADYENPYYDYSTYASHFYDPDTGTTYIPFAKHAKETGAKYFNLAGQAYQNQDMQQAFFYLGLSLHYLGDVNQPMHAASFTNLSYPWGFHSKYENFVDTIKNNYIVSDSNGYWNWKGANPEDWIEGAAVAAKQDYPGVVNDTTKDWFVKAAVSQEYADKWRAEVTPVTGKRLMEAQRVTAGYIHLWFDTYVNR

SEQ ID NO: 16200 - protein, 245 aa, Synthetic construct
WSAADKHNEGINSHLWIVNRAIDIMSRNTTIVNPNETALLNEWRADLENGIYSADYENPYYDMSTYASHFYDPDTGTTYIPFAKHAKETGAKYFNLAGQAYQNQDMQQAFFYLGLSLHYLGDVNQPMHAANFTELSYPWGFHSKYENFVDTIKNNYIVSDSNGYWNWKGANPEDWIEGAAVAAKQDYPGVVNDTTKDWFVKAAVSQEYADKWRAEVTPVTGKRLMEAQRVTAGYIHLWFDTYVNR

SEQ ID NO: 16201 - protein, 245 aa, Synthetic construct
WSAADKHNEGINSHLWIVNRAIDIMSRNTTIVNPNETALLNEWRADLENGIYSADYENPYYDYSTYASHFYDPDTGTTYIPFAKHAKETGAKYFNLAGQAYQNQDMQQAFFYLGLSLHYLGDVNQPMHAANFTELSYPWGFHSKYENFVDTIKNNYIVSDSNGYWNWKGANPEDWIEGAAVAAKQDYPGVVNDTTKDWFVKAAVSQEYADKWRAEVTPVTGKRLMEAQRVTAGYIHLWFDTYVNR

SEQ ID NO: 16202 - protein, 245 aa, Synthetic construct
WSAEDKHNEGINSHLWIVNRAIDIMSRNTTIVNPNETALLNEWRADLENGIYSADYENPYYDMSTYASHFYDPDTGTTYIPFAKHAKETGAKYFNLAGQAYQNQDMQQAFFYLGLSLHYLGDVNQPMHAASFTELSYPWGFHSKYENFVDTIKNNYIVSDSNGYWNWKGANPEDWIEGAAVAAKQDYPGVVNDTTKDWFVKAAVSQEYADKWRAEVTPVTGKRLMEAQRVTAGYIHLWFDTYVNR

SEQ ID NO: 16203 - protein, 245 aa, Synthetic construct
WSAADKHNEGINSHLWIVNRAIDIMSRNTTIVNPNETALLNEWRADLENGIYSADYENPYYDWSTYASHFYDPDTGTTYIPFAKHAKETGAKYFNLAGQAYQNQDMQQAFFYLGLSLHYLGDVNQPMHAANFTELSYPWGFHSKYENFVDTIKNNYIVSDSNGYWNWKGANPEDWIEGAAVAAKQDYPGVVNDTTKDWFVKAAVSQEYADKWRAEVTPVTGKRLMEAQRVTAGYIHLWFDTYVNR

SEQ ID NO: 16204 - protein, 245 aa, Synthetic construct
WSAWDKHNEGINSHLWIVNRAIDIMSRNTTIVNPNETALLNEWRADLENGIYSADYENPYYDFSTYASHFYDPDTGTTYIPFAKHAKETGAKYFNLAGQAYQNQDMQQAFFYLGLSLHYLGDVNQPMHAASFTNLSYPMGFHSKYENFVDTIKNNYIVSDSNGYWNWKGANPEDWIEGAAVAAKQDYPGVVNDTTKDWFVKAAVSQEYADKWRAEVTPVTGKRLMEAQRVTAGYIHLWFDTYVNR

SEQ ID NO: 16205 - protein, 245 aa, Synthetic construct
WSARDKHNEGINSHLWIVNRAIDIMSRNTTIVNPNETALLNEWRADLENGIYSADYENPYYDYSTYASHFYDPDTGTTYIPFAKHAKETGAKYFNLAGQAYQNQDMQQAFFYLGLSLHYLGDVNQPMHAASFTNLSYPMGFHSKYENFVDTIKNNYIVSDSNGYWNWKGANPEDWIEGAAVAAKQDYPGVVNDTTKDWFVKAAVSQEYADKWRAEVTPVTGKRLMEAQRVTAGYIHLWFDTYVNR

SEQ ID NO: 16206 - protein, 245 aa, Synthetic construct
WSAADKHNEGINSHLWIVNRAIDIMSRNTTIVNPNETALLNEWRADLENGIYSADYENPYYDFSTYASHFYDPDTGTTYIPFAKHAKETGAKYFNLAGQAYQNQDMQQAFFYLGLSLHYLGDVNQPMHAANFTELSYPMGFHSKYENFVDTIKNNYIVSDSNGYWNWKGANPEDWIEGAAVAAKQDYPGVVNDTTKDWFVKAAVSQEYADKWRAEVTPVTGKRLMEAQRVTAGYIHLWFDTYVNR

SEQ ID NO: 16207 - protein, 245 aa, Synthetic construct
WSAWDKHNEGINSHLWIVNRAIDIMSRNTTIVNPNETALLNEWRADLENGIYSADYENPYYDFSTYASHFYDPDTGTTYIPFAKHAKETGAKYFNLAGQAYQNQDMQQAFFYLGLSLHYLGDVNQPMHAANFTELSYPWGFHSKYENFVDTIKNNYIVSDSNGYWNWKGANPEDWIEGAAVAAKQDYPGVVNDTTKDWFVKAAVSQEYADKWRAEVTPVTGKRLMEAQRVTAGYIHLWFDTYVNR

SEQ ID NO: 16208 - protein, 245 aa, Synthetic construct
WSAADKHNEGINSHLWIVNRAIDIMSRNTTIVNPNETALLNEWRADLENGIYSADYENPYYDYSTYASHFYDPDTGTTYIPFAKHAKETGAKYFNLAGQAYQNQDMQQAFFYLGLSLHYLGDVNQPMHAANFTELSYPMGFHSKYENFVDTIKNNYIVSDSNGYWNWKGANPEDWIEGAAVAAKQDYPGVVNDTTKDWFVKAAVSQEYADKWRAEVTPVTGKRLMEAQRVTAGYIHLWFDTYVNR

SEQ ID NO: 16209 - protein, 245 aa, Synthetic construct
WSAYDKHNEGINSHLWIVNRAIDIMSRNTTIVNPNETALLNEWRADLENGIYSADYENPYYDFSTYASHFYDPDTGTTYIPFAKHAKETGAKYFNLAGQAYQNQDMQQAFFYLGLSLHYLGDVNQPMHAASFTNLSYPMGFHSKYENFVDTIKNNYIVSDSNGYWNWKGANPEDWIEGAAVAAKQDYPGVVNDTTKDWFVKAAVSQEYADKWRAEVTPVTGKRLMEAQRVTAGYIHLWFDTYVNR

SEQ ID NO: 16210 - protein, 245 aa, Synthetic construct
WSAYDKHNEGINSHLWIVNRAIDIMSRNTTIVNPNETALLNEWRADLENGIYSADYENPYYDMSTYASHFYDPDTGTTYIPFAKHAKETGAKYFNLAGQAYQNQDMQQAFFYLGLSLHYLGDVNQPMHAASFTNLSYPWGFHSKYENFVDTIKNNYIVSDSNGYWNWKGANPEDWIEGAAVAAKQDYPGVVNDTTKDWFVKAAVSQEYADKWRAEVTPVTGKRLMEAQRVTAGYIHLWFDTYVNR

SEQ ID NO: 16211 - protein, 245 aa, Synthetic construct
WSAFDKHNEGINSHLWIVNRAIDIMSRNTTIVNPNETALLNEWRADLENGIYSADYENPYYDMSTYASHFYDPDTGTTYIPFAKHAKETGAKYFNLAGQAYQNQDMQQAFFYLGLSLHYLGDVNQPMHAANFTELSYPMGFHSKYENFVDTIKNNYIVSDSNGYWNWKGANPEDWIEGAAVAAKQDYPGVVNDTTKDWFVKAAVSQEYADKWRAEVTPVTGKRLMEAQRVTAGYIHLWFDTYVNR

SEQ ID NO: 16212 - protein, 245 aa, Synthetic construct
WSAADKHNEGINSHLWIVNRAIDIMSRNTTIVNPNETALLNEWRADLENGIYSADYENPYYDNSTYASHFYDPDTGTTYIPFAKHAKETGAKYFNLAGQAYQNQDMQQAFFYLGLSLHYLGDVNQPMHAASFTELSYPMGFHSKYENFVDTIKNNYIVSDSNGYWNWKGANPEDWIEGAAVAAKQDYPGVVNDTTKDWFVKAAVSQEYADKWRAEVTPVTGKRLMEAQRVTAGYIHLWFDTYVNR

SEQ ID NO: 16213 - protein, 245 aa, Synthetic construct
WSAEDKHNEGINSHLWIVNRAIDIMSRNTTIVNPNETALLNEWRADLENGIYSADYENPYYDDSTYASHFYDPDTGTTYIPFAKHAKETGAKYFNLAGQAYQNQDMQQAFFYLGLSLHYLGDVNQPMHAASFTVLSYPMGFHSKYENFVDTIKNNYIVSDSNGYWNWKGANPEDWIEGAAVAAKQDYPGVVNDTTKDWFVKAAVSQEYADKWRAEVTPVTGKRLMEAQRVTAGYIHLWFDTYVNR

SEQ ID NO: 16214 - protein, 245 aa, Synthetic construct
WSAFDKHNEGINSHLWIVNRAIDIMSRNTTIVNPNETALLNEWRADLENGIYSADYENPYYDFSTYASHFYDPDTGTTYIPFAKHAKETGAKYFNLAGQAYQNQDMQQAFFYLGLSLHYLGDVNQPMHAASFTNLSYPWGFHSKYENFVDTIKNNYIVSDSNGYWNWKGANPEDWIEGAAVAAKQDYPGVVNDTTKDWFVKAAVSQEYADKWRAEVTPVTGKRLMEAQRVTAGYIHLWFDTYVNR

SEQ ID NO: 16215 - protein, 245 aa, Synthetic construct
WSAFDKHNEGINSHLWIVNRAIDIMSRNTTIVNPNETALLNEWRADLENGIYSADYENPYYDFSTYASHFYDPDTGTTYIPFAKHAKETGAKYFNLAGQAYQNQDMQQAFFYLGLSLHYLGDVNQPMHAANFTELSYPWGFHSKYENFVDTIKNNYIVSDSNGYWNWKGANPEDWIEGAAVAAKQDYPGVVNDTTKDWFVKAAVSQEYADKWRAEVTPVTGKRLMEAQRVTAGYIHLWFDTYVNR

SEQ ID NO: 16216 - protein, 245 aa, Synthetic construct
WSAEDKHNEGINSHLWIVNRAIDIMSRNTTIVNPNETALLNEWRADLENGIYSADYENPYYDWSTYASHFYDPDTGTTYIPFAKHAKETGAKYFNLAGQAYQNQDMQQAFFYLGLSLHYLGDVNQPMHAASFTDLSYPMGFHSKYENFVDTIKNNYIVSDSNGYWNWKGANPEDWIEGAAVAAKQDYPGVVNDTTKDWFVKAAVSQEYADKWRAEVTPVTGKRLMEAQRVTAGYIHLWFDTYVNR

SEQ ID NO: 16217 - protein, 245 aa, Synthetic construct
WSAYDKHNEGINSHLWIVNRAIDIMSRNTTIVNPNETALLNEWRADLENGIYSADYENPYYDMSTYASHFYDPDTGTTYIPFAKHAKETGAKYFNLAGQAYQNQDMQQAFFYLGLSLHYLGDVNQPMHAASFTNLSYPMGFHSKYENFVDTIKNNYIVSDSNGYWNWKGANPEDWIEGAAVAAKQDYPGVVNDTTKDWFVKAAVSQEYADKWRAEVTPVTGKRLMEAQRVTAGYIHLWFDTYVNR

SEQ ID NO: 16218 - protein, 245 aa, Synthetic construct
WSAFDKHNEGINSHLWIVNRAIDIMSRNTTIVNPNETALLNEWRADLENGIYSADYENPYYDYSTYASHFYDPDTGTTYIPFAKHAKETGAKYFNLAGQAYQNQDMQQAFFYLGLSLHYLGDVNQPMHAASFTNLSYPMGFHSKYENFVDTIKNNYIVSDSNGYWNWKGANPEDWIEGAAVAAKQDYPGVVNDTTKDWFVKAAVSQEYADKWRAEVTPVTGKRLMEAQRVTAGYIHLWFDTYVNR

SEQ ID NO: 16219 - protein, 245 aa, Synthetic construct
WSARDKHNEGINSHLWIVNRAIDIMSRNTTIVNPNETALLNEWRADLENGIYSADYENPYYDLSTYASHFYDPDTGTTYIPFAKHAKETGAKYFNLAGQAYQNQDMQQAFFYLGLSLHYLGDVNQPMHAASFTNLSYPMGFHSKYENFVDTIKNNYIVSDSNGYWNWKGANPEDWIEGAAVAAKQDYPGVVNDTTKDWFVKAAVSQEYADKWRAEVTPVTGKRLMEAQRVTAGYIHLWFDTYVNR

SEQ ID NO: 16220 - protein, 245 aa, Synthetic construct
WSAADKHNEGINSHLWIVNRAIDIMSRNTTIVNPNETALLNEWRADLENGIYSADYENPYYDLSTYASHFYDPDTGTTYIPFAKHAKETGAKYFNLAGQAYQNQDMQQAFFYLGLSLHYLGDVNQPMHAANFTELSYPMGFHSKYENFVDTIKNNYIVSDSNGYWNWKGANPEDWIEGAAVAAKQDYPGVVNDTTKDWFVKAAVSQEYADKWRAEVTPVTGKRLMEAQRVTAGYIHLWFDTYVNR

SEQ ID NO: 16221 - protein, 245 aa, Synthetic construct
WSAYDKHNEGINSHLWIVNRAIDIMSRNTTIVNPNETALLNEWRADLENGIYSADYENPYYDFSTYASHFYDPDTGTTYIPFAKHAKETGAKYFNLAGQAYQNQDMQQAFFYLGLSLHYLGDVNQPMHAANFTELSYPWGFHSKYENFVDTIKNNYIVSDSNGYWNWKGANPEDWIEGAAVAAKQDYPGVVNDTTKDWFVKAAVSQEYADKWRAEVTPVTGKRLMEAQRVTAGYIHLWFDTYVNR

SEQ ID NO: 16222 - protein, 245 aa, Synthetic construct
WSAYDKHNEGINSHLWIVNRAIDIMSRNTTIVNPNETALLNEWRADLENGIYSADYENPYYDWSTYASHFYDPDTGTTYIPFAKHAKETGAKYFNLAGQAYQNQDMQQAFFYLGLSLHYLGDVNQPMHAASFTNLSYPMGFHSKYENFVDTIKNNYIVSDSNGYWNWKGANPEDWIEGAAVAAKQDYPGVVNDTTKDWFVKAAVSQEYADKWRAEVTPVTGKRLMEAQRVTAGYIHLWFDTYVNR

SEQ ID NO: 16223 - protein, 245 aa, Synthetic construct
WSAADKHNEGINSHLWIVNRAIDIMSRNTTIVNPNETALLNEWRADLENGIYSADYENPYYDFSTYASHFYDPDTGTTYIPFAKHAKETGAKYFNLAGQAYQNQDMQQAFFYLGLSLHYLGDVNQPMHAANFTELSYPWGFHSKYENFVDTIKNNYIVSDSNGYWNWKGANPEDWIEGAAVAAKQDYPGVVNDTTKDWFVKAAVSQEYADKWRAEVTPVTGKRLMEAQRVTAGYIHLWFDTYVNR

SEQ ID NO: 16224 - protein, 245 aa, Synthetic construct
WSAEDKHNEGINSHLWIVNRAIDIMSRNTTIVNPNETALLNEWRADLENGIYSADYENPYYDWSTYASHFYDPDTGTTYIPFAKHAKETGAKYFNLAGQAYQNQDMQQAFFYLGLSLHYLGDVNQPMHAASFTELSYPMGFHSKYENFVDTIKNNYIVSDSNGYWNWKGANPEDWIEGAAVAAKQDYPGVVNDTTKDWFVKAAVSQEYADKWRAEVTPVTGKRLMEAQRVTAGYIHLWFDTYVNR

SEQ ID NO: 16225 - protein, 245 aa, Synthetic construct
WSAYDKHNEGINSHLWIVNRAIDIMSRNTTIVNPNETALLNEWRADLENGIYSADYENPYYDLSTYASHFYDPDTGTTYIPFAKHAKETGAKYFNLAGQAYQNQDMQQAFFYLGLSLHYLGDVNQPMHAASFTNLSYPMGFHSKYENFVDTIKNNYIVSDSNGYWNWKGANPEDWIEGAAVAAKQDYPGVVNDTTKDWFVKAAVSQEYADKWRAEVTPVTGKRLMEAQRVTAGYIHLWFDTYVNR

SEQ ID NO: 16226 - protein, 245 aa, Synthetic construct
WSAADKHNEGINSHLWIVNRAIDIMSRNTTIVNPNETALLNEWRADLENGIYSADYENPYYDWSTYASHFYDPDTGTTYIPFAKHAKETGAKYFNLAGQAYQNQDMQQAFFYLGLSLHYLGDVNQPMHAANFTELSYPMGFHSKYENFVDTIKNNYIVSDSNGYWNWKGANPEDWIEGAAVAAKQDYPGVVNDTTKDWFVKAAVSQEYADKWRAEVTPVTGKRLMEAQRVTAGYIHLWFDTYVNR

SEQ ID NO: 16227 - protein, 245 aa, Synthetic construct
WSAYDKHNEGINSHLWIVNRAIDIMSRNTTIVNPNETALLNEWRADLENGIYSADYENPYYDMSTYASHFYDPDTGTTYIPFAKHAKETGAKYFNLAGQAYQNQDMQQAFFYLGLSLHYLGDVNQPMHAANFTELSYPWGFHSKYENFVDTIKNNYIVSDSNGYWNWKGANPEDWIEGAAVAAKQDYPGVVNDTTKDWFVKAAVSQEYADKWRAEVTPVTGKRLMEAQRVTAGYIHLWFDTYVNR

SEQ ID NO: 16228 - protein, 245 aa, Synthetic construct
WSAYDKHNEGINSHLWIVNRAIDIMSRNTTIVNPNETALLNEWRADLENGIYSADYENPYYDFSTYASHFYDPDTGTTYIPFAKHAKETGAKYFNLAGQAYQNQDMQQAFFYLGLSLHYLGDVNQPMHAANFTELSYPMGFHSKYENFVDTIKNNYIVSDSNGYWNWKGANPEDWIEGAAVAAKQDYPGVVNDTTKDWFVKAAVSQEYADKWRAEVTPVTGKRLMEAQRVTAGYIHLWFDTYVNR

SEQ ID NO: 16229 - protein, 245 aa, Synthetic construct
WSAADKHNEGINSHLWIVNRAIDIMSRNTTIVNPNETALLNEWRADLENGIYSADYENPYYDMSTYASHFYDPDTGTTYIPFAKHAKETGAKYFNLAGQAYQNQDMQQAFFYLGLSLHYLGDVNQPMHAASFTNLSYPWGFHSKYENFVDTIKNNYIVSDSNGYWNWKGANPEDWIEGAAVAAKQDYPGVVNDTTKDWFVKAAVSQEYADKWRAEVTPVTGKRLMEAQRVTAGYIHLWFDTYVNR

SEQ ID NO: 16230 - protein, 245 aa, Synthetic construct
WSARDKHNEGINSHLWIVNRAIDIMSRNTTIVNPNETALLNEWRADLENGIYSADYENPYYDNSTYASHFYDPDTGTTYIPFAKHAKETGAKYFNLAGQAYQNQDMQQAFFYLGLSLHYLGDVNQPMHAASFTELSYPMGFHSKYENFVDTIKNNYIVSDSNGYWNWKGANPEDWIEGAAVAAKQDYPGVVNDTTKDWFVKAAVSQEYADKWRAEVTPVTGKRLMEAQRVTAGYIHLWFDTYVNR

SEQ ID NO: 16231 - protein, 245 aa, Synthetic construct
WSAFDKHNEGINSHLWIVNRAIDIMSRNTTIVNPNETALLNEWRADLENGIYSADYENPYYDLSTYASHFYDPDTGTTYIPFAKHAKETGAKYFNLAGQAYQNQDMQQAFFYLGLSLHYLGDVNQPMHAANFTELSYPWGFHSKYENFVDTIKNNYIVSDSNGYWNWKGANPEDWIEGAAVAAKQDYPGVVNDTTKDWFVKAAVSQEYADKWRAEVTPVTGKRLMEAQRVTAGYIHLWFDTYVNR

SEQ ID NO: 16232 - protein, 245 aa, Synthetic construct
WSAADKHNEGINSHLWIVNRAIDIMSRNTTIVNPNETALLNEWRADLENGIYSADYENPYYDYSTYASHFYDPDTGTTYIPFAKHAKETGAKYFNLAGQAYQNQDMQQAFFYLGLSLHYLGDVNQPMHAASFTNLSYPMGFHSKYENFVDTIKNNYIVSDSNGYWNWKGANPEDWIEGAAVAAKQDYPGVVNDTTKDWFVKAAVSQEYADKWRAEVTPVTGKRLMEAQRVTAGYIHLWFDTYVNR

SEQ ID NO: 16233 - protein, 245 aa, Synthetic construct
WSAFDKHNEGINSHLWIVNRAIDIMSRNTTIVNPNETALLNEWRADLENGIYSADYENPYYDYSTYASHFYDPDTGTTYIPFAKHAKETGAKYFNLAGQAYQNQDMQQAFFYLGLSLHYLGDVNQPMHAANFTELSYPWGFHSKYENFVDTIKNNYIVSDSNGYWNWKGANPEDWIEGAAVAAKQDYPGVVNDTTKDWFVKAAVSQEYADKWRAEVTPVTGKRLMEAQRVTAGYIHLWFDTYVNR

SEQ ID NO: 16234 - protein, 245 aa, Synthetic construct
WSAEDKHNEGINSHLWIVNRAIDIMSRNTTIVNPNETALLNEWRADLENGIYSADYENPYYDYSTYASHFYDPDTGTTYIPFAKHAKETGAKYFNLAGQAYQNQDMQQAFFYLGLSLHYLGDVNQPMHAASFTELSYPMGFHSKYENFVDTIKNNYIVSDSNGYWNWKGANPEDWIEGAAVAAKQDYPGVVNDTTKDWFVKAAVSQEYADKWRAEVTPVTGKRLMEAQRVTAGYIHLWFDTYVNR

SEQ ID NO: 16235 - protein, 245 aa, Synthetic construct
WSARDKHNEGINSHLWIVNRAIDIMSRNTTIVNPNETALLNEWRADLENGIYSADYENPYYDLSTYASHFYDPDTGTTYIPFAKHAKETGAKYFNLAGQAYQNQDMQQAFFYLGLSLHYLGDVNQPMHAANFTELSYPMGFHSKYENFVDTIKNNYIVSDSNGYWNWKGANPEDWIEGAAVAAKQDYPGVVNDTTKDWFVKAAVSQEYADKWRAEVTPVTGKRLMEAQRVTAGYIHLWFDTYVNR

SEQ ID NO: 16236 - protein, 245 aa, Synthetic construct
WSAFDKHNEGINSHLWIVNRAIDIMSRNTTIVNPNETALLNEWRADLENGIYSADYENPYYDWSTYASHFYDPDTGTTYIPFAKHAKETGAKYFNLAGQAYQNQDMQQAFFYLGLSLHYLGDVNQPMHAANFTELSYPMGFHSKYENFVDTIKNNYIVSDSNGYWNWKGANPEDWIEGAAVAAKQDYPGVVNDTTKDWFVKAAVSQEYADKWRAEVTPVTGKRLMEAQRVTAGYIHLWFDTYVNR

SEQ ID NO: 16237 - protein, 245 aa, unidentified
WSAEDKHNEGINSHLWIVNRAIDIMSRNTTIVNPNETALLNEWRADLENGIYSADYENPYYDDSTYASHFYDPDTGTTYIPFAKHAKETGAKYFNLAGQAYQNQDMQQAFFYLGLSLHYLGDVNQPMHAASFTDLSYPMGFHSKYENFVDTIKNNYIVSDSNGYWNWKGANPEDWIEGAAVAAKQDYPGVVNDTTKDWFVKAAVSQEYADKWRAEVTPVTGKRLMEAQRVTAGYIHLWFDTYVNR

SEQ ID NO: 16238 - protein, 245 aa, Synthetic construct
WSAADKHNEGINSHLWIVNRAIDIMSRNTTIVNPNETALLNEWRADLENGIYSADYENPYYDLSTYASHFYDPDTGTTYIPFAKHAKETGAKYFNLAGQAYQNQDMQQAFFYLGLSLHYLGDVNQPMHAANFTELSYPWGFHSKYENFVDTIKNNYIVSDSNGYWNWKGANPEDWIEGAAVAAKQDYPGVVNDTTKDWFVKAAVSQEYADKWRAEVTPVTGKRLMEAQRVTAGYIHLWFDTYVNR

SEQ ID NO: 16239 - protein, 245 aa, Synthetic construct
WSAWDKHNEGINSHLWIVNRAIDIMSRNTTIVNPNETALLNEWRADLENGIYSADYENPYYDWSTYASHFYDPDTGTTYIPFAKHAKETGAKYFNLAGQAYQNQDMQQAFFYLGLSLHYLGDVNQPMHAANFTELSYPMGFHSKYENFVDTIKNNYIVSDSNGYWNWKGANPEDWIEGAAVAAKQDYPGVVNDTTKDWFVKAAVSQEYADKWRAEVTPVTGKRLMEAQRVTAGYIHLWFDTYVNR

SEQ ID NO: 16240 - protein, 245 aa, Synthetic construct
WSAWDKHNEGINSHLWIVNRAIDIMSRNTTIVNPNETALLNEWRADLENGIYSADYENPYYDYSTYASHFYDPDTGTTYIPFAKHAKETGAKYFNLAGQAYQNQDMQQAFFYLGLSLHYLGDVNQPMHAASFTNLSYPWGFHSKYENFVDTIKNNYIVSDSNGYWNWKGANPEDWIEGAAVAAKQDYPGVVNDTTKDWFVKAAVSQEYADKWRAEVTPVTGKRLMEAQRVTAGYIHLWFDTYVNR

SEQ ID NO: 16241 - protein, 245 aa, Synthetic construct
WSARDKHNEGINSHLWIVNRAIDIMSRNTTIVNPNETALLNEWRADLENGIYSADYENPYYDLSTYASHFYDPDTGTTYIPFAKHAKETGAKYFNLAGQAYQNQDMQQAFFYLGLSLHYLGDVNQPMHAASFTNLSYPWGFHSKYENFVDTIKNNYIVSDSNGYWNWKGANPEDWIEGAAVAAKQDYPGVVNDTTKDWFVKAAVSQEYADKWRAEVTPVTGKRLMEAQRVTAGYIHLWFDTYVNR

SEQ ID NO: 16242 - protein, 245 aa, Synthetic construct
WSAEDKHNEGINSHLWIVNRAIDIMSRNTTIVNPNETALLNEWRADLENGIYSADYENPYYDFSTYASHFYDPDTGTTYIPFAKHAKETGAKYFNLAGQAYQNQDMQQAFFYLGLSLHYLGDVNQPMHAASFTELSYPMGFHSKYENFVDTIKNNYIVSDSNGYWNWKGANPEDWIEGAAVAAKQDYPGVVNDTTKDWFVKAAVSQEYADKWRAEVTPVTGKRLMEAQRVTAGYIHLWFDTYVNR

SEQ ID NO: 16243 - protein, 245 aa, Synthetic construct
WSARDKHNEGINSHLWIVNRAIDIMSRNTTIVNPNETALLNEWRADLENGIYSADYENPYYDWSTYASHFYDPDTGTTYIPFAKHAKETGAKYFNLAGQAYQNQDMQQAFFYLGLSLHYLGDVNQPMHAASFTNLSYPMGFHSKYENFVDTIKNNYIVSDSNGYWNWKGANPEDWIEGAAVAAKQDYPGVVNDTTKDWFVKAAVSQEYADKWRAEVTPVTGKRLMEAQRVTAGYIHLWFDTYVNR

SEQ ID NO: 16244 - protein, 245 aa, Synthetic construct
WSAADKHNEGINSHLWIVNRAIDIMSRNTTIVNPNETALLNEWRADLENGIYSADYENPYYDLSTYASHFYDPDTGTTYIPFAKHAKETGAKYFNLAGQAYQNQDMQQAFFYLGLSLHYLGDVNQPMHAASFTNLSYPWGFHSKYENFVDTIKNNYIVSDSNGYWNWKGANPEDWIEGAAVAAKQDYPGVVNDTTKDWFVKAAVSQEYADKWRAEVTPVTGKRLMEAQRVTAGYIHLWFDTYVNR

SEQ ID NO: 16245 - protein, 245 aa, Synthetic construct
WSAWDKHNEGINSHLWIVNRAIDIMSRNTTIVNPNETALLNEWRADLENGIYSADYENPYYDWSTYASHFYDPDTGTTYIPFAKHAKETGAKYFNLAGQAYQNQDMQQAFFYLGLSLHYLGDVNQPMHAASFTNLSYPWGFHSKYENFVDTIKNNYIVSDSNGYWNWKGANPEDWIEGAAVAAKQDYPGVVNDTTKDWFVKAAVSQEYADKWRAEVTPVTGKRLMEAQRVTAGYIHLWFDTYVNR

SEQ ID NO: 16246 - protein, 245 aa, Synthetic construct
WSAFDKHNEGINSHLWIVNRAIDIMSRNTTIVNPNETALLNEWRADLENGIYSADYENPYYDFSTYASHFYDPDTGTTYIPFAKHAKETGAKYFNLAGQAYQNQDMQQAFFYLGLSLHYLGDVNQPMHAANFTELSYPMGFHSKYENFVDTIKNNYIVSDSNGYWNWKGANPEDWIEGAAVAAKQDYPGVVNDTTKDWFVKAAVSQEYADKWRAEVTPVTGKRLMEAQRVTAGYIHLWFDTYVNR

SEQ ID NO: 16247 - protein, 245 aa, Synthetic construct
WSAFDKHNEGINSHLWIVNRAIDIMSRNTTIVNPNETALLNEWRADLENGIYSADYENPYYDLSTYASHFYDPDTGTTYIPFAKHAKETGAKYFNLAGQAYQNQDMQQAFFYLGLSLHYLGDVNQPMHAASFTNLSYPWGFHSKYENFVDTIKNNYIVSDSNGYWNWKGANPEDWIEGAAVAAKQDYPGVVNDTTKDWFVKAAVSQEYADKWRAEVTPVTGKRLMEAQRVTAGYIHLWFDTYVNR

SEQ ID NO: 16248 - protein, 245 aa, Synthetic construct
WSAADKHNEGINSHLWIVNRAIDIMSRNTTIVNPNETALLNEWRADLENGIYSADYENPYYDFSTYASHFYDPDTGTTYIPFAKHAKETGAKYFNLAGQAYQNQDMQQAFFYLGLSLHYLGDVNQPMHAASFTNLSYPMGFHSKYENFVDTIKNNYIVSDSNGYWNWKGANPEDWIEGAAVAAKQDYPGVVNDTTKDWFVKAAVSQEYADKWRAEVTPVTGKRLMEAQRVTAGYIHLWFDTYVNR

SEQ ID NO: 16249 - protein, 245 aa, Synthetic construct
WSAEDKHNEGINSHLWIVNRAIDIMSRNTTIVNPNETALLNEWRADLENGIYSADYENPYYDDSTYASHFYDPDTGTTYIPFAKHAKETGAKYFNLAGQAYQNQDMQQAFFYLGLSLHYLGDVNQPMHAASFTDLSYPWGFHSKYENFVDTIKNNYIVSDSNGYWNWKGANPEDWIEGAAVAAKQDYPGVVNDTTKDWFVKAAVSQEYADKWRAEVTPVTGKRLMEAQRVTAGYIHLWFDTYVNR

SEQ ID NO: 16250 - protein, 245 aa, Synthetic construct
WSARDKHNEGINSHLWIVNRAIDIMSRNTTIVNPNETALLNEWRADLENGIYSADYENPYYDMSTYASHFYDPDTGTTYIPFAKHAKETGAKYFNLAGQAYQNQDMQQAFFYLGLSLHYLGDVNQPMHAASFTNLSYPMGFHSKYENFVDTIKNNYIVSDSNGYWNWKGANPEDWIEGAAVAAKQDYPGVVNDTTKDWFVKAAVSQEYADKWRAEVTPVTGKRLMEAQRVTAGYIHLWFDTYVNR

SEQ ID NO: 16251 - protein, 245 aa, Synthetic construct
WSARDKHNEGINSHLWIVNRAIDIMSRNTTIVNPNETALLNEWRADLENGIYSADYENPYYDFSTYASHFYDPDTGTTYIPFAKHAKETGAKYFNLAGQAYQNQDMQQAFFYLGLSLHYLGDVNQPMHAANFTELSYPMGFHSKYENFVDTIKNNYIVSDSNGYWNWKGANPEDWIEGAAVAAKQDYPGVVNDTTKDWFVKAAVSQEYADKWRAEVTPVTGKRLMEAQRVTAGYIHLWFDTYVNR

SEQ ID NO: 16252 - protein, 245 aa, Synthetic construct
WSAYDKHNEGINSHLWIVNRAIDIMSRNTTIVNPNETALLNEWRADLENGIYSADYENPYYDYSTYASHFYDPDTGTTYIPFAKHAKETGAKYFNLAGQAYQNQDMQQAFFYLGLSLHYLGDVNQPMHAASFTNLSYPMGFHSKYENFVDTIKNNYIVSDSNGYWNWKGANPEDWIEGAAVAAKQDYPGVVNDTTKDWFVKAAVSQEYADKWRAEVTPVTGKRLMEAQRVTAGYIHLWFDTYVNR

SEQ ID NO: 16253 - protein, 245 aa, Synthetic construct
WSAEDKHNEGINSHLWIVNRAIDIMSRNTTIVNPNETALLNEWRADLENGIYSADYENPYYDDSTYASHFYDPDRGTTYIPFAKHAKETGAKYFNLAGQAYQNQDMQQAFFYLGLSLHYLGDVNQPMHAASFTDLSYPMGFHSKYENFVDTIKNNYIVSDSNGYWNWKGANPEDWIEGAAVAAKQDYPGVVNDTTKDWFVKAAVSQEYADKWRAEVTPVTGKRLMEAQRVTAGYIHLWFDTYVNR

SEQ ID NO: 16254 - protein, 245 aa, Synthetic construct
WSARDKHNEGINSHLWIVNRAIDIMSRNTTIVNPNETALLNEWRADLENGIYSADYENPYYDWSTYASHFYDPDTGTTYIPFAKHAKETGAKYFNLAGQAYQNQDMQQAFFYLGLSLHYLGDVNQPMHAANFTELSYPMGFHSKYENFVDTIKNNYIVSDSNGYWNWKGANPEDWIEGAAVAAKQDYPGVVNDTTKDWFVKAAVSQEYADKWRAEVTPVTGKRLMEAQRVTAGYIHLWFDTYVNR

SEQ ID NO: 16255 - protein, 245 aa, Synthetic construct
WSAEDKHNEGINSHLWIVNRAIDIMSRNTTIVNPNETALLNEWRADLENGIYSADYENPYYDYSTYASHFYDPDTGTTYIPFAKHAKETGAKYFNLAGQAYQNQDMQQAFFYLGLSLHYLGDVNQPMHAASFTELSYPWGFHSKYENFVDTIKNNYIVSDSNGYWNWKGANPEDWIEGAAVAAKQDYPGVVNDTTKDWFVKAAVSQEYADKWRAEVTPVTGKRLMEAQRVTAGYIHLWFDTYVNR

SEQ ID NO: 16256 - protein, 245 aa, Synthetic construct
WSAWDKHNEGINSHLWIVNRAIDIMSRNTTIVNPNETALLNEWRADLENGIYSADYENPYYDYSTYASHFYDPDTGTTYIPFAKHAKETGAKYFNLAGQAYQNQDMQQAFFYLGLSLHYLGDVNQPMHAANFTELSYPWGFHSKYENFVDTIKNNYIVSDSNGYWNWKGANPEDWIEGAAVAAKQDYPGVVNDTTKDWFVKAAVSQEYADKWRAEVTPVTGKRLMEAQRVTAGYIHLWFDTYVNR

SEQ ID NO: 16257 - protein, 245 aa, Synthetic construct
WSAWDKHNEGINSHLWIVNRAIDIMSRNTTIVNPNETALLNEWRADLENGIYSADYENPYYDMSTYASHFYDPDTGTTYIPFAKHAKETGAKYFNLAGQAYQNQDMQQAFFYLGLSLHYLGDVNQPMHAASFTNLSYPMGFHSKYENFVDTIKNNYIVSDSNGYWNWKGANPEDWIEGAAVAAKQDYPGVVNDTTKDWFVKAAVSQEYADKWRAEVTPVTGKRLMEAQRVTAGYIHLWFDTYVNR

SEQ ID NO: 16258 - protein, 245 aa, Synthetic construct
WSAWDKHNEGINSHLWIVNRAIDIMSRNTTIVNPNETALLNEWRADLENGIYSADYENPYYDLSTYASHFYDPDTGTTYIPFAKHAKETGAKYFNLAGQAYQNQDMQQAFFYLGLSLHYLGDVNQPMHAANFTELSYPMGFHSKYENFVDTIKNNYIVSDSNGYWNWKGANPEDWIEGAAVAAKQDYPGVVNDTTKDWFVKAAVSQEYADKWRAEVTPVTGKRLMEAQRVTAGYIHLWFDTYVNR

SEQ ID NO: 16259 - protein, 245 aa, Synthetic construct
WSARDKHNEGINSHLWIVNRAIDIMSRNTTIVNPNETALLNEWRADLENGIYSADYENPYYDMSTYASHFYDPDTGTTYIPFAKHAKETGAKYFNLAGQAYQNQDMQQAFFYLGLSLHYLGDVNQPMHAANFTELSYPWGFHSKYENFVDTIKNNYIVSDSNGYWNWKGANPEDWIEGAAVAAKQDYPGVVNDTTKDWFVKAAVSQEYADKWRAEVTPVTGKRLMEAQRVTAGYIHLWFDTYVNR

SEQ ID NO: 16260 - protein, 245 aa, Synthetic construct
WSAWDKHNEGINSHLWIVNRAIDIMSRNTTIVNPNETALLNEWRADLENGIYSADYENPYYDMSTYASHFYDPDTGTTYIPFAKHAKETGAKYFNLAGQAYQNQDMQQAFFYLGLSLHYLGDVNQPMHAANFTELSYPWGFHSKYENFVDTIKNNYIVSDSNGYWNWKGANPEDWIEGAAVAAKQDYPGVVNDTTKDWFVKAAVSQEYADKWRAEVTPVTGKRLMEAQRVTAGYIHLWFDTYVNR

SEQ ID NO: 16261 - protein, 245 aa, Synthetic construct
WSARDKHNEGINSHLWIVNRAIDIMSRNTTIVNPNETALLNEWRADLENGIYSADYENPYYDFSTYASHFYDPDTGTTYIPFAKHAKETGAKYFNLAGQAYQNQDMQQAFFYLGLSLHYLGDVNQPMHAASFTNLSYPWGFHSKYENFVDTIKNNYIVSDSNGYWNWKGANPEDWIEGAAVAAKQDYPGVVNDTTKDWFVKAAVSQEYADKWRAEVTPVTGKRLMEAQRVTAGYIHLWFDTYVNR

SEQ ID NO: 16262 - protein, 245 aa, Synthetic construct
WSAYDKHNEGINSHLWIVNRAIDIMSRNTTIVNPNETALLNEWRADLENGIYSADYENPYYDNSTYASHFYDPDTGTTYIPFAKHAKETGAKYFNLAGQAYQNQDMQQAFFYLGLSLHYLGDVNQPMHAASFTELSYPWGFHSKYENFVDTIKNNYIVSDSNGYWNWKGANPEDWIEGAAVAAKQDYPGVVNDTTKDWFVKAAVSQEYADKWRAEVTPVTGKRLMEAQRVTAGYIHLWFDTYVNR

SEQ ID NO: 16263 - protein, 245 aa, Synthetic construct
WSAWDKHNEGINSHLWIVNRAIDIMSRNTTIVNPNETALLNEWRADLENGIYSADYENPYYDNSTYASHFYDPDTGTTYIPFAKHAKETGAKYFNLAGQAYQNQDMQQAFFYLGLSLHYLGDVNQPMHAASFTELSYPMGFHSKYENFVDTIKNNYIVSDSNGYWNWKGANPEDWIEGAAVAAKQDYPGVVNDTTKDWFVKAAVSQEYADKWRAEVTPVTGKRLMEAQRVTAGYIHLWFDTYVNR

SEQ ID NO: 16264 - protein, 245 aa, Synthetic construct
WSAWDKHNEGINSHLWIVNRAIDIMSRNTTIVNPNETALLNEWRADLENGIYSADYENPYYDMSTYASHFYDPDTGTTYIPFAKHAKETGAKYFNLAGQAYQNQDMQQAFFYLGLSLHYLGDVNQPMHAANFTELSYPMGFHSKYENFVDTIKNNYIVSDSNGYWNWKGANPEDWIEGAAVAAKQDYPGVVNDTTKDWFVKAAVSQEYADKWRAEVTPVTGKRLMEAQRVTAGYIHLWFDTYVNR

SEQ ID NO: 16265 - protein, 245 aa, Synthetic construct
WSAFDKHNEGINSHLWIVNRAIDIMSRNTTIVNPNETALLNEWRADLENGIYSADYENPYYDNSTYASHFYDPDTGTTYIPFAKHAKETGAKYFNLAGQAYQNQDMQQAFFYLGLSLHYLGDVNQPMHAASFTELSYPWGFHSKYENFVDTIKNNYIVSDSNGYWNWKGANPEDWIEGAAVAAKQDYPGVVNDTTKDWFVKAAVSQEYADKWRAEVTPVTGKRLMEAQRVTAGYIHLWFDTYVNR

SEQ ID NO: 16266 - protein, 245 aa, Synthetic construct
WSAEDKHNEGINSHLWIVNRAIDIMSRNTTIVNPNETALLNEWRADLENGIYSADYENPYYDFSTYASHFYDPDTGTTYIPFAKHAKETGAKYFNLAGQAYQNQDMQQAFFYLGLSLHYLGDVNQPMHAASFTDLSYPMGFHSKYENFVDTIKNNYIVSDSNGYWNWKGANPEDWIEGAAVAAKQDYPGVVNDTTKDWFVKAAVSQEYADKWRAEVTPVTGKRLMEAQRVTAGYIHLWFDTYVNR

SEQ ID NO: 16267 - protein, 245 aa, Synthetic construct
WSAFDKHNEGINSHLWIVNRAIDIMSRNTTIVNPNETALLNEWRADLENGIYSADYENPYYDLSTYASHFYDPDTGTTYIPFAKHAKETGAKYFNLAGQAYQNQDMQQAFFYLGLSLHYLGDVNQPMHAASFTNLSYPMGFHSKYENFVDTIKNNYIVSDSNGYWNWKGANPEDWIEGAAVAAKQDYPGVVNDTTKDWFVKAAVSQEYADKWRAEVTPVTGKRLMEAQRVTAGYIHLWFDTYVNR

SEQ ID NO: 16268 - protein, 245 aa, Synthetic construct
WSAEDKHNEGINSHLWIVNRAIDIMSRNTTIVNPNETALLNEWRADLENGIYSADYENPYYDMSTYASHFYDPDTGTTYIPFAKHAKETGAKYFNLAGQAYQNQDMQQAFFYLGLSLHYLGDVNQPMHAASFTELSYPMGFHSKYENFVDTIKNNYIVSDSNGYWNWKGANPEDWIEGAAVAAKQDYPGVVNDTTKDWFVKAAVSQEYADKWRAEVTPVTGKRLMEAQRVTAGYIHLWFDTYVNR

SEQ ID NO: 16269 - protein, 245 aa, Synthetic construct
WSAADKHNEGINSHLWIVNRAIDIMSRNTTIVNPNETALLNEWRADLENGIYSADYENPYYDFSTYASHFYDPDTGTTYIPFAKHAKETGAKYFNLAGQAYQNQDMQQAFFYLGLSLHYLGDVNQPMHAASFTNLSYPWGFHSKYENFVDTIKNNYIVSDSNGYWNWKGANPEDWIEGAAVAAKQDYPGVVNDTTKDWFVKAAVSQEYADKWRAEVTPVTGKRLMEAQRVTAGYIHLWFDTYVNR

SEQ ID NO: 16270 - protein, 245 aa, Synthetic construct
WSARDKHNEGINSHLWIVNRAIDIMSRNTTIVNPNETALLNEWRADLENGIYSADYENPYYDWSTYASHFYDPDTGTTYIPFAKHAKETGAKYFNLAGQAYQNQDMQQAFFYLGLSLHYLGDVNQPMHAASFTNLSYPWGFHSKYENFVDTIKNNYIVSDSNGYWNWKGANPEDWIEGAAVAAKQDYPGVVNDTTKDWFVKAAVSQEYADKWRAEVTPVTGKRLMEAQRVTAGYIHLWFDTYVNR

SEQ ID NO: 16271 - protein, 245 aa, Synthetic construct
WSAEDKHNEGINSHLWIVNRAIDIMSRNTTIVNPNETALLNEWRADLENGIYSADYENPYYDLSTYASHFYDPDTGTTYIPFAKHAKETGAKYFNLAGQAYQNQDMQQAFFYLGLSLHYLGDVNQPMHAASFTELSYPWGFHSKYENFVDTIKNNYIVSDSNGYWNWKGANPEDWIEGAAVAAKQDYPGVVNDTTKDWFVKAAVSQEYADKWRAEVTPVTGKRLMEAQRVTAGYIHLWFDTYVNR

SEQ ID NO: 16272 - protein, 245 aa, Synthetic construct
WSARDKHNEGINSHLWIVNRAIDIMSRNTTIVNPNETALLNEWRADLENGIYSADYENPYYDWSTYASHFYDPDTGTTYIPFAKHAKETGAKYFNLAGQAYQNQDMQQAFFYLGLSLHYLGDVNQPMHAANFTELSYPWGFHSKYENFVDTIKNNYIVSDSNGYWNWKGANPEDWIEGAAVAAKQDYPGVVNDTTKDWFVKAAVSQEYADKWRAEVTPVTGKRLMEAQRVTAGYIHLWFDTYVNR

SEQ ID NO: 16273 - protein, 245 aa, Synthetic construct
WSAFDKHNEGINSHLWIVNRAIDIMSRNTTIVNPNETALLNEWRADLENGIYSADYENPYYDLSTYASHFYDPDTGTTYIPFAKHAKETGAKYFNLAGQAYQNQDMQQAFFYLGLSLHYLGDVNQPMHAANFTELSYPMGFHSKYENFVDTIKNNYIVSDSNGYWNWKGANPEDWIEGAAVAAKQDYPGVVNDTTKDWFVKAAVSQEYADKWRAEVTPVTGKRLMEAQRVTAGYIHLWFDTYVNR

SEQ ID NO: 16274 - protein, 245 aa, Synthetic construct
WSARDKHNEGINSHLWIVNRAIDIMSRNTTIVNPNETALLNEWRADLENGIYSADYENPYYDWSTYASHFYDPDTGTTYIPFAKHAKETGAKYFNLAGQAYQNQDMQQAFFYLGLSLHYLGDVNQPMHAANFTELSYPSGFHSKYENFVDTIKNNYIVSDSNGYWNWKGANPEDWIEGAAVAAKQDYPGVVNDTTKDWFVKAAVSQEYADKWRAEVTPVTGKRLMEAQRVTAGYIHLWFDTYVNR

SEQ ID NO: 16275 - protein, 245 aa, Synthetic construct
WSARDKHNEGINSHLWIVNRAIDIMSRNTTIVNPNETALLNEWRADLENGIYSADYENPYYDLSTYASHFYDPDTGTTYIPFAKHAKETGAKYFNLAGQAYQNQDMQQAFFYLGLSLHYLGDVNQPMHAANFTELSYPWGFHSKYENFVDTIKNNYIVSDSNGYWNWKGANPEDWIEGAAVAAKQDYPGVVNDTTKDWFVKAAVSQEYADKWRAEVTPVTGKRLMEAQRVTAGYIHLWFDTYVNR

SEQ ID NO: 16276 - protein, 245 aa, Synthetic construct
WSAADKHNEGINSHLWIVNRAIDIMSRNTTIVNPNETALLNEWRADLENGIYSADYENPYYDMSTYASHFYDPDTGTTYIPFAKHAKETGAKYFNLAGQAYQNQDMQQAFFYLGLSLHYLGDVNQPMHAANFTELSYPMGFHSKYENFVDTIKNNYIVSDSNGYWNWKGANPEDWIEGAAVAAKQDYPGVVNDTTKDWFVKAAVSQEYADKWRAEVTPVTGKRLMEAQRVTAGYIHLWFDTYVNR

SEQ ID NO: 16277 - protein, 245 aa, Synthetic construct
WSAFDKHNEGINSHLWIVNRAIDIMSRNTTIVNPNETALLNEWRADLENGIYSADYENPYYDFSTYASHFYDPDTGTTYIPFAKHAKETGAKYFNLAGQAYQNQDMQQAFFYLGLSLHYLGDVNQPMHAASFTNLSYPMGFHSKYENFVDTIKNNYIVSDSNGYWNWKGANPEDWIEGAAVAAKQDYPGVVNDTTKDWFVKAAVSQEYADKWRAEVTPVTGKRLMEAQRVTAGYIHLWFDTYVNR

SEQ ID NO: 16278 - protein, 245 aa, Synthetic construct
WSAYDKHNEGINSHLWIVNRAIDIMSRNTTIVNPNETALLNEWRADLENGIYSADYENPYYDFSTYASHFYDPDTGTTYIPFAKHAKETGAKYFNLAGQAYQNQDMQQAFFYLGLSLHYLGDVNQPMHAASFTNLSYPWGFHSKYENFVDTIKNNYIVSDSNGYWNWKGANPEDWIEGAAVAAKQDYPGVVNDTTKDWFVKAAVSQEYADKWRAEVTPVTGKRLMEAQRVTAGYIHLWFDTYVNR

SEQ ID NO: 16279 - protein, 245 aa, Synthetic construct
WSAFDKHNEGINSHLWIVNRAIDIMSRNTTIVNPNETALLNEWRADLENGIYSADYENPYYDMSTYASHFYDPDTGTTYIPFAKHAKETGAKYFNLAGQAYQNQDMQQAFFYLGLSLHYLGDVNQPMHAANFTELSYPWGFHSKYENFVDTIKNNYIVSDSNGYWNWKGANPEDWIEGAAVAAKQDYPGVVNDTTKDWFVKAAVSQEYADKWRAEVTPVTGKRLMEAQRVTAGYIHLWFDTYVNR

SEQ ID NO: 16280 - protein, 245 aa, Synthetic construct
WSAWDKHNEGINSHLWIVNRAIDIMSRNTTIVNPNETALLNEWRADLENGIYSADYENPYYDFSTYASHFYDPDTGTTYIPFAKHAKETGAKYFNLAGQAYQNQDMQQAFFYLGLSLHYLGDVNQPMHAASFTNLSYPWGFHSKYENFVDTIKNNYIVSDSNGYWNWKGANPEDWIEGAAVAAKQDYPGVVNDTTKDWFVKAAVSQEYADKWRAEVTPVTGKRLMEAQRVTAGYIHLWFDTYVNR

SEQ ID NO: 16281 - protein, 245 aa, Synthetic construct
WSAFDKHNEGINSHLWIVNRAIDIMSRNTTIVNPNETALLNEWRADLENGIYSADYENPYYDWSTYASHFYDPDTGTTYIPFAKHAKETGAKYFNLAGQAYQNQDMQQAFFYLGLSLHYLGDVNQPMHAASFTNLSYPWGFHSKYENFVDTIKNNYIVSDSNGYWNWKGANPEDWIEGAAVAAKQDYPGVVNDTTKDWFVKAAVSQEYADKWRAEVTPVTGKRLMEAQRVTAGYIHLWFDTYVNR

SEQ ID NO: 16282 - protein, 245 aa, Synthetic construct
WSAADKHNEGINSHLWIVNRAIDIMSRNTTIVNPNETALLNEWRADLENGIYSADYENPYYDLSTYASHFYDPDTGTTYIPFAKHAKETGAKYFNLAGQAYQNQDMQQAFFYLGLSLHYLGDVNQPMHAASFTNLSYPMGFHSKYENFVDTIKNNYIVSDSNGYWNWKGANPEDWIEGAAVAAKQDYPGVVNDTTKDWFVKAAVSQEYADKWRAEVTPVTGKRLMEAQRVTAGYIHLWFDTYVNR

SEQ ID NO: 16283 - protein, 245 aa, Synthetic construct
WSAWDKHNEGINSHLWIVNRAIDIMSRNTTIVNPNETALLNEWRADLENGIYSADYENPYYDWSTYASHFYDPDTGTTYIPFAKHAKETGAKYFNLAGQAYQNQDMQQAFFYLGLSLHYLGDVNQPMHAANFTELSYPWGFHSKYENFVDTIKNNYIVSDSNGYWNWKGANPEDWIEGAAVAAKQDYPGVVNDTTKDWFVKAAVSQEYADKWRAEVTPVTGKRLMEAQRVTAGYIHLWFDTYVNR

SEQ ID NO: 16284 - protein, 245 aa, Synthetic construct
WSAYDKHNEGINSHLWIVNRAIDIMSRNTTIVNPNETALLNEWRADLENGIYSADYENPYYDMSTYASHFYDPDTGTTYIPFAKHAKETGAKYFNLAGQAYQNQDMQQAFFYLGLSLHYLGDVNQPMHAANFTELSYPMGFHSKYENFVDTIKNNYIVSDSNGYWNWKGANPEDWIEGAAVAAKQDYPGVVNDTTKDWFVKAAVSQEYADKWRAEVTPVTGKRLMEAQRVTAGYIHLWFDTYVNR

SEQ ID NO: 16285 - protein, 245 aa, Synthetic construct
WSAFDKHNEGINSHLWIVNRAIDIMSRNTTIVNPNETALLNEWRADLENGIYSADYENPYYDMSTYASHFYDPDTGTTYIPFAKHAKETGAKYFNLAGQAYQNQDMQQAFFYLGLSLHYLGDVNQPMHAASFTNLSYPWGFHSKYENFVDTIKNNYIVSDSNGYWNWKGANPEDWIEGAAVAAKQDYPGVVNDTTKDWFVKAAVSQEYADKWRAEVTPVTGKRLMEAQRVTAGYIHLWFDTYVNR

SEQ ID NO: 16286 - protein, 245 aa, Synthetic construct
WSAYDKHNEGINSHLWIVNRAIDIMSRNTTIVNPNETALLNEWRADLENGIYSADYENPYYDWSTYASHFYDPDTGTTYIPFAKHAKETGAKYFNLAGQAYQNQDMQQAFFYLGLSLHYLGDVNQPMHAANFTELSYPWGFHSKYENFVDTIKNNYIVSDSNGYWNWKGANPEDWIEGAAVAAKQDYPGVVNDTTKDWFVKAAVSQEYADKWRAEVTPVTGKRLMEAQRVTAGYIHLWFDTYVNR

SEQ ID NO: 16287 - protein, 245 aa, Synthetic construct
WSAADKHNEGINSHLWIVNRAIDIMSRNTTIVNPNETALLNEWRADLENGIYSADYENPYYDWSTYASHFYDPDTGTTYIPFAKHAKETGAKYFNLAGQAYQNQDMQQAFFYLGLSLHYLGDVNQPMHAASFTNLSYPMGFHSKYENFVDTIKNNYIVSDSNGYWNWKGANPEDWIEGAAVAAKQDYPGVVNDTTKDWFVKAAVSQEYADKWRAEVTPVTGKRLMEAQRVTAGYIHLWFDTYVNR

SEQ ID NO: 16288 - protein, 245 aa, Synthetic construct
WSAFDKHNEGINSHLWIVNRAIDIMSRNTTIVNPNETALLNEWRADLENGIYSADYENPYYDWSTYASHFYDPDTGTTYIPFAKHAKETGAKYFNLAGQAYQNQDMQQAFFYLGLSLHYLGDVNQPMHAASFTNLSYPMGFHSKYENFVDTIKNNYIVSDSNGYWNWKGANPEDWIEGAAVAAKQDYPGVVNDTTKDWFVKAAVSQEYADKWRAEVTPVTGKRLMEAQRVTAGYIHLWFDTYVNR

SEQ ID NO: 16289 - protein, 245 aa, Synthetic construct
WSAWDKHNEGINSHLWIVNRAIDIMSRNTTIVNPNETALLNEWRADLENGIYSADYENPYYDLSTYASHFYDPDTGTTYIPFAKHAKETGAKYFNLAGQAYQNQDMQQAFFYLGLSLHYLGDVNQPMHAASFTNLSYPWGFHSKYENFVDTIKNNYIVSDSNGYWNWKGANPEDWIEGAAVAAKQDYPGVVNDTTKDWFVKAAVSQEYADKWRAEVTPVTGKRLMEAQRVTAGYIHLWFDTYVNR

SEQ ID NO: 16290 - protein, 245 aa, Synthetic construct
WSAYDKHNEGINSHLWIVNRAIDIMSRNTTIVNPNETALLNEWRADLENGIYSADYENPYYDYSTYASHFYDPDTGTTYIPFAKHAKETGAKYFNLAGQAYQNQDMQQAFFYLGLSLHYLGDVNQPMHAANFTELSYPMGFHSKYENFVDTIKNNYIVSDSNGYWNWKGANPEDWIEGAAVAAKQDYPGVVNDTTKDWFVKAAVSQEYADKWRAEVTPVTGKRLMEAQRVTAGYIHLWFDTYVNR

SEQ ID NO: 16291 - protein, 245 aa, Synthetic construct
WSAWDKHNEGINSHLWIVNRAIDIMSRNTTIVNPNETALLNEWRADLENGIYSADYENPYYDNSTYASHFYDPDTGTTYIPFAKHAKETGAKYFNLAGQAYQNQDMQQAFFYLGLSLHYLGDVNQPMHAASFTELSYPWGFHSKYENFVDTIKNNYIVSDSNGYWNWKGANPEDWIEGAAVAAKQDYPGVVNDTTKDWFVKAAVSQEYADKWRAEVTPVTGKRLMEAQRVTAGYIHLWFDTYVNR

SEQ ID NO: 16292 - protein, 245 aa, Synthetic construct
WSAWDKHNEGINSHLWIVNRAIDIMSRNTTIVNPNETALLNEWRADLENGIYSADYENPYYDWSTYASHFYDPDTGTTYIPFAKHAKETGAKYFNLAGQAYQNQDMQQAFFYLGLSLHYLGDVNQPMHAASFTNLSYPMGFHSKYENFVDTIKNNYIVSDSNGYWNWKGANPEDWIEGAAVAAKQDYPGVVNDTTKDWFVKAAVSQEYADKWRAEVTPVTGKRLMEAQRVTAGYIHLWFDTYVNR

SEQ ID NO: 16293 - protein, 245 aa, Synthetic construct
WSARDKHNEGINSHLWIVNRAIDIMSRNTTIVNPNETALLNEWRADLENGIYSADYENPYYDMSTYASHFYDPDTGTTYIPFAKHAKETGAKYFNLAGQAYQNQDMQQAFFYLGLSLHYLGDVNQPMHAASFTNLSYPWGFHSKYENFVDTIKNNYIVSDSNGYWNWKGANPEDWIEGAAVAAKQDYPGVVNDTTKDWFVKAAVSQEYADKWRAEVTPVTGKRLMEAQRVTAGYIHLWFDTYVNR

SEQ ID NO: 16294 - protein, 245 aa, Synthetic construct
WSAWDKHNEGINSHLWIVNRAIDIMSRNTTIVNPNETALLNEWRADLENGIYSADYENPYYDLSTYASHFYDPDTGTTYIPFAKHAKETGAKYFNLAGQAYQNQDMQQAFFYLGLSLHYLGDVNQPMHAANFTELSYPWGFHSKYENFVDTIKNNYIVSDSNGYWNWKGANPEDWIEGAAVAAKQDYPGVVNDTTKDWFVKAAVSQEYADKWRAEVTPVTGKRLMEAQRVTAGYIHLWFDTYVNR

SEQ ID NO: 16295 - protein, 245 aa, Synthetic construct
WSARDKHNEGINSHLWIVNRAIDIMSRNTTIVNPNETALLNEWRADLENGIYSADYENPYYDFSTYASHFYDPDTGTTYIPFAKHAKETGAKYFNLAGQAYQNQDMQQAFFYLGLSLHYLGDVNQPMHAASFTNLSYPMGFHSKYENFVDTIKNNYIVSDSNGYWNWKGANPEDWIEGAAVAAKQDYPGVVNDTTKDWFVKAAVSQEYADKWRAEVTPVTGKRLMEAQRVTAGYIHLWFDTYVNR

SEQ ID NO: 16296 - protein, 245 aa, Synthetic construct
WSARDKHNEGINSHLWIVNRAIDIMSRNTTIVNPNETALLNEWRADLENGIYSADYENPYYDYSTYASHFYDPDTGTTYIPFAKHAKETGAKYFNLAGQAYQNQDMQQAFFYLGLSLHYLGDVNQPMHAANFTELSYPWGFHSKYENFVDTIKNNYIVSDSNGYWNWKGANPEDWIEGAAVAAKQDYPGVVNDTTKDWFVKAAVSQEYADKWRAEVTPVTGKRLMEAQRVTAGYIHLWFDTYVNR

SEQ ID NO: 16297 - protein, 245 aa, Synthetic construct
WSAADKHNEGINSHLWIVNRAIDIMSRNTTIVNPNETALLNEWRADLENGIYSADYENPYYDWSTYASHFYDPDTGTTYIPFAKHAKETGAKYFNLAGQAYQNQDMQQAFFYLGLSLHYLGDVNQPMHAASFTNLSYPWGFHSKYENFVDTIKNNYIVSDSNGYWNWKGANPEDWIEGAAVAAKQDYPGVVNDTTKDWFVKAAVSQEYADKWRAEVTPVTGKRLMEAQRVTAGYIHLWFDTYVNR

SEQ ID NO: 16298 - protein, 245 aa, Synthetic construct
WSAYDKHNEGINSHLWIVNRAIDIMSRNTTIVNPNETALLNEWRADLENGIYSADYENPYYDLSTYASHFYDPDTGTTYIPFAKHAKETGAKYFNLAGQAYQNQDMQQAFFYLGLSLHYLGDVNQPMHAANFTELSYPWGFHSKYENFVDTIKNNYIVSDSNGYWNWKGANPEDWIEGAAVAAKQDYPGVVNDTTKDWFVKAAVSQEYADKWRAEVTPVTGKRLMEAQRVTAGYIHLWFDTYVNR

SEQ ID NO: 16299 - protein, 245 aa, Synthetic construct
WSAWDKHNEGINSHLWIVNRAIDIMSRNTTIVNPNETALLNEWRADLENGIYSADYENPYYDLSTYASHFYDPDTGTTYIPFAKHAKETGAKYFNLAGQAYQNQDMQQAFFYLGLSLHYLGDVNQPMHAASFTNLSYPMGFHSKYENFVDTIKNNYIVSDSNGYWNWKGANPEDWIEGAAVAAKQDYPGVVNDTTKDWFVKAAVSQEYADKWRAEVTPVTGKRLMEAQRVTAGYIHLWFDTYVNR

SEQ ID NO: 16300 - protein, 245 aa, Synthetic construct
WSAYDKHNEGINSHLWIVNRAIDIMSRNTTIVNPNETALLNEWRADLENGIYSADYENPYYDWSTYASHFYDPDTGTTYIPFAKHAKETGAKYFNLAGQAYQNQDMQQAFFYLGLSLHYLGDVNQPMHAANFTELSYPMGFHSKYENFVDTIKNNYIVSDSNGYWNWKGANPEDWIEGAAVAAKQDYPGVVNDTTKDWFVKAAVSQEYADKWRAEVTPVTGKRLMEAQRVTAGYIHLWFDTYVNR

SEQ ID NO: 16301 - protein, 245 aa, Synthetic construct
WSAWDKHNEGINSHLWIVNRAIDIMSRNTTIVNPNETALLNEWRADLENGIYSADYENPYYDYSTYASHFYDPDTGTTYIPFAKHAKETGAKYFNLAGQAYQNQDMQQAFFYLGLSLHYLGDVNQPMHAANFTELSYPMGFHSKYENFVDTIKNNYIVSDSNGYWNWKGANPEDWIEGAAVAAKQDYPGVVNDTTKDWFVKAAVSQEYADKWRAEVTPVTGKRLMEAQRVTAGYIHLWFDTYVNR

SEQ ID NO: 16302 - protein, 245 aa, Synthetic construct
WSAEDKHNEGINSHLWIVNRAIDIMSRNTTIVNPNETALLNEWRADLENGIYSADYENPYYDMSTYASHFYDPDTGTTYIPFAKHAKETGAKYFNLAGQAYQNQDMQQAFFYLGLSLHYLGDVNQPMHAASFTDLSYPMGFHSKYENFVDTIKNNYIVSDSNGYWNWKGANPEDWIEGAAVAAKQDYPGVVNDTTKDWFVKAAVSQEYADKWRAEVTPVTGKRLMEAQRVTAGYIHLWFDTYVNR

SEQ ID NO: 16303 - protein, 245 aa, Synthetic construct
WSAADKHNEGINSHLWIVNRAIDIMSRNTTIVNPNETALLNEWRADLENGIYSADYENPYYDNSTYASHFYDPDTGTTYIPFAKHAKETGAKYFNLAGQAYQNQDMQQAFFYLGLSLHYLGDVNQPMHAASFTELSYPWGFHSKYENFVDTIKNNYIVSDSNGYWNWKGANPEDWIEGAAVAAKQDYPGVVNDTTKDWFVKAAVSQEYADKWRAEVTPVTGKRLMEAQRVTAGYIHLWFDTYVNR

SEQ ID NO: 16304 - protein, 245 aa, Synthetic construct
WSAWDKHNEGINSHLWIVNRAIDIMSRNTTIVNPNETALLNEWRADLENGIYSADYENPYYDMSTYASHFYDPDTGTTYIPFAKHAKETGAKYFNLAGQAYQNQDMQQAFFYLGLSLHYLGDVNQPMHAASFTNLSYPWGFHSKYENFVDTIKNNYIVSDSNGYWNWKGANPEDWIEGAAVAAKQDYPGVVNDTTKDWFVKAAVSQEYADKWRAEVTPVTGKRLMEAQRVTAGYIHLWFDTYVNR

SEQ ID NO: 16305 - protein, 245 aa, Synthetic construct
WSAADKHNEGINSHLWIVNRAIDIMSRNTTIVNPNETALLNEWRADLENGIYSADYENPYYDMSTYASHFYDPDTGTTYIPFAKHAKETGAKYFNLAGQAYQNQDMQQAFFYLGLSLHYLGDVNQPMHAASFTNLSYPMGFHSKYENFVDTIKNNYIVSDSNGYWNWKGANPEDWIEGAAVAAKQDYPGVVNDTTKDWFVKAAVSQEYADKWRAEVTPVTGKRLMEAQRVTAGYIHLWFDTYVNR

SEQ ID NO: 16306 - protein, 245 aa, Synthetic construct
WSARDKHNEGINSHLWIVNRAIDIMSRNTTIVNPNETALLNEWRADLENGIYSADYENPYYDFSTYASHFYDPDTGTTYIPFAKHAKETGAKYFNLAGQAYQNQDMQQAFFYLGLSLHYLGDVNQPMHAANFTELSYPWGFHSKYENFVDTIKNNYIVSDSNGYWNWKGANPEDWIEGAAVAAKQDYPGVVNDTTKDWFVKAAVSQEYADKWRAEVTPVTGKRLMEAQRVTAGYIHLWFDTYVNR

SEQ ID NO: 16307 - protein, 245 aa, Synthetic construct
WSAYDKHNEGINSHLWIVNRAIDIMSRNTTIVNPNETALLNEWRADLENGIYSADYENPYYDNSTYASHFYDPDTGTTYIPFAKHAKETGAKYFNLAGQAYQNQDMQQAFFYLGLSLHYLGDVNQPMHAASFTELSYPMGFHSKYENFVDTIKNNYIVSDSNGYWNWKGANPEDWIEGAAVAAKQDYPGVVNDTTKDWFVKAAVSQEYADKWRAEVTPVTGKRLMEAQRVTAGYIHLWFDTYVNR

SEQ ID NO: 16308 - protein, 245 aa, Synthetic construct
WSARDKHNEGINSHLWIVNRAIDIMSRNTTIVNPNETALLNEWRADLENGIYSADYENPYYDMSTYASHFYDPDTGTTYIPFAKHAKETGAKYFNLAGQAYQNQDMQQAFFYLGLSLHYLGDVNQPMHAANFTELSYPMGFHSKYENFVDTIKNNYIVSDSNGYWNWKGANPEDWIEGAAVAAKQDYPGVVNDTTKDWFVKAAVSQEYADKWRAEVTPVTGKRLMEAQRVTAGYIHLWFDTYVNR

SEQ ID NO: 16309 - protein, 245 aa, Synthetic construct
WSAFDKHNEGINSHLWIVNRAIDIMSRNTTIVNPNETALLNEWRADLENGIYSADYENPYYDMSTYASHFYDPDTGTTYIPFAKHAKETGAKYFNLAGQAYQNQDMQQAFFYLGLSLHYLGDVNQPMHAASFTNLSYPMGFHSKYENFVDTIKNNYIVSDSNGYWNWKGANPEDWIEGAAVAAKQDYPGVVNDTTKDWFVKAAVSQEYADKWRAEVTPVTGKRLMEAQRVTAGYIHLWFDTYVNR

SEQ ID NO: 16310 - protein, 245 aa, Synthetic construct
WSAEDKHNEGINSHLWIVNRAIDIMSRNTTIVNPNETALLNEWRADLENGIYSADYENPYYDDSTYASHFYDPDTGTTYWPFAKHAKETGAKYFNLAGQAYQNQDMQQAFFYLGLSLHYLGDVNQPMHAASFTDLSYPMGFHSKYENFVDTIKNNYIVSDSNGYWNWKGANPEDWIEGAAVAAKQDYPGVVNDTTKDWFVKAAVSQEYADKWRAEVTPVTGKRLMEAQRVTAGYIHLWFDTYVNR

SEQ ID NO: 16311 - protein, 245 aa, Synthetic construct
WSAADKHNEGINSHLWIVNRAIDIMSRNTTIVNPNETALLNEWRADLENGIYSADYENPYYDLSTYASHFYDPDTGTTYIPFAKHAKETGAKYFNLAGQAYQNQDMQQAFFYLGLSLHYLGDVNQPMHAASFTELSYPMGFHSKYENFVDTIKNNYIVSDSNGYWNWKGANPEDWIEGAAVAAKQDYPGVVNDTTKDWFVKAAVSQEYADKWRAEVTPVTGKRLMEAQRVTAGYIHLWFDTYVNR

SEQ ID NO: 16312 - protein, 245 aa, Synthetic construct
WSAFDKHNEGINSHLWIVNRAIDIMSRNTTIVNPNETALLNEWRADLENGIYSADYENPYYDWSTYASHFYDPDTGTTYIPFAKHAKETGAKYFNLAGQAYQNQDMQQAFFYLGLSLHYLGDVNQPMHAASFTELSYPMGFHSKYENFVDTIKNNYIVSDSNGYWNWKGANPEDWIEGAAVAAKQDYPGVVNDTTKDWFVKAAVSQEYADKWRAEVTPVTGKRLMEAQRVTAGYIHLWFDTYVNR

SEQ ID NO: 16313 - protein, 245 aa, Synthetic construct
WSAFDKHNEGINSHLWIVNRAIDIMSRNTTIVNPNETALLNEWRADLENGIYSADYENPYYDLSTYASHFYDPDTGTTYIPFAKHAKETGAKYFNLAGQAYQNQDMQQAFFYLGLSLHYLGDVNQPMHAASFTELSYPWGFHSKYENFVDTIKNNYIVSDSNGYWNWKGANPEDWIEGAAVAAKQDYPGVVNDTTKDWFVKAAVSQEYADKWRAEVTPVTGKRLMEAQRVTAGYIHLWFDTYVNR

SEQ ID NO: 16314 - protein, 245 aa, Synthetic construct
WSAYDKHNEGINSHLWIVNRAIDIMSRNTTIVNPNETALLNEWRADLENGIYSADYENPYYDFSTYASHFYDPDTGTTYIPFAKHAKETGAKYFNLAGQAYQNQDMQQAFFYLGLSLHYLGDVNQPMHAASFTELSYPWGFHSKYENFVDTIKNNYIVSDSNGYWNWKGANPEDWIEGAAVAAKQDYPGVVNDTTKDWFVKAAVSQEYADKWRAEVTPVTGKRLMEAQRVTAGYIHLWFDTYVNR

SEQ ID NO: 16315 - protein, 245 aa, Synthetic construct
WSAFDKHNEGINSHLWIVNRAIDIMSRNTTIVNPNETALLNEWRADLENGIYSADYENPYYDMSTYASHFYDPDTGTTYIPFAKHAKETGAKYFNLAGQAYQNQDMQQAFFYLGLSLHYLGDVNQPMHAASFTELSYPMGFHSKYENFVDTIKNNYIVSDSNGYWNWKGANPEDWIEGAAVAAKQDYPGVVNDTTKDWFVKAAVSQEYADKWRAEVTPVTGKRLMEAQRVTAGYIHLWFDTYVNR

SEQ ID NO: 16316 - protein, 245 aa, Synthetic construct
WSAADKHNEGINSHLWIVNRAIDIMSRNTTIVNPNETALLNEWRADLENGIYSADYENPYYDYSTYASHFYDPDTGTTYIPFAKHAKETGAKYFNLAGQAYQNQDMQQAFFYLGLSLHYLGDVNQPMHAASFTELSYPMGFHSKYENFVDTIKNNYIVSDSNGYWNWKGANPEDWIEGAAVAAKQDYPGVVNDTTKDWFVKAAVSQEYADKWRAEVTPVTGKRLMEAQRVTAGYIHLWFDTYVNR

SEQ ID NO: 16317 - protein, 245 aa, Synthetic construct
WSAYDKHNEGINSHLWIVNRAIDIMSRNTTIVNPNETALLNEWRADLENGIYSADYENPYYDDSTYASHFYDPDTGTTYIPFAKHAKETGAKYFNLAGQAYQNQDMQQAFFYLGLSLHYLGDVNQPMHAASFTDLSYPMGFHSKYENFVDTIKNNYIVSDSNGYWNWKGANPEDWIEGAAVAAKQDYPGVVNDTTKDWFVKAAVSQEYADKWRAEVTPVTGKRLMEAQRVTAGYIHLWFDTYVNR

SEQ ID NO: 16318 - protein, 245 aa, Synthetic construct
WSAEDKHNEGINSHLWIVNRAIDIMSRNTTIVNPNETALLNEWRADLENGIYSADYENPYYDDSTYASHFYDPDTGTTYIPFAKHAKETGAKYFNLAGQAYQNQDMQQAFFYLGLSLHYLGDVNQPMHAASFTDLSYPMGFHSKYENFVDTIKNNYIVSDSNGYWNWKGANPEDWIEGAAVAAKQDYPGVVNDTTKKWFVKAAVSQEYADKWRAEVTPVTGKRLMEAQRVTAGYIHLWFDTYVNR

SEQ ID NO: 16319 - protein, 245 aa, Synthetic construct
WSAWDKHNEGINSHLWIVNRAIDIMSRNTTIVNPNETALLNEWRADLENGIYSADYENPYYDYSTYASHFYDPDTGTTYIPFAKHAKETGAKYFNLAGQAYQNQDMQQAFFYLGLSLHYLGDVNQPMHAASFTELSYPWGFHSKYENFVDTIKNNYIVSDSNGYWNWKGANPEDWIEGAAVAAKQDYPGVVNDTTKDWFVKAAVSQEYADKWRAEVTPVTGKRLMEAQRVTAGYIHLWFDTYVNR

SEQ ID NO: 16320 - protein, 245 aa, Synthetic construct
WSAADKHNEGINSHLWIVNRAIDIMSRNTTIVNPNETALLNEWRADLENGIYSADYENPYYDWSTYASHFYDPDTGTTYIPFAKHAKETGAKYFNLAGQAYQNQDMQQAFFYLGLSLHYLGDVNQPMHAASFTELSYPWGFHSKYENFVDTIKNNYIVSDSNGYWNWKGANPEDWIEGAAVAAKQDYPGVVNDTTKDWFVKAAVSQEYADKWRAEVTPVTGKRLMEAQRVTAGYIHLWFDTYVNR

SEQ ID NO: 16321 - protein, 248 aa, Synthetic construct
WSAANKNDKHNEGINSHLWIVNRAIDIMSRNTTIVNPNETALLNEWRADLENGIYSADYENPYYDDSTYASHFYDPDTGTTYIPFAKHAKETGAKYFNLAGQAYQNQDMQQAFFYLGLSLHYLGDVNQPMHAASFTDLSYPMGFHSKYENFVDTIKNNYIVSDSNGYWNWKGANPEDWIEGAAVAAKQDYPGVVNDTTKDWFVKAAVSQEYADKWRAEVTPVTGKRLMEAQRVTAGYIHLWFDTYVNR

SEQ ID NO: 16322 - protein, 245 aa, Synthetic construct
WSAYDKHNEGINSHLWIVNRAIDIMSRNTTIVNPNETALLNEWRADLENGIYSADYENPYYDLSTYASHFYDPDTGTTYIPFAKHAKETGAKYFNLAGQAYQNQDMQQAFFYLGLSLHYLGDVNQPMHAASFTELSYPMGFHSKYENFVDTIKNNYIVSDSNGYWNWKGANPEDWIEGAAVAAKQDYPGVVNDTTKDWFVKAAVSQEYADKWRAEVTPVTGKRLMEAQRVTAGYIHLWFDTYVNR

SEQ ID NO: 16323 - protein, 245 aa, Synthetic construct
WSAYDKHNEGINSHLWIVNRAIDIMSRNTTIVNPNETALLNEWRADLENGIYSADYENPYYDFSTYASHFYDPDTGTTYIPFAKHAKETGAKYFNLAGQAYQNQDMQQAFFYLGLSLHYLGDVNQPMHAASFTELSYPMGFHSKYENFVDTIKNNYIVSDSNGYWNWKGANPEDWIEGAAVAAKQDYPGVVNDTTKDWFVKAAVSQEYADKWRAEVTPVTGKRLMEAQRVTAGYIHLWFDTYVNR

SEQ ID NO: 16324 - protein, 245 aa, Synthetic construct
WSAFDKHNEGINSHLWIVNRAIDIMSRNTTIVNPNETALLNEWRADLENGIYSADYENPYYDYSTYASHFYDPDTGTTYIPFAKHAKETGAKYFNLAGQAYQNQDMQQAFFYLGLSLHYLGDVNQPMHAASFTELSYPWGFHSKYENFVDTIKNNYIVSDSNGYWNWKGANPEDWIEGAAVAAKQDYPGVVNDTTKDWFVKAAVSQEYADKWRAEVTPVTGKRLMEAQRVTAGYIHLWFDTYVNR

SEQ ID NO: 16325 - protein, 245 aa, Synthetic construct
WSAEDKHNEGINSHLWIVNRAIDIMSRNTTIVNPNETALLNEWRADLENGIYSADYENPYYDDSTYASHFYDPDTGTTWIPFAKHAKETGAKYFNLAGQAYQNQDMQQAFFYLGLSLHYLGDVNQPMHAASFTDLSYPMGFHSKYENFVDTIKNNYIVSDSNGYWNWKGANPEDWIEGAAVAAKQDYPGVVNDTTKDWFVKAAVSQEYADKWRAEVTPVTGKRLMEAQRVTAGYIHLWFDTYVNR

SEQ ID NO: 16326 - protein, 245 aa, Synthetic construct
WSAFDKHNEGINSHLWIVNRAIDIMSRNTTIVNPNETALLNEWRADLENGIYSADYENPYYDFSTYASHFYDPDTGTTYIPFAKHAKETGAKYFNLAGQAYQNQDMQQAFFYLGLSLHYLGDVNQPMHAASFTELSYPMGFHSKYENFVDTIKNNYIVSDSNGYWNWKGANPEDWIEGAAVAAKQDYPGVVNDTTKDWFVKAAVSQEYADKWRAEVTPVTGKRLMEAQRVTAGYIHLWFDTYVNR

SEQ ID NO: 16327 - protein, 245 aa, Synthetic construct
WSAYDKHNEGINSHLWIVNRAIDIMSRNTTIVNPNETALLNEWRADLENGIYSADYENPYYDMSTYASHFYDPDTGTTYIPFAKHAKETGAKYFNLAGQAYQNQDMQQAFFYLGLSLHYLGDVNQPMHAASFTELSYPWGFHSKYENFVDTIKNNYIVSDSNGYWNWKGANPEDWIEGAAVAAKQDYPGVVNDTTKDWFVKAAVSQEYADKWRAEVTPVTGKRLMEAQRVTAGYIHLWFDTYVNR

SEQ ID NO: 16328 - protein, 245 aa, Synthetic construct
WSARDKHNEGINSHLWIVNRAIDIMSRNTTIVNPNETALLNEWRADLENGIYSADYENPYYDLSTYASHFYDPDTGTTYIPFAKHAKETGAKYFNLAGQAYQNQDMQQAFFYLGLSLHYLGDVNQPMHAASFTELSYPWGFHSKYENFVDTIKNNYIVSDSNGYWNWKGANPEDWIEGAAVAAKQDYPGVVNDTTKDWFVKAAVSQEYADKWRAEVTPVTGKRLMEAQRVTAGYIHLWFDTYVNR

SEQ ID NO: 16329 - protein, 245 aa, Synthetic construct
WSAFDKHNEGINSHLWIVNRAIDIMSRNTTIVNPNETALLNEWRADLENGIYSADYENPYYDDSTYASHFYDPDTGTTYIPFAKHAKETGAKYFNLAGQAYQNQDMQQAFFYLGLSLHYLGDVNQPMHAASFTDLSYPMGFHSKYENFVDTIKNNYIVSDSNGYWNWKGANPEDWIEGAAVAAKQDYPGVVNDTTKDWFVKAAVSQEYADKWRAEVTPVTGKRLMEAQRVTAGYIHLWFDTYVNR

SEQ ID NO: 16330 - protein, 245 aa, Synthetic construct
WSAFDKHNEGINSHLWIVNRAIDIMSRNTTIVNPNETALLNEWRADLENGIYSADYENPYYDFSTYASHFYDPDTGTTYIPFAKHAKETGAKYFNLAGQAYQNQDMQQAFFYLGLSLHYLGDVNQPMHAASFTELSYPWGFHSKYENFVDTIKNNYIVSDSNGYWNWKGANPEDWIEGAAVAAKQDYPGVVNDTTKDWFVKAAVSQEYADKWRAEVTPVTGKRLMEAQRVTAGYIHLWFDTYVNR

SEQ ID NO: 16331 - protein, 245 aa, Synthetic construct
WSARDKHNEGINSHLWIVNRAIDIMSRNTTIVNPNETALLNEWRADLENGIYSADYENPYYDLSTYASHFYDPDTGTTYIPFAKHAKETGAKYFNLAGQAYQNQDMQQAFFYLGLSLHYLGDVNQPMHAASFTELSYPMGFHSKYENFVDTIKNNYIVSDSNGYWNWKGANPEDWIEGAAVAAKQDYPGVVNDTTKDWFVKAAVSQEYADKWRAEVTPVTGKRLMEAQRVTAGYIHLWFDTYVNR

SEQ ID NO: 16332 - protein, 245 aa, Synthetic construct
WSAWDKHNEGINSHLWIVNRAIDIMSRNTTIVNPNETALLNEWRADLENGIYSADYENPYYDLSTYASHFYDPDTGTTYIPFAKHAKETGAKYFNLAGQAYQNQDMQQAFFYLGLSLHYLGDVNQPMHAASFTELSYPMGFHSKYENFVDTIKNNYIVSDSNGYWNWKGANPEDWIEGAAVAAKQDYPGVVNDTTKDWFVKAAVSQEYADKWRAEVTPVTGKRLMEAQRVTAGYIHLWFDTYVNR

SEQ ID NO: 16333 - protein, 245 aa, Synthetic construct
WSAEDKHNEGINSHLWIVNRAIDIMSRNTTIVNPNETALLNEWRADLENGIYSADYENPYYDDSTYASHFYDPDTGTTYIPFAKHAKETGAKYFNLAGQAYQNQDMQQAFFYLGLSLHYLGDVNQPMHAASFTDLSYPMGFHSKYENFVDTIKNNYIVSDSNGYWNWKGANPEDWIEGAAVAAKQDYPGVVNDTTKWWFVKAAVSQEYADKWRAEVTPVTGKRLMEAQRVTAGYIHLWFDTYVNR

SEQ ID NO: 16334 - protein, 248 aa, Synthetic construct
WSAANSNDKHNEGINSHLWIVNRAIDIMSRNTTIVNPNETALLNEWRADLENGIYSADYENPYYDDSTYASHFYDPDTGTTYIPFAKHAKETGAKYFNLAGQAYQNQDMQQAFFYLGLSLHYLGDVNQPMHAASFTDLSYPMGFHSKYENFVDTIKNNYIVSDSNGYWNWKGANPEDWIEGAAVAAKQDYPGVVNDTTKDWFVKAAVSQEYADKWRAEVTPVTGKRLMEAQRVTAGYIHLWFDTYVNR

SEQ ID NO: 16335 - protein, 245 aa, Synthetic construct
WSAEDKHNEGINSHLWIVNRAIDIMSRNTTIVNPNETALLNEWRADLENGIYSADYENPYYDDSTYASHFYDPRTGTTYIPFAKHAKETGAKYFNLAGQAYQNQDMQQAFFYLGLSLHYLGDVNQPMHAASFTDLSYPMGFHSKYENFVDTIKNNYIVSDSNGYWNWKGANPEDWIEGAAVAAKQDYPGVVNDTTKDWFVKAAVSQEYADKWRAEVTPVTGKRLMEAQRVTAGYIHLWFDTYVNR

SEQ ID NO: 16336 - protein, 245 aa, Synthetic construct
WSARDKHNEGINSHLWIVNRAIDIMSRNTTIVNPNETALLNEWRADLENGIYSADYENPYYDDSTYASHFYDPDTGTTYIPFAKHAKETGAKYFNLAGQAYQNQDMQQAFFYLGLSLHYLGDVNQPMHAASFTDLSYPMGFHSKYENFVDTIKNNYIVSDSNGYWNWKGANPEDWIEGAAVAAKQDYPGVVNDTTKDWFVKAAVSQEYADKWRAEVTPVTGKRLMEAQRVTAGYIHLWFDTYVNR

SEQ ID NO: 16337 - protein, 245 aa, Synthetic construct
WSAEDKHNEGINSHLWIVNRAIDIMSRNTTIVNPNETALLNEWRADLENGIYSADYENPYYDDSTYASHFYDPDTGTTYIPFAKHAKETGAKYFNLAGQAYQNQDMQQAFFYLGLSLHYLGDVNQPMHAASFTDLSYPMGFHSKYENFVDTIKNNYIVSDSNGYWNWKGANPEDWIEGAAVAAKQDYPGVVNDTTKVWFVKAAVSQEYADKWRAEVTPVTGKRLMEAQRVTAGYIHLWFDTYVNR

SEQ ID NO: 16338 - protein, 245 aa, Synthetic construct
WSAADKHNEGINSHLWIVNRAIDIMSRNTTIVNPNETALLNEWRADLENGIYSADYENPYYDWSTYASHFYDPDTGTTYIPFAKHAKETGAKYFNLAGQAYQNQDMQQAFFYLGLSLHYLGDVNQPMHAASFTELSYPMGFHSKYENFVDTIKNNYIVSDSNGYWNWKGANPEDWIEGAAVAAKQDYPGVVNDTTKDWFVKAAVSQEYADKWRAEVTPVTGKRLMEAQRVTAGYIHLWFDTYVNR

SEQ ID NO: 16339 - protein, 245 aa, Synthetic construct
WSARDKHNEGINSHLWIVNRAIDIMSRNTTIVNPNETALLNEWRADLENGIYSADYENPYYDYSTYASHFYDPDTGTTYIPFAKHAKETGAKYFNLAGQAYQNQDMQQAFFYLGLSLHYLGDVNQPMHAASFTELSYPWGFHSKYENFVDTIKNNYIVSDSNGYWNWKGANPEDWIEGAAVAAKQDYPGVVNDTTKDWFVKAAVSQEYADKWRAEVTPVTGKRLMEAQRVTAGYIHLWFDTYVNR

SEQ ID NO: 16340 - protein, 245 aa, Synthetic construct
WSAWDKHNEGINSHLWIVNRAIDIMSRNTTIVNPNETALLNEWRADLENGIYSADYENPYYDWSTYASHFYDPDTGTTYIPFAKHAKETGAKYFNLAGQAYQNQDMQQAFFYLGLSLHYLGDVNQPMHAASFTELSYPMGFHSKYENFVDTIKNNYIVSDSNGYWNWKGANPEDWIEGAAVAAKQDYPGVVNDTTKDWFVKAAVSQEYADKWRAEVTPVTGKRLMEAQRVTAGYIHLWFDTYVNR

SEQ ID NO: 16341 - protein, 245 aa, Synthetic construct
WSAEDKHNEGINSHLWIVNRAIDIMSRNTTIVNPNETALLNEWRADLENGIYSADYENPYYDDSTYASHFYDPDTGTTYIPFAKHAKKTGAKYFNLAGQAYQNQDMQQAFFYLGLSLHYLGDVNQPMHAASFTDLSYPMGFHSKYENFVDTIKNNYIVSDSNGYWNWKGANPEDWIEGAAVAAKQDYPGVVNDTTKDWFVKAAVSQEYADKWRAEVTPVTGKRLMEAQRVTAGYIHLWFDTYVNR

SEQ ID NO: 16342 - protein, 245 aa, Synthetic construct
WSAADKHNEGINSHLWIVNRAIDIMSRNTTIVNPNETALLNEWRADLENGIYSADYENPYYDFSTYASHFYDPDTGTTYIPFAKHAKETGAKYFNLAGQAYQNQDMQQAFFYLGLSLHYLGDVNQPMHAASFTELSYPWGFHSKYENFVDTIKNNYIVSDSNGYWNWKGANPEDWIEGAAVAAKQDYPGVVNDTTKDWFVKAAVSQEYADKWRAEVTPVTGKRLMEAQRVTAGYIHLWFDTYVNR

SEQ ID NO: 16343 - protein, 245 aa, Komagataella pastoris
WSAEDKHNEGINSHLWIVNRAIDIMSRNTTIVNPNETALLNEWRADLENGIYSADHENPYYDDSTYASHFYDPDTGTTYIPFAKHAKETGAKYFNLAGQAYQNQDMQQAFFYLGLSLHYLGDVNQPMHAASFTDLSYPMGFHSKYENFVDTIKNNYIVSDSNGYWNWKGANPEDWIEGAAVAAKQDYPGVVNDTTKDWFVKAAVSQEYADKWRAEVTPVTGKRLMEAQRVTAGYIHLWFDTYVNR

SEQ ID NO: 16344 - protein, 245 aa, Synthetic construct
WSAWDKHNEGINSHLWIVNRAIDIMSRNTTIVNPNETALLNEWRADLENGIYSADYENPYYDWSTYASHFYDPDTGTTYIPFAKHAKETGAKYFNLAGQAYQNQDMQQAFFYLGLSLHYLGDVNQPMHAASFTELSYPWGFHSKYENFVDTIKNNYIVSDSNGYWNWKGANPEDWIEGAAVAAKQDYPGVVNDTTKDWFVKAAVSQEYADKWRAEVTPVTGKRLMEAQRVTAGYIHLWFDTYVNR

SEQ ID NO: 16345 - protein, 245 aa, Synthetic construct
WSAEDKHNEGINSHLWIVNRAIDIMSRNTTIVNPNETALLNEWRADLENGIYSADYENPYYDDSTYASHFYDPDTGTTYIPFAKHAKETGAKYFNLAGQAYQNQDMQQAFFYLGLSLHYLGDVNQPMHAASFTDLSYPMGFHSKYENFVDTIKNNYIVSDSNGYWNWKGANPEDWIEGAAVAAKQDYPGVVNRTTKDWFVKAAVSQEYADKWRAEVTPVTGKRLMEAQRVTAGYIHLWFDTYVNR

SEQ ID NO: 16346 - protein, 245 aa, Synthetic construct
WSAYDKHNEGINSHLWIVNRAIDIMSRNTTIVNPNETALLNEWRADLENGIYSADYENPYYDWSTYASHFYDPDTGTTYIPFAKHAKETGAKYFNLAGQAYQNQDMQQAFFYLGLSLHYLGDVNQPMHAASFTELSYPMGFHSKYENFVDTIKNNYIVSDSNGYWNWKGANPEDWIEGAAVAAKQDYPGVVNDTTKDWFVKAAVSQEYADKWRAEVTPVTGKRLMEAQRVTAGYIHLWFDTYVNR

SEQ ID NO: 16347 - protein, 245 aa, Synthetic construct
WSAEDKHNEGINSHLWIVNRAIDIMSRNTTIVNPNETALLNEWRADLENGIYSADYENPYYDDSTYLSHFYDPDTGTTYIPFAKHAKETGAKYFNLAGQAYQNQDMQQAFFYLGLSLHYLGDVNQPMHAASFTDLSYPMGFHSKYENFVDTIKNNYIVSDSNGYWNWKGANPEDWIEGAAVAAKQDYPGVVNDTTKDWFVKAAVSQEYADKWRAEVTPVTGKRLMEAQRVTAGYIHLWFDTYVNR

SEQ ID NO: 16348 - protein, 245 aa, Synthetic construct
WSAWDKHNEGINSHLWIVNRAIDIMSRNTTIVNPNETALLNEWRADLENGIYSADYENPYYDFSTYASHFYDPDTGTTYIPFAKHAKETGAKYFNLAGQAYQNQDMQQAFFYLGLSLHYLGDVNQPMHAASFTELSYPMGFHSKYENFVDTIKNNYIVSDSNGYWNWKGANPEDWIEGAAVAAKQDYPGVVNDTTKDWFVKAAVSQEYADKWRAEVTPVTGKRLMEAQRVTAGYIHLWFDTYVNR

SEQ ID NO: 16349 - protein, 245 aa, Synthetic construct
WSAWDKHNEGINSHLWIVNRAIDIMSRNTTIVNPNETALLNEWRADLENGIYSADYENPYYDLSTYASHFYDPDTGTTYIPFAKHAKETGAKYFNLAGQAYQNQDMQQAFFYLGLSLHYLGDVNQPMHAASFTELSYPWGFHSKYENFVDTIKNNYIVSDSNGYWNWKGANPEDWIEGAAVAAKQDYPGVVNDTTKDWFVKAAVSQEYADKWRAEVTPVTGKRLMEAQRVTAGYIHLWFDTYVNR

SEQ ID NO: 16350 - protein, 245 aa, Synthetic construct
WSAEDKHNEGINSHLWIVNRAIDIMSRNTTIVNPNETALLNEWRADLENGIYSADYENPYYDDSTYASHFYDPDTGTTYIPFAKHAKETGAKYFNLAGQAYQNQDMQQAFFYLGLSLHYLGDVNQPMHAASFTDLSYPMGFHSKYENFVDTIKNNYIVSDSNGYWNWKGANPEDWIEGAAVAAKQDYPGVVNDTTKGWFVKAAVSQEYADKWRAEVTPVTGKRLMEAQRVTAGYIHLWFDTYVNR

SEQ ID NO: 16351 - protein, 245 aa, Synthetic construct
WSARDKHNEGINSHLWIVNRAIDIMSRNTTIVNPNETALLNEWRADLENGIYSADYENPYYDMSTYASHFYDPDTGTTYIPFAKHAKETGAKYFNLAGQAYQNQDMQQAFFYLGLSLHYLGDVNQPMHAASFTELSYPMGFHSKYENFVDTIKNNYIVSDSNGYWNWKGANPEDWIEGAAVAAKQDYPGVVNDTTKDWFVKAAVSQEYADKWRAEVTPVTGKRLMEAQRVTAGYIHLWFDTYVNR

SEQ ID NO: 16352 - protein, 245 aa, Synthetic construct
WSARDKHNEGINSHLWIVNRAIDIMSRNTTIVNPNETALLNEWRADLENGIYSADYENPYYDMSTYASHFYDPDTGTTYIPFAKHAKETGAKYFNLAGQAYQNQDMQQAFFYLGLSLHYLGDVNQPMHAASFTELSYPWGFHSKYENFVDTIKNNYIVSDSNGYWNWKGANPEDWIEGAAVAAKQDYPGVVNDTTKDWFVKAAVSQEYADKWRAEVTPVTGKRLMEAQRVTAGYIHLWFDTYVNR

SEQ ID NO: 16353 - protein, 245 aa, Synthetic construct
WSAWDKHNEGINSHLWIVNRAIDIMSRNTTIVNPNETALLNEWRADLENGIYSADYENPYYDYSTYASHFYDPDTGTTYIPFAKHAKETGAKYFNLAGQAYQNQDMQQAFFYLGLSLHYLGDVNQPMHAASFTELSYPMGFHSKYENFVDTIKNNYIVSDSNGYWNWKGANPEDWIEGAAVAAKQDYPGVVNDTTKDWFVKAAVSQEYADKWRAEVTPVTGKRLMEAQRVTAGYIHLWFDTYVNR

SEQ ID NO: 16354 - protein, 245 aa, Synthetic construct
WSAADKHNEGINSHLWIVNRAIDIMSRNTTIVNPNETALLNEWRADLENGIYSADYENPYYDFSTYASHFYDPDTGTTYIPFAKHAKETGAKYFNLAGQAYQNQDMQQAFFYLGLSLHYLGDVNQPMHAASFTELSYPMGFHSKYENFVDTIKNNYIVSDSNGYWNWKGANPEDWIEGAAVAAKQDYPGVVNDTTKDWFVKAAVSQEYADKWRAEVTPVTGKRLMEAQRVTAGYIHLWFDTYVNR

SEQ ID NO: 16355 - protein, 245 aa, Synthetic construct
WSAADKHNEGINSHLWIVNRAIDIMSRNTTIVNPNETALLNEWRADLENGIYSADYENPYYDMSTYASHFYDPDTGTTYIPFAKHAKETGAKYFNLAGQAYQNQDMQQAFFYLGLSLHYLGDVNQPMHAASFTELSYPMGFHSKYENFVDTIKNNYIVSDSNGYWNWKGANPEDWIEGAAVAAKQDYPGVVNDTTKDWFVKAAVSQEYADKWRAEVTPVTGKRLMEAQRVTAGYIHLWFDTYVNR

SEQ ID NO: 16356 - protein, 248 aa, Synthetic construct
WSAANNNDKHNEGINSHLWIVNRAIDIMSRNTTIVNPNETALLNEWRADLENGIYSADYENPYYDDSTYASHFYDPDTGTTYIPFAKHAKETGAKYFNLAGQAYQNQDMQQAFFYLGLSLHYLGDVNQPMHAASFTDLSYPMGFHSKYENFVDTIKNNYIVSDSNGYWNWKGANPEDWIEGAAVAAKQDYPGVVNDTTKDWFVKAAVSQEYADKWRAEVTPVTGKRLMEAQRVTAGYIHLWFDTYVNR

SEQ ID NO: 16357 - protein, 245 aa, Synthetic construct
WSAWDKHNEGINSHLWIVNRAIDIMSRNTTIVNPNETALLNEWRADLENGIYSADYENPYYDMSTYASHFYDPDTGTTYIPFAKHAKETGAKYFNLAGQAYQNQDMQQAFFYLGLSLHYLGDVNQPMHAASFTELSYPMGFHSKYENFVDTIKNNYIVSDSNGYWNWKGANPEDWIEGAAVAAKQDYPGVVNDTTKDWFVKAAVSQEYADKWRAEVTPVTGKRLMEAQRVTAGYIHLWFDTYVNR

SEQ ID NO: 16358 - protein, 245 aa, Synthetic construct
WSAADKHNEGINSHLWIVNRAIDIMSRNTTIVNPNETALLNEWRADLENGIYSADYENPYYDLSTYASHFYDPDTGTTYIPFAKHAKETGAKYFNLAGQAYQNQDMQQAFFYLGLSLHYLGDVNQPMHAASFTELSYPWGFHSKYENFVDTIKNNYIVSDSNGYWNWKGANPEDWIEGAAVAAKQDYPGVVNDTTKDWFVKAAVSQEYADKWRAEVTPVTGKRLMEAQRVTAGYIHLWFDTYVNR

SEQ ID NO: 16359 - protein, 245 aa, Synthetic construct
WSAEDKHNEGINSHLWIVNRAIDIMSRNTTIVNPNETALLNEWRADLENGIYSADYENPYYDDSTYASHFYDPDTGTTYIPFAKHAKETGAKYFNLAGQAYQNQDMQQAFFYLGLSLHYLGDVNQPMHAASFTDLSYPMGFHSKYENFVDTIKNNYIVSDSNGYWNWKGANPEDWIEGAAVAAKQDYPGVVNDTTKRWFVKAAVSQEYADKWRAEVTPVTGKRLMEAQRVTAGYIHLWFDTYVNR

SEQ ID NO: 16360 - protein, 245 aa, Synthetic construct
WSAADKHNEGINSHLWIVNRAIDIMSRNTTIVNPNETALLNEWRADLENGIYSADYENPYYDMSTYASHFYDPDTGTTYIPFAKHAKETGAKYFNLAGQAYQNQDMQQAFFYLGLSLHYLGDVNQPMHAASFTELSYPWGFHSKYENFVDTIKNNYIVSDSNGYWNWKGANPEDWIEGAAVAAKQDYPGVVNDTTKDWFVKAAVSQEYADKWRAEVTPVTGKRLMEAQRVTAGYIHLWFDTYVNR

SEQ ID NO: 16361 - protein, 245 aa, Synthetic construct
WSAYDKHNEGINSHLWIVNRAIDIMSRNTTIVNPNETALLNEWRADLENGIYSADYENPYYDYSTYASHFYDPDTGTTYIPFAKHAKETGAKYFNLAGQAYQNQDMQQAFFYLGLSLHYLGDVNQPMHAASFTELSYPWGFHSKYENFVDTIKNNYIVSDSNGYWNWKGANPEDWIEGAAVAAKQDYPGVVNDTTKDWFVKAAVSQEYADKWRAEVTPVTGKRLMEAQRVTAGYIHLWFDTYVNR

SEQ ID NO: 16362 - protein, 245 aa, Synthetic construct
WSAWDKHNEGINSHLWIVNRAIDIMSRNTTIVNPNETALLNEWRADLENGIYSADYENPYYDDSTYASHFYDPDTGTTYIPFAKHAKETGAKYFNLAGQAYQNQDMQQAFFYLGLSLHYLGDVNQPMHAASFTDLSYPMGFHSKYENFVDTIKNNYIVSDSNGYWNWKGANPEDWIEGAAVAAKQDYPGVVNDTTKDWFVKAAVSQEYADKWRAEVTPVTGKRLMEAQRVTAGYIHLWFDTYVNR

SEQ ID NO: 16363 - protein, 245 aa, Synthetic construct
WSARDKHNEGINSHLWIVNRAIDIMSRNTTIVNPNETALLNEWRADLENGIYSADYENPYYDYSTYASHFYDPDTGTTYIPFAKHAKETGAKYFNLAGQAYQNQDMQQAFFYLGLSLHYLGDVNQPMHAASFTELSYPMGFHSKYENFVDTIKNNYIVSDSNGYWNWKGANPEDWIEGAAVAAKQDYPGVVNDTTKDWFVKAAVSQEYADKWRAEVTPVTGKRLMEAQRVTAGYIHLWFDTYVNR

SEQ ID NO: 16364 - protein, 245 aa, Synthetic construct
WSARDKHNEGINSHLWIVNRAIDIMSRNTTIVNPNETALLNEWRADLENGIYSADYENPYYDWSTYASHFYDPDTGTTYIPFAKHAKETGAKYFNLAGQAYQNQDMQQAFFYLGLSLHYLGDVNQPMHAASFTELSYPMGFHSKYENFVDTIKNNYIVSDSNGYWNWKGANPEDWIEGAAVAAKQDYPGVVNDTTKDWFVKAAVSQEYADKWRAEVTPVTGKRLMEAQRVTAGYIHLWFDTYVNR

SEQ ID NO: 16365 - protein, 245 aa, Synthetic construct
WSAADKHNEGINSHLWIVNRAIDIMSRNTTIVNPNETALLNEWRADLENGIYSADYENPYYDYSTYASHFYDPDTGTTYIPFAKHAKETGAKYFNLAGQAYQNQDMQQAFFYLGLSLHYLGDVNQPMHAASFTELSYPWGFHSKYENFVDTIKNNYIVSDSNGYWNWKGANPEDWIEGAAVAAKQDYPGVVNDTTKDWFVKAAVSQEYADKWRAEVTPVTGKRLMEAQRVTAGYIHLWFDTYVNR

SEQ ID NO: 16366 - protein, 245 aa, Synthetic construct
WSAFDKHNEGINSHLWIVNRAIDIMSRNTTIVNPNETALLNEWRADLENGIYSADYENPYYDWSTYASHFYDPDTGTTYIPFAKHAKETGAKYFNLAGQAYQNQDMQQAFFYLGLSLHYLGDVNQPMHAASFTELSYPWGFHSKYENFVDTIKNNYIVSDSNGYWNWKGANPEDWIEGAAVAAKQDYPGVVNDTTKDWFVKAAVSQEYADKWRAEVTPVTGKRLMEAQRVTAGYIHLWFDTYVNR

SEQ ID NO: 16367 - protein, 245 aa, Synthetic construct
WSAWDKHNEGINSHLWIVNRAIDIMSRNTTIVNPNETALLNEWRADLENGIYSADYENPYYDMSTYASHFYDPDTGTTYIPFAKHAKETGAKYFNLAGQAYQNQDMQQAFFYLGLSLHYLGDVNQPMHAASFTELSYPWGFHSKYENFVDTIKNNYIVSDSNGYWNWKGANPEDWIEGAAVAAKQDYPGVVNDTTKDWFVKAAVSQEYADKWRAEVTPVTGKRLMEAQRVTAGYIHLWFDTYVNR

SEQ ID NO: 16368 - protein, 245 aa, Synthetic construct
WSAYDKHNEGINSHLWIVNRAIDIMSRNTTIVNPNETALLNEWRADLENGIYSADYENPYYDYSTYASHFYDPDTGTTYIPFAKHAKETGAKYFNLAGQAYQNQDMQQAFFYLGLSLHYLGDVNQPMHAASFTELSYPMGFHSKYENFVDTIKNNYIVSDSNGYWNWKGANPEDWIEGAAVAAKQDYPGVVNDTTKDWFVKAAVSQEYADKWRAEVTPVTGKRLMEAQRVTAGYIHLWFDTYVNR

SEQ ID NO: 16369 - protein, 245 aa, Synthetic construct
WSARDKHNEGINSHLWIVNRAIDIMSRNTTIVNPNETALLNEWRADLENGIYSADYENPYYDFSTYASHFYDPDTGTTYIPFAKHAKETGAKYFNLAGQAYQNQDMQQAFFYLGLSLHYLGDVNQPMHAASFTELSYPWGFHSKYENFVDTIKNNYIVSDSNGYWNWKGANPEDWIEGAAVAAKQDYPGVVNDTTKDWFVKAAVSQEYADKWRAEVTPVTGKRLMEAQRVTAGYIHLWFDTYVNR

SEQ ID NO: 16370 - protein, 245 aa, Synthetic construct
WSAYDKHNEGINSHLWIVNRAIDIMSRNTTIVNPNETALLNEWRADLENGIYSADYENPYYDLSTYASHFYDPDTGTTYIPFAKHAKETGAKYFNLAGQAYQNQDMQQAFFYLGLSLHYLGDVNQPMHAASFTELSYPWGFHSKYENFVDTIKNNYIVSDSNGYWNWKGANPEDWIEGAAVAAKQDYPGVVNDTTKDWFVKAAVSQEYADKWRAEVTPVTGKRLMEAQRVTAGYIHLWFDTYVNR

SEQ ID NO: 16371 - protein, 245 aa, Synthetic construct
WSARDKHNEGINSHLWIVNRAIDIMSRNTTIVNPNETALLNEWRADLENGIYSADYENPYYDWSTYASHFYDPDTGTTYIPFAKHAKETGAKYFNLAGQAYQNQDMQQAFFYLGLSLHYLGDVNQPMHAASFTELSYPWGFHSKYENFVDTIKNNYIVSDSNGYWNWKGANPEDWIEGAAVAAKQDYPGVVNDTTKDWFVKAAVSQEYADKWRAEVTPVTGKRLMEAQRVTAGYIHLWFDTYVNR

SEQ ID NO: 16372 - protein, 245 aa, Synthetic construct
WSAWDKHNEGINSHLWIVNRAIDIMSRNTTIVNPNETALLNEWRADLENGIYSADYENPYYDFSTYASHFYDPDTGTTYIPFAKHAKETGAKYFNLAGQAYQNQDMQQAFFYLGLSLHYLGDVNQPMHAASFTELSYPWGFHSKYENFVDTIKNNYIVSDSNGYWNWKGANPEDWIEGAAVAAKQDYPGVVNDTTKDWFVKAAVSQEYADKWRAEVTPVTGKRLMEAQRVTAGYIHLWFDTYVNR

SEQ ID NO: 16373 - protein, 245 aa, Synthetic construct
WSAEDKHNEGINSHLWIVNRAIDIMSRNTTIVNPNETALLNEWRADLENGIYSADYENPYYDDSTYASHFYDPDTGTTYIWFAKHAKETGAKYFNLAGQAYQNQDMQQAFFYLGLSLHYLGDVNQPMHAASFTDLSYPMGFHSKYENFVDTIKNNYIVSDSNGYWNWKGANPEDWIEGAAVAAKQDYPGVVNDTTKDWFVKAAVSQEYADKWRAEVTPVTGKRLMEAQRVTAGYIHLWFDTYVNR

SEQ ID NO: 16374 - protein, 245 aa, Synthetic construct
WSAEDKHNEGINSHLWIVNRAIDIMSRNTTIVNPNETALLNEWRADLENGIYSADYENPYYDDSTYASHFYDPDTGTTYIPFAKHAKETGAKYFNLAGQAYQNQDMQQAFFYLGLSLHYLGDVNQPMHAASFTDLSYPMGFHSKYENFVDTIKNNYIVSDSNGYWNWKGANPEDWIEGAAVAAKQDYPGVVNDTTKDWFVKAAVSQEYADKWRAEVTPVTGKRLMEARRVTAGYIHLWFDTYVNR

SEQ ID NO: 16375 - protein, 245 aa, Synthetic construct
WSAFDKHNEGINSHLWIVNRAIDIMSRNTTIVNPNETALLNEWRADLENGIYSADYENPYYDYSTYASHFYDPDTGTTYIPFAKHAKETGAKYFNLAGQAYQNQDMQQAFFYLGLSLHYLGDVNQPMHAASFTELSYPMGFHSKYENFVDTIKNNYIVSDSNGYWNWKGANPEDWIEGAAVAAKQDYPGVVNDTTKDWFVKAAVSQEYADKWRAEVTPVTGKRLMEAQRVTAGYIHLWFDTYVNR

SEQ ID NO: 16376 - protein, 245 aa, Synthetic construct
WSAFDKHNEGINSHLWIVNRAIDIMSRNTTIVNPNETALLNEWRADLENGIYSADYENPYYDLSTYASHFYDPDTGTTYIPFAKHAKETGAKYFNLAGQAYQNQDMQQAFFYLGLSLHYLGDVNQPMHAASFTELSYPMGFHSKYENFVDTIKNNYIVSDSNGYWNWKGANPEDWIEGAAVAAKQDYPGVVNDTTKDWFVKAAVSQEYADKWRAEVTPVTGKRLMEAQRVTAGYIHLWFDTYVNR

SEQ ID NO: 16377 - protein, 245 aa, Synthetic construct
WSAADKHNEGINSHLWIVNRAIDIMSRNTTIVNPNETALLNEWRADLENGIYSADYENPYYDDSTYASHFYDPDTGTTYIPFAKHAKETGAKYFNLAGQAYQNQDMQQAFFYLGLSLHYLGDVNQPMHAASFTDLSYPMGFHSKYENFVDTIKNNYIVSDSNGYWNWKGANPEDWIEGAAVAAKQDYPGVVNDTTKDWFVKAAVSQEYADKWRAEVTPVTGKRLMEAQRVTAGYIHLWFDTYVNR

SEQ ID NO: 16378 - protein, 245 aa, Synthetic construct
WSARDKHNEGINSHLWIVNRAIDIMSRNTTIVNPNETALLNEWRADLENGIYSADYENPYYDFSTYASHFYDPDTGTTYIPFAKHAKETGAKYFNLAGQAYQNQDMQQAFFYLGLSLHYLGDVNQPMHAASFTELSYPMGFHSKYENFVDTIKNNYIVSDSNGYWNWKGANPEDWIEGAAVAAKQDYPGVVNDTTKDWFVKAAVSQEYADKWRAEVTPVTGKRLMEAQRVTAGYIHLWFDTYVNR

SEQ ID NO: 16379 - protein, 245 aa, Synthetic construct
WSAYDKHNEGINSHLWIVNRAIDIMSRNTTIVNPNETALLNEWRADLENGIYSADYENPYYDWSTYASHFYDPDTGTTYIPFAKHAKETGAKYFNLAGQAYQNQDMQQAFFYLGLSLHYLGDVNQPMHAASFTELSYPWGFHSKYENFVDTIKNNYIVSDSNGYWNWKGANPEDWIEGAAVAAKQDYPGVVNDTTKDWFVKAAVSQEYADKWRAEVTPVTGKRLMEAQRVTAGYIHLWFDTYVNR

SEQ ID NO: 16380 - protein, 245 aa, Synthetic construct
WSAEDKHNEGINSHLWIVNRAIDIMSRNTTIVNPNETALLNEWRADLENGIYSADYRNPYYDDSTYASHFYDPDTGTTYIPFAKHAKETGAKYFNLAGQAYQNQDMQQAFFYLGLSLHYLGDVNQPMHAASFTDLSYPMGFHSKYENFVDTIKNNYIVSDSNGYWNWKGANPEDWIEGAAVAAKQDYPGVVNDTTKDWFVKAAVSQEYADKWRAEVTPVTGKRLMEAQRVTAGYIHLWFDTYVNR

SEQ ID NO: 16381 - protein, 245 aa, Synthetic construct
WSAEDKHNEGINSHLWIVNRAIDIMSRNTTIVNPNETALLNEWRADLENGIYSADYENPYYDDSTYASHFYDPDTGTTYIPFAKHAKETGAKYFNLAGQAYQNQDMQQAFFYLGLSLHYLGDVNQPMHAASFTDLSYPMGFHSKYENFVDTIKNNYIVSDSNGYWNWKGANPEDWIEGAAVAAKQDYPGVVNHTTKDWFVKAAVSQEYADKWRAEVTPVTGKRLMEAQRVTAGYIHLWFDTYVNR

SEQ ID NO: 16382 - protein, 245 aa, Synthetic construct
WSAFDKHNEGINSHLWIVNRAIDIMSRNTTIVNPNETALLNEWRADLENGIYSADYENPYYDMSTYASHFYDPDTGTTYIPFAKHAKETGAKYFNLAGQAYQNQDMQQAFFYLGLSLHYLGDVNQPMHAASFTELSYPWGFHSKYENFVDTIKNNYIVSDSNGYWNWKGANPEDWIEGAAVAAKQDYPGVVNDTTKDWFVKAAVSQEYADKWRAEVTPVTGKRLMEAQRVTAGYIHLWFDTYVNR

SEQ ID NO: 16383 - protein, 248 aa, Synthetic construct
WSAANRNDKHNEGINSHLWIVNRAIDIMSRNTTIVNPNETALLNEWRADLENGIYSADYENPYYDDSTYASHFYDPDTGTTYIPFAKHAKETGAKYFNLAGQAYQNQDMQQAFFYLGLSLHYLGDVNQPMHAASFTDLSYPMGFHSKYENFVDTIKNNYIVSDSNGYWNWKGANPEDWIEGAAVAAKQDYPGVVNDTTKDWFVKAAVSQEYADKWRAEVTPVTGKRLMEAQRVTAGYIHLWFDTYVNR

SEQ ID NO: 16384 - protein, 245 aa, Synthetic construct
WSARDKHNEGINSHLWIVNRAIDIMSRNTTIVNPNETALLNEWRADLENGIYSADYENPYYDMSTYASHFYDPDTGTTYIPFAKHAKETGAKYFNLAGQAYQNQDMQQAFFYLGLSLHYLGDVNQPMHAASFTELSYPMWFHSKYENFVDTIKNNYIVSDSNGYWNWKGANPEDWIEGAAVAAKQDYPGVVNDTTKDWFVKAAVSQEYADKWRAEVTPVTGKRLMEAQRVTAGYIHLWFDTYVNR

SEQ ID NO: 16385 - protein, 246 aa, Bacillus pseudomycoides
WSAEDKHNEGRNSHLWIVNRAIDIMSRDKTVVKPNETALLNEWRDDLENGIYSADYENPYFDNGTFASHFYDPDTQKSYIPFAKHAKETGAKYFKLAGEAYQNKDMKQAFFYLGLSLHYLGDVNQPMHAANFTNISTEAPIFHSKYENFVDTIKDNYKVADGNGYWNWKGTNSEDWIHGAAVASKQDYSSIVNDTTTSWFLKAATSQEYANKWRAEVTPTSGKRLIEAQRVTAGYIHLWFDTYVNR

SEQ ID NO: 16386 - protein, 242 aa, unidentified
WSAESIHNEGVSSHLWIVNRAIDIMSQNTTVVKQNETALLNEWRTDLEKGIYSADYENPYYDNSTFASHFYDPDSGKTYIPFAKQAKQTGAKYFKLAGEAYQNKDLKNAFFYLGLSLHYLGDVNQPMHAANFTNISHPFGFHSKYENFVDTVKDNYRVTDGNGYWNWQSANPEEWVHASASAAKADFPSIVNDKTKNWFLKAAVSQDSADKWRAEVTPITGKRLMEAQRVTAGYIHLWFDTY

SEQ ID NO: 16387 - protein, 242 aa, Bacillus mycoides
WSAESIHNEGVSSHLWIVNKAIDIMSQNTTVVKQNETALLNEWRTDLEKGIYSADYQNPYYDNSTFASHFYDPDSGKTYIPFAKQAKQTGAKYFKLAGEAYQNKDMKNAFFYLGLSLHYLGDVNQPMHAANFTNISHPFGFHSKYENFVDTVKDNYRVTDGNGYWNWQSTNPEDWVHASASAAKADFPSIVNDNTKNWFLKAAVSQDSADKWRAEVTPVTGKRLIEAQRITAGYIHLWFDTY

SEQ ID NO: 16388 - protein, 242 aa, unidentified
WSAESVHNEGVSSHLWIVNRAIDIMSQNTTVVKQNETALLNEWRTNLEEGIYSADYKNPYYDNSTFASHFYDPDSEKTYIPFAKQAKQTGAKYFKLAGEAYQNKDLKNAFFYLGLSLHYLGDVNQPMHAANFTNISHPFGFHSKYENFVDTVKDNYRVTDGDGYWNWKSANPEEWVHASASAAKADFPSIVNDNTKSWFLKAAVSQDSADKWRAEVTPVTGKRLMEAQRITAGYIHLWFDTY

SEQ ID NO: 16389 - protein, 242 aa, Lysinibacillus xylanilyticus
WSAESIHNEGVSSHLWIVNRAIDIMSQNTTIVKQHETDLLNEWRTDLEEGIYSADYQNPYYDNSTFASHFYDPDSGKTYIPFAKQAKQTGAKYFKLAGEAYQNKDLKNAFFYLGLSLHYLGDVNQPMHAANFTNISHPFGFHSKYENFVDTVKDNYRVTDGNGYWNWKSANPEEWVHASAVAAKADFLLIVNDNTESGFLKAAVSQDSADKWRAEVTPVTGKRLMEAQRITAGYIHLWFDTY

SEQ ID NO: 16390 - protein, 242 aa, Bacillus mycoides
WSAESIHNEGVSSHLWIVNRAIDIMSQNTTVVKQNETALLNEWRTNLEEGIYSADYKNPYYDHSTFASHFYDPDSGKTYIPFAKQAKQTGAKYFKLAGEAYQNKDMKNAFFYLGLSLHYLGDVNQPMHAANFTNISHPFGFHSKYENFVDTVKDNYRVTDGDGYWNWKSANPEEWVHASASAAKADFPSIVNDNTKNWFLKATVSQDSADKWRAEVTPVTGKRLMEAQRITAGYIHLWFDTY

SEQ ID NO: 16391 - protein, 242 aa, Bacillus sp.
WSAESVHNEGVSSHLWIVNRAIDIMSQNTTVVKQNETALLNDWRTNLEEGIYSADYKNPYYDNSTFASHFYDPDSEKTYIPFAKQAKQTGAKYFKLAGEAYQNKDMKNAFFYLGLSLHYLGDVNQPMHAANFTNISHPFGFHSKYENFVDTVKDNYRVTDGNGYWNWKSANPEEWVHESAAAAKADFPSIVNDNTKSWFLKAAVSQDSADKWRAEVTPVTGKRLIEAQRITAGYIHLWFDTY

SEQ ID NO: 16392 - protein, 242 aa, Bacillus thuringiensis
WSNEENHKEGKNSHLWIVNGAIDIMSRNTTIVKQENLALLQQWRTHLENGLYVADYENPYYDSGTFASHFYNPDTDSTYLPFAKHAKETGATYFTLAGEAYQHKNIQQAFFYLGVSLHYLGDINQPMHAANFTNLSYPFGFHSKYEHFVDTIKQNYEIMDGEGYWNWKGRDPEDWIHQAAVAANQDFSDIVNSDTKNWFVKAAVSQTYADRWRAAVTPITGKRLIEAQRITAGYIQLWFDTY

SEQ ID NO: 16393 - protein, 245 aa, Bacillus manliponensis
WSAEEMHAEGKNSHLWIVNRAIDIMARDTTVVKENEVALLNEWRTDLEDGIYTADYENPYYDNSTFASHFYDPDTDDTYIPFAKNAKVTGAKYFKLAGEAYEQQDMQQAFFYLGLSLHYFGDINQPMHASNFTNISHPFGFHSKYENFVDTIKAPYAVTDSKGYWNFAGGTPEEWLHTAAVAAKKDAPGIVNETTKSWFLKASVSQEYANMWRAEVTPETGARLMEAQRAMAGYIHLWFDTYVNR

SEQ ID NO: 16394 - protein, 242 aa, Unidentified
WSAEEMHTEGKNTHLWIVNRAIDIMARDNTVVKENEVALLNEWRTDLEDGIYTADYENPYYDNGTFASHFYDPDTDDTYIPFAKNAKVTGVKYFKLAGEAYQQQAMNQAFFYLGLSLHYFGDINQPMHASNFTNISHPFGFHSKYENFVDTIKAPYSVTDGNGYWNFAGETPEEWLHTAAVAAKQDAPGIVNETTISWFLQAAFSQEYADMWRAEVTPETGARLIEAQRAMAGYIHLWFDTY

SEQ ID NO: 16395 - protein, 242 aa, Bacillus mycoides
WSAEAIHDEGVSTHLWIVNRSIEVMAQNKTVVQPNEISLLNEWRADLEKGIYSADYDNPYFDNGTFASHFYDPDTGGTYLPLAKHAKETGAKYFKLAGEAYQNNDLKNAFFYLGLSLHYLGDVNQPMHAANFTNVSLPVALHSKYENFVDTVKDNYKVKDGNGYWNWKSVNPEDWVHASAVGAKADFPLIVNDKTKKWFLDAAISQDAADKWRAEVTPVTGKRLMEAQRITAGYIHLWFDTY

SEQ ID NO: 16396 - protein, 298 aa, Pseudomonas sp; identical to SEQ ID NO: 32

SEQ ID NO: 16397 - protein, 297 aa, Pseudomonas sp
QESPAFIDPASWNTPFNGIAQVACHNCYEKQYANTFSSVLDSVRTLELDFWDQRDAVSGGSPHHWFVRHNPGTLFQSGNDNNCTGDGTGKNDLEACLNDVKNWSDKHPGHFPITLILDKKQGWSKESSGRTPKDFDELVARVFQGKLFTPQDLATHIGSGAGALQGNLKGKSWPTANDLQGKVLLVLNHSENQKLSQYAEARTSKAKVFISPVTNGQNDISGKVSGMSSQSSGYVAMNNMGKGDKSWAKQAFAYSHIGRVWGDDEVSFAQHINQKINLSAYYRFAAQSAGGYRIRPF

SEQ ID NO: 16398 - protein, 298 aa, Pseudomonas sp
SQESPAFIDPASWNTPFNGIAQVACHNCYEKQYANTFSSVLDSVRTLELDFWDQRDAVSGGSPHHWFVRHNPGTLFQSGNDNNCTGDGTGKNDLEACLNDVKNWSDKHPGHFPITLILDKKQGWSKESSGRTPKDFDELVARVFQGKLFTPQDLATHIGSGAGALQGNLKGKSWPTANDLQGKVLLVLNHSENQKLSQYAEARTSKAKVFISPVTNGQNDISGKVSGMSSQSSGYVAMNNMGKGDKSWAKQAFAYSHIGRVWGDDEVSFAQHINQKINLSAYYRFAAQSAGGYRIRPF

SEQ ID NO: 16399 - protein, 296 aa, Pseudomonas sp
SQESPAFIDPASWNTPFNGIAQVACHNCYEKQYANTFSSVLDSVRTLELDFWDQRDAVSGGSPHHWFVRHNPGTLFQSGNDNNCTGDGTGKNDLEACLNDVKNWSDKHPGHFPITLILDKKQGWSKESSGRTPKDFDELVARVFQGKLFTPQDLATHIGSGAGALQGNLKGKSWPTANDLQGKVLLVLNHSENQKLSQYAEARTSKAKVFISPVTNGQNDISGKVSGMSSQSSGYVAMNNMGKGDKSWAKQAFAYSHIGRVWGDDEVSFAQHINQKINLSAYYRFAAQSAGGYRIR

SEQ ID NO: 16400 - protein, 297 aa, Pseudomonas protegens
QESPAFIAPATWNTPFNGIAQVACHNCYEKQYASTFSSVLDSVRTLELDFWDQRDAVTGGSPRHWFVRHNPGTLFQSGNDNNCTGDGTGKNDLEACLNDVKNWSDNHPGHFPITVILDKKQGWSKESSGRTPKDFDELVTRVFQGKLYTPQDLATHIGSSAGALQGNLKGKSWPTASQLQGKVLLVLNHSENQKLSQYAEARTSSAKVFISPVTNGQNDVSGKVSGMSGQSSGYVAMNNMSKGDKKWAAQAFAYSHVGRVWGDDGVSFAQHISEKVNLSAYYKFAEQNAGGYRIRPF

SEQ ID NO: 16401 - protein, 298 aa, Pseudomonas protegens
SQESPAFIAPATWNTPFNGIAQVACHNCYEKQYASTFSSVLDSVRTLELDFWDQRDAVTGGSPRHWFVRHNPGTLFQSGNDNNCTGDGTGKNDLEACLNDVKNWSDNHPGHFPITVILDKKQGWSKESSGRTPKDFDELVTRVFQGKLYTPQDLATHIGSSAGALQGNLKGKSWPTASQLQGKVLLVLNHSENQKLSQYAEARTSSAKVFISPVTNGQNDVSGKVSGMSGQSSGYVAMNNMSKGDKKWAAQAFAYSHVGRVWGDDGVSFAQHISEKVNLSAYYKFAEQNAGGYRIRPF

SEQ ID NO: 16402 - protein, 298 aa, Pseudomonas protegens
AQESPAFIAPATWNTPFNGIAQVACHNCYEKQYASTFSSVLDSVRTLELDFWDQRDAVTGGSPRHWFVRHNPGTLFQSGNDNNCTGDGTGKNDLEACLNDVKNWSENHPGHFPITVILDKKQGWSKESSGRTPKDFDELVTRVFQGKLYTPQDLATHIGSSAGALQGNLKGKSWPTASQLQGKVLLVLNHSENQKLSQYAEARTSSAKVFISPVTNGQNDVSGKVSGMSGQSSGYVAMNNMSKGDKKWAAQAFAYSHVGRVWGDDGVSFAQHISEKVNLSAYYKFAEQNSGGYRIRPF

SEQ ID NO: 16403 - protein, 297 aa, Pseudomonas protegens
QESPAFIAPATWNTPFNGIAQVACHNCYEKQYASTFSSVLDSVRTLELDFWDQRDAVTGGSPRHWFVRHNPGTLFQSGNDNNCTGDGTGKNDLEACLNDVKNWSENHPGHFPITVILDKKQGWSKESSGRTPKDFDELVTRVFQGKLYTPQDLATHIGSSAGALQGNLKGKSWPTASQLQGKVLLVLNHSENQKLSQYAEARTSSAKVFISPVTNGQNDVSGKVSGMSGQSSGYVAMNNMSKGDKKWAAQAFAYSHVGRVWGDDGVSFAQHISEKVNLSAYYKFAEQNSGGYRIRPF

SEQ ID NO: 16404 - protein, 298 aa, Pseudomonas protegens
SQESPAFIAPATWNTPFNGIAQVACHNCYEKQYASTFSSVLDSVRTLELDFWDQRDAVTGGSPRHWFVRHNPGTLFQSGNDNNCTGDGTGKNDLEACLNDVKNWSENHPGHFPITVILDKKQGWSKESSGRTPKDFDELVTRVFQGKLYTPQDLATHIGSSAGALQGNLKGKSWPTASQLQGKVLLVLNHSENQKLSQYAEARTSSAKVFISPVTNGQNDVSGKVSGMSGQSSGYVAMNNMSKGDKKWAAQAFAYSHVGRVWGDDGVSFAQHISEKVNLSAYYKFAEQNSGGYRIRPF

SEQ ID NO: 16405 - protein, 293 aa, Pseudomonas chlororaphis
FISPASWYSAFNAIAQVACHNCYEKQYASTFTSVLDSVRTLELDFWDQRDAVTGGSAGHWFVRHNPGTLFQSGNDNNCTGDGKGTNDLEACLNDIRLWSDSHPGHFPITLILDKKQGWSKESSGRTPKDFDDLVSRIFQGKLYTPGDLAQHLGVSSGALQGSLEGKSWPTASQLQGKVLLVLNHSENQKLSQYAEARTTSAKVFISPVTNGQNDVSGEVSGMSRTSSGYVAMNNMGKGDKQWAAQAFAYSHIGRVWGDDGVSFTQHIAEKVNLSAYYKFAEAKDGNGYRIRPF

SEQ ID NO: 16406 - protein, 299 aa, Pseudomonas chlororaphis
AQEAVGFISPASWYTAFNAIAQVACHNCYEKQYAGTFTSVLDSVRTLELDFWDQRDAVTGGSPRHWFVRHNPGSLFQSGNDNNCTGDGKGTNDLEACLNDIKLWSDSHPGHFPITLILDKKQGWSKESSGRTPKDFDDLVSRIFQGKLYTPGDLAQHLGVSSSALQGSLKGKSWPTASQLQGKVLLVLNHSENQKLSQYAEARTTSAKVFISPVTNGQNDVSGEVSGMSRTSSGYVAMNNMGKGDKQWAAQAFAYSHIGRVWGDDGVSFTQHIAEKVNLSAYYKFAEAKDGNGYRIRPF

SEQ ID NO: 16407 - protein, 298 aa, Pseudomonas chlororaphis
QEAVGFISPASWYTAFNAIAQVACHNCYEKQYAGTFTSVLDSVRTLELDFWDQRDAVTGGSPRHWFVRHNPGSLFQSGNDNNCTGDGKGTNDLEACLNDIKLWSDSHPGHFPITLILDKKQGWSKESSGRTPKDFDDLVSRIFQGKLYTPGDLAQHLGVSSSALQGSLKGKSWPTASQLQGKVLLVLNHSENQKLSQYAEARTTSAKVFISPVTNGQNDVSGEVSGMSRTSSGYVAMNNMGKGDKQWAAQAFAYSHIGRVWGDDGVSFTQHIAEKVNLSAYYKFAEAKDGNGYRIRPF

SEQ ID NO: 16408 - protein, 299 aa, Pseudomonas chlororaphis
SQEAVGFISPASWYTAFNAIAQVACHNCYEKQYAGTFTSVLDSVRTLELDFWDQRDAVTGGSPRHWFVRHNPGSLFQSGNDNNCTGDGKGTNDLEACLNDIKLWSDSHPGHFPITLILDKKQGWSKESSGRTPKDFDDLVSRIFQGKLYTPGDLAQHLGVSSSALQGSLKGKSWPTASQLQGKVLLVLNHSENQKLSQYAEARTTSAKVFISPVTNGQNDVSGEVSGMSRTSSGYVAMNNMGKGDKQWAAQAFAYSHIGRVWGDDGVSFTQHIAEKVNLSAYYKFAEAKDGNGYRIRPF

SEQ ID NO: 16409 - protein, 299 aa, Pseudomonas sp
AQEAVGFISPASWYTAFNAIAQVACHNCYEKQYAGTFTSVLDSVRTLELDFWDQRDAVTGGSPRHWFVRHNPGSLFQSGNDNNCTGDGNGTNDLEACLNDIKLWSDSHPGHFPITLILDKKQGWSKESSGRTPKDFDDLVSRIFQGKLYTPGDLAQHLGVSSSALQGSLKGKSWPTASQLQGKVLLVLNHSENQKLSQYAEARTTSAKVFISPVTNGQNDVSGEVSGMSRTSSGYVAMNNMGKGDKQWAAQAFVYSHIGRVWGDDGVSFTQHIAEKVNLSAYYKFAEAKDGNGYRIRPF

SEQ ID NO: 16410 - protein, 298 aa, Pseudomonas sp
QEAVGFISPASWYTAFNAIAQVACHNCYEKQYAGTFTSVLDSVRTLELDFWDQRDAVTGGSPRHWFVRHNPGSLFQSGNDNNCTGDGNGTNDLEACLNDIKLWSDSHPGHFPITLILDKKQGWSKESSGRTPKDFDDLVSRIFQGKLYTPGDLAQHLGVSSSALQGSLKGKSWPTASQLQGKVLLVLNHSENQKLSQYAEARTTSAKVFISPVTNGQNDVSGEVSGMSRTSSGYVAMNNMGKGDKQWAAQAFVYSHIGRVWGDDGVSFTQHIAEKVNLSAYYKFAEAKDGNGYRIRPF

SEQ ID NO: 16411 - protein, 299 aa, Pseudomonas sp
SQEAVGFISPASWYTAFNAIAQVACHNCYEKQYAGTFTSVLDSVRTLELDFWDQRDAVTGGSPRHWFVRHNPGSLFQSGNDNNCTGDGNGTNDLEACLNDIKLWSDSHPGHFPITLILDKKQGWSKESSGRTPKDFDDLVSRIFQGKLYTPGDLAQHLGVSSSALQGSLKGKSWPTASQLQGKVLLVLNHSENQKLSQYAEARTTSAKVFISPVTNGQNDVSGEVSGMSRTSSGYVAMNNMGKGDKQWAAQAFVYSHIGRVWGDDGVSFTQHIAEKVNLSAYYKFAEAKDGNGYRIRPF

SEQ ID NO: 16412 - protein, 299 aa, Pseudomonas chlororaphis
SQEAAGFISPASWYSAFNAIAQVACHNCYEKQYASTFTSVLDSVRTLELDFWDQRDAVTGGSAGHWFVRHNPGTLFQSGNDNNCTGDGKGTNDLEACLNDIRLWSDSHPGHFPITLILDKKQGWSKESSGRTPKDFDDLVSRIFQGKLYTPGDLAQHLGVSSGALQGSLEGKSWPTASQLQGKVLLVLNHSENQKLSQYAEARTTSAKVFISPVTNGQNDVSGEVSGMSRTSSGYVAMNNMGKGDKQWAAQAFAYSHIGRVWGDDGVSFTQHIAEKVNLSAYYKFAEAKDGNGYRIRPF

SEQ ID NO: 16413 - protein, 513 aa, Geobacillus stearothermophilus
AAPFNGTMMQYFEWYLPDDGTLWTKVANEANNLSSLGITALWLPPAYKGTSRSDVGYGVYDLYDLGEFNQKGTVRTKYGTKAQYLQAIQAAHAAGMQVYADVVFDHKGGADGTEWVDAVEVNPSDRNQEISGTYQIQAWTKFDFPGRGNTYSSFKWRWYHFDGVDWDESRKLSRIYKFRGKAWDWEVDTEFGNYDYLMYADLDMDHPEVVTELKNWGKWYVNTTNIDGFRLDAVKHIKFSFFPDWLSYVRSQTGKPLFTVGEYWSYDINKLHNYITKTDGTMSLFDAPLHNKFYTASKSGGAFDMRTLMTNTLMKDQPTLAVTFVDNHDTEPGQALQSWVDPWFKPLAYAFILTRQEGYPCVFYGDYYGIPQYNIPSLKSKIDPLLIARRDYAYGTQHDYLDHSDIIGWTREGGTEKPGSGLAALITDGPGGSKWMYVGKQHAGKVFYDLTGNRSDTVTINSDGWGEFKVNGGSVSVWVPRKTTVSTIARPITTRPWTGEFVRWTEPRLVAWP

SEQ ID NO: 16414 - protein, 512 aa, Geobacillus stearothermophilus
APFNGTMMQYFEWYLPDDGTLWTKVANEANNLSSLGITALWLPPAYKGTSRSDVGYGVYDLYDLGEFNQKGTVRTKYGTKAQYLQAIQAAHAAGMQVYADVVFDHKGGADGTEWVDAVEVNPSDRNQEISGTYQIQAWTKFDFPGRGNTYSSFKWRWYHFDGVDWDESRKLSRIYKFRGKAWDWEVDTEFGNYDYLMYADLDMDHPEVVTELKNWGKWYVNTTNIDGFRLDAVKHIKFSFFPDWLSYVRSQTGKPLFTVGEYWSYDINKLHNYITKTDGTMSLFDAPLHNKFYTASKSGGAFDMRTLMTNTLMKDQPTLAVTFVDNHDTEPGQALQSWVDPWFKPLAYAFILTRQEGYPCVFYGDYYGIPQYNIPSLKSKIDPLLIARRDYAYGTQHDYLDHSDIIGWTREGGTEKPGSGLAALITDGPGGSKWMYVGKQHAGKVFYDLTGNRSDTVTINSDGWGEFKVNGGSVSVWVPRKTTVSTIARPITTRPWTGEFVRWTEPRLVAWP

SEQ ID NO: 16415 - protein, 540 aa, Geobacillus stearothermophilus; identical to SEQ ID NO: 35

SEQ ID NO: 16416 - protein, 485 aa, Bacillus sp.
HHNGTNGTMMQYFEWHLPNDGNHWNRLRDDASNLRNRGITAIWIPPAWKGTSQNDVGYGAYDLYDLGEFNQKGTVRTKYGTRSQLESAIHALKNNGVQVYGDVVMNHKGGADATENVLAVEVNPNNRNQEISGDYTIEAWTKFDFPGRGNTYSDFKWRWYHFDGVDWDQSRQFQNRIYKFRGDGKAWDWEVDSENGNYDYLMYADVDMDHPEVVNELRRWGEWYTNTLNLDGFRIDAVKHIKYSFTRDWLTHVRNATGKEMFAVAEFWKNDLGALENYLNKTNWNHSVFDVPLHYNLYNASNSGGNYDMAKLLNGTVVQKHPMHAVTFVDNHDSQPGESLESFVQEWFKPLAYALILTREQGYPSVFYGDYYGIPTHSVPAMKAKIDPILEARQNFAYGTQHDYFDHHNIIGWTREGNTTHPNSGLATIMSDGPGGEKWMYVGQNKAGQVWHDITGNKPGTVTINADGWANFSVNGGSVSIWVKR

SEQ ID NO: 16417 - protein, 483 aa, Unidentified; identical to SEQ ID NO: 36

SEQ ID NO: 16418 - protein, 485 aa, Bacillus sp.
HHNGTNGTMMQYFEWHLPNDGNHWNRLRDDASNLRNRGITAIWIPPAWKGTSQNDVGYGAYDLYDLGEFNQKGTVRTKYGTRSQLESAIHALKNNGVQVYGDVVMNHKGGADATENVLAVEVNPNNRNQEISGDYTIEAWTKFDFPGRGNTYSDFKWRWYHFDGVDWDQSRQFQNRIYKFRGXXKAWDWEVDSENGNYDYLMYADVDMDHPEVVNELRRWGEWYTNTLNLDGFRIDAVKHIKYSFTRDWLTHVRNATGKEMFAVAEFWKNDLGALENYLNKTNWNHSVFDVPLHYNLYNASNSGGNYDMAKLLNGTVVQKHPMHAVTFVDNHDSQPGESLESFVQEWFKPLAYALILTREQGYPSVFYGDYYGIPTHSVPAMKAKIDPILEARQNFAYGTQHDYFDHHNIIGWTREGNTTHPNSGLATIMSDGPGGEKWMYVGQNKAGQVWHDITGNKPGTVTINADGWANFSVNGGSVSIWVKR

SEQ ID NO: 16419 - protein, 484 aa, Bacillus amyloliquefaciens
HHNGTNGTMMQYFEWHLPNDGNHWNRLRDDASNLRNRGITAIWIPPAWKGTSQNDVGYGAYDLYDLGEFNQKGTVRTKYGTRSQLESAIHALKNNGVQVYGDVVMNHKGGADATENVLAVEVNPNNRNQEISGDYTIEAWTKFDFPGRGNTYSDFKWRWYHFDGVDWDQSRQFQNRIYKFRDGKAWDWEVDSENGNYDYLMYADVDMDHPEVVNELRRWGEWYTNTLNLDGFRIDAVKHIKYSFTRDWLTHVRNATGKEMFAVAEFWKNDLGALENYLNKTNWNHSVFDVPLHYNLYNASNSGGNYDMAKLLNGTVVQKHPMHAVTFVDNHDSQPGESLESFVQEWFKPLAYALILTREQGYPSVFYGDYYGIPTHSVPAMKAKIDPILEARQNFAYGTQHDYFDHHNIIGWTREGNTTHPNSGLATIMSDGPGGEKWMYVGQNKAGQVWHDITGNKPGTVTINADGWANFSVNGGSVSIWVKR

SEQ ID NO: 16420 - protein, 484 aa, Bacillus amyloliquefaciens
HHNGTNGTMMQYFEWHLPNDGNHWNRLRDDASNLRNRGITAIWIPPAWKGTSQNDVGYGAYDLYDLGEFNQKGTVRTKYGTRSQLESAIHALKNNGVQVYGDVVMNHKGGADATENVLAVEVNPNNRNQEISGDYTIEAWTKFDFPGRGNTYSDFKWRWYHFDGVDWDQSRQFQNRIYKFRGGKAWDWEVDSENGNYDYLMYADVDMDHPEVVNELRRWGEWYTNTLNLDGFRIDAVKHIKYSFTRDWLTHVRNATGKEMFAVAEFWKNDLGALENYLNKTNWNHSVFDVPLHYNLYNASNSGGNYDMAKLLNGTVVQKHPMHAVTFVDNHDSQPGESLESFVQEWFKPLAYALILTREQGYPSVFYGDYYGIPTHSVPAMKAKIDPILEARQNFAYGTQHDYFDHHNIIGWTREGNTTHPNSGLATIMSDGPGGEKWMYVGQNKAGQVWHDITGNKPGTVTINADGWANFSVNGGSVSIWVKR

SEQ ID NO: 16421 - protein, 484 aa, Bacillus amyloliquefaciens
HHNGTNGTMMQYFEWHLPNDGNHWNRLRDDASNLRNRGITAIWIPPAWKGTSQNDVGYGAYDLYDLGEFNQKGTVRTKYGTRSQLESAIHALKNNGVQVYGDVVMNHKGGADATENVLAVEVNPNNRNQEISGDYTIEAWTKFDFPGRGNTYSDFKWRWYHFDGVDWDQSRQFQNRIYKFRGDKAWDWEVDSENGNYDYLMYADVDMDHPEVVNELRRWGEWYTNTLNLDGFRIDAVKHIKYSFTRDWLTHVRNATGKEMFAVAEFWKNDLGALENYLNKTNWNHSVFDVPLHYNLYNASNSGGNYDMAKLLNGTVVQKHPMHAVTFVDNHDSQPGESLESFVQEWFKPLAYALILTREQGYPSVFYGDYYGIPTHSVPAMKAKIDPILEARQNFAYGTQHDYFDHHNIIGWTREGNTTHPNSGLATIMSDGPGGEKWMYVGQNKAGQVWHDITGNKPGTVTINADGWANFSVNGGSVSIWVKR

SEQ ID NO: 16422 - protein, 482 aa, Bacillus amyloliquefaciens
VNGTLMQYFEWYTPNDGQHWKRLQNDAEHLSDIGITAVWIPPAYKGLSQSDNGYGPYDLYDLGEFQQKGTVRTKYGTKSELQDAIGSLHSRNVQVYGDVVLNHKAGADATEDVTAVEVNPANRNQETSEEYQIKAWTDFRFPGRGNTYSDFKWHWYHFDGADWDESRKISRIFKFRGEGKAWDWEVSSENGNYDYLMYADVDYDHPDVVAETKKWGIWYANELSLDGFRIDAAKHIKFSFLRDWVQAVRQATGKEMFTVAEYWQNNAGKLENYLNKTSFNQSVFDVPLHFNLQAASSQGGGYDMRRLLDGTVVSRHPEKAVTFVENHDTQPGQSLESTVQTWFKPLAYAFILTRESGYPQVFYGDMYGTKGTSPKEIPSLKDNIEPILKARKEYAYGPQHDYIDHPDVIGWTREGDSSAAKSGLAALITDGPGGSKRMYAGLKNAGETWYDITGNRSDTVKIGSDGWGEFHVNDGSVSIYVQ

SEQ ID NO: 16423 - protein, 397 aa, Bacillus amyloliquefaciens
VNGTLMQYFEWYTPNDGQHWKRLQNDAEHLSDIGITAVWIPPAYKGLSQSDNGYGPYDLYDLGEFQQKGTVRTKYGTKSELQDAIGSLHSRNVQVYGDVVLNHKAGADATEDVTAVEVNPANRNQETSEEYQIKAWTDFRFPGRGNTYSDFKWHWYHFDGADWDESRKISRIFKFRGEGKAWDWEVSSENGNYDYLMYADVDYDHPDVVAETKKWGIWYANELSLDGFRIDAAKHIKFSFLRDWVQAVRQATGKEMFTVAEYWQNNAGKLENYLNKTSFNQSVFDVPLHFNLQAASSQGGGYDMRRLLDGTVVSRHPEKAVTFVENHDTQPGQSLESTVQTWFKPLAYAFILTRESGYPQVFYGDMYGTKGTSPKEIPSLKDNIEPILKARKEYAYG

SEQ ID NO: 16424 - protein, 483 aa, Bacillus amyloliquefaciens; identical to SEQ ID NO: 37

SEQ ID NO: 16425 - protein, 481 aa, Bacillus amyloliquefaciens
VNGTLMQYFEWYTPNDGQHWKRLQNDAEHLSDIGITAVWIPPAYKGLSQSDNGYGPYDLYDLGEFQQKGTVRTKYGTKSELQDAIGSLHSRNVQVYGDVVLNHKAGADATEDVTAVEVNPANRNQETSEEYQIKAWTDFRFPGRGNTYSDFKWHWYHFDGADWDESRKISRIFKFRGKAWDWEVSSENGNYDYLMYADVDYDHPDVVAETKKWGIWYANELSLDGFRIDAAKHIKFSFLRDWVQAVRQATGKEMFTVAEYWQNNAGKLENYLNKTSFNQSVFDVPLHFNLQAASSQGGGYDMRRLLDGTVVSRHPEKAVTFVENHDTQPGQSLESTVQTWFKPLAYAFILTRESGYPQVFYGDMYGTKGTSPKEIPSLKDNIEPILKARKEYAYGPQHDYIDHPDVIGWTREGDSSAAKSGLAALITDGPGGSKRMYAGLKNAGETWYDITGNRSDTVKIGSDGWGEFHVNDGSVSIYVQK

SEQ ID NO: 16426 - protein, 480 aa, Bacillus amyloliquefaciens
VNGTLMQYFEWYTPNDGQHWKRLQNDAEHLSDIGITAVWIPPAYKGLSQSDNGYGPYDLYDLGEFQQKGTVRTKYGTKSELQDAIGSLHSRNVQVYGDVVLNHKAGADATEDVTAVEVNPANRNQETSEEYQIKAWTDFRFPGRGNTYSDFKWHWYHFDGADWDESRKISRIFKFRGEGKAWDWEVSSENGNYDYLMYADVDYDHPDVVAETKKWGIWYANELSLDGFRIDAAKHIKFSFLRDWVQAVRQATGKEMFTVAEYWQNNAGKLENYLNKTSFNQSVFDVPLHFNLQAASSQGGGYDMRRLLDGTVVSRHPEKAVTFVENHDTQPGQSLESTVQTWFKPLAYAFILTRESGYPQVFYGDMYGTKGTSPKEIPSLKDNIEPILKARKEYAYGPQHDYIDHPDVIGWTREGDSSAAKSGLAALITDGPGGSKRMYAGLKNAGETWYDITGNRSDTVKIGSDGWGEFHVNDGSVSIY

SEQ ID NO: 16427 - protein, 498 aa, Aspergillus niger; identical to SEQ ID NO: 38

SEQ ID NO: 16428 - protein, 478 aa, Aspergillus niger CBS 513.88
ATPADWRSQSIYFLLTDRFARTDGSTTATCNTADQKYCGGTWQGIIDKLDYIQGMGFTAIWITPVTAQLPQTTAYGDAYHGYWQQDIYSLNENYGTADDLKALSSALHERGMYLMVDVVANHMGYDGAGSSVDYSVFKPFSSQDYFHPFCFIQNYEDQTQVEDCWLGDNTVSLPDLDTTKDVVKNEWYDWVGSLVSNYSIDGLRIDTVKHVQKDFWPGYNKAAGVYCIGEVLDGDPAYTCPYQNVMDGVLNYPIYYPLLNAFKSTSGSMDDLYNMINTVKSDCPDSTLLGTFVENHDNPRFASYTNDIALAKNVAAFIILNDGIPIIYAGQEQHYAGGNDPANREATWLSGYPTDSELYKLIASANAIRNYAISKDTGFVTYKNWPIYKDDTTIAMRKGTDGSQIVTILSNKGASGDSYTLSLSGAGYTAGQQLTEVIGCTTVTVGSDGNVPVPMAGGLPRVLYPTEKLAGSKICSSS

SEQ ID NO: 16429 - protein, 476 aa, Aspergillus oryzae
ATPADWRSQSIYFLLTDRFARTDGSTTATCNTADQKYCGGTWQGIIDKLDYIQGMGFTAIWITPVTAQLPQTTAYGDAYHGYWQQDIYSLNENYGTADDLKALSSALHERGMYLMVDVVANHMGYDGAGSSVDYSVFKPFSSQDYFHPFCFIQNYEDQTQVEDCWLGDNTVSLPDLDTTKDVVKNEWYDWVGSLVSNYSIDGLRIDTVKHVQKDFWPGYNKAAGVYCIGEVLDGDPAYTCPYQNVMDGVLNYPIYYPLLNAFKSTSGSMDDLYNMINTVKSDCPDSTLLGTFVENHDNPRFASYTNDIALAKNVAAFIILNDGIPIIYAGQEQHYAGGNDPANREATWLSGYPTDSELYKLIASANAIRNYAISKDTGFVTYKNWPIYKDDTTIAMRKGTDGSQIVTILSNKGASGDSYTLSLSGAGYTAGQQLTEVIGCTTVTVGSDGNVPVPMAGGLPRVLYPTEKLAGSKICS

SEQ ID NO: 16430 - protein, 519 aa, Geobacillus stearothermophilus; identical to SEQ ID NO: 39

SEQ ID NO: 16431 - protein, 491 aa, Geobacillus stearothermophilus
AAPFNGTMMQYFEWYLPDDGTLWTKVANEANNLSSLGITALWLPPAYKGTSRSDVGYGAYDLYDLGEFNQKGTVRTKYGTKAQYLQAIQAAHAAGMQVYADVVFDHKGGADGTEWVDAVEVNPSDRNQVISGTYQIQAWTKFDFPGRGNTYSSFKWRWYHFDGVDWDESRKLSRIYLFSGKQWDWPVDNEFGNYDYLMYADLDMDHPEVTTELKNWGKWYVNTTNIDGFRLDAVKHIKFYFFPDWLSYVRSSTGKPLFTVGEYWSGDINKLHNYITITDGTVSLFDAPLHYKFYNASKSGGAFDMRTLMTNTLMKDQPTLAVTFVDNHDTEPGQALQSWVDPWFKPLAYAFILTRQEGYPCVFYGDYYGIPQYNIPSLKSKIDPLLIARRDYAYGTQHDYLDHSDIIGWTREGGTEKPGSGLAALITDGPGGSKWMYVGKQHAGKVFYDLTGNRSDTVTINSDGWGEFKVNGGSVSVWVPRKTTVSTIARP

SEQ ID NO: 16432 - protein, 485 aa, Geobacillus stearothermophilus; identical to SEQ ID NO: 34

SEQ ID NO: 16433 - protein, 484 aa, Unidentified
HHNGTNGTMMQYFEWHLPNDGNHWNRLRDDASNLRNRGITAIWIPPAWKGTSQNDVGYGAYDLYDLGEFNQKGTVRTKYGTRSQLESAIHALKNNGVQVYGDVVMNHKGGADATENVLAVEVNPNNRNQEISGDYTIEAWTKFDFPGRGNTYSDFKWRWYHFDGVDWDQSRQFQNRIYKFRGDGKAWDWEVDSENGNYDYLMYADVDMDHPEVVNELRRWGEWYTNTLNLDGFRIDAVKHIKYSFTRDWLTHVRNATGKEMFAVAEFWKNDLGALENYLNKTNWNHSVFDVPLHYNLYNASNSGGNYDMAKLLNGTVVQKHPMAVTFVDNHDSQPGESLESFVQEWFKPLAYALILTREQGYPSVFYGDYYGIPTHSVPAMKAKIDPILEARQNFAYGTQHDYFDHHNIIGWTREGNTTHPNSGLATIMSDGPGGEKWMYVGQNKAGQVWHDITGNKPGTVTINADGWANFSVNGGSVSIWVKR

SEQ ID NO: 16434 - protein, 484 aa, Unidentified
HNGTNGTMMQYFEWHLPNDGNHWNRLRDDASNLRNRGITAIWIPPAWKGTSQNDVGYGAYDLYDLGEFNQKGTVRTKYGTRSQLESAIHALKNNGVQVYGDVVMNHKGGADATENVLAVEVNPNNRNQEISGDYTIEAWTKFDFPGRGNTYSDFKWRWYHFDGVDWDQSRQFQNRIYKFRGDGKAWDWEVDSENGNYDYLMYADVDMDHPEVVNELRRWGEWYTNTLNLDGFRIDAVKHIKYSFTRDWLTHVRNATGKEMFAVAEFWKNDLGALENYLNKTNWNHSVFDVPLHYNLYNASNSGGNYDMAKLLNGTVVQKHPMHAVTFVDNHDSQPGESLESFVQEWFKPLAYALILTREQGYPSVFYGDYYGIPTHSVPAMKAKIDPILEARQNFAYGTQHDYFDHHNIIGWTREGNTTHPNSGLATIMSDGPGGEKWMYVGQNKAGQVWHDITGNKPGTVTINADGWANFSVNGGSVSIWVKR

SEQ ID NO: 16435 - protein, 484 aa, Unidentified
HHNGTNGTMMQYFEWHLPNDGNHWNRLRDDASNLRNRGITAIWIPPAWKGTSQNDVGYGAYDLYDLGEFNQKGTVRTYGTRSQLESAIHALKNNGVQVYGDVVMNHKGGADATENVLAVEVNPNNRNQEISGDYTIEAWTKFDFPGRGNTYSDFKWRWYHFDGVDWDQSRQFQNRIYKFRGDGKAWDWEVDSENGNYDYLMYADVDMDHPEVVNELRRWGEWYTNTLNLDGFRIDAVKHIKYSFTRDWLTHVRNATGKEMFAVAEFWKNDLGALENYLNKTNWNHSVFDVPLHYNLYNASNSGGNYDMAKLLNGTVVQKHPMHAVTFVDNHDSQPGESLESFVQEWFKPLAYALILTREQGYPSVFYGDYYGIPTHSVPAMKAKIDPILEARQNFAYGTQHDYFDHHNIIGWTREGNTTHPNSGLATIMSDGPGGEKWMYVGQNKAGQVWHDITGNKPGTVTINADGWANFSVNGGSVSIWVKR

SEQ ID NO: 16436 - protein, 484 aa, Bacillus sp. NCIB 12513
HHNGTNGTMMQYFEWHLPNDGNHWNRLRDDASNLRNRGITAIWIPPAWKGTSQNDVGYGAYDLYDLGEFNQKGTVRTKYGTRSQLESAIHALKNNGVQVYGDVVMNHKGGADATENVLAVEVNPNNRNQEISGDYTIEAWTKFDFPGRGNTYSDFKWRWYHFDGVDWDQSRQFQNRIYKFRGDGKAWDWEVDSENGNYDYLMYADVDMDHPEVVNELRRWGEWYTNTLNLDGFRIDAVKHIKYSFTRDWLTHVRNATGKEMFAVAEFWKNDLGALENYLNKTNWNHSVFDVPLHYNLYNASNSGGNYDMAKLLNGTVVQKHPMHAVTFVDNHDSQPGESLESFVQEWFKPLAYALILTREQGYPSVFYGDYYGIPTHSVPAMKAKIDPILEARQNFAYGTQHDYFDHHNIIGWTREGNTTHPNSGLATIMSDGPGGEKWMYVGQNKAGQVWHDITGNKPGTVTINADGWANFSVNGGSVSIWVK

SEQ ID NO: 16437 - protein, 484 aa, Unidentified
HHNGTNGTMMQYFEWHLPNDGNHWNRLRDDASNLRNRGITAIWIPPAWKGTSQNDVGYGAYDLYDLGEFNQKTVRTKYGTRSQLESAIHALKNNGVQVYGDVVMNHKGGADATENVLAVEVNPNNRNQEISGDYTIEAWTKFDFPGRGNTYSDFKWRWYHFDGVDWDQSRQFQNRIYKFRGDGKAWDWEVDSENGNYDYLMYADVDMDHPEVVNELRRWGEWYTNTLNLDGFRIDAVKHIKYSFTRDWLTHVRNATGKEMFAVAEFWKNDLGALENYLNKTNWNHSVFDVPLHYNLYNASNSGGNYDMAKLLNGTVVQKHPMHAVTFVDNHDSQPGESLESFVQEWFKPLAYALILTREQGYPSVFYGDYYGIPTHSVPAMKAKIDPILEARQNFAYGTQHDYFDHHNIIGWTREGNTTHPNSGLATIMSDGPGGEKWMYVGQNKAGQVWHDITGNKPGTVTINADGWANFSVNGGSVSIWVKR

SEQ ID NO: 16438 - protein, 481 aa, Unidentified
TNGTMMQYFEWHLPNDGNHWNRLRDDASNLRNRGITAIWIPPAWKGTSQNDVGYGAYDLYDLGEFNQKGTVRTKYGTRSQLESAIHALKNNGVQVYGDVVMNHKGGADATENVLAVEVNPNNRNQEISGDYTIEAWTKFDFPGRGNTYSDFKWRWYHFDGVDWDQSRQFQNRIYKFRGDGKAWDWEVDSENGNYDYLMYADVDMDHPEVVNELRRWGEWYTNTLNLDGFRIDAVKHIKYSFTRDWLTHVRNATGKEMFAVAEFWKNDLGALENYLNKTNWNHSVFDVPLHYNLYNASNSGGNYDMAKLLNGTVVQKHPMHAVTFVDNHDSQPGESLESFVQEWFKPLAYALILTREQGYPSVFYGDYYGIPTHSVPAMKAKIDPILEARQNFAYGTQHDYFDHHNIIGWTREGNTTHPNSGLATIMSDGPGGEKWMYVGQNKAGQVWHDITGNKPGTVTINADGWANFSVNGGSVSIWVKR

SEQ ID NO: 16439 - protein, 399 aa, Bacillus sp.
HHNGTNGTMMQYFEWHLPNDGNHWNRLRDDASNLRNRGITAIWIPPAWKGTSQNDVGYGAYDLYDLGEFNQKGTVRTKYGTRSQLESAIHALKNNGVQVYGDVVMNHKGGADATENVLAVEVNPNNRNQEISGDYTIEAWTKFDFPGRGNTYSDFKWRWYHFDGVDWDQSRQFQNRIYKFRGDGKAWDWEVDSENGNYDYLMYADVDMDHPEVVNELRRWGEWYTNTLNLDGFRIDAVKHIKYSFTRDWLTHVRNATGKEMFAVAEFWKNDLGALENYLNKTNWNHSVFDVPLHYNLYNASNSGGNYDMAKLLNGTVVQKHPMHAVTFVDNHDSQPGESLESFVQEWFKPLAYALILTREQGYPSVFYGDYYGIPTHSVPAMKAKIDPILEARQNFAYG

SEQ ID NO: 16440 - protein, 479 aa, Aspergillus niger CBS 513.88
AATPADWRSQSIYFLLTDRFARTDGSTTATCNTADQKYCGGTWQGIIDKLDYIQGMGFTAIWITPVTAQLPQTTAYGDAYHGYWQQDIYSLNENYGTADDLKALSSALHERGMYLMVDVVANHMGYDGAGSSVDYSVFKPFSSQDYFHPFCFIQNYEDQTQVEDCWLGDNTVSLPDLDTTKDVVKNEWYDWVGSLVSNYSIDGLRIDTVKHVQKDFWPGYNKAAGVYCIGEVLDGDPAYTCPYQNVMDGVLNYPIYYPLLNAFKSTSGSMDDLYNMINTVKSDCPDSTLLGTFVENHDNPRFASYTNDIALAKNVAAFIILNDGIPIIYAGQEQHYAGGNDPANREATWLSGYPTDSELYKLIASANAIRNYAISKDTGFVTYKNWPIYKDDTTIAMRKGTDGSQIVTILSNKGASGDSYTLSLSGAGYTAGQQLTEVIGCTTVTVGSDGNVPVPMAGGLPRVLYPTEKLAGSKICSSS

SEQ ID NO: 16441 - protein, 513 aa, Geobacillus stearothermophilus
AAPFNGTMMQYFEWYLPDDGTLWTKVANEANNLSSLGITALWLPPAYKGTSRSDVGYGVYDLYDLGEFNQKGTVRTKYGTKAQYLQAIQAAHAAGMQVYADVVFDHKGGADGTEWVDAVEVNPSDRNQEISGTYQIQAWTKFDFPGRGNTYSSFKWRWYHFDGVDWDESRKLSRIYKFRGKAWDWEVDTEFGNYDYLMYADLDMDHPEVVTELKNWGKWYVNTTNIDGFRLDAVKHIKFSFFPDWLSYVRSQTGKPLFTVGEYWSYDINKLHNYITKTNGTMSLFDAPLHNKFYTASKSGGAFDMRTLMTNTLMKDQPTLAVTFVDNHDTEPGQALQSWVDPWFKPLAYAFILTRQEGYPCVFYGDYYGIPQYNIPSLKSKIDPLLIARRDYAYGTQHDYLDHSDIIGWTREGGTEKPGSGLAALITDGPGGSKWMYVGKQHAGKVFYDLTGNRSDTVTINSDGWGEFKVNGGSVSVWVPRKTTVSTIARPITTRPWTGEFVRWTEPRLVAWP

SEQ ID NO: 16442 - protein, 515 aa, Geobacillus stearothermophilus
AAPFNGTMMQYFEWYLPDDGTLWTKVANEANNLSSLGITALWLPPAYKGTSRSDVGYGVYDLYDLGEFNQKGTVRTKYGTKAQYLQAIQAAHAAGMQVYADVVFDHKGGADGTEWVDAVEVNPSDRNQEISGTYQIQAWTKFDFPGRGNTYSSFKWRWYHFDGVDWDESRKLSRIYKFRGIGKAWDWEVDTENGNYDYLMYADLDMDHPEVVTELKNWGKWYVNTTNIDGFRLDAVKHIKFSFFPDWLSYVRSQTGKPLFTVGEYWSYDINKLHNYITKTDGTMSLFDAPLHNKFYTASKSGGAFDMRTLMTNTLMKDQPTLAVTFVDNHDTEPGQALQSWVDPWFKPLAYAFILTRQEGYPCVFYGDYYGIPQYNIPSLKSKIDPLLIARRDYAYGTQHDYLDHSDIIGWTREGGTEKPGSGLAALITDGPGGSKWMYVGKQHAGKVFYDLTGNRSDTVTINSDGWGEFKVNGGSVSVWVPRKTTVSTIARPITTRPWTGEFVRWTEPRLVAWP

SEQ ID NO: 16443 - protein, 514 aa, Geobacillus stearothermophilus
AAPFNGTMMQYFEWYLPDDGTLWTKVANEANNLSSLGITALWLPPAYKGTSRSDVGYGVYDLYDLGEFNQKGTVRTKYGTKAQYLQAIQAAHAAGMQVYADVVFDHKGGADGTEWVDAVEVNPSDRNQEISGTYQIQAWTKFDFPGRGNTYSSFKWRWYHFDGVDWDESRKLSRIYKFRGIGKAWDWEVDTENGNYDYLMYADLDMDHPEVVTELKNWGKWYVNTTNIDGFRLDAVKHIKFSFFPDWLSYVRSQTGKPLFTVGEYWSYDINKLHNYITKTDGTMSLFDAPLHNKFYTASKSGGAFDMRTLMTNTLMKDQPTLAVTFVDNHDTEPGQALQSWVDPWFKPLAYAFILTRQEGYPCVFYGDYYGIPQYNIPSLKSKIDPLLIARRDYAYGTQHDYLDHSDIIGWTREGGTEKPGSGLAALITDGPGGSKWMYVGKQHAGKVFYDLTGNRSDTVTINSDGWGEFKVNGGSVSVWVPRKTTVSTIARPITTRPWTGEFVRWTEPRLVAW

SEQ ID NO: 16444 - protein, 498 aa, Aspergillus awamori
MVAWWSLFLYGLQVAAPALAATPADWRSQSIYFLLTDRFARTDGSTTATCNTADQKYCGGTWQGIIDKLDYIQGMGFTAIWITPVTAQLPQTTAYGDAYHGYWQQDIYSLNENYGTADDLKALSSALHERGMYLMVDVVANHMGYDGAGSSVDYSVFKPFSSQDYFHPFCFIQNYEDQTQVEDCWLGDNTVSLPDLDTTKDVVKNEWFDWVGSLVSNYSIDGLRIDTVKHVQKDFWPGYNKAAGVYCIGEVLDGDPAYTCPYQNVMDGVLNYPIYYPLLNAFKSTSGSMDDLYNMINTVKSDCPDSTLLGTFVENHDNPRFASYTNDIALAKNVAAFIILNDGIPIIYAGQEQHYAGGNDPANREATWLSGYPTDSELYKLIASANAIRNYAISKDTGFVTYKNWPIYKDDTTIAMRKGTDGSQIVTILSNKGASGDSYTLSLSGAGYTAGQQLTEVIGCTTVTVGSDGNVPVPMAGGLPRVLYPTEKLAGSKICSSS

SEQ ID NO: 16445 - protein, 498 aa, unidentified
MVAWWSLFLYGLQVAAPALAATPADWRSQSIYFLLTDRFARTDGSTTATCNTADQKYCGGTWQGIIDKLDYIQGMGFTAIWITPVTAQLPQTTAYGDAYHGYWQQDIYSLNENYGTADDLKALSSALHERGMYLMVDVVANHMGYDGAGSSVDYSVFKPFSSQDYFHPFCFIQNYEDQTQVEDCWLGDNTVSLPDLDTTKDVVKNEWYDWVGSLVSNYSIDGLRIDTVKHVQKDFWPGYNKAAGVYCIGEVLDVDPAYTCPYQNVMDGVLNYPIYYPLLNAFKSTSGSMDDLYNMINTVKSDCPDSTLLGTFVENHDNPRFASYTNDIALAKNVAAFIILNDGIPIIYAGQEQHYAGGNDPANREATWLSGYPTDSELYKLIASANAIRNYAISKDTGFVTYKNWPIYKDDTTIAMRKGTDGSQIVTILSNKGASGDSYTLSLSGAGYTAGQQLTEVIGCTTVTVGSDGNVPVPMAGGLPRVLYPTEKLAGSKICSSS

SEQ ID NO: 16446 - protein, 498 aa, Aspergillus oryzae
MVAWWSLFLYGLQVAAPALAATPADWRSQSIYFLLTDRFARTDGSTTATCNTADQKYCGGTWQGIIDKLDYIQGMGFTAIWITPVTAQLPQTTAYGDAYHGYWQQDIYSLNENYGTADDLKALSSALHERGMYLMVDVVANHMGYDGAGSSVDYSVFKPFSSQDYFHPFCFIQNYENQTQVEDCWLGDNTVSLPDLDTTKDVVKNEWYDWVGSLVSNYSIDGLRIDTVKHVQKDFWPGYNKAAGVYCIGEVLDGDPAYTCPYQNVMDGVLNYPIYYPLLNAFKSTSGSMDDLYNMINTVKSDCPDSTLLGTFVENHDNPRFASYTNDIALAKNVAAFIILNDGIPIIYAGQEQHYAGGNDPANREATWLSGYPTDSELYKLIASANAIRNYAISKDTGFVTYKNWPIYKDDTTIAMRKGTDGSQIVTILSNKGASGDSYTLSLSGAGYTAGQQLTEVIGCTTVTVGSDGNVPVPMAGGLPRVLYPTEKLAGSKICSSS

SEQ ID NO: 16447 - protein, 498 aa, Aspergillus oryzae
MVAWWSLFLYGLQVAAPALAATPADWRSQSIYFLLTDRFARTDGSTTATCNTADQKYCGGTWQGIIDKLDYIQGMGFTAIWITPVTAQLPQTTAYGDAYHGYWQQDIYSLNENYGTADDLKALSSALHERGMYLMVDVVANHMGYDGAGSSVDYSVFKPFSSQDYFHPFCFIQNYEDQTQVEDCWLGDNTVSLPDLDTTKDVVKNEWYDWVGSLVSNYSIDGLRIDTVKHVQKDFWPGYNKAAGVYCIGEVLNGDPAYTCPYQNVMDGVLNYPIYYPLLNAFKSTSGSMDDLYNMINTVKSDCPDSTLLGTFVENHDNPRFASYTNDIALAKNVAAFIILNDGIPIIYAGQEQHYAGGNDPANREATWLSGYPTDSELYKLIASANAIRNYAISKDTGFVTYKNWPIYKDDTTIAMRKGTDGSQIVTILSNKGASGDSYTLSLSGAGYTAGQQLTEVIGCTTVTVGSDGNVPVPMAGGLPRVLYPTEKLAGSKICSSS

SEQ ID NO: 16448 - protein, 491 aa, Geobacillus stearothermophilus
AAPFNGTMMQYFEWYLPDDGTLWTKVANEANNLSSLGITALWLPPAYKGTSRSDVGYGAYDLYDLGEFNQKGTVRTKYGTKAQYLQAIQAAHAAGMQVYADVVFDHKGGADGTEWVDAVEVNPSDRNQVISGTYQIQAWTKFDFPGRGNTYSSFKWRWYHFDGVDWDESRKLSRIYLFSGKQWDWPVDNEFGNYDYLMYADLDMDHPEVTTELKNWGKWYVNTTNIDGFRLDAVKHIKFYFFPDWLSYVRSSTGKPLFTVGEYWSGDINKLHNYITWTDGTVSLFDAPLHYKFYNASKSGGAFDMRTLMTNTLMKDQPTLAVTFVDNHDTEPGQALQSWVDPWFKPLAYAFILTRQEGYPCVFYGDYYGIPQYNIPSLKSKIDPLLIARRDYAYGTQHDYLDHSDIIGWTREGGTEKPGSGLAALITDGPGGSKWMYVGKQHAGKVFYDLTGNRSDTVTINSDGWGEFKVNGGSVSVWVPRKTTVSTIARP

SEQ ID NO: 16449 - protein, 486 aa, Geobacillus stearothermophilus
AAPFNGTMMQYFEWYLPDDGTLWTKVANEANNLSSLGITALWLPPAYKGTSRSDVGYGVYDLYDLGEFNQKGTVRTKYGTKAQYLQAIQAAHAAGMQVYADVVFDHKGGADGTEWVDAVEVNPSDRNQEISGTYQIQAWTKFDFPGRGNTYSSFKWRWYHFDGVDWDESRKLSRIYKFRGKAWDWEVDTEFGNYDYLMYADLDMDHPEVVTELKNWGKWYVNTTNIDGFRLDAVKHIKFSFFPDWLSYVRSQTGKPLFTVGEYWSYDINKLHNYITKTDGTTSLFDAPLHNKFYTASKSGGAFDMRTLMTNTLMKDQPTLAVTFVDNHDTEPGQALQSWVDPWFKPLAYAFILTRQEGYPCVFYGDYYGIPQYNIPSLKSKIDPLLIARRDYAYGTQHDYLDHSDIIGWTREGGTEKPGSGLAALITDGPGGSKWMYVGKQHAGKVFYDLTGNRSDTVTINSDGWGEFKVNGGSVSVWVPRKTTVS

SEQ ID NO: 16450 - protein, 486 aa, Geobacillus stearothermophilus
AAPFNGTMMQYFEWYLPDDGTLWTKVANEANNLSSLGITALWLPPAYKGTSRSDVGYGVYDLYDLGEFNQKGTVRTKYGTKAQYLQAIQAAHAAGMQVYADVVFDHKAGADGTEWVDAVEVNPSDRNQEISGTYQIQAWTKFDFPGRGNTYSSFKWRWYHFDGVDWDESRKLSRIYKFRGKAWDWEVDTEFGNYDYLMYADLDMDHPEVVTELKNWGKWYVNTTNIDGFRLDAVKHIKFSFFPDWLSYVRSQTGKPLFTVGEYWSYDINKLHNYITKTDGTMSLFDAPLHNKFYTASKSGGAFDMRTLMTNTLMKDQPTLAVTFVDNHDTEPGQALQSWVDPWFKPLAYAFILTRQEGYPCVFYGDYYGIPQYNIPSLKSKIDPLLIARRDYAYGTQHDYLDHSDIIGWTREGGTEKPGSGLAALITDGPGGSKWMYVGKQHAGKVFYDLTGNRSDTVTINSDGWGEFKVNGGSVSVWVPRKTTVS

SEQ ID NO: 16451 - protein, 486 aa, Geobacillus stearothermophilus
AAPFNGTMMQYFEWYLPDDGTLWTKVANEANNLSSLGITALWLPPAYKGTSRSDVGYGEYDLYDLGEFNQKGTVRTKYGTKAQYLQAIQAAHAAGMQVYADVVFDHKGGADGTEWVDAVEVNPSDRNQEISGTYQIQAWTKFDFPGRGNTYSSFKWRWYHFDGVDWDESRKLSRIYKFRGKAWDWEVDTEFGNYDYLMYADLDMDHPEVVTELKNWGKWYVNTTNIDGFRLDAVKHIKFSFFPDWLSYVRSQTGKPLFTVGEYWSYDINKLHNYITKTDGTMSLFDAPLHNKFYTASKSGGAFDMRTLMTNTLMKDQPTLAVTFVDNHDTEPGQALQSWVDPWFKPLAYAFILTRQEGYPCVFYGDYYGIPQYNIPSLKSKIDPLLIARRDYAYGTQHDYLDHSDIIGWTREGGTEKPGSGLAALITDGPGGSKWMYVGKQHAGKVFYDLTGNRSDTVTINSDGWGEFKVNGGSVSVWVPRKTTVS

SEQ ID NO: 16452 - protein, 486 aa, Geobacillus stearothermophilus
AAPFNGTMMQYFEWYLPDDGTLWTKVANEANNLSSLGITALWLPPAYKGTSRSDVGYGIYDLYDLGEFNQKGTVRTKYGTKAQYLQAIQAAHAAGMQVYADVVFDHKGGADGTEWVDAVEVNPSDRNQEISGTYQIQAWTKFDFPGRGNTYSSFKWRWYHFDGVDWDESRKLSRIYKFRGKAWDWEVDTEFGNYDYLMYADLDMDHPEVVTELKNWGKWYVNTTNIDGFRLDAVKHIKFSFFPDWLSYVRSQTGKPLFTVGEYWSYDINKLHNYITKTDGTMSLFDAPLHNKFYTASKSGGAFDMRTLMTNTLMKDQPTLAVTFVDNHDTEPGQALQSWVDPWFKPLAYAFILTRQEGYPCVFYGDYYGIPQYNIPSLKSKIDPLLIARRDYAYGTQHDYLDHSDIIGWTREGGTEKPGSGLAALITDGPGGSKWMYVGKQHAGKVFYDLTGNRSDTVTINSDGWGEFKVNGGSVSVWVPRKTTVS

SEQ ID NO: 16453 - protein, 486 aa, Geobacillus stearothermophilus
AAPFNGTMMQYFEWYLPDDGTLWTKVANEANNLSSLGITALWLPPAYKGTSRSDVGYGQYDLYDLGEFNQKGTVRTKYGTKAQYLQAIQAAHAAGMQVYADVVFDHKGGADGTEWVDAVEVNPSDRNQEISGTYQIQAWTKFDFPGRGNTYSSFKWRWYHFDGVDWDESRKLSRIYKFRGKAWDWEVDTEFGNYDYLMYADLDMDHPEVVTELKNWGKWYVNTTNIDGFRLDAVKHIKFSFFPDWLSYVRSQTGKPLFTVGEYWSYDINKLHNYITKTDGTMSLFDAPLHNKFYTASKSGGAFDMRTLMTNTLMKDQPTLAVTFVDNHDTEPGQALQSWVDPWFKPLAYAFILTRQEGYPCVFYGDYYGIPQYNIPSLKSKIDPLLIARRDYAYGTQHDYLDHSDIIGWTREGGTEKPGSGLAALITDGPGGSKWMYVGKQHAGKVFYDLTGNRSDTVTINSDGWGEFKVNGGSVSVWVPRKTTVS

SEQ ID NO: 16454 - protein, 486 aa, Geobacillus stearothermophilus
AAPFNGTMMQYFEWYLPDDGTLWTKVANEANNLSSLGITALWLPPAYKGTSRSDVGYGVYDLYDLGEFNQKGTVRTKYGTKAQYLQAIQAAHAAGMQVYADVVFDHKGGADGTEWVDAVEVNPSDRNQEISGTYQIQAWTKFDFPGRGNTYSSFKWRWYHFDGVDWDESRKLSRIYKFRGKAWDWEVDTEFGNYDYLMYADLDMDHPEVVTELKNWGKWYVNTTNIDGFRLDAVKHIKFSFFPDWLSYVRSQTGKPLFTVGEYWSYDINKLHNYITKTDGTVSLFDAPLHNKFYTASKSGGAFDMRTLMTNTLMKDQPTLAVTFVDNHDTEPGQALQSWVDPWFKPLAYAFILTRQEGYPCVFYGDYYGIPQYNIPSLKSKIDPLLIARRDYAYGTQHDYLDHSDIIGWTREGGTEKPGSGLAALITDGPGGSKWMYVGKQHAGKVFYDLTGNRSDTVTINSDGWGEFKVNGGSVSVWVPRKTTVS

SEQ ID NO: 16455 - protein, 486 aa, Geobacillus stearothermophilus
AAPFNGTMMQYFEWYLPDDGTLWTKVANEANNLSSLGITALWLPPAYKGTSRSDVGYGAYDLYDLGEFNQKGTVRTKYGTKAQYLQAIQAAHAAGMQVYADVVFDHKGGADGTEWVDAVEVNPSDRNQEISGTYQIQAWTKFDFPGRGNTYSSFKWRWYHFDGVDWDESRKLSRIYKFRGKAWDWEVDTEFGNYDYLMYADLDMDHPEVVTELKNWGKWYVNTTNIDGFRLDAVKHIKFSFFPDWLSYVRSQTGKPLFTVGEYWSYDINKLHNYITKTDGTMSLFDAPLHNKFYTASKSGGAFDMRTLMTNTLMKDQPTLAVTFVDNHDTEPGQALQSWVDPWFKPLAYAFILTRQEGYPCVFYGDYYGIPQYNIPSLKSKIDPLLIARRDYAYGTQHDYLDHSDIIGWTREGGTEKPGSGLAALITDGPGGSKWMYVGKQHAGKVFYDLTGNRSDTVTINSDGWGEFKVNGGSVSVWVPRKTTVS

SEQ ID NO: 16456 - protein, 488 aa, Geobacillus stearothermophilus
AAPFNGTMMQYFEWYLPDDGTLWTKVANEANNLSSLGITALWLPPAYKGTSRSDVGYGVYDLYDLGEFNQKGTVRTKYGTKAQYLQAIQAAHAAGMQVYADVVFDHKGGADGTEWVDAVEVNPSDRNQEISGTYQIQAWTKFDFPGRGNTYSSFKWRWYHFDGVDWDESRKLSRIYKFRGIGKAWDWEVDTENGNYDYLMYADLDMDHPEVVTELKNWGKWYVNTTNIDGFRLDAVKHIKFSFFPDWLSYVRSQTGKPLFTVGEYWSYDINKLHNYITKTDGTMSLFDAPLHNKFYTASKSGGAFDMRTLMTNTLMKDQPTLAVTFVDNHDTEPGQALQSWVDPWFKPLAYAFILTRQEGYPCVFYGDYYGIPQYNIPSLKSKIDPLLIARRDYAYGTQHDYLDHSDIIGWTREGGTEKPGSGLAALITDGPGGSKWMYVGKQHAGKVFYDLTGNRSDTVTINSDGWGEFKVNGGSVSVWVPRKTTVS

SEQ ID NO: 16457 - protein, 484 aa, Aspergillus niger
AATALAATPADWRSQSIYFLLTDRFARTDGSTTATCNTADQKYCGGTWQGIIDKLDYIQGMGFTAIWITPVTAQLPQTTAYGDAYHGYWQQDIYSLNENYGTADDLKALSSALHERGMYLMVDVVANHMGYDGAGSSVDYSVFKPFSSQDYFHPFCFIQNYEDQTQVEDCWLGDNTVSLPDLDTTKDVVKNEWYDWVGSLVSNYSIDGLRIDTVKHVQKDFWPGYNKAAGVYCIGEVLDGDPAYTCPYQNVMDGVLNYPIYYPLLNAFKSTSGSMDDLYNMINTVKSDCPDSTLLGTFVENHDNPRFASYTNDIALAKNVAAFIILNDGIPIIYAGQEQHYAGGNDPANREATWLSGYPTDSELYKLIASANAIRNYAISKDTGFVTYKNWPIYKDDTTIAMRKGTDGSQIVTILSNKGASGDSYTLSLSGAGYTAGQQLTEVIGCTTVTVGSDGNVPVPMAGGLPRVLYPTEKLAGSKICSSS

SEQ ID NO: 16458 - protein, 485 aa, Unidentified
HHNGTNGTMMQYFEWDLPNDGNHWNRLRDDASNLRNRGITAIWIPPAWKGTSQNDVGYGAYDLYDLGEFNQKGTVRTKYGTRSQLESAIHALKNNGVQVYGDVVMNHKGGADATENVLAVEVNPNNRNQEISGDYTIEAWTKFDFPGRGNTYSDFKWRWYHFDGVDWDQSRQFQNRIYKFRGDGKAWDWEVDSENGNYDYLMYADVDMDHPEVVNELRRWGEWYTNTLNLDGFRIDAVKHIKYSFTRDWLTHVRNATGKEMFAVAEFWKNDLGALENYLNKTNWNHSVFDVPLHYNLYNASNSGGNYDMAKLLNGTVVQKHPMHAVTFVDNHDSQPGESLESFVQEWFKPLAYALILTREQGYPSVFYGDYYGIPTHSVPAMKAKIDPILEARQNFAYGTQHDYFDHHNIIGWTREGNTTHPNSGLATIMSDGPGGEKWMYVGQNKAGQVWHDITGNKPGTVTINADGWANFSVNGGSVSIWVKR

SEQ ID NO: 16459 - protein, 485 aa, Unidentified
HHNGTNGTMMQYFEWHLPNDGNHWNRLRDDASNLRNRGITAIWIPPAWKGTSQNDVGYGAYDLYDLGEFNQKGTVRTKYGTRSQLESAIHALKNNGVQVYGDVVMNHKGGADATENVLAVEVNPNNRNQEISGDYTIEAWTKFDFPGRGNTYSDFKWREYHFDGVDWDQSRQFQNRIYKFRGDGKAWDWEVDSENGNYDYLMYADVDMDHPEVVNELRRWGEWYTNTLNLDGFRIDAVKHIKYSFTRDWLTHVRNATGKEMFAVAEFWKNDLGALENYLNKTNWNHSVFDVPLHYNLYNASNSGGNYDMAKLLNGTVVQKHPMHAVTFVDNHDSQPGESLESFVQEWFKPLAYALILTREQGYPSVFYGDYYGIPTHSVPAMKAKIDPILEARQNFAYGTQHDYFDHHNIIGWTREGNTTHPNSGLATIMSDGPGGEKWMYVGQNKAGQVWHDITGNKPGTVTINADGWANFSVNGGSVSIWVKR

SEQ ID NO: 16460 - protein, 485 aa, Unidentified
HHNGTNGTMMQYFEWHLPNDGNHWNRLRDDASNLRNRGITTIWIPPAWKGTSQNDVGYGAYDLYDLGEFNQKGTVRTKYGTRSQLESAIHALKNNGVQVYGDVVMNHKGGADATENVLAVEVNPNNRNQEISGDYTIEAWTKFDFPGRGNTYSDFKWRWYHFDGVDWDQSRQFQNRIYKFRGDGKAWDWEVDSENGNYDYLMYADVDMDHPEVVNELRRWGEWYTNTLNLDGFRIDAVKHIKYSFTRDWLTHVRNATGKEMFAVAEFWKNDLGALENYLNKTNWNHSVFDVPLHYNLYNASNSGGNYDMAKLLNGTVVQKHPMHAVTFVDNHDSQPGESLESFVQEWFKPLAYALILTREQGYPSVFYGDYYGIPTHSVPAMKAKIDPILEARQNFAYGTQHDYFDHHNIIGWTREGNTTHPNSGLATIMSDGPGGEKWMYVGQNKAGQVWHDITGNKPGTVTINADGWANFSVNGGSVSIWVKR

SEQ ID NO: 16461 - protein, 485 aa, Unidentified
HHNGTNGTMMQYFEWHLPNDGNHWNRLRDDASNLRNRGITAIWIPPAWKGTSQNDVGYGAYDLYDLGEFNQKGTVRTKYGTRSQLESAIHALKNNGVQVYGDVVMNHKGGADATENVLAVEVNPNNRNQEISGDYTIEAWTKFDFPGRGNTYSDFKWRWYHFDGVDWDQSRQFQNRIYKFRGDGKAWDWEVDSENGNYDYLMYADVDMDHPEVVNELRRWGEWYTNTLNLDGFRIDAVKHIKYSFTRDWLTHVRNATGKEMLAVAEFWKNDLGALENYLNKTNWNHSVFDVPLHYNLYNASNSGGNYDMAKLLNGTVVQKHPMHAVTFVDNHDSQPGESLESFVQEWFKPLAYALILTREQGYPSVFYGDYYGIPTHSVPAMKAKIDPILEARQNFAYGTQHDYFDHHNIIGWTREGNTTHPNSGLATIMSDGPGGEKWMYVGQNKAGQVWHDITGNKPGTVTINADGWANFSVNGGSVSIWVKR

SEQ ID NO: 16462 - protein, 485 aa, Unidentified
HHNGTNGTMMQYFEWHLPNDGNHWNRLRDDASNLRNRGITAIWIPPAWKGTSQNDVGYGAYDLYDLGEFNQKGTVRTKYGTRSQLESAIHALKNNGVQVYGDVVMNHKGGADATENVLAVEVNPNNRNQEISGDYTIEAWTKFDFPGRGNTYSDFKWRWYHFDGVDWDQSRQFQNRIYKFRGDGKAWDWEVDSENGNYDYLMYHDVDMDHPEVVNELRRWGEWYTNTLNLDGFRIDAVKHIKYSFTRDWLTHVRNATGKEMFAVAEFWKNDLGALENYLNKTNWNHSVFDVPLHYNLYNASNSGGNYDMAKLLNGTVVQKHPMHAVTFVDNHDSQPGESLESFVQEWFKPLAYALILTREQGYPSVFYGDYYGIPTHSVPAMKAKIDPILEARQNFAYGTQHDYFDHHNIIGWTREGNTTHPNSGLATIMSDGPGGEKWMYVGQNKAGQVWHDITGNKPGTVTINADGWANFSVNGGSVSIWVKR

SEQ ID NO: 16463 - protein, 485 aa, Unidentified
HHNGTNGTMMQYFEWHLPNDGNHWNRLRDDASNLRNRGITAIWIPPAWKGTSQNDVGYGAYDLYDLGEFNQKGTVRTKYGTRSQLESAIHALKNNGVQVYGDVVMNHKGGADATENVLAVEVNPNNRNQEISGDYTIEAWTKFDFPGRGNTYSDFKWRWYHFDGVDWDQSRQFQNRIYKFRGDGKAWDWEVDSENGNYDYLMYADVDMDHPEVVNELRRWGEWYTNTLNLDGFRIDAVKHIKYSFTRDWLTHVRNATGKEMHAVAEFWKNDLGALENYLNKTNWNHSVFDVPLHYNLYNASNSGGNYDMAKLLNGTVVQKHPMHAVTFVDNHDSQPGESLESFVQEWFKPLAYALILTREQGYPSVFYGDYYGIPTHSVPAMKAKIDPILEARQNFAYGTQHDYFDHHNIIGWTREGNTTHPNSGLATIMSDGPGGEKWMYVGQNKAGQVWHDITGNKPGTVTINADGWANFSVNGGSVSIWVKR

SEQ ID NO: 16464 - protein, 485 aa, Unidentified
HHNGTNGTMMQYFEWHLPNDGNHWNRLRDDASNLRNRGITAIWIPPAWKGTSQNDVGYGAYDLYDLGEFNQKGTVRTKYGTRSQLESAIHALKNNGVQVYGDVVMNHKGGADATENVLAVEVNPNNRNQEISGDYTIEAWTKFDFPGRGNTYSDFKWRWYHFDGVDWDQSRQFQNRIYKFRGDGKAWDWEVDSENGNYDYLMYADVDMDHPEVVNELRRWGEWYRNTLNLDGFRIDAVKHIKYSFTRDWLTHVRNATGKEMFAVAEFWKNDLGALENYLNKTNWNHSVFDVPLHYNLYNASNSGGNYDMAKLLNGTVVQKHPMHAVTFVDNHDSQPGESLESFVQEWFKPLAYALILTREQGYPSVFYGDYYGIPTHSVPAMKAKIDPILEARQNFAYGTQHDYFDHHNIIGWTREGNTTHPNSGLATIMSDGPGGEKWMYVGQNKAGQVWHDITGNKPGTVTINADGWANFSVNGGSVSIWVKR

SEQ ID NO: 16465 - protein, 485 aa, Unidentified
HHNGTNGTMMQYFEWHLPNDGNHWNRLRDDASNLRNRGITAIWIPPAWKGTSQNDVGYGAYDLYDLGEFNQKGTVRTKYGTRSQLESAIHALKNNGVQVYGDVVMNHKGGADATENVLAVEVNPNNRNQEISGDYTIEAWTKFDFPGRGNTYSDFKWRWYHFDGVDWDQSRQFQNRIYKFRGDGKAWDWEVDSENGNYDYLMYADVDMDHPEVVNELRRWGEWYTNTLNLDGFRIDAVKHIKYSFTRDWLTHVRNATGKEMFAVAEFWKNDLGALENYLNKTNWNHSVFDVPLHYNLYNASNSGGNYDMAKLLNGTVVQKHPMHAVTFVDNHDSQPGESLESFVQEEFKPLAYALILTREQGYPSVFYGDYYGIPTHSVPAMKAKIDPILEARQNFAYGTQHDYFDHHNIIGWTREGNTTHPNSGLATIMSDGPGGEKWMYVGQNKAGQVWHDITGNKPGTVTINADGWANFSVNGGSVSIWVKR

SEQ ID NO: 16466 - protein, 485 aa, Unidentified
HHNGTNGTMMQYFEWHLPNDGNHWNRLRDDASNLRNRGITAIWIPPAWKGTSQNDVGYGAYDLYDLGEFNQKGTVRTKYGTRSQLESAIHALKNNGVQVYGDVVMNHKGGADATENVLAVEVNPNNRNQEISGDYTIEAWTKFDFPGRGNTYSDFKWRWYHFDGVDWDQSRQFQNRIYKFRGDGKAWDWEVDSENGNYDYLMYADVDMDHPEVVNELRRWGEWYTNTLNLDGFRIDAVKHIKYSFTRDWLTHVRPATGKEMFAVAEFWKNDLGALENYLNKTNWNHSVFDVPLHYNLYNASNSGGNYDMAKLLNGTVVQKHPMHAVTFVDNHDSQPGESLESFVQEWFKPLAYALILTREQGYPSVFYGDYYGIPTHSVPAMKAKIDPILEARQNFAYGTQHDYFDHHNIIGWTREGNTTHPNSGLATIMSDGPGGEKWMYVGQNKAGQVWHDITGNKPGTVTINADGWANFSVNGGSVSIWVKR

SEQ ID NO: 16467 - protein, 485 aa, Bacillus sp.
HHNGTNGTMMQYFEWHLPNDGNHWNRLRDDASNLRNRGITAIWIPPAWKGTSQNDVGYGAYDLYDLGEFNQKGTVRTKYGTRSQLESAIHALKNNGVQVYGDVVMNHKGGADATENVLAVEVNPNNRNQEISGDYTIEAWTKFDFPGRGNTYSDFKWRWYHFDGVDWDQSRQFQNRIYKFRGDGKAWDWEVDSENGNYDFLMYADVDMDHPEVVNELRRWGEWYTNTLNLDGFRIDAVKHIKYSFTRDWLTHVRNATGKEMFAVAEFWKNDLGALENYLNKTNWNHSVFDVPLHYNLYNASNSGGNYDMAKLLNGTVVQKHPMHAVTFVDNHDSQPGESLESFVQEWFKPLAYALILTREQGYPSVFYGDYYGIPTHSVPAMKAKIDPILEARQNFAYGTQHDYFDHHNIIGWTREGNTTHPNSGLATIMSDGPGGEKWMYVGQNKAGQVWHDITGNKPGTVTINADGWANFSVNGGSVSIWVKR

SEQ ID NO: 16468 - protein, 485 aa, Unidentified
HHNGTNGTMMQYFEWHLPNDGNHWNRLRDDASNLRNRGITAIWIPPAWKGTSQNDVGYGAYDLYDLGEFNQKGTVRTKYGTRSQLESAIHALKNNGVQVYGDVVMNHKGGADATENVLAVEVNPNNRNQEISGDYTIELWTKFDFPGRGNTYSDFKWRWYHFDGVDWDQSRQFQNRIYKFRGDGKAWDWEVDSENGNYDYLMYADVDMDHPEVVNELRRWGEWYTNTLNLDGFRIDAVKHIKYSFTRDWLTHVRNATGKEMFAVAEFWKNDLGALENYLNKTNWNHSVFDVPLHYNLYNASNSGGNYDMAKLLNGTVVQKHPMHAVTFVDNHDSQPGESLESFVQEWFKPLAYALILTREQGYPSVFYGDYYGIPTHSVPAMKAKIDPILEARQNFAYGTQHDYFDHHNIIGWTREGNTTHPNSGLATIMSDGPGGEKWMYVGQNKAGQVWHDITGNKPGTVTINADGWANFSVNGGSVSIWVKR

SEQ ID NO: 16469 - protein, 485 aa, Unidentified
HHNGTNGTMMQYFEWHLPNDGNHWNRLRDDASNLRNRGITAIWIPPAWKGTSQNDVGYGAYDLYDLGEFNQKGTVRTKYGTRSQLESAIHALKNNGVQVYGDVVMNHKGGADATENVLAVEVNPNNRNQEISGDYTIEAWTKFDFPGRGNTYSDFKWRWYHFDGVDWDQSRQFQNRIYKFRGDGKAWDWEVDSENGNYDYLMYADVDMDHPEVVNELRRWGEWYTNTLNLDGFRIDAVKHIKYSFTRDWLTHVRNATGKEMFAVAEFWKNDLGALENYLNKTNWNHSVFDVPLHYNLYNASNSGGNYDMAKLLNGTVVQKHPMHAVTFVDNHDSQPGESLESFVQEWFKPLAYALILTREQGYPSVFYGDYYGIPTHSVPAMKAKIDPILEARQNFAYGTQHDYFDHHNIIGWTREGNTTHPGSGLATIMSDGPGGEKWMYVGQNKAGQVWHDITGNKPGTVTINADGWANFSVNGGSVSIWVKR

SEQ ID NO: 16470 - protein, 485 aa, Unidentified
HHNGTNGTMMQYFEWHLPNDGNHWNRLRDDASNLRNRGITAIWIPPAWKGTSQNDVGYGAYDLYDLGEFNQKGTVRTKYGTRSWLESAIHALKNNGVQVYGDVVMNHKGGADATENVLAVEVNPNNRNQEISGDYTIEAWTKFDFPGRGNTYSDFKWRWYHFDGVDWDQSRQFQNRIYKFRGDGKAWDWEVDSENGNYDYLMYADVDMDHPEVVNELRRWGEWYTNTLNLDGFRIDAVKHIKYSFTRDWLTHVRNATGKEMFAVAEFWKNDLGALENYLNKTNWNHSVFDVPLHYNLYNASNSGGNYDMAKLLNGTVVQKHPMHAVTFVDNHDSQPGESLESFVQEWFKPLAYALILTREQGYPSVFYGDYYGIPTHSVPAMKAKIDPILEARQNFAYGTQHDYFDHHNIIGWTREGNTTHPNSGLATIMSDGPGGEKWMYVGQNKAGQVWHDITGNKPGTVTINADGWANFSVNGGSVSIWVKR

SEQ ID NO: 16471 - protein, 485 aa, Bacillus sp.
HHNGTNGTMMQYFEWHLPNDGNHWNRLRDDASNLRNRGITAIWIPPAWKGTSQNDVGYGAYDLYDLGEFNQKGTVRTKYGTRSQLESAIHALKNNGVQVYGDVVMNHKGGADATENVLAVEVNPNNRNQEISGDYTIEAWTKFDFPGRGNTYSDFKWRWYHFDGVDWDQSRQFQNRIYKFRGDGKAWDWEVDSENGNYDYLMYADVDMDHPEVVNELRRWGEWYTNTLNLDGFRIDAVKHIKYSFTRDWLTHVRNATGKEMFAVAEFWKNDLGALENYLNKTNWNHSVFDVPLHYNLYNASNSGGNYDMAKLLNGTVVQKHPMHAVTFVDNHDSQPGESLESFVQEWFKPLAYALALTREQGYPSVFYGDYYGIPTHSVPAMKAKIDPILEARQNFAYGTQHDYFDHHNIIGWTREGNTTHPNSGLATIMSDGPGGEKWMYVGQNKAGQVWHDITGNKPGTVTINADGWANFSVNGGSVSIWVKR

SEQ ID NO: 16472 - protein, 485 aa, Unidentified
HHNGTNGTMMQYFEWHLPNDGNHWNRLRDDASNLRNRGITAIWIPPAWKGTSQNDVGYGAYDLYDLGEFNQKGTVRTKYGTRSQLESAIHALKNNGVQVYGDVVMNHKGGADATENVLAVEVNPNNRNQEISGDYTIEAWTKFDFPGRGNTYSDFKWRWYHFDGVDWDQSRQFQNRIYKFRGDGKAWDWEVDSENGNYDYLMYADVDMDHPEVVNELRRWGEWYTNTLNLDGFRIDAVKHIKYSFTRDWLTHVRNATGKEMFAVAEFWKNDLGALENYLNKTNWNHRVFDVPLHYNLYNASNSGGNYDMAKLLNGTVVQKHPMHAVTFVDNHDSQPGESLESFVQEWFKPLAYALILTREQGYPSVFYGDYYGIPTHSVPAMKAKIDPILEARQNFAYGTQHDYFDHHNIIGWTREGNTTHPNSGLATIMSDGPGGEKWMYVGQNKAGQVWHDITGNKPGTVTINADGWANFSVNGGSVSIWVKR

SEQ ID NO: 16473 - protein, 485 aa, Unidentified
HHNGTNGTMMQYFEWHLPNDGNHWNRLRDDASNLRNRGITAIWIPPAWKGTSQNDVGYGAYDLYDLGEFNQKGTVRTKYGTRSQLESAIHALKNNGVQVYGDVVMNHKGGADATENVLAVEVNPNNRNQEISGDYTIEAWTKFDFPGRGNTYSDFKWRWYHFDGVDWDQSRQFQNRIYKFRGDGKAWDWEVDSENGNYDYLMYADVDMDHPEVVNELRRWGEWYTNTLNLDGFRIDAVKHIKYSFTRDWLTHVRNATGKEMFAVAEFWKNDLGALENYLNKTNWNHSVFDVPLHYNLYNASNSGGNYDMAKLLNGTVVQKHPMHAVTFVDNHDSQPGESLESFVQEWFKPLAYALILTGEQGYPSVFYGDYYGIPTHSVPAMKAKIDPILEARQNFAYGTQHDYFDHHNIIGWTREGNTTHPNSGLATIMSDGPGGEKWMYVGQNKAGQVWHDITGNKPGTVTINADGWANFSVNGGSVSIWVKR

SEQ ID NO: 16474 - protein, 485 aa, Unidentified
HHNGTNGTMMQYFEWHLPNDGNHWNRLRDDASNLRNRGITAIWIPPAWKGTSQNDVGYGAYDLYDLGEFNQKGTVRTKYGTRSQLESAIHALKNNGVQVYGDVVMNHKGGADATENVLAVEVNPNNRNQEISGDYTIEAWTKFDFPGRGNTYSDFKWRWYHFDGVDWDQSRQFQNRIYKFRGDGVAWDWEVDSENGNYDYLMYADVDMDHPEVVNELRRWGEWYTNTLNLDGFRIDAVKHIKYSFTRDWLTHVRNATGKEMFAVAEFWKNDLGALENYLNKTNWNHSVFDVPLHYNLYNASNSGGNYDMAKLLNGTVVQKHPMHAVTFVDNHDSQPGESLESFVQEWFKPLAYALILTREQGYPSVFYGDYYGIPTHSVPAMKAKIDPILEARQNFAYGTQHDYFDHHNIIGWTREGNTTHPNSGLATIMSDGPGGEKWMYVGQNKAGQVWHDITGNKPGTVTINADGWANFSVNGGSVSIWVKR

SEQ ID NO: 16475 - protein, 485 aa, Unidentified
HHNGTNGTMMQYFEWHLPNDGNHWNRLRDDASNLRNRGITAIWIPPAWKGTSQNDVGYGAYDLYDLGEFNQKGTVRTKYGTRSQLESAIHALKNNGVQVYGDVVMNHKGGADATENVLAVEVNPNNRNQEISGDYTIEAWTKFDFPGRGNTYSDFKWRWYHFDGVDWDQSRQFQNRIYKFRGDGKAWDWEVDSENGNYDYLMYADVDMDHPEVVNELRRWGEWYTNTLNLDGFRIDAVKHIKYSFTRDWLTHVRNATGKEMAAVAEFWKNDLGALENYLNKTNWNHSVFDVPLHYNLYNASNSGGNYDMAKLLNGTVVQKHPMHAVTFVDNHDSQPGESLESFVQEWFKPLAYALILTREQGYPSVFYGDYYGIPTHSVPAMKAKIDPILEARQNFAYGTQHDYFDHHNIIGWTREGNTTHPNSGLATIMSDGPGGEKWMYVGQNKAGQVWHDITGNKPGTVTINADGWANFSVNGGSVSIWVKR

SEQ ID NO: 16476 - protein, 485 aa, Unidentified
HHNGTNGTMMQYFEWHLPNDGNHWNRLRDDASNLRNRGITAIWIPPAWKGTSQNDVGYGAYDLYDLGEFNQKGTVRTKYGTRSQLESAIHALKNNGVQVYGDVVMNHKGGADATENVLAVEVNPNNRNQEISGDYTIEAWTKFDFNGRGNTYSDFKWRWYHFDGVDWDQSRQFQNRIYKFRGDGKAWDWEVDSENGNYDYLMYADVDMDHPEVVNELRRWGEWYTNTLNLDGFRIDAVKHIKYSFTRDWLTHVRNATGKEMFAVAEFWKNDLGALENYLNKTNWNHSVFDVPLHYNLYNASNSGGNYDMAKLLNGTVVQKHPMHAVTFVDNHDSQPGESLESFVQEWFKPLAYALILTREQGYPSVFYGDYYGIPTHSVPAMKAKIDPILEARQNFAYGTQHDYFDHHNIIGWTREGNTTHPNSGLATIMSDGPGGEKWMYVGQNKAGQVWHDITGNKPGTVTINADGWANFSVNGGSVSIWVKR

SEQ ID NO: 16477 - protein, 483 aa, Bacillus sp.
HHNGTNGTMMQYFEWHLPNDGNHWNRLRDDASNLRNRGITAIWIPPAWKGTSQNDVGYGAYDLYDLGEFNQKGTVRTKYGTRSQLESAIHALKNNGVQVYGDVVMNHKGGADATENVLAVEVNPNNRNQEISGDYTIEAWTKFDFPGRGNTYSDFKWRWYHFDGVDWDQSRQFQNRIYKFRGKAWDWEVDTENGNYDYLMYADVDMDHPEVVNELRRWGEWYTNTLNLDGFRIDAVKHIKYSFTRDWLTHVRNATGKEMFAVAEFWKNDLGALENYLNKTNWNHSVFDVPLHYNLYNASNSGGNYDMAKLLNGTVVQKHPMHAVTFVDNHDSQPGESLESFVQEWFKPLAYALILTREQGYPSVFYGDYYGIPTHSVPAMKAKIDPILEARQNFAYGTQHDYFDHHNIIGWTREGNTTHPNSGLATIMSDGPGGEKWMYVGQNKAGQVWHDITGNKPGTVTINADGWANFSVNGGSVSIWVKR

SEQ ID NO: 16478 - protein, 485 aa, Bacillus sp.
HHNGTNGTMMQYFEWHLPNDGNHWNRLRDDASNLRNRGITAIWIPPAWKGTSQNDVGYGAYDLYDLGEFNQKGTVRTKYGTRSQLESAIHALKNNGVQVYGDVVMNHKGGADATENVLAVEVNPNNRNQEISGDYTIEAWTKFDFPGRGNTYSDFKWRWYHFDGVDWDQSRQFQNRIYKFRGXXKAWDWEVDSENGNYDYLMYADLDMDHPEVVNELRRWGEWYTNTLNLDGFRIDAVKHIKYSFTRDWLTHVRNATGKEMFAVAEFWKNDLGALENYLNKTNWNHSVFDVPLHYNLYNASNSGGNYDMAKLLNGTVVQKHPMHAVTFVDNHDSQPGESLESFVQEWFKPLAYALILTREQGYPSVFYGDYYGIPTHSVPAMKAKIDPILEARQNFAYGTQHDYFDHHNIIGWTREGNTTHPNSGLATIMSDGPGGEKWMYVGQNKAGQVWHDITGNKPGTVTINADGWANFSVNGGSVSIWVKR

SEQ ID NO: 16479 - protein, 485 aa, Unidentified
HHNGTNGTMMQYFEWHLPNDGNHWNRLRDDASNLRNRGITAIWIPPAWKGTSQNDVGYGAYDLYDLGEFNQKGTVRTKYGTRSQLESAIHALKNNGVQVYGDVVMNHKGGADATENVLAVEVNPNNRNQEISGDYTIEAWTKFDFPGRGNTYSDFKWRWYHFDGVDWDQSRQFQNRIYKFRGDGKAWDWEVDSENGNYDYLMYADVDMDHPEVVNELRRWGEWYTNTLNLDGFRIDAVKHIKYSFTRDWLTHVRNATGKEMNAVAEFWKNDLGALENYLNKTNWNHSVFDVPLHYNLYNASNSGGNYDMAKLLNGTVVQKHPMHAVTFVDNHDSQPGESLESFVQEWFKPLAYALILTREQGYPSVFYGDYYGIPTHSVPAMKAKIDPILEARQNFAYGTQHDYFDHHNIIGWTREGNTTHPNSGLATIMSDGPGGEKWMYVGQNKAGQVWHDITGNKPGTVTINADGWANFSVNGGSVSIWVKR

SEQ ID NO: 16480 - protein, 483 aa, Synthetic construct
HHNGTNGTMMQYFEWHLPNDGNHWNRLRDDASNLRNRGITAIWIPPAWKGTSQNDVGYGAYDLYDLGEFNQKGTVRTKYGTRSQLESAIHALKNNGVQVYGDVVMNHKGGADATENVLAVEVNPNNRNQEISGDYTIEAWTKFDFPGRGNTYSDFKWRWYHFDGVDWDQSRQFQNRIYKFRGKAWDWEVDSENGNYDYLXYADVDMDHPEVVNELRRWGEWYTNTLNLDGFRIDAVKHIKYSFTRDWLTHVRNATGKEMFAVAEFWKNDLGALENYLNKTNWNHSVFDVPLHYNLYNASNSGGNYDMAKLLNGTVVQKHPMHAVTFVDNHDSQPGESLESFVQEWFKPLAYALILTREQGYPSVFYGDYYGIPTHSVPAMKAKIDPILEARQNFAYGTQHDYFDHHNIIGWTREGNTTHPNSGLATIMSDGPGGEKWMYVGQNKAGQVWHDITGNKPGTVTINADGWANFSVNGGSVSIWVKR

SEQ ID NO: 16481 - protein, 485 aa, Unidentified
HHNGTNGTMMQYFEWHLPNDGNHWNRLRDDASNLRNRGITAIWIPPAWKGTSQNDVGYGAYDLYDLGEFNQKGTVRTKYGTRSQLESAIHALKNNGVQVYGDVVMNHKGGADATENVLAVEVNPNNRNQEISGDYTIEAWTKFDFPGRGNTYSDFKWRWYHFDGVDWDQSRQFQNRIYKFRGDGKAWDWEVDSENGNYDYLMYADVDMDHPEVVNELRRWGEWYTNTLNLDGFRIDAVKHIKYSFTRDWLTHVRNATGKEMFAVAEFWKNDLGALENYLNKTNWNHSVFDVPLHYNLYNASNSGGNYDMAKLLNGTVVQKHPMHAVTFVDNHDSQPGESLESFVQEWFKPLAYALILTREQGYPSVFYGDYYGIPTHSVPAMKAKIDPILEARQNFAYGTQHDYFDHHNIIGWTREGNTTHNNSGLATIMSDGPGGEKWMYVGQNKAGQVWHDITGNKPGTVTINADGWANFSVNGGSVSIWVKR

SEQ ID NO: 16482 - protein, 485 aa, Unidentified
HHNGTNGTMMQYFEWHLPNDGNHWNRLRDDASNLRNRGITAIWIPPAWKGTSQNDVGYGAYDLYDLGEFNQKGTVRTKYGTRSQLESAIHALKNNGVQVYGDVVMNHKGGADATENVLAVEVNPNNRNQEISGDYTQEAWTKFDFPGRGNTYSDFKWRWYHFDGVDWDQSRQFQNRIYKFRGDGKAWDWEVDSENGNYDYLMYADVDMDHPEVVNELRRWGEWYTNTLNLDGFRIDAVKHIKYSFTRDWLTHVRNATGKEMFAVAEFWKNDLGALENYLNKTNWNHSVFDVPLHYNLYNASNSGGNYDMAKLLNGTVVQKHPMHAVTFVDNHDSQPGESLESFVQEWFKPLAYALILTREQGYPSVFYGDYYGIPTHSVPAMKAKIDPILEARQNFAYGTQHDYFDHHNIIGWTREGNTTHPNSGLATIMSDGPGGEKWMYVGQNKAGQVWHDITGNKPGTVTINADGWANFSVNGGSVSIWVKR

SEQ ID NO: 16483 - protein, 485 aa, Bacillus sp.
HHNGTNGTMMQYFEWHLPNDGNHWNRLRDDASNLRNRGITAIWIPPAWKGTSQNDVGYGAYDLYDLGEFNQKGTVRTKYGTRSQLESAIHALKNNGVQVYGDVVMNHKGGADATENVLAVEVNPNNRNQEISGDYTIEAWTKFDFPGRGNTYSDFKWRWYHFDGVDWDQSRQFQNRIYKFRGDGKAWDWEVDSENGNYDYLMYADVDMDHPEVVNELRRWGEWYTNTLNLDGFRIDAVKHIKYSFVRDWLTHVRNATGKEMFAVAEFWKNDLGALENYLNKTNWNHSVFDVPLHYNLYNASNSGGNYDMAKLLNGTVVQKHPMHAVTFVDNHDSQPGESLESFVQEWFKPLAYALILTREQGYPSVFYGDYYGIPTHSVPAMKAKIDPILEARQNFAYGTQHDYFDHHNIIGWTREGNTTHPNSGLATIMSDGPGGEKWMYVGQNKAGQVWHDITGNKPGTVTINADGWANFSVNGGSVSIWVKR

SEQ ID NO: 16484 - protein, 485 aa, Bacillus sp.
HHNGTNGTMMQYFEWHLPNDGNHWNRLRDDASNLRNRGITAIWIPPAWKGTSQNDVGYGAYDLYDLGEFNQKGTVRTKYGTRSQLESAIHALKNNGVQVYGDVVMNHKGGADATENVLAVEVNPNNRNQEISGDYTIEAWTKFDFPGRGNTYSDFKWRWYHFDGVDWDQSRQFQNRIYKFRGDGKAWDWEVDSENGNYDLLMYADVDMDHPEVVNELRRWGEWYTNTLNLDGFRIDAVKHIKYSFTRDWLTHVRNATGKEMFAVAEFWKNDLGALENYLNKTNWNHSVFDVPLHYNLYNASNSGGNYDMAKLLNGTVVQKHPMHAVTFVDNHDSQPGESLESFVQEWFKPLAYALILTREQGYPSVFYGDYYGIPTHSVPAMKAKIDPILEARQNFAYGTQHDYFDHHNIIGWTREGNTTHPNSGLATIMSDGPGGEKWMYVGQNKAGQVWHDITGNKPGTVTINADGWANFSVNGGSVSIWVKR

SEQ ID NO: 16485 - protein, 485 aa, Unidentified
HHNGTNGTMMQYFEWHLPNDGNHWNRLRDDASNLRNRGITAIWIPPAWKGTSQNDVGYGAYDLYDLGEFNQKGTVRTKYGTRSQLESAIHALKNNGVQVYGDVVMNHKGGADATENVLAVEVNPNNRNQEILGDYTIEAWTKFDFPGRGNTYSDFKWRWYHFDGVDWDQSRQFQNRIYKFRGDGKAWDWEVDSENGNYDYLMYADVDMDHPEVVNELRRWGEWYTNTLNLDGFRIDAVKHIKYSFTRDWLTHVRNATGKEMFAVAEFWKNDLGALENYLNKTNWNHSVFDVPLHYNLYNASNSGGNYDMAKLLNGTVVQKHPMHAVTFVDNHDSQPGESLESFVQEWFKPLAYALILTREQGYPSVFYGDYYGIPTHSVPAMKAKIDPILEARQNFAYGTQHDYFDHHNIIGWTREGNTTHPNSGLATIMSDGPGGEKWMYVGQNKAGQVWHDITGNKPGTVTINADGWANFSVNGGSVSIWVKR

SEQ ID NO: 16486 - protein, 485 aa, Bacillus sp.
HHNGTNGTMMQYFEWHLPNDGNHWNRLRDDASNLRNRGITAIWIPPAWKGTSQNDVGYGAYDLYDLGEFNQKGTVRTKYGTRSQLESAIHALKNNGVQVYGDVVMNHKGGADATENVLAVEVNPNNRNQEISGDYTIEAWTKFDFPGRGNTYSDFKWRWYHFDGVDWDQSRQFQNRIYKFRGDGKAWDWEVDSEIGNYDYLMYADVDMDHPEVVNELRRWGEWYTNTLNLDGFRIDAVKHIKYSFTRDWLTHVRNATGKEMFAVAEFWKNDLGALENYLNKTNWNHSVFDVPLHYNLYNASNSGGNYDMAKLLNGTVVQKHPMHAVTFVDNHDSQPGESLESFVQEWFKPLAYALILTREQGYPSVFYGDYYGIPTHSVPAMKAKIDPILEARQNFAYGTQHDYFDHHNIIGWTREGNTTHPNSGLATIMSDGPGGEKWMYVGQNKAGQVWHDITGNKPGTVTINADGWANFSVNGGSVSIWVKR

SEQ ID NO: 16487 - protein, 485 aa, Unidentified
HHNGTNGTMMQYFEWHLPNDGNHWNRLRDDASNLRNRGITAIWIPPAWKGTSQNDVGYGAYDLYDLGEFNQKGTVRTKYGTRSQLESAIHALKNNGVQVYGDVVMNHKGGADATENVLAVEVNPNNRNQEISGDYTIEAWTKFDFPGRGNTYSDFKWRWYHFDGVDWDQSRQFQNRIYKFRGDGKAWDWEVDSENGNYDYLMYADVDMDHPEVVNELRRWGEWYTNTLNLDGFRIDAVKHIKYSFTRDWLTHVRNATGKEMFAVAEFWKNDLGALENYLNKTNWNHSVFDVPLHYNLYNASNSGGNYDMAKLLNGTVVQKHPMHAVTFVDNHDSQPGESLESFVQEWFKPLAYALILTREQGYPSVFYGDYYGIPTHSVPAMKAKIDPILEARQNGAYGTQHDYFDHHNIIGWTREGNTTHPNSGLATIMSDGPGGEKWMYVGQNKAGQVWHDITGNKPGTVTINADGWANFSVNGGSVSIWVKR

SEQ ID NO: 16488 - protein, 485 aa, Bacillus sp.
HHNGTNGTMMQYFEWHLPNDGNHWNRLRDDASNLRNRGITAIWIPPAWKGTSQNDVGYGAYDLYDLGEFNQKGTVRTKYGTRSQLESAIHALKNNGVQVYGDVVMNHKGGADATENVLAVEVNPNNRNQEISGDYTIEAWTKFDFPGRGNTYSDFKWRWYHFDGVDWDQSRQFQNRIYKFRGDGKAWDWEVDSEFGNYDYLMYADVDMDHPEVVNELRRWGEWYTNTLNLDGFRIDAVKHIKYSFTRDWLTHVRNATGKEMFAVAEFWKNDLGALENYLNKTNWNHSVFDVPLHYNLYNASNSGGNYDMAKLLNGTVVQKHPMHAVTFVDNHDSQPGESLESFVQEWFKPLAYALILTREQGYPSVFYGDYYGIPTHSVPAMKAKIDPILEARQNFAYGTQHDYFDHHNIIGWTREGNTTHPNSGLATIMSDGPGGEKWMYVGQNKAGQVWHDITGNKPGTVTINADGWANFSVNGGSVSIWVKR

SEQ ID NO: 16489 - protein, 485 aa, Unidentified
HHNGTNGTMMQYFEWHLPNDGNHWNRLRDDASNLRNRGITAIWIPPAWKGTSQNDVGYGAYDLYDLGEFNQKGTVRTKYGTRSQLESAIHALKNNGVQVYGDVVMNHKGGADATENVLAVEVNPNNRNQEISGDYTIEAWTKFDFPGRGNTYSDFKWRWYHFDGVDWDQSRQFQNRIYKFRGDGKAWDWEVDSENGNYDYLMYADVDMDHPEVVNELRRWGEWYTNTLNLDGFRIDAVKHIKYSFTRDWLTHVRNATGKEMFAVAEFWKNDLGALENYLNKTNWNHSVFDVPLHYNLYNASNSGGNYDMAKLLNGTVVQKHPMHAVTFVDNHDSQPGESLESFVQEWFKPLAYALILTREQGYPSVFYGDYYGIPTHSVPAMKAKIDPILEARQNFAYGTQHDYFDHHNIIGWTREGNTTHPNSGLATIMSDGPGGEKWMYVGQNKAGQVWHDITGNKPGTVTINADGWANFSVLGGSVSIWVKR

SEQ ID NO: 16490 - protein, 485 aa, Unidentified
HHNGTNGTMMQYFEWHLPNDGNHWNRLRDDASNLRNRGITAIWIPPAWKGTSQNDVGYGAYDLYDLGEFNQKGTVRTKYGTRSQLESAIHALKNNGVQVYGDVVMNHKGGADATENVLAVEVNPNNRNQEISGDYTIEAWTKFDFPGRGNTYSDFKWRWYHFDGVDWDQSRQFQNRIYKFRGDGKAWDWEVDSENGNYDYLMYADVDMDHPEVVNELRRWGEWYTNTLNLDGFRIDAVKHIKYSFTRDWLTHVRNATGKEMFAVAEFWKNDLGALENYLNKTNWNHSVFDVPLHYNLYNASNSGGNYDMAKLLNMTVVQKHPMHAVTFVDNHDSQPGESLESFVQEWFKPLAYALILTREQGYPSVFYGDYYGIPTHSVPAMKAKIDPILEARQNFAYGTQHDYFDHHNIIGWTREGNTTHPNSGLATIMSDGPGGEKWMYVGQNKAGQVWHDITGNKPGTVTINADGWANFSVNGGSVSIWVKR

SEQ ID NO: 16491 - protein, 485 aa, Bacillus sp.
HHNGTNGTMMQYFEWHLPNDGNHWNRLRDDASNLRNRGITAIWIPPAWKGTSQNDVGYGAYDLYDLGEFNQKGTVRTKYGTRSQLESAIHALKNNGVQVYGDVVMNHKGGADATENVLAVEVNPNNRNQEISGDYTIEAWTKFDFPGRGNTYSDFKWRWYHFDGVDWDQSRQFQNRIYKFRGDGKAWDWEVDSENGNYDYLMYADVDMDHPLVVNELRRWGEWYTNTLNLDGFRIDAVKHIKYSFTRDWLTHVRNATGKEMFAVAEFWKNDLGALENYLNKTNWNHSVFDVPLHYNLYNASNSGGNYDMAKLLNGTVVQKHPMHAVTFVDNHDSQPGESLESFVQEWFKPLAYALILTREQGYPSVFYGDYYGIPTHSVPAMKAKIDPILEARQNFAYGTQHDYFDHHNIIGWTREGNTTHPNSGLATIMSDGPGGEKWMYVGQNKAGQVWHDITGNKPGTVTINADGWANFSVNGGSVSIWVKR

SEQ ID NO: 16492 - protein, 485 aa, Bacillus sp.
HHNGTNGTMMQYFEWHLPNDGNHWNRLRDDASNLRNRGITAIWIPPAWKGTSQNDVGYGAYDLYDLGEFNQKGTVRTKYGTRSQLESAIHALKNNGVQVYGDVVMNHKGGADATENVLAVEVNPNNRNQEISGDYTIEAWTKFDFPGRGNTYSDFKWRWYHFDGVDWDQSRQFQNRIYKFRGDGKAWDWEVDSENGIYDYLMYADVDMDHPEVVNELRRWGEWYTNTLNLDGFRIDAVKHIKYSFTRDWLTHVRNATGKEMFAVAEFWKNDLGALENYLNKTNWNHSVFDVPLHYNLYNASNSGGNYDMAKLLNGTVVQKHPMHAVTFVDNHDSQPGESLESFVQEWFKPLAYALILTREQGYPSVFYGDYYGIPTHSVPAMKAKIDPILEARQNFAYGTQHDYFDHHNIIGWTREGNTTHPNSGLATIMSDGPGGEKWMYVGQNKAGQVWHDITGNKPGTVTINADGWANFSVNGGSVSIWVKR

SEQ ID NO: 16493 - protein, 485 aa, Unidentified
HHNGTNGTMMQYFEWHLPNDGNHWNRLRDDASNLRNRGITAIWIPPAWKGTSQNDVGYGAYDLYDLGEFNQKGTVRTKYGTRSQLESAIHALKNNGVQVYGDVVMNHKGGADATENVLAVEVNPNNRNQEISGDYTIEAWTKFDFPGRGNTYSDFKWRWYHFDGVDWDQSRQFQNRIYKFRGDGKAWDWEVDSENGNYDYLMYADVDMDHPEVVNELRRWGEWYTNTLNLDGFRIDAVKHIKYSFTRDWLTHVRNATGKEMFAVAEFWKNDLGALENYLNKTNQNHSVFDVPLHYNLYNASNSGGNYDMAKLLNGTVVQKHPMHAVTFVDNHDSQPGESLESFVQEWFKPLAYALILTREQGYPSVFYGDYYGIPTHSVPAMKAKIDPILEARQNFAYGTQHDYFDHHNIIGWTREGNTTHPNSGLATIMSDGPGGEKWMYVGQNKAGQVWHDITGNKPGTVTINADGWANFSVNGGSVSIWVKR

SEQ ID NO: 16494 - protein, 485 aa, Unidentified
HHNGTNGTMMQYFEWHLPNDGNHWNRLRDDASNLRNRGITAIWIPPAWKGTSQNDVGYGAYDLYDLGEFNQKGTVRTKYGTRSQLESAIHALKNNGVQVYGDVVMNHKGGADATENVLAVEVNPNNRNQEISGDYTIEAWTKFDFPGRGNTYSDFKWRWYHFDGVDWDQSRQFQNRIYKFRGDGKAWDWEVDSENGNYDYLMYADVDMDHPEVVNELRRWGEWYTNTLNLDGFRIDAVKHIKYSFTRDWLTHVRNATGKEMFAVAEFWKNDLGALENYLNKTNWNHSVFDVPLHYNLYNASNSGGNYDMAKLLNGTVVQKHPMHAVTFVDNHDSQPGESLESFVQEWFKPLAYALILTREQGYPSVFYGDYGGIPTHSVPAMKAKIDPILEARQNFAYGTQHDYFDHHNIIGWTREGNTTHPNSGLATIMSDGPGGEKWMYVGQNKAGQVWHDITGNKPGTVTINADGWANFSVNGGSVSIWVKR

SEQ ID NO: 16495 - protein, 485 aa, Unidentified
HHNGTNGTMMQYFEWHLPNDGNHWNRLRDDASNLRNRGITAIWIPPAWKGTSQNDVGYGAYDLYDLGEFNQKGTVRTKYGTRSQLESAIHALKNNGVQVYGDVVMNHKGGADATENVLAVEVNPNNRNQEISGDYTIEAWTKFDFPGRGNTYSDFKWRWYHFDGVDWDQSRQFQNRIYKFRGDGKAWDWEVDSENGNYDYLMYADVDMDHPEVVNELRRWGEWYTNTLNLDGFRIDAVKHIKYSFTRDWLTHVRNATGKEMFAVAEFWKNDLGALENYLNKTNWNHSVFDVPLHYNLYNASNSGGNYDMAKLLNGTVVQKHPMHAVTFVDNHDSQPVESLESFVQEWFKPLAYALILTREQGYPSVFYGDYYGIPTHSVPAMKAKIDPILEARQNFAYGTQHDYFDHHNIIGWTREGNTTHPNSGLATIMSDGPGGEKWMYVGQNKAGQVWHDITGNKPGTVTINADGWANFSVNGGSVSIWVKR

SEQ ID NO: 16496 - protein, 485 aa, Unidentified
HHNGTNGTMMQYFEWHLPNDGNHWNRLRDDASNLRNRGITAIWIPPAWKGTSQNDVGYGAYDLYDLGEFNQKGTVRTKYGTRSQLESAIHALKNNGVQVYGDVVMNHKGGADATENVLAVEVNPNNRNQEISGDYTIEAWTKFDFPGRGNTYSDFKWRWYHFDGVDWDQSRQFQNRIYKFRGDGKAWDWEVDSENGNYDYLMYADVDMDHPEVVNELRRWGEWYTNTLNLDGFRIDAVKHIKYSFTRDWLTHVRNATGKEMFAVAEFWKNDLGALENYLNKTNWNHSVFDVPLHYNLYNASNSGGNYDMAKLLNGTVVQKHPMHAVTFVDNHDSQPGESLESFVQEWFKPLAYALILTREQGYPSVFYGDYYGIPTHSVPAMKANIDPILEARQNFAYGTQHDYFDHHNIIGWTREGNTTHPNSGLATIMSDGPGGEKWMYVGQNKAGQVWHDITGNKPGTVTINADGWANFSVNGGSVSIWVKR

SEQ ID NO: 16497 - protein, 485 aa, Unidentified
HHNGTNGTMMQYFEWHLPNDGNHWNRLRDDASNLRNRGITAIWIPPAWKGTSQNDVGYGAYDLYDLGEFNQKGTVRTKYGTRSQLESAIHALKNNGVQVYGDVVMNHKGGADATENVLAVEVNPNNRNQEISGDYTIEAWTKFDFPGRGNTYSDFKWRWYHFDGVDWDQSRQFQNRIYKFRGDGKAWDWEVDSENGNYDYLMYADVDMDHPEVVNELRRWGEWYTNTLNLDGFRIDAVKHIKYSFTRDWLTHVRNATGKEMFAVAEFWKNDLGALENYLNKTNWNHSVFDVPLHYNLYNASNSGGNYDMAKLLNGTVVQKHPMHAVTFVDNHDSQPGESLESFVQEWFKPLAYALILTREQGYPSVFYGDYYGIPTHSVPAMKAKIDPILEARQNFAYGTQHDYFDHHNIIGWTREGNTTHPNSGLATIMSDGPGGEAWMYVGQNKAGQVWHDITGNKPGTVTINADGWANFSVNGGSVSIWVKR

SEQ ID NO: 16498 - protein, 485 aa, Bacillus sp.
HHNGTNGTMMQYFEWHLPNDGNHWNRLRDDASNLRNRGITAIWIPPAWKGTSQNDVGYGAYDLYDLGEFNQKGTVRTKYGTRSQLESAIHALKNNGVQVYGDVVMNHKGGADATENVLAVEVNPNNRNQEISGDYTIEAWTKFDFPGRGNTYSDFKWRWYHFDGVDWDQSRQFQNRIYKFRGDGKAWDWEVDSENGNYDYLMYADQDMDHPEVVNELRRWGEWYTNTLNLDGFRIDAVKHIKYSFTRDWLTHVRNATGKEMFAVAEFWKNDLGALENYLNKTNWNHSVFDVPLHYNLYNASNSGGNYDMAKLLNGTVVQKHPMHAVTFVDNHDSQPGESLESFVQEWFKPLAYALILTREQGYPSVFYGDYYGIPTHSVPAMKAKIDPILEARQNFAYGTQHDYFDHHNIIGWTREGNTTHPNSGLATIMSDGPGGEKWMYVGQNKAGQVWHDITGNKPGTVTINADGWANFSVNGGSVSIWVKR

SEQ ID NO: 16499 - protein, 485 aa, Unidentified
HHNGTNGTMMQYFEWHLPNDGNHWNRLRDDASNLRNRGITAIWIPPAWKGTSQNDVGYGAYDLYDLGEFNQKGTVRTKYGTRSQLESAIHALKNNGVQVYGDVVMNHKGGADATENVLAVEVNPNNRNQEISGDYTIEAWTKFDFPGRGNTYSDFKWRWYHFDGVDWDQSRQFQNRIYKFRGDGTAWDWEVDSENGNYDYLMYADVDMDHPEVVNELRRWGEWYTNTLNLDGFRIDAVKHIKYSFTRDWLTHVRNATGKEMFAVAEFWKNDLGALENYLNKTNWNHSVFDVPLHYNLYNASNSGGNYDMAKLLNGTVVQKHPMHAVTFVDNHDSQPGESLESFVQEWFKPLAYALILTREQGYPSVFYGDYYGIPTHSVPAMKAKIDPILEARQNFAYGTQHDYFDHHNIIGWTREGNTTHPNSGLATIMSDGPGGEKWMYVGQNKAGQVWHDITGNKPGTVTINADGWANFSVNGGSVSIWVKR

SEQ ID NO: 16500 - protein, 485 aa, Bacillus sp.
HHNGTNGTMMQYFEWHLPNDGNHWNRLRDDASNLRNRGITAIWIPPAWKGTSQNDVGYGAYDLYDLGEFNQKGTVRTKYGTRSQLESAIHALKNNGVQVYGDVVMNHKGGADATENVLAVEVNPNNRNQEISGDYTIEAWTKFDFPGRGNTYSDFKWRWYHFDGVDWDQSRQFQNRIYKFRGDGKAWDWEVDSENGNYDYLMYADVDMDHPWVVNELRRWGEWYTNTLNLDGFRIDAVKHIKYSFTRDWLTHVRNATGKEMFAVAEFWKNDLGALENYLNKTNWNHSVFDVPLHYNLYNASNSGGNYDMAKLLNGTVVQKHPMHAVTFVDNHDSQPGESLESFVQEWFKPLAYALILTREQGYPSVFYGDYYGIPTHSVPAMKAKIDPILEARQNFAYGTQHDYFDHHNIIGWTREGNTTHPNSGLATIMSDGPGGEKWMYVGQNKAGQVWHDITGNKPGTVTINADGWANFSVNGGSVSIWVKR

SEQ ID NO: 16501 - protein, 485 aa, Unidentified
HHNGTNGTMMQYFEWHLPNDGNHWNRLRDDASNLRNRGITAIWIPPAWKGTSQNDVGYGAYDLYDLGEFNQKGTVRTKYGTRSQLESAIHALKNNGVQVYGDVVMNHKGGADATENVLAVEVNPNNRNQEISGDYTIEAWTKFDFPGRGNTYSDFKWRWYHFDGVDWDQSRQFQNRIYKFRGDGKAWDWEVDSENGNYDYLMYADVDMDHPEVVNELRRWGEWYTNTLNLDGFRIDAVKHIKYSFTRDWLTHVRNATGKEMFAVAEFWKNDLGALENYLNKTNWNHSVFDVPLHYNLYNASNSGGNYDMAKLLNGTVVQKHPMHAVTFVDNHDSQPGESLESFVQEWFKPLAYALILTREQGRPSVFYGDYYGIPTHSVPAMKAKIDPILEARQNFAYGTQHDYFDHHNIIGWTREGNTTHPNSGLATIMSDGPGGEKWMYVGQNKAGQVWHDITGNKPGTVTINADGWANFSVNGGSVSIWVKR

SEQ ID NO: 16502 - protein, 485 aa, Unidentified
HHNGTNGTMMQYFEWHLPNDGNHWNRLRDDASNLRNRGITAIWIPPAWKGTSQNDVGYGAYDLYDLGEFNQKDTVRTKYGTRSQLESAIHALKNNGVQVYGDVVMNHKGGADATENVLAVEVNPNNRNQEISGDYTIEAWTKFDFPGRGNTYSDFKWRWYHFDGVDWDQSRQFQNRIYKFRGDGKAWDWEVDSENGNYDYLMYADVDMDHPEVVNELRRWGEWYTNTLNLDGFRIDAVKHIKYSFTRDWLTHVRNATGKEMFAVAEFWKNDLGALENYLNKTNWNHSVFDVPLHYNLYNASNSGGNYDMAKLLNGTVVQKHPMHAVTFVDNHDSQPGESLESFVQEWFKPLAYALILTREQGYPSVFYGDYYGIPTHSVPAMKAKIDPILEARQNFAYGTQHDYFDHHNIIGWTREGNTTHPNSGLATIMSDGPGGEKWMYVGQNKAGQVWHDITGNKPGTVTINADGWANFSVNGGSVSIWVKR

SEQ ID NO: 16503 - protein, 485 aa, Unidentified
HHNGTNGTMMQYFEWHLPNDGNHWNRLRDDASNLRNRGITAIWIPPAWKGTSQNDVGYGAYDLYDLGEFNQKGTVRTKYGTRSQLESAIHALKNNGVQVYGDVVMNHKGGADATENVLAVEVNPNNRNQEISGDYTIEAWTKMDFPGRGNTYSDFKWRWYHFDGVDWDQSRQFQNRIYKFRGDGKAWDWEVDSENGNYDYLMYADVDMDHPEVVNELRRWGEWYTNTLNLDGFRIDAVKHIKYSFTRDWLTHVRNATGKEMFAVAEFWKNDLGALENYLNKTNWNHSVFDVPLHYNLYNASNSGGNYDMAKLLNGTVVQKHPMHAVTFVDNHDSQPGESLESFVQEWFKPLAYALILTREQGYPSVFYGDYYGIPTHSVPAMKAKIDPILEARQNFAYGTQHDYFDHHNIIGWTREGNTTHPNSGLATIMSDGPGGEKWMYVGQNKAGQVWHDITGNKPGTVTINADGWANFSVNGGSVSIWVKR

SEQ ID NO: 16504 - protein, 483 aa, Unidentified
HHNGTNGTMMQYFEWHLPNDGNHWNRLRDDASNLRNRGITAIWIPPAWKGTSQNDVGYGAYDLYDLGEFNQKGTVRTKYGTRSQLESAIHALKNNGVQVYGDVVMNHKGGADATENVLAVEVNPNNRNQEISGDYTIEAWTKFDFPGRGNTYSDFKWRWYHFDGVDWDQSRQFQNRIYKFRGKAWDWEVDSENGLYDYLMYADVDMDHPEVVNELRRWGEWYTNTLNLDGFRIDAVKHIKYSFTRDWLTHVRNATGKEMFAVAEFWKNDLGALENYLNKTNWNHSVFDVPLHYNLYNASNSGGNYDMAKLLNGTVVQKHPMHAVTFVDNHDSQPGESLESFVQEWFKPLAYALILTREQGYPSVFYGDYYGIPTHSVPAMKAKIDPILEARQNFAYGTQHDYFDHHNIIGWTREGNTTHPNSGLATIMSDGPGGEKWMYVGQNKAGQVWHDITGNKPGTVTINADGWANFSVNGGSVSIWVKR

SEQ ID NO: 16505 - protein, 485 aa, Unidentified
HHNGTNGTMMQYFEWHLPNDGNHWNRLRDDASNLRNRGITAIWIPPAWKGTSQNDVGYGAYDLYDLGEFNQKGTVRTKYGTRSQLESAIHALKNNGVQVYGDVVMNHKGGADATENVLAVEVNPNNRNQEISGDYTIEAWTKFDFPGRGNTYSDFKWRWYHFDGVDWDQSRQFQNRIYKFRGDGKAWDWEVDSENGNYDYLMYADVDMDHPEVVNELRRWGEWYTNTLNLDGFRIDAVKHIKYSFTRDWLTHVRNATGKEMFAVAEFWKNDLGALENYLNKTNWNHSVFDVPLHYNLYNASNSGGNYDMAKLLNGTVVQKHPMHAVTFVDNHDSQPGESLESFVQEWFKPLAYALILTREQGYPSVFYGDYYGIPTHSVPAMKAKIDPILEARQNFAYGTQSDYFDHHNIIGWTREGNTTHPNSGLATIMSDGPGGEKWMYVGQNKAGQVWHDITGNKPGTVTINADGWANFSVNGGSVSIWVKR

SEQ ID NO: 16506 - protein, 485 aa, Unidentified
HHNGTNGTMMQYFEWHLPNDGNHWNRLRDDASNLRNRGITAIWIPPAWKGTSQNDVGYGAYDLYDLGEFNQKGTVRTKYGTRSQLESAIHALKNNGVQVYGDVVMNHKGGADATENVLAVEVNPNNRNQEISGDYTIEAWTKFDFPGRGNTYSDFKWRWYHFDGVDWDQSRQFQNRIYKFRGDGKAWDWEVDSENGNYDYLMYADVDMDHPEVVNELQRWGEWYTNTLNLDGFRIDAVKHIKYSFTRDWLTHVRNATGKEMFAVAEFWKNDLGALENYLNKTNWNHSVFDVPLHYNLYNASNSGGNYDMAKLLNGTVVQKHPMHAVTFVDNHDSQPGESLESFVQEWFKPLAYALILTREQGYPSVFYGDYYGIPTHSVPAMKAKIDPILEARQNFAYGTQHDYFDHHNIIGWTREGNTTHPNSGLATIMSDGPGGEKWMYVGQNKAGQVWHDITGNKPGTVTINADGWANFSVNGGSVSIWVKR

SEQ ID NO: 16507 - protein, 485 aa, Unidentified
HHNGTNGTMMQYFEWHLPNDGNHWNRLRDDASNLRNRGITAIWIPPAWKGTSQNDVGYGAYDLYDLGEFNQKGTVRTKYGTRSQLESAIHALKNNGVQVYGDVVMNHKGGADATENVLAVEVNPNNRNQEISGDYTIEAWTKFDFPGRGNTYSDFKWRWYHFDGVDWDQSRQFQNRIYKFRGDGKAWDWEVDSENGNYDYLMYADVDMDHPEVVNELRRWGEWYTNTLNLDGFRIDAVKHIKYSFTRDWLTHVRNATGKEMFAVAEFWKNDLGALENYLNKTNSNHSVFDVPLHYNLYNASNSGGNYDMAKLLNGTVVQKHPMHAVTFVDNHDSQPGESLESFVQEWFKPLAYALILTREQGYPSVFYGDYYGIPTHSVPAMKAKIDPILEARQNFAYGTQHDYFDHHNIIGWTREGNTTHPNSGLATIMSDGPGGEKWMYVGQNKAGQVWHDITGNKPGTVTINADGWANFSVNGGSVSIWVKR

SEQ ID NO: 16508 - protein, 485 aa, Bacillus sp.
HHNGTNGTMMQYFEWHLPNDGNHWNRLRDDASNLRNRGITAIWIPPAWKGTSQNDVGYGAYDLYDLGEFNQKGTVRTKYGTRSQLESAIHALKNNGVQVYGDVVMNHKGGADATENVLAVEVNPNNRNQEISGDYTIEAWTKFDFPGRGNTYSDFKWRWYHFDGVDWDQSRQFQNRIYKFRGDGKAWDWEVDSENGNYDYLMYADVDMDHPEVVNELRRWGEWYTNTLNLDGFRIDAVKHIKFSFTRDWLTHVRNATGKEMFAVAEFWKNDLGALENYLNKTNWNHSVFDVPLHYNLYNASNSGGNYDMAKLLNGTVVQKHPMHAVTFVDNHDSQPGESLESFVQEWFKPLAYALILTREQGYPSVFYGDYYGIPTHSVPAMKAKIDPILEARQNFAYGTQHDYFDHHNIIGWTREGNTTHPNSGLATIMSDGPGGEKWMYVGQNKAGQVWHDITGNKPGTVTINADGWANFSVNGGSVSIWVKR

SEQ ID NO: 16509 - protein, 485 aa, Bacillus sp.
HHNGTNGTMMQYFEWHLPNDGNHWNRLRDDASNLRNRGITAIWIPPAWKGTSQNDVGYGAYDLYDLGEFNQKGTVRTKYGTRSQLESAIHALKNNGVQVYGDVVMNHKGGADATENVLAVEVNPNNRNQEISGDYTIEAWTKFDFPGRGNTYSDFKWRWYHFDGVDWDQSRQFQNRIYKFRGDGKAWDWEVDTENGNYDYLMYADVDMDHPEVVNELRRWGEWYTNTLNLDGFRIDAVKHIKYSFTRDWLTHVRNATGKEMFAVAEFWKNDLGALENYLNKTNWNHSVFDVPLHYNLYNASNSGGNYDMAKLLNGTVVQKHPMHAVTFVDNHDSQPGESLESFVQEWFKPLAYALILTREQGYPSVFYGDYYGIPTHSVPAMKAKIDPILEARQNFAYGTQHDYFDHHNIIGWTREGNTTHPNSGLATIMSDGPGGEKWMYVGQNKAGQVWHDITGNKPGTVTINADGWANFSVNGGSVSIWVKR

SEQ ID NO: 16510 - protein, 485 aa, Unidentified
HHNGTNGTMMQYFEWHLPNDGNHWNRLRDDASNLRNRGITAIWIPPAWKGTSQNDVGYGAYDLYDLGEFNQKGTVRTKYGTRSQLESAIHALKNNGVQVYGDVVMNHKGGADATENVLAVEVNPNNRNQEISGDYTIEAWTKFDFPGRGNTYSDFKWRWYHFDGVDWDQSRQFQNRIYKFRGDGKAWDWEVDSENGNYDYLMYADVDMDHPEVVNELRRWGEWYTNTLNLDGFRIDAVKHIKYSFTRDWLTHVRNATGKEMFAVAEFWKNDLGALENYLNKTNWNHSVFDVPLHYNLYNASNSGGNYDMAKLLNGTVVQKHPMYAVTFVDNHDSQPGESLESFVQEWFKPLAYALILTREQGYPSVFYGDYYGIPTHSVPAMKAKIDPILEARQNFAYGTQHDYFDHHNIIGWTREGNTTHPNSGLATIMSDGPGGEKWMYVGQNKAGQVWHDITGNKPGTVTINADGWANFSVNGGSVSIWVKR

SEQ ID NO: 16511 - protein, 483 aa, Bacillus sp.
HHNGTNGTMMQYFEWHLPNDGNHWNRLRDDASNLRNRGITAIWIPPAWKGTSQNDVGYGAYDLYDLGEFNQKGTVRTKYGTRSQLESAIHALKNNGVQVYGDVVMNHKGGADATENVLAVEVNPNNRNQEISGDYTIEAWTKFDFPGRGNTYSDFKWRWYHFDGVDWDQSRQFQNRIYKFRGKAWDWEVDSENGNYDYLMYADVDLDHPEVVNELRRWGEWYTNTLNLDGFRIDAVKHIKYSFTRDWLTHVRNATGKEMFAVAEFWKNDLGALENYLNKTNWNHSVFDVPLHYNLYNASNSGGNYDMAKLLNGTVVQKHPMHAVTFVDNHDSQPGESLESFVQEWFKPLAYALILTREQGYPSVFYGDYYGIPTHSVPAMKAKIDPILEARQNFAYGTQHDYFDHHNIIGWTREGNTTHPNSGLATIMSDGPGGEKWMYVGQNKAGQVWHDITGNKPGTVTINADGWANFSVNGGSVSIWVKR

SEQ ID NO: 16512 - protein, 485 aa, Unidentified
HHNGTNGTMMQYFEWHLPNDGNHWNRLRDDASNLRNRGITAIWIPPAWKGTSQNDVGYGAYDLYDLGEFNQKGTVRTKYGTRSQLESAIHALKNNGVQVYGDVVMNHKGGADATENVLAVEVNPNNRNQEISGDYTIEAWTKFDFPGRGNTYSDFKWRWYHFDGVDWDQSRQFQNRIYKFRGDGKAWDWEVDSENGNYDYLMYADVDMDHPEVVNELRRWGEWYTNTLNLDGFRIDAVKHIKDSFTRDWLTHVRNATGKEMFAVAEFWKNDLGALENYLNKTNWNHSVFDVPLHYNLYNASNSGGNYDMAKLLNGTVVQKHPMHAVTFVDNHDSQPGESLESFVQEWFKPLAYALILTREQGYPSVFYGDYYGIPTHSVPAMKAKIDPILEARQNFAYGTQHDYFDHHNIIGWTREGNTTHPNSGLATIMSDGPGGEKWMYVGQNKAGQVWHDITGNKPGTVTINADGWANFSVNGGSVSIWVKR

SEQ ID NO: 16513 - protein, 485 aa, Unidentified
HHNGTNGTMMQYFEWHLPNDGNHWNRLRDDASNLRNRGITAIWIPPAWKGTSQNDVGYGAYDLYDLGEFNQKGTVRTKYGTRSQLESAIHALKNNGVQVYGDVVMNHKGGADATENVLAVEVNPNNRNQEISGDYTIEAWTKFDFPGRGNTYSDFKWRWYHFDGVDWDQSRQFQNRIYKFRGDGKAWDWEVDSENGNYDYLMYADVDMDHMEVVNELRRWGEWYTNTLNLDGFRIDAVKHIKYSFTRDWLTHVRNATGKEMFAVAEFWKNDLGALENYLNKTNWNHSVFDVPLHYNLYNASNSGGNYDMAKLLNGTVVQKHPMHAVTFVDNHDSQPGESLESFVQEWFKPLAYALILTREQGYPSVFYGDYYGIPTHSVPAMKAKIDPILEARQNFAYGTQHDYFDHHNIIGWTREGNTTHPNSGLATIMSDGPGGEKWMYVGQNKAGQVWHDITGNKPGTVTINADGWANFSVNGGSVSIWVKR

SEQ ID NO: 16514 - protein, 485 aa, Unidentified
HHNGTNGTMMQYFEWHLPNDGNHWNRLRDDASNLRNRGITAIWIPPAWKGTSQNDVGYGAYDLYDLGEFNQKGTVRTKYGTRSQLESAIHALKNNGVQVYGDVVMNHKGGADATENVLAVEVNPNNRNQEISGDYTIEAWTKFDFPGRGNTYSDFKWRWYHFDGVDWDQSRQFQNRIYVFRGDGKAWDWEVDSENGNYDYLMYADVDMDHPEVVNELRRWGEWYTNTLNLDGFRIDAVKHIKYSFTRDWLTHVRNATGKEMFAVAEFWKNDLGALENYLNKTNWNHSVFDVPLHYNLYNASNSGGNYDMAKLLNGTVVQKHPMHAVTFVDNHDSQPGESLESFVQEWFKPLAYALILTREQGYPSVFYGDYYGIPTHSVPAMKAKIDPILEARQNFAYGTQHDYFDHHNIIGWTREGNTTHPNSGLATIMSDGPGGEKWMYVGQNKAGQVWHDITGNKPGTVTINADGWANFSVNGGSVSIWVKR

SEQ ID NO: 16515 - protein, 485 aa, Bacillus sp.
HHNGTNGTMMQYFEWHLPNDGNHWNRLRDDASNLRNRGITAIWIPPAWKGTSQNDVGYGAYDLYDLGEFNQKGTVRTKYGTRSQLESAIHALKNNGVQVYGDVVMNHKGGADATENVLAVEVNPNNRNQEISGDYTIEAWTKFDFPGRGNTYSDFKWRWYHFDGVDWDQSRQFQNRIYKFRGDGKDWDWEVDSENGNYDYLMYADVDMDHPEVVNELRRWGEWYTNTLNLDGFRIDAVKHIKYSFTRDWLTHVRNATGKEMFAVAEFWKNDLGALENYLNKTNWNHSVFDVPLHYNLYNASNSGGNYDMAKLLNGTVVQKHPMHAVTFVDNHDSQPGESLESFVQEWFKPLAYALILTREQGYPSVFYGDYYGIPTHSVPAMKAKIDPILEARQNFAYGTQHDYFDHHNIIGWTREGNTTHPNSGLATIMSDGPGGEKWMYVGQNKAGQVWHDITGNKPGTVTINADGWANFSVNGGSVSIWVKR

SEQ ID NO: 16516 - protein, 485 aa, Bacillus sp.
HHNGTNGTMMQYFEWHLPNDGNHWNRLRDDASNLRNRGITAIWIPPAWKGTSQNDVGYGAYDLYDLGEFNQKGTVRTKYGTRSQLESAIHALKNNGVQVYGDVVMNHKGGADATENVLAVEVNPNNRNQEISGDYTIEAWTKFDFPGRGNTYSDFKWRWYHFDGVDWDQSRQFQNRIYKFRGDGKAWDWEVDSENGNYDYLMYADADMDHPEVVNELRRWGEWYTNTLNLDGFRIDAVKHIKYSFTRDWLTHVRNATGKEMFAVAEFWKNDLGALENYLNKTNWNHSVFDVPLHYNLYNASNSGGNYDMAKLLNGTVVQKHPMHAVTFVDNHDSQPGESLESFVQEWFKPLAYALILTREQGYPSVFYGDYYGIPTHSVPAMKAKIDPILEARQNFAYGTQHDYFDHHNIIGWTREGNTTHPNSGLATIMSDGPGGEKWMYVGQNKAGQVWHDITGNKPGTVTINADGWANFSVNGGSVSIWVKR

SEQ ID NO: 16517 - protein, 485 aa, Unidentified
HHNGTNGTMMQYFEWHLPNDGNHWNRLRDDASNLRNRGITAIWIPPAWKGTSQNDVGYGAYDLYDLGEFNQKGTVRTKYGTRSQLESAIHALKNNGVQVYGDVVMNHKGGADATENVLAVEVNPNNRNQEISGDYTIEAWTKFDFPGRGNTYSDFKWRWYHFDGVDWDQSRQFQNRIYKFRGDGKAWDWEVDSENGNYDYLMYADVDMDHPEVVNELRRWGEWYTNTLNLDGFRIDAVKHIKYSFTRDWLTHVRNATGKEMFAVAEFWKNDLGALENYLNKTNWNHSVFDVPLHYNLYNASNSGGNYDMAKLLNGTVVQKHPMHAVTFVDNHDSQPGESLESFVQEWFKPLAYALILTREQGYPSVFYGDYYGIPTHSVPAMKAKIDPILEARQNFAYGTQHDYFDHHNIIGWTREGNTTHPNSGLATIMSDGPGGEKWMYVGQNKAGQVWHDITGNKPGTVTILADGWANFSVNGGSVSIWVKR

SEQ ID NO: 16518 - protein, 485 aa, Unidentified
HHNGTNGTMMQYFEWHLPNDGNHWNRLRDDASNLRNRGITAIWIPPAWKGTSQNDVGYGAYDLYDLGEFNQKGTVRTKYGTRSQLESAIHALKNNGVQVYGDVVMNHKGGADATENVLAVEVNPNNRNQEISGDYTIEAWTKFDFPGRGNTYSDFKWRWYHFDGVDWDQSRQFQNRIYKFRGDGKAWDWEVDSENGNYDYLMYADVDMDHPEVVNELRRWGEWYTNTLNLDGFRIDAVKHIKYSFTRDWLTHVRNATGKESFAVAEFWKNDLGALENYLNKTNWNHSVFDVPLHYNLYNASNSGGNYDMAKLLNGTVVQKHPMHAVTFVDNHDSQPGESLESFVQEWFKPLAYALILTREQGYPSVFYGDYYGIPTHSVPAMKAKIDPILEARQNFAYGTQHDYFDHHNIIGWTREGNTTHPNSGLATIMSDGPGGEKWMYVGQNKAGQVWHDITGNKPGTVTINADGWANFSVNGGSVSIWVKR

SEQ ID NO: 16519 - protein, 485 aa, Unidentified
HHNGTNGTMMQYFEWHLPNDGNHWNRLRDDASNLRNRGITAIWIPPAWKGTSQNDVGYGAYDLYDLGEFNQKGTVRTKYGTRSQLESAIHALKNNGVQVYGDVVMNHKGGADATENVLAVEVNPNNRNQEISGDYTIEAWTKFDFPGRGNTYSDFKWRWYHFDGVDWDQSRQFQNRIYKFRGDGKAWDWEVDSENGNYDYLMYADVDDDHPEVVNELRRWGEWYTNTLNLDGFRIDAVKHIKYSFTRDWLTHVRNATGKEMFAVAEFWKNDLGALENYLNKTNWNHSVFDVPLHYNLYNASNSGGNYDMAKLLNGTVVQKHPMHAVTFVDNHDSQPGESLESFVQEWFKPLAYALILTREQGYPSVFYGDYYGIPTHSVPAMKAKIDPILEARQNFAYGTQHDYFDHHNIIGWTREGNTTHPNSGLATIMSDGPGGEKWMYVGQNKAGQVWHDITGNKPGTVTINADGWANFSVNGGSVSIWVKR

SEQ ID NO: 16520 - protein, 485 aa, Unidentified
HHNGTNGTMMQYFEWHLPNDGNHWNRLRDDASNLRNRGITAIWIPPAWKGTSQNDVGYGAYDLYDLGEFNQKGTVRTKYGTRSQLESAIHALKNNGVQVYGDVVMNHKGGADATENVLAVEVNPNNRNQEISGDYTIEAWTKFDFPGRGNTYSDFKWRWYHFDGVDWDQSRQFQNRIYKFRGDGKAWDWEVDSENGNYDYLMYADVDMDHPEVVNELRRWGEWYTNTLNLDGFRIDAVKHIKYSFTRDWLTHVRNATGKEMFAVAEFWKNDLGALENYLNKTNWNHSVFDVPLHYNLYNASNSGGNYDMAKLLNGTVVQKHPMHAVTFVDNHDSQPGESLESFVQEWFKPLAYALILTREQGYPSVFYGDYYGIPTHSVPAMKAKIDPILEARQNFAYGTQHDYFDHHNIIGWTREGNTTHPNSGLATIMSDGPGGEKWMYVGQNKAGQVWHDITGNKPVTVTINADGWANFSVNGGSVSIWVKR

SEQ ID NO: 16521 - protein, 485 aa, Unidentified
HHNGTNGTMMQYFEWHLPNDGNHWNRLRDDASNLRNRGITAIWIPPAWKGTSQNDVGYGAYDLYDLGEFNQKGTVRTKYGTRSQLESAIHALKNNGVQVYGDVVMNHKGGADATENVLAVEVNPNNRNQEISGDDTIEAWTKFDFPGRGNTYSDFKWRWYHFDGVDWDQSRQFQNRIYKFRGDGKAWDWEVDSENGNYDYLMYADVDMDHPEVVNELRRWGEWYTNTLNLDGFRIDAVKHIKYSFTRDWLTHVRNATGKEMFAVAEFWKNDLGALENYLNKTNWNHSVFDVPLHYNLYNASNSGGNYDMAKLLNGTVVQKHPMHAVTFVDNHDSQPGESLESFVQEWFKPLAYALILTREQGYPSVFYGDYYGIPTHSVPAMKAKIDPILEARQNFAYGTQHDYFDHHNIIGWTREGNTTHPNSGLATIMSDGPGGEKWMYVGQNKAGQVWHDITGNKPGTVTINADGWANFSVNGGSVSIWVKR

SEQ ID NO: 16522 - protein, 483 aa, Bacillus sp.
HHNGTNGTMMQYFEWHLPNDGNHWNRLRDDASNLRNRGITAIWIPPAWKGTSQNDVGYGAYDLYDLGEFNQKGTVRTKYGTRSQLESAIHALKNNGVQVYGDVVMNHKGGADATENVLAVEVNPNNRNQEISGDYTIEAWTKFDFPGRGNTYSDFKWRWYHFDGVDWDQSRQFQNRIYKFRGKAWDWEVDSENGNYLYLMYADVDMDHPEVVNELRRWGEWYTNTLNLDGFRIDAVKHIKYSFTRDWLTHVRNATGKEMFAVAEFWKNDLGALENYLNKTNWNHSVFDVPLHYNLYNASNSGGNYDMAKLLNGTVVQKHPMHAVTFVDNHDSQPGESLESFVQEWFKPLAYALILTREQGYPSVFYGDYYGIPTHSVPAMKAKIDPILEARQNFAYGTQHDYFDHHNIIGWTREGNTTHPNSGLATIMSDGPGGEKWMYVGQNKAGQVWHDITGNKPGTVTINADGWANFSVNGGSVSIWVKR

SEQ ID NO: 16523 - protein, 485 aa, Unidentified
HHNGTNGTMMQYFEWHLPNDGNHWNRLRDDASNLRNRGITAIWIPPAWKGTSQNDVGYGAYDLYDLGEFNQKGTVRTKYGTRSQLESAIHALKNNGVQVYGDVVMNHKGGADATENVLAVEVNPNNRNQEISGDYTIEAWTKFDFPGRGNTYSDFKWRWYHFDGVDWDQSRQFQNRIYKFRGDGKAWDWEVDSENGNYDYLMYADVDMDHPEVVNELRRWGEWYTNTLNLDGFRIDAVKHIKYSFTRDWLTHVRNATGKEMFAVAEFWKNDLGALENYLNKTNWNHSVFDVPLHYNLYNASNSGGNYDMAKLLNGTVVQKHPMHAVTFVDNHDSQPGESLESFVQEWFKPLAYALILTREQGYPSVFYGDYYGIPTHSVPAMKAKIDPILEARQNFAYGTQHDYFVHHNIIGWTREGNTTHPNSGLATIMSDGPGGEKWMYVGQNKAGQVWHDITGNKPGTVTINADGWANFSVNGGSVSIWVKR

SEQ ID NO: 16524 - protein, 483 aa, Synthetic construct
HHNGTNGTMMQYFEWHLPNDGNHWNRLRDDASNLRNRGITAIWIPPAWKGTSQNDVGYGAYDLYDLGEFNQKGTVRTKYGTRSQLESAIHALKNNGVQVYGDVVMNHKGGADATENVLAVEVNPNNRNQEISGDYTIEAWTKFDFPGRGNTYSDFKWRWYHFDGVDWDQSRQFQNRIYKFDGKAWDWEVDSENGNYDYLMYADVDMDHPEVVNELRRWGEWYTNTLNLDGFRIDAVKHIKYSFTRDWLTHVRNATGKEMFAVAEFWKNDLGALENYLNKTNWNHSVFDVPLHYNLYNASNSGGNYDMAKLLNGTVVQKHPMHAVTFVDNHDSQPGESLESFVQEWFKPLAYALILTREQGYPSVFYGDYYGIPTHSVPAMKAKIDPILEARQNFAYGTQHDYFDHHNIIGWTREGNTTHPNSGLATIMSDGPGGEKWMYVGQNKAGQVWHDITGNKPGTVTINADGWANFSVNGGSVSIWVKR

SEQ ID NO: 16525 - protein, 485 aa, Unidentified
HHNGTNGTMMQYFEWHLPNDGNHWNRLRDDASNLRNRGITAIWIPPAWKGTSQNDVGYGAYDLYDLGEFNQKGTVRTKYGTRSQLESAIHALKNNGVQVYGDVVMNHKGGADATENVLAVEVNPNNRNQEISGDYTIEAWTKFDFPGRGNTYSDFKWRWYHFDGVDWDQSRQFQNRIYKFRGDGKAWDWEVDSENGNYDYLMYADVDMDHPEVVNELRRWGEWYTNTLNLDGFRIDAVKHIKYSFTRDWLTHVRNATGKEMFAVAEFWKNDLGALENYLNKTNWNHSVFDVPLHYNLYNASNSGENYDMAKLLNGTVVQKHPMHAVTFVDNHDSQPGESLESFVQEWFKPLAYALILTREQGYPSVFYGDYYGIPTHSVPAMKAKIDPILEARQNFAYGTQHDYFDHHNIIGWTREGNTTHPNSGLATIMSDGPGGEKWMYVGQNKAGQVWHDITGNKPGTVTINADGWANFSVNGGSVSIWVKR

SEQ ID NO: 16526 - protein, 485 aa, Unidentified
HHNGTNGTMMQYFEWHLPNDGNHWNRLRDDASNLRNRGITAIWIPPAWKGTSQNDVGYGAYDLYDLGEFNQKGTVRTKYGTRSQLESAIHALKNNGVQVYGDVVMNHKGGADATENVLAVEVNPNNRNQEISGDYTIEAWTKFDFPGRGNTYSDFKWRWYHFDGVDWDQSRQFQNRIYKFRGDGKAWDWEVDSENGNYDYLMYADVDMDHPEVVNELRRWGEWYTNTLNLDGFRIDAVKHIKYSFTRDWLTHVRNATGKEMFAVAEFWKNDLGALENYLNKTNWNHSVFDVPLHYNLYNASNSGGNYDMAKLLNGTVVQKHPMHAVTFVDNHDSQPGESLESFVQEWFKPLAYALILTREQGYPSVFYGDYYGIPTHSVPAMKAKIDPILEARQNFAYGTQHDYCDHHNIIGWTREGNTTHPNSGLATIMSDGPGGEKWMYVGQNKAGQVWHDITGNKPGTVTINADGWANFSVNGGSVSIWVKR

SEQ ID NO: 16527 - protein, 485 aa, Unidentified
HHNGTNGTMMQYFEWHLPNDGNHWNRLRDDASNLRNRGITAIWIPPAWKGTSQNDVGYGAYDLYDLGEFNQKGTVRTKYGTRSQLESAIHALKNNGVQVYGDVVMNHKGGADATENVLAVEVNPNNRNQEISGDYTIEAWTKFDFPGRGNTYSDFKWRWYHFDGVDWDQSRQFQNRIYKFRGDGKAWDWEVDSENGNYDYLMYADVDMDHPEVVNELRRWGEWYTNTLNLDGFRIDAVKHIKYSFTRDWLTHVRNATGKEMFAVAEFWKNDLGALENYLNKTNWNHSVFDVPLHYNLYNASNSGGNYDMAKLLNGTVVQKHHMHAVTFVDNHDSQPGESLESFVQEWFKPLAYALILTREQGYPSVFYGDYYGIPTHSVPAMKAKIDPILEARQNFAYGTQHDYFDHHNIIGWTREGNTTHPNSGLATIMSDGPGGEKWMYVGQNKAGQVWHDITGNKPGTVTINADGWANFSVNGGSVSIWVKR

SEQ ID NO: 16528 - protein, 485 aa, Unidentified
HHNGTNGTMMQYFEWHLPNDGNHWNRLRDDASNLRNRGITYIWIPPAWKGTSQNDVGYGAYDLYDLGEFNQKGTVRTKYGTRSQLESAIHALKNNGVQVYGDVVMNHKGGADATENVLAVEVNPNNRNQEISGDYTIEAWTKFDFPGRGNTYSDFKWRWYHFDGVDWDQSRQFQNRIYKFRGDGKAWDWEVDSENGNYDYLMYADVDMDHPEVVNELRRWGEWYTNTLNLDGFRIDAVKHIKYSFTRDWLTHVRNATGKEMFAVAEFWKNDLGALENYLNKTNWNHSVFDVPLHYNLYNASNSGGNYDMAKLLNGTVVQKHPMHAVTFVDNHDSQPGESLESFVQEWFKPLAYALILTREQGYPSVFYGDYYGIPTHSVPAMKAKIDPILEARQNFAYGTQHDYFDHHNIIGWTREGNTTHPNSGLATIMSDGPGGEKWMYVGQNKAGQVWHDITGNKPGTVTINADGWANFSVNGGSVSIWVKR

SEQ ID NO: 16529 - protein, 485 aa, Unidentified
HHNGTNGTMMQYFEWHLPNDGNHWNRLRDDASNLRNRGITAIWIPPAWKGTSQNDVGYGAYDLYDLGEFNQKGTVRTKYGTRSQLESAIHALKNNGVQVYGDVVMNHKGGADATENVLAVEVNPNNRNQEIHGDYTIEAWTKFDFPGRGNTYSDFKWRWYHFDGVDWDQSRQFQNRIYKFRGDGKAWDWEVDSENGNYDYLMYADVDMDHPEVVNELRRWGEWYTNTLNLDGFRIDAVKHIKYSFTRDWLTHVRNATGKEMFAVAEFWKNDLGALENYLNKTNWNHSVFDVPLHYNLYNASNSGGNYDMAKLLNGTVVQKHPMHAVTFVDNHDSQPGESLESFVQEWFKPLAYALILTREQGYPSVFYGDYYGIPTHSVPAMKAKIDPILEARQNFAYGTQHDYFDHHNIIGWTREGNTTHPNSGLATIMSDGPGGEKWMYVGQNKAGQVWHDITGNKPGTVTINADGWANFSVNGGSVSIWVKR

SEQ ID NO: 16530 - protein, 485 aa, Unidentified
HHNGTNGTMMQYFEWHLPNDGNHWNRLRDDASNLRNRGITAIWIPPAWKGTSQNDVGYGAYDLYDLGEFNQKGTVRTKYGTRSQLESAIHALKNNGVQVYGDVVMNHKGGADATENVLAVEVNPNNRNQEISGDYTIEAWTKFDFPGRGNTYSDFKWRWYHFDGVDWDQSRQFQNRIYKFRGDGKAWDWEVDSENGNYDYLMYADVDMDHPEVVNELRRWGEWYTNTLNLDGFRIDAVKHIKYSFTRDWLTHVRNATGKEMFAVAEFWKNDLGALENYLNKTNWNHSVFDVPLHYNLYNASNSGGNYDMAKLLNGTVVQKHPMHAVTFVDNHDSQPGESLESFVQEWFKPLAYALILTREQGYPSVFYGDYYGIPTHSVPAMKAKIDPILEARQNFAYGTQHDYFDHHNIIGWTREGNTTHPNSGLATIMSDGPGGEKSMYVGQNKAGQVWHDITGNKPGTVTINADGWANFSVNGGSVSIWVKR

SEQ ID NO: 16531 - protein, 485 aa, Unidentified
HHNGTNGTMMQYFEWHLPNDGNHWNRLRDDASNLRNRGITAIWIPPAWKGTSQNDVGYGAYDLYDLGEFNQKGTVRTKYGTRSQLESAIHALKNNGVQVYGDVVMNHKGGADATENVLAVEVNPNNRNQEISGDYTIEAWTKFDFPGRGNTYSDFKWRWYHFDGVDWDLSRQFQNRIYKFRGDGKAWDWEVDSENGNYDYLMYADVDMDHPEVVNELRRWGEWYTNTLNLDGFRIDAVKHIKYSFTRDWLTHVRNATGKEMFAVAEFWKNDLGALENYLNKTNWNHSVFDVPLHYNLYNASNSGGNYDMAKLLNGTVVQKHPMHAVTFVDNHDSQPGESLESFVQEWFKPLAYALILTREQGYPSVFYGDYYGIPTHSVPAMKAKIDPILEARQNFAYGTQHDYFDHHNIIGWTREGNTTHPNSGLATIMSDGPGGEKWMYVGQNKAGQVWHDITGNKPGTVTINADGWANFSVNGGSVSIWVKR

SEQ ID NO: 16532 - protein, 483 aa, Bacillus sp.
HHNGTNGTMMQYFEWHLPNDGNHWNRLRDDASNLRNRGITAIWIPPAWKGTSQNDVGYGAYDLYDLGEFNQKGTVRTKYGTRSQLESAIHALKNNGVQVYGDVVMNHKGGADATENVLAVEVNPNNRNQEISGDYTIEAWTKFDFPGRGNTYSDFKWRWYHFDGVDWDQSRQFQNRIYKFRGKAWDWEVDSENGNYDYLMYADVDMDHPEAVNELRRWGEWYTNTLNLDGFRIDAVKHIKYSFTRDWLTHVRNATGKEMFAVAEFWKNDLGALENYLNKTNWNHSVFDVPLHYNLYNASNSGGNYDMAKLLNGTVVQKHPMHAVTFVDNHDSQPGESLESFVQEWFKPLAYALILTREQGYPSVFYGDYYGIPTHSVPAMKAKIDPILEARQNFAYGTQHDYFDHHNIIGWTREGNTTHPNSGLATIMSDGPGGEKWMYVGQNKAGQVWHDITGNKPGTVTINADGWANFSVNGGSVSIWVKR

SEQ ID NO: 16533 - protein, 485 aa, Unidentified
HHNGTNGTMMQYFEWHLPNDGNHWNRLRDDASNLRNRGITAIWIPPAWKGTSQNDVGYGAYDLYDLGEFNQKGTVRTKYGTRSQLESAIHALKNNGVQVYGDVVMNHKGGADATENVLAVEVNPNNRNQEISGDYTIEAWTKFDFPGRGNTYSDFKWRWYHFDGVDWDQSRQFQNRIYKFRGDGKAWDWEVDSENGNYDYLMYADVDMDHPEVVNELRRWGEWYTNTLNLDGFRIDAVKHIKYSFTRDWLTHVRNATGKEMFAVAEFWKNDLGALENYLNKTNWNHSVFDVPLHYNLYNASNSGGNYDMAKLLNGTVVQKHPMHAVTFVDNHDSQPGESLESFVQEWFKPLAYALILTREQGYPSVFYGDYYGIPTHSVPAMKAKIDPILEARQNFAYGTQHAYFDHHNIIGWTREGNTTHPNSGLATIMSDGPGGEKWMYVGQNKAGQVWHDITGNKPGTVTINADGWANFSVNGGSVSIWVKR

SEQ ID NO: 16534 - protein, 485 aa, Unidentified
HHNGTNGTMMQYFEWHLPNDGNHWNRLRDDASNLRNRGITAIWIPPAWKGTSQNDVGYGAYDLYDLGEFNQKGTVRTKYGTRSQLESAIHALKNNGVQVYGDVVMNHKGGADATENVLAVEVNPNNRNQEISGDYTIEAWTKFDFPGRGNTYSDFKWRWYHFDGVDWDQSRQFQNRIYKFRGDGKAWDWEVDSENGNYDYLMYADVDMDHPEVVNELRRWGEWYTNTLNLDGFRIDAVKHIKYSFTRDWLTHVRNATGKEMFAVAEFWKNDLGALENYLNKTNWNHSVFDVPLHYNLYNASNSGGNYDMAKLLNGTVVQKHPMHAVTFVDNHDSQPGESLESFVQEWFKPLAYALILTREQGYPSVFYGDYYGIPTHSVPAMKAKIDPILEARQNFAYGTQHDYFDHHNIIGWTREGNTTHPNSGLATIMSDGPGGEKWMYVGQNKAGQVWHDITGNKPGIVTINADGWANFSVNGGSVSIWVKR

SEQ ID NO: 16535 - protein, 485 aa, Unidentified
HHNGTNGTMMQYFEWHLPNDGNHWNRLRDDASNLRNRGITAIWIPPAWKGTSQNDVGYGAYDLYDLGEFNQKGTVRTKYGTRSQLESAIHALKNNGVQVYGDVVMNHKGGADATENVLAVEVNPNNRNQEISGDYTIEAWTKFDFPGRGNTYSDFKWRWYHFDGVDWDQSRQFQNRIYKFRGDGKAWDWEVDSENGNYDYLMYADVDMDHPEVVNELRRWGEWYTNTLNLDGFRIDAVKHIKYSFTRDWLTHVRNATGKEMFAVAEFWKNDLGALENYLNKTNWNHSVFDVPLHYNLYNASNDGGNYDMAKLLNGTVVQKHPMHAVTFVDNHDSQPGESLESFVQEWFKPLAYALILTREQGYPSVFYGDYYGIPTHSVPAMKAKIDPILEARQNFAYGTQHDYFDHHNIIGWTREGNTTHPNSGLATIMSDGPGGEKWMYVGQNKAGQVWHDITGNKPGTVTINADGWANFSVNGGSVSIWVKR

SEQ ID NO: 16536 - protein, 485 aa, Unidentified
HHNGTNGTMMQYFEWHLPNDGNHWNRLRDDASNLRNRGITAIWIPPAWKGTSQNDVGYGAYDLYDLGEFNQKGTVRTKYGTRSQLESAIHALKNNGVQVYGDVVMNHKGGADATENVLAVEVNPNNRNQEISGDYTIEAWGKFDFPGRGNTYSDFKWRWYHFDGVDWDQSRQFQNRIYKFRGDGKAWDWEVDSENGNYDYLMYADVDMDHPEVVNELRRWGEWYTNTLNLDGFRIDAVKHIKYSFTRDWLTHVRNATGKEMFAVAEFWKNDLGALENYLNKTNWNHSVFDVPLHYNLYNASNSGGNYDMAKLLNGTVVQKHPMHAVTFVDNHDSQPGESLESFVQEWFKPLAYALILTREQGYPSVFYGDYYGIPTHSVPAMKAKIDPILEARQNFAYGTQHDYFDHHNIIGWTREGNTTHPNSGLATIMSDGPGGEKWMYVGQNKAGQVWHDITGNKPGTVTINADGWANFSVNGGSVSIWVKR

SEQ ID NO: 16537 - protein, 485 aa, Unidentified
HHNGTNGTMMQYFEWHLPNDGNHWNRLRDDASNLRNRGITAIWIPPAWKGTSQNDVGYGAYDLYDLGEFNQKGTVRTKYGTRSQLESAIHALKNNGVQVYGDVVMNHKGGADATENVLAVEVNPNNRNQEISGDYTIEAWTKFDFPGRGNTYSDFKWRWYHFDGVDWDQSRQFQNRIYKFRGDGKAWDWEVDSENGNYDYLMYADVDMDHPEVVNELRRWGEWYTNTLNLDGFRIDAVKHIKYSFTRDWLTHVRNATGKEMFAVAEFWKNDLGALENYLNKTNWNHSVFDVPLHYNLYNASNSGGNYDMAKLLNGTVVQKHPMHAVTFVDNHDSQPGESLESFVQEWFKPLAYALILTREQGYPSVFYGDYYGIPTHSVPAMKAKIDPILEARQNFAYGTQHDYFDHHNIIGWTREGNTTHPNSGLATIMSDGPGGEKNMYVGQNKAGQVWHDITGNKPGTVTINADGWANFSVNGGSVSIWVKR

SEQ ID NO: 16538 - protein, 485 aa, Unidentified
HHEGTNGTMMQYFEWHLPNDGNHWNRLRDDASNLRNRGITAIWIPPAWKGTSQNDVGYGAYDLYDLGEFNQKGTVRTKYGTRSQLESAIHALKNNGVQVYGDVVMNHKGGADATENVLAVEVNPNNRNQEISGDYTIEAWTKFDFPGRGNTYSDFKWRWYHFDGVDWDQSRQFQNRIYKFRGDGKAWDWEVDSENGNYDYLMYADVDMDHPEVVNELRRWGEWYTNTLNLDGFRIDAVKHIKYSFTRDWLTHVRNATGKEMFAVAEFWKNDLGALENYLNKTNWNHSVFDVPLHYNLYNASNSGGNYDMAKLLNGTVVQKHPMHAVTFVDNHDSQPGESLESFVQEWFKPLAYALILTREQGYPSVFYGDYYGIPTHSVPAMKAKIDPILEARQNFAYGTQHDYFDHHNIIGWTREGNTTHPNSGLATIMSDGPGGEKWMYVGQNKAGQVWHDITGNKPGTVTINADGWANFSVNGGSVSIWVKR

SEQ ID NO: 16539 - protein, 485 aa, Unidentified
HHNGTNGTMMQYFEWHLPNDGNHWNRLRDDASNLRNRGITAIWIPPAWKGTSQNDVGYGAYDLYDLGEFNQKGTVRTKYGTRSQLESAIHALKNNGCQVYGDVVMNHKGGADATENVLAVEVNPNNRNQEISGDYTIEAWTKFDFPGRGNTYSDFKWRWYHFDGVDWDQSRQFQNRIYKFRGDGKAWDWEVDSENGNYDYLMYADVDMDHPEVVNELRRWGEWYTNTLNLDGFRIDAVKHIKYSFTRDWLTHVRNATGKEMFAVAEFWKNDLGALENYLNKTNWNHSVFDVPLHYNLYNASNSGGNYDMAKLLNGTVVQKHPMHAVTFVDNHDSQPGESLESFVQEWFKPLAYALILTREQGYPSVFYGDYYGIPTHSVPAMKAKIDPILEARQNFAYGTQHDYFDHHNIIGWTREGNTTHPNSGLATIMSDGPGGEKWMYVGQNKAGQVWHDITGNKPGTVTINADGWANFSVNGGSVSIWVKR

SEQ ID NO: 16540 - protein, 485 aa, Bacillus sp.
HHNGTNGTMMQYFEWHLPNDGNHWNRLRDDASNLRNRGITAIWIPPAWKGTSQNDVGYGAYDLYDLGEFNQKGTVRTKYGTRSQLESAIHALKNNGVQVYGDVVMNHKGGADATENVLAVEVNPNNRNQEISGDYTIEAWTKFDFPGRGNTYSDFKWRWYHFDGVDWDQSRQFQNRIYKFRGDGKAWDWEVDSENGNYDYLMYADFDMDHPEVVNELRRWGEWYTNTLNLDGFRIDAVKHIKYSFTRDWLTHVRNATGKEMFAVAEFWKNDLGALENYLNKTNWNHSVFDVPLHYNLYNASNSGGNYDMAKLLNGTVVQKHPMHAVTFVDNHDSQPGESLESFVQEWFKPLAYALILTREQGYPSVFYGDYYGIPTHSVPAMKAKIDPILEARQNFAYGTQHDYFDHHNIIGWTREGNTTHPNSGLATIMSDGPGGEKWMYVGQNKAGQVWHDITGNKPGTVTINADGWANFSVNGGSVSIWVKR

SEQ ID NO: 16541 - protein, 485 aa, Unidentified
HHNGTNGTMMQYFEWHLPNDGNHWNRLRDDASNLRNRGITAIWIPPAWKGTSQNDVGYGAYDLYDLGEFNQKGTVRTKYGTRSQLESAIHALKNNGVQVYGDVVMNHKGGADATENVLAVEVNPNNRNQEISGDYTIEAWTKFDFPGRGNTYSDFKWRWYHFDGVDWDQSRQFQNRIYKFRGDGKAWDWEVDSENGNYDYLMYADVDMDHPEVVNELRRWGEWYTNTLNLDGFRIDAVKHIKYSFTRDWLTHVRNATGKEMFAVAEFWKNDLGALENYLNKTNWNHSVFDVPLHYNLYNASNSGGNYDMAKLLNGTVVQKHPMHAVTFVDNHDSQPGESLESFVQEWFKPLAYALILTREQGYPSVFYGDYYGIPTHSVPAMKAKIDPILEARQNFAYGTQHDYFDHHNIIGWTREGNTTHPNSGLATIMSDGPGGEKWMYVGQNKAGQVWHDITGNKPGTVTINADGWANFSVQGGSVSIWVKR

SEQ ID NO: 16542 - protein, 485 aa, Unidentified
HHNGTNGTMMQYFEWHLPNDGNHWNRLRDDASNLRNRGITAIWIPPAWKGTSQNDVAYGAYDLYDLGEFNQKGTVRTKYGTRSQLESAIHALKNNGVQVYGDVVMNHKGGADATENVLAVEVNPNNRNQEISGDYTIEAWTKFDFPGRGNTYSDFKWRWYHFDGVDWDQSRQFQNRIYKFRGDGKAWDWEVDSENGNYDYLMYADVDMDHPEVVNELRRWGEWYTNTLNLDGFRIDAVKHIKYSFTRDWLTHVRNATGKEMFAVAEFWKNDLGALENYLNKTNWNHSVFDVPLHYNLYNASNSGGNYDMAKLLNGTVVQKHPMHAVTFVDNHDSQPGESLESFVQEWFKPLAYALILTREQGYPSVFYGDYYGIPTHSVPAMKAKIDPILEARQNFAYGTQHDYFDHHNIIGWTREGNTTHPNSGLATIMSDGPGGEKWMYVGQNKAGQVWHDITGNKPGTVTINADGWANFSVNGGSVSIWVKR

SEQ ID NO: 16543 - protein, 485 aa, Unidentified
HHNGTNGTMMQYFEWHLPNDGNHWNRLRDDASNLRNRGITAIWIPPAWKGTSQNDVGYGAYDLYDLGEFNQKGTVRTKYGTRSQLESAIHALKNNGVQVYGDVVMNHKGGADATENVLAVEVNPNNRNQEISGDYTIEAWTKFDFPGRGNTYSDFKWRWYHFDGVDWDQSPQFQNRIYKFRGDGKAWDWEVDSENGNYDYLMYADVDMDHPEVVNELRRWGEWYTNTLNLDGFRIDAVKHIKYSFTRDWLTHVRNATGKEMFAVAEFWKNDLGALENYLNKTNWNHSVFDVPLHYNLYNASNSGGNYDMAKLLNGTVVQKHPMHAVTFVDNHDSQPGESLESFVQEWFKPLAYALILTREQGYPSVFYGDYYGIPTHSVPAMKAKIDPILEARQNFAYGTQHDYFDHHNIIGWTREGNTTHPNSGLATIMSDGPGGEKWMYVGQNKAGQVWHDITGNKPGTVTINADGWANFSVNGGSVSIWVKR

SEQ ID NO: 16544 - protein, 485 aa, Unidentified
HHNGTNGTMMQYFEWHLPNDGNHWNRLRDDASNLRNRGITAIWIPPAWKGTSQNDVGYGAYDLYDLGEFNQKGTVRTKYGTRSQLESAIHALKNNGVQVYGDVVMNHKGGADATENVLAVEVNPNNRNQEISGDYTIEAWTKFDFPGRGNTYSDFKWRWYHFDGVDWDQSRQFQNRIYKFRGDGKAWDWEVDSENGNYDYLMYADVDMDHPEVVNELRRWGEWYTNTLNLDGFRIDAVKHIKYSFTRDWLTHVRNATGKEMFAVAEFWKNDLGALENYLNKTNWNHYVFDVPLHYNLYNASNSGGNYDMAKLLNGTVVQKHPMHAVTFVDNHDSQPGESLESFVQEWFKPLAYALILTREQGYPSVFYGDYYGIPTHSVPAMKAKIDPILEARQNFAYGTQHDYFDHHNIIGWTREGNTTHPNSGLATIMSDGPGGEKWMYVGQNKAGQVWHDITGNKPGTVTINADGWANFSVNGGSVSIWVKR

SEQ ID NO: 16545 - protein, 485 aa, Unidentified
HHNGTNGTMMQYFEWHLPNDGNHWNRLRDDASNLRNRGITAIWIPPAWKGTSQNDVGYGAYDLYDLGEFNQKGTVRTKYGTRSQLESAIHALKNNGVQVYGDVVMNHKGGADATENVLAVEVNPNNRNQEISGDYTIEAWTKFDLPGRGNTYSDFKWRWYHFDGVDWDQSRQFQNRIYKFRGDGKAWDWEVDSENGNYDYLMYADVDMDHPEVVNELRRWGEWYTNTLNLDGFRIDAVKHIKYSFTRDWLTHVRNATGKEMFAVAEFWKNDLGALENYLNKTNWNHSVFDVPLHYNLYNASNSGGNYDMAKLLNGTVVQKHPMHAVTFVDNHDSQPGESLESFVQEWFKPLAYALILTREQGYPSVFYGDYYGIPTHSVPAMKAKIDPILEARQNFAYGTQHDYFDHHNIIGWTREGNTTHPNSGLATIMSDGPGGEKWMYVGQNKAGQVWHDITGNKPGTVTINADGWANFSVNGGSVSIWVKR

SEQ ID NO: 16546 - protein, 485 aa, Unidentified
HHNGTNGTMMQYFEWHLPNDGNHWNRLRDDASNLRNRGITAIWIPPAWKGTSQNDVGYGAYDLYDLGEFNQKGTVRTKYGTRSQLESAIHALKNNGVQVYGDVVMNHKGGADATENVLAVEVNPNNRNQEISGDYTIEAWTKFDFPGRGNTYSDFKWRWYHFDGVDWDQSRQFQNRIYKFRGDGKAWDWEVDSENGNYDYLMYADVDMDHPEVVNELRRWGEWYTNTLNLDGFRIDAVKHIKYSFTRDWLTHVRNATGKEMFAVAEFWKNDLGALENYLNKTNWNHSVFDVPLHYNLYNASNSGGNYDMAKLLNVTVVQKHPMHAVTFVDNHDSQPGESLESFVQEWFKPLAYALILTREQGYPSVFYGDYYGIPTHSVPAMKAKIDPILEARQNFAYGTQHDYFDHHNIIGWTREGNTTHPNSGLATIMSDGPGGEKWMYVGQNKAGQVWHDITGNKPGTVTINADGWANFSVNGGSVSIWVKR

SEQ ID NO: 16547 - protein, 485 aa, Bacillus sp.
HHNGTNGTMMQYFEWHLPNDGNHWNRLRDDASNLRNRGITAIWIPPAWKGTSQNDVGYGAYDLYDLGEFNQKGTVRTKYGTRSQLESAIHALKNNGVQVYGDVVMNHKGGADATENVLAVEVNPNNRNQEISGDYTIEAWTKFDFPGRGNTYSDFKWRWYHFDGVDWDQSRQFQNRIYKFRGDGKAWDWEVDSEVGNYDYLMYADVDMDHPEVVNELRRWGEWYTNTLNLDGFRIDAVKHIKYSFTRDWLTHVRNATGKEMFAVAEFWKNDLGALENYLNKTNWNHSVFDVPLHYNLYNASNSGGNYDMAKLLNGTVVQKHPMHAVTFVDNHDSQPGESLESFVQEWFKPLAYALILTREQGYPSVFYGDYYGIPTHSVPAMKAKIDPILEARQNFAYGTQHDYFDHHNIIGWTREGNTTHPNSGLATIMSDGPGGEKWMYVGQNKAGQVWHDITGNKPGTVTINADGWANFSVNGGSVSIWVKR

SEQ ID NO: 16548 - protein, 485 aa, Unidentified
HHNGTNGTMMQYFEWHLPNDGNHWNRLRDDASNLRNRGITAIWIPPAWKGTSQNDVGYGAYDLYDLGEFNQKGTVRTKYGTRSQLESAIHALKNNGVQVYGDVVMNHKGGADATENVLAVEVNPNNRNQEISGDYTIEAWTKFDFPGRGNTYSDFKWRWYHFDGVDWDQSRQFQNRIYKFRGDGKAWDWEVDSENGNYDYLMYADVDMDHPEVVNELRRWGEWYTNTLNLDGFRIDAVKHIKYSFTRDWLTHVRNATGKEWFAVAEFWKNDLGALENYLNKTNWNHSVFDVPLHYNLYNASNSGGNYDMAKLLNGTVVQKHPMHAVTFVDNHDSQPGESLESFVQEWFKPLAYALILTREQGYPSVFYGDYYGIPTHSVPAMKAKIDPILEARQNFAYGTQHDYFDHHNIIGWTREGNTTHPNSGLATIMSDGPGGEKWMYVGQNKAGQVWHDITGNKPGTVTINADGWANFSVNGGSVSIWVKR

SEQ ID NO: 16549 - protein, 485 aa, Unidentified
HHNGTNGTMMQYFEWHLPNDGNHWNRLRDDASNLRNRGITAIWIPPAWKGTSQNDVGYGAYDLYDLGEFNQKGTVRTKYGTRSQLESAIHALKNNGVQVYGDVVMNHKGGADATENVLAVEVNPNNRNQEISGDYTIEAWTKFDFPGRGNTYSDFKWRWYHFDGVDWDQSRQFQNRIYKFRGDGKAWDWEVDSENGNYDYLMYADVDMDHPEVVNELRRWGEWYTNTLNLDGFRIDAVKHIKYSFTRDWLTHVRNATGKEMFAVAEFWKNDLGALENYLNKTNWNHSVFDVPLHYNLYNASNSGGNYDMAKLLNGTVVQKHPMHAVTFVDNHDSQPGESLESFVQEWFKPLAYALILTREQGYPSVFYGDYYGIPTHSVPAMKAKIDPILAARQNFAYGTQHDYFDHHNIIGWTREGNTTHPNSGLATIMSDGPGGEKWMYVGQNKAGQVWHDITGNKPGTVTINADGWANFSVNGGSVSIWVKR

SEQ ID NO: 16550 - protein, 485 aa, Unidentified
HHNGTNGTMMQYFEWHLPNDGNHWNRLRDDASNLRNRGITAIWIPPAWKGTSQNDVGYGAYDLYDLGEFNQKGTVRTKYGTRSQLESAIHALKNNGVQVYGDVVMNHKGGADATENVLAVEVNPNNRNQEISGDYTIEAWTKFDFPGRGNTYSDFKWRWYHFDGVDWDQSRQFQNRIYKFRGDGKAWDWEVDSENGNYDYLMYADVDMDHPEVVNELRRWGEWYTNTLNLDGFRIDAVKHIKYSFTRDWLTHVRNATGKEMFAVAEFWKNDLGALENYLNKTNWNHSVFDVPLHYNLYNASNSGGNYDMAKLLNGTVVQKHPMHAVTFVDNHDSQPGESLESFVQEWFKPLAYALILTREQGYPSVFYGDYYGIPTHSVPAMKAKIDPILEARQNFAYGTQHDYFDHHNIIGWTREGNTTHPNSGLATIMSDGPGGEKWMYVGQNKAGQVWHDITGNKPGTVTIAADGWANFSVNGGSVSIWVKR

SEQ ID NO: 16551 - protein, 485 aa, Unidentified
HHNGTNGTMMQYFEWHLPNDGNHWNRLRDDASNLRNRGITAIWIPPAWKGTSQNDVGYGAYDLYDLGEFNQKGTVRTKYGTRSQLESAIHALKNNGVQVYGDVVMNHKGGADATENVLAVEVNPNNRNQEISGDYTIEAWTKFDFPGRGNTYSDFKWRWYHFDGVDWDQSRQFQNRIYKFRGDGKAWDWEVDSENGNYDYLMYADVDMDHPEVVNELRRWGEWYTNTLNLDGFRIDAVKHIKYSFTRDWLTHVRNATGKEMFAVAEFWKNDLGALENYLNKTNWNHSVFDVPLHYNLYNASNSGGNYDMACLLNGTVVQKHPMHAVTFVDNHDSQPGESLESFVQEWFKPLAYALILTREQGYPSVFYGDYYGIPTHSVPAMKAKIDPILEARQNFAYGTQHDYFDHHNIIGWTREGNTTHPNSGLATIMSDGPGGEKWMYVGQNKAGQVWHDITGNKPGTVTINADGWANFSVNGGSVSIWVKR

SEQ ID NO: 16552 - protein, 485 aa, Unidentified
HHNGTNGTMMQYFEWHLPNDGNHWNRLRDDASNLRNRGITAIWIPPAWKGTSQNDVGYGAYDLYDLGEFNQKGTVRTKYGTRSQLESAIHALKNNGVQVYGDVVMNHKGGADATENVLAVEVNPNNRNQEISGDYTIEAWTKFDFPGRGNTYSDFKWRWYHFDGVDWDQSRQFQNRIYKFRGDGKAWDWEVDSENGNYDYLMYADVDMDHPEVVNELRRWGEWYTNTLNLDGFRIDAVKHIKYSFTRDWLTHVRNATGKEMFAVAEFWKNDLGALENYLNKTNKNHSVFDVPLHYNLYNASNSGGNYDMAKLLNGTVVQKHPMHAVTFVDNHDSQPGESLESFVQEWFKPLAYALILTREQGYPSVFYGDYYGIPTHSVPAMKAKIDPILEARQNFAYGTQHDYFDHHNIIGWTREGNTTHPNSGLATIMSDGPGGEKWMYVGQNKAGQVWHDITGNKPGTVTINADGWANFSVNGGSVSIWVKR

SEQ ID NO: 16553 - protein, 485 aa, Unidentified
HHNGTNGTMMQYFEWHLPNDGNHWNRLRDDASNLRNRGITAIWIPPAWKGTSQNDVGYGAYDLYDLGEFNQKGTVRTKYGTRSQLESAIHALKNNGVQVYGDVVMNHKGGADATENVLAVEVNPNNRNQEISGDYTIEAWTKFDFPGRGNTYSDFKWRWYHFDGVDWDQSRQFQNRIYKFRGDGKAWDWEVDSENGNYDYLMYADVDMDHPEVVNELRRWGEWYYNTLNLDGFRIDAVKHIKYSFTRDWLTHVRNATGKEMFAVAEFWKNDLGALENYLNKTNWNHSVFDVPLHYNLYNASNSGGNYDMAKLLNGTVVQKHPMHAVTFVDNHDSQPGESLESFVQEWFKPLAYALILTREQGYPSVFYGDYYGIPTHSVPAMKAKIDPILEARQNFAYGTQHDYFDHHNIIGWTREGNTTHPNSGLATIMSDGPGGEKWMYVGQNKAGQVWHDITGNKPGTVTINADGWANFSVNGGSVSIWVKR

SEQ ID NO: 16554 - protein, 485 aa, Unidentified
HHNGTNGTMMQYFEWHLPNDGNHWNRLRDDASNLRNRGITAIWIPPAWKGTSQNDVGYGAYDLYDLGEFNQKGTVRTKYGTRSQLESAIHALKNNGVQVYGDVVMNHKGGADATENVLAVEVNPNNRNQEISGDYTIEAWTKFDFPGRGNTYSDFKWRWYHFDGVDWDQSRQFQNRIYKFRGDGKAWDWEVDSENGNYDYLMYADVDMDHPEVVNELRRWGEWYTNTLNLDGFRIDAVKHIKYSFTRDWLTHVRNATGKEMFAVAEFWKNDLGALENYLNKTNWNHSVFDVPLHYNLYNASNSGGNYDMAKLLNGTVVQKHPMHAVTFVDNHDSQPGESLESFVQEWFKPLAYALILTREQGYPSVFYGDYYGIPTHSVPAMKAKIDPILEARQNFAYGTQHDYFDHHNIIGWTYEGNTTHPNSGLATIMSDGPGGEKWMYVGQNKAGQVWHDITGNKPGTVTINADGWANFSVNGGSVSIWVKR

SEQ ID NO: 16555 - protein, 485 aa, Unidentified
HHNGTNGTMMQYFEWHLPNDGNHWNRLRDDASNLRNRGITAIWIPPAWKGTSQNDVGYGAYDLYDLGEFNQKGTVRTKYGTRSQLESAIHALKNNGVQVYGDVVMNHKGGADATENVLAVEVNPNNRNQEISGDYTIEAWTKFDFPGRGNTYSDFKWRWYHFDGVDWDQSRQFQNRIYKFRGDGKAWDWEVDSENGNYDYLMYADVDMDHPEVVNELRRWGEWYTNTLNLDGFRIDAVKHIKYSFTRDWLTHVRNATGVEMFAVAEFWKNDLGALENYLNKTNWNHSVFDVPLHYNLYNASNSGGNYDMAKLLNGTVVQKHPMHAVTFVDNHDSQPGESLESFVQEWFKPLAYALILTREQGYPSVFYGDYYGIPTHSVPAMKAKIDPILEARQNFAYGTQHDYFDHHNIIGWTREGNTTHPNSGLATIMSDGPGGEKWMYVGQNKAGQVWHDITGNKPGTVTINADGWANFSVNGGSVSIWVKR

SEQ ID NO: 16556 - protein, 485 aa, Unidentified
HHNGTNGTMMQYFEWHLPNDGNHWNRLRDDASNLRNRGITAIWIPPAWKGTSQNDVGYGAYDLYDLGEFNQKGTVRTKYGTRSQLESAIHALKNNGVQVYGDVVMNHKGGADATENVLAVEVNPNNRNQEISGDYTIEAWTKFDFPGRGNTYSDFKWRWYHFDGVDWDQSRQFQNRIYKFRGDGKAWDWEVDSENGNYDYLMYADVDMDHPEVVNELRRWGEWYTNTLNLDGFRIDAVKHIKYSFTRDWLTHVRNATGKEMFAVAEFWKNDLGALENYLNKTNWNHSVFDVPLHYNLYNASNSGGNYDMAKLLNGTVVQKHPMHAVTFVDNHDSQPGESLESFVQEWFKPLAYALILTREQGYPSVFYGDYYGIPTHSVPAMKAKIDPILEARQNFAYGTQHDYFDHHNIIGWTREGNTTHPNSGLATIMSDGPGGEKWMYVGQNKAGQVWHDITGNKPGTVTINADGWANFSVWGGSVSIWVKR

SEQ ID NO: 16557 - protein, 485 aa, Unidentified
HHNGTNGTMMQYFEWHLPNDGNHWNRLRDDASNLRNRGITAIWIPPAWKGTSQNDVGYGAYDLYDLGEFNQKGTVRTKYGTRSQLESAIHALKNNGVQVYGDVVMNHKGGADATENVLAVEVNPNNRNQEISGDYTIEAWTKFDFPGRGNTYSDFKWRWYHFDGVDWDQSRQFQNRIYKFRGDGKAWDWEVDSENGNYDYLMYADVDMDHPEVVNELRRWGEWYTNTLNLDGFRIDAVKHIKYSFTPDWLTHVRNATGKEMFAVAEFWKNDLGALENYLNKTNWNHSVFDVPLHYNLYNASNSGGNYDMAKLLNGTVVQKHPMHAVTFVDNHDSQPGESLESFVQEWFKPLAYALILTREQGYPSVFYGDYYGIPTHSVPAMKAKIDPILEARQNFAYGTQHDYFDHHNIIGWTREGNTTHPNSGLATIMSDGPGGEKWMYVGQNKAGQVWHDITGNKPGTVTINADGWANFSVNGGSVSIWVKR

SEQ ID NO: 16558 - protein, 485 aa, Unidentified
HHNGTNGTMMQYFEWHLPNDGNHWNRLRDDASNLRNRGITAIWIPPAWKGTSQNDVGYGAYDLYDLGEFNQKGTVRTKYGTRSQLESAIHALKNNGVQVYGDVVMNHKGGADATENVLAVEVNPNNRNQEISGDYTIEAWTKFDFPGRGNTYSDFKWRWYHFDGVDWDQSRQFQNRIYKFRGDGKAWDWEVDSENGNYDYLMYADVDMDHPEVVNELRRWGEWYTNTLNLDGFRIDAVKHIKYSFTRDWLTHVRNATGKEMFAVAEFWKNDLGALENYLNKTNWNHSVFDVPLHYNLYNASNSGGNYDMAKLLNGTVVQKHPMHAVTFVDNHDSQPGESLESFVQEWFKALAYALILTREQGYPSVFYGDYYGIPTHSVPAMKAKIDPILEARQNFAYGTQHDYFDHHNIIGWTREGNTTHPNSGLATIMSDGPGGEKWMYVGQNKAGQVWHDITGNKPGTVTINADGWANFSVNGGSVSIWVKR

SEQ ID NO: 16559 - protein, 485 aa, Unidentified
HHNGTNGTMMQYFEWHLPNDGNHWNRLRDDASNLRNRGITAIWIPPAWKGTSQNDVGYGAYDLYDLGEFNQKTTVRTKYGTRSQLESAIHALKNNGVQVYGDVVMNHKGGADATENVLAVEVNPNNRNQEISGDYTIEAWTKFDFPGRGNTYSDFKWRWYHFDGVDWDQSRQFQNRIYKFRGDGKAWDWEVDSENGNYDYLMYADVDMDHPEVVNELRRWGEWYTNTLNLDGFRIDAVKHIKYSFTRDWLTHVRNATGKEMFAVAEFWKNDLGALENYLNKTNWNHSVFDVPLHYNLYNASNSGGNYDMAKLLNGTVVQKHPMHAVTFVDNHDSQPGESLESFVQEWFKPLAYALILTREQGYPSVFYGDYYGIPTHSVPAMKAKIDPILEARQNFAYGTQHDYFDHHNIIGWTREGNTTHPNSGLATIMSDGPGGEKWMYVGQNKAGQVWHDITGNKPGTVTINADGWANFSVNGGSVSIWVKR

SEQ ID NO: 16560 - protein, 485 aa, Unidentified
HHNGTNGTMMQYFEWHLPNDGNHWNRLRDDASNLRNRGITAIWIPPAWKGTSQNDVGYGAYDLYDLGEFNQKGTVRTKYGTRSQLESAIHALKNNGVQVYGDVVMNHKGGADATENVLAVEVNPNNRNQEISGDYTIEAWTKFDFPGRGNTYSDFKWRWYHFDGVDWDQSRQFQNRIYKFRGDGKAWDWEVDSENGNYDYLMYADVDMDHPEVVNELRRWGEWYTNTLNLDGFRIDAVKHIKYSFTRDWLTHVRNATGKEMFAVAEFWKNDLGALENYLNKTNWNHSVFDVPLHYNLYNASNSGGNYDMAKLLNGTVVQKHPMHAVTFVDNHDSQPGESLESFVQEWFKPLAYALILTREWGYPSVFYGDYYGIPTHSVPAMKAKIDPILEARQNFAYGTQHDYFDHHNIIGWTREGNTTHPNSGLATIMSDGPGGEKWMYVGQNKAGQVWHDITGNKPGTVTINADGWANFSVNGGSVSIWVKR

SEQ ID NO: 16561 - protein, 485 aa, Unidentified
HHNGTNGTMMQYFEWHLPNDGNHWNRLRDDASNLRNRGITAIWIPPAWKGTSQNDVGYGAYDLYDLGEFNQKGTVRTKYGTRSQLESAIHALKNNGVQVYGDVVMNHKGGADATENVLAVEVNPNNRNQEISGDYTIEAWTKFDFPGRGNTYSDFKWRWYHFDGVDWDQSRQFQNRIYKFRGDGKAWDWEVDSENGNYDYLMYADVDMDHPEVVNELRRWGEWYTNTLNLDGFRIDAVKHIKYSFTRDWLTHVRNATGKEMFAVAEFWKNDLGALENYLNKTNWNHSVFDVPLHYNLYNASNSGGNYDMAKLLNGTVVQKHPHHAVTFVDNHDSQPGESLESFVQEWFKPLAYALILTREQGYPSVFYGDYYGIPTHSVPAMKAKIDPILEARQNFAYGTQHDYFDHHNIIGWTREGNTTHPNSGLATIMSDGPGGEKWMYVGQNKAGQVWHDITGNKPGTVTINADGWANFSVNGGSVSIWVKR

SEQ ID NO: 16562 - protein, 485 aa, Bacillus sp.
HHNGTNGTMMQYFEWHLPNDGNHWNRLRDDASNLRNRGITAIWIPPAWKGTSQNDVGYGAYDLYDLGEFNQKGTVRTKYGTRSQLESAIHALKNNGVQVYGDVVMNHKGGADATENVLAVEVNPNNRNQEISGDYTIEAWTKFDFPGRGNTYSDFKWRWYHFDGVDWDQSRQFQNRIYKFRGDGKAWDWEVDMENGNYDYLMYADVDMDHPEVVNELRRWGEWYTNTLNLDGFRIDAVKHIKYSFTRDWLTHVRNATGKEMFAVAEFWKNDLGALENYLNKTNWNHSVFDVPLHYNLYNASNSGGNYDMAKLLNGTVVQKHPMHAVTFVDNHDSQPGESLESFVQEWFKPLAYALILTREQGYPSVFYGDYYGIPTHSVPAMKAKIDPILEARQNFAYGTQHDYFDHHNIIGWTREGNTTHPNSGLATIMSDGPGGEKWMYVGQNKAGQVWHDITGNKPGTVTINADGWANFSVNGGSVSIWVKR

SEQ ID NO: 16563 - protein, 485 aa, Unidentified
HHNGTNGTMMQYFEWHLPNDGNHWNRLRDDASNLRNRGITAIWIPPAWKGTSQNDVGYGAYDLYDLGEFNQKGTVRTKYGTRSQLESAIHALKNNGVQVYGDVVMNHKGGADATENVLAVEVNPNNRNQEISGDYTIEAWTKFDFPGRGNTYSDFKWRWYHFDGVDWDQSRQFQNRIYKFRGDGKAWDWEVDSENGNYDYLMYADVDMDHPEVVNELRRWGEWYTNTLNLDGFRIDAVKHIKYSFTRDWLTHVRNATGKEMFAVAEFWKNDLGALENYLNKTNWNHSVFDVPLHYNLYNASNSGGNYDMAKLLNGTVVQKHPMHAVTFVDNHDSQPGESLESFVQEWFKPLAYALILTREQGYPSVFCGDYYGIPTHSVPAMKAKIDPILEARQNFAYGTQHDYFDHHNIIGWTREGNTTHPNSGLATIMSDGPGGEKWMYVGQNKAGQVWHDITGNKPGTVTINADGWANFSVNGGSVSIWVKR

SEQ ID NO: 16564 - protein, 485 aa, Unidentified
HHNGTNGTMMQYFEWHLPNDGNHWNRLRDDASNLRNRGITAIWIPPAWKGTSQNDVGYGAYDLYDLGEFNQKGTVRTKYGTRSQLESAIHALKNNGVQVYGDVVMNHKGGADATENVLAVEVNPNNRNQEISGDYTIEAWTKFDFPGRGNTYSDFKWRWYHFDGVDWDQSRQFQNRIYKFRGDGKAWDWEVDSENGNYDYLMYADVDMDHPEVVNELRRWGEWYTNTLNLDGFRIDAVKHIKYSFTRDWLTHVRNATGKEMFAVAEFWKNDLGALENYLNKTNWNHSVFDVPLHYNLYNASNSGGNYDMAKLLNGTVVQKHPMHAVTFVDNHDSQPGESLESFVQEWFKPLAYALILTREQGYPSVFYGDYYGIPTHSVPAMKAKIDPILEARQNFAYGTQHDYFDHHNIIGWTREGNTTHPNSGLATIMSDGPGGEKWMYVGQNKAGQVWHDITGNKPGTVTINADGWANFSVCGGSVSIWVKR

SEQ ID NO: 16565 - protein, 485 aa, Unidentified
HHNGTNGTMMQYFEWHLPNDGNHWNRLRDDASNLRNRGITAIWIPPAWKGTSQNDVGYGAYDLYDLGEFNQKGTVRTKYGTRSQLESAIHALKNNGVQVYGDVVMNHKGGADATENVLAVEVNPNNRNQEISGDYTIEAWTKFDFPGRGNTYSDFKWRWYHFDGVDWDQSRQFQNRIYKFRGDGKAWDWEVDSENGNYDYLMYADVDMDHPEVVNELRRWGEWYTNTLNLDGFRIDAVKHIKYSFTRDWLTHVRNATGKEMFAVAEFWKNDLGALENYLNKTNWNHSVFDVPLHYNLYNASNSGGNYDMAKLLNGTVVQKHPMHAVTFVDNHDSQPGESLESFVQEWFKPLAYALILTREQGYPSVFYGDYYGIPTHSVPAMKAKIDPILEARQNFAYGTQHDYFDHHNIIGWTREGNTTHPNSGLATIMSDGLGGEKWMYVGQNKAGQVWHDITGNKPGTVTINADGWANFSVNGGSVSIWVKR

SEQ ID NO: 16566 - protein, 485 aa, Unidentified
HHNGTNGTMMQYFEWHLPNDGNHWNRLRDDASNLRNRGITAIWIPPAWKGTSQNDVGYGAYDLYDLGEFNQKGTVRTKYGTRSQLESAIHALKNNGVQVYGDVVMNHKGGADATENVLAVEVNPNNRNQEISGDYTIEAWTKFDFPGRGNTYSDFKWRWYHFDGVDWDQSRQFQNRIYKFRGDGKAWDWEVDSENGNYDYLMYADVDMDHPEVVNELRRWGEWYTNTLNLDGFRIDAVKHIKYSFTRDWLDHVRNATGKEMFAVAEFWKNDLGALENYLNKTNWNHSVFDVPLHYNLYNASNSGGNYDMAKLLNGTVVQKHPMHAVTFVDNHDSQPGESLESFVQEWFKPLAYALILTREQGYPSVFYGDYYGIPTHSVPAMKAKIDPILEARQNFAYGTQHDYFDHHNIIGWTREGNTTHPNSGLATIMSDGPGGEKWMYVGQNKAGQVWHDITGNKPGTVTINADGWANFSVNGGSVSIWVKR

SEQ ID NO: 16567 - protein, 485 aa, Unidentified
HHNGTNGTMMQYFEWHLPNDGNHWNRLRDDASNLRNRGITAIWIPPAWKGTSQNDVGYGAYDLYDLGFFNQKGTVRTKYGTRSQLESAIHALKNNGVQVYGDVVMNHKGGADATENVLAVEVNPNNRNQEISGDYTIEAWTKFDFPGRGNTYSDFKWRWYHFDGVDWDQSRQFQNRIYKFRGDGKAWDWEVDSENGNYDYLMYADVDMDHPEVVNELRRWGEWYTNTLNLDGFRIDAVKHIKYSFTRDWLTHVRNATGKEMFAVAEFWKNDLGALENYLNKTNWNHSVFDVPLHYNLYNASNSGGNYDMAKLLNGTVVQKHPMHAVTFVDNHDSQPGESLESFVQEWFKPLAYALILTREQGYPSVFYGDYYGIPTHSVPAMKAKIDPILEARQNFAYGTQHDYFDHHNIIGWTREGNTTHPNSGLATIMSDGPGGEKWMYVGQNKAGQVWHDITGNKPGTVTINADGWANFSVNGGSVSIWVKR

SEQ ID NO: 16568 - protein, 485 aa, Unidentified
HHNGTNGTMMQYFEWHLPNDGNHWNRLRDDASNLRNRGITAIWIPPAWKGTSQNDVGYGAYDLYDLGEFNQKGTVRTKYGTRSQLESAIHALKNNGVQVYGDVVMNHKGGADATENVLAVEVNPNNRNQEISGDYTIEAWTKFDFPGRGNTYSDFKWRWYHFDGVDWDQSRQFQNRIYKFRGDGKAWDWEVDSENGNYDYLMYADVDMDHPEVVNELRRWGEWYTNTLNLDGFRIDAVKHIKYSFTRDWLTHVRNATGKEMFAVAEFWKNDLGALENYLNKTNWNHSVFDVPLHYNLYNASNSGGNYDMAKLLNGTVVQKHPMHAVTFVDNHDSQPGESLESFVQEWFKPLAYALILTWEQGYPSVFYGDYYGIPTHSVPAMKAKIDPILEARQNFAYGTQHDYFDHHNIIGWTREGNTTHPNSGLATIMSDGPGGEKWMYVGQNKAGQVWHDITGNKPGTVTINADGWANFSVNGGSVSIWVKR

SEQ ID NO: 16569 - protein, 485 aa, Unidentified
HHNGTNGTMMQYFEWHLPNDGNHWNRLRDDASNLRNRGITAIWIPPAWKGTSQNDVGYGAYDLYDLGEFNQKGTVRTKYGTRSQLESAIHALKNNGVQVYGDVVMNHKGGADATENVLAVEVNPNNRNQEISGDYTIEAWTKFDFPGRGNTYSDFKWRWYHFDGVDWDQSRQFQNRIYKFRGDGKAWDWEVDSENGNYDYLMYLDVDMDHPEVVNELRRWGEWYTNTLNLDGFRIDAVKHIKYSFTRDWLTHVRNATGKEMFAVAEFWKNDLGALENYLNKTNWNHSVFDVPLHYNLYNASNSGGNYDMAKLLNGTVVQKHPMHAVTFVDNHDSQPGESLESFVQEWFKPLAYALILTREQGYPSVFYGDYYGIPTHSVPAMKAKIDPILEARQNFAYGTQHDYFDHHNIIGWTREGNTTHPNSGLATIMSDGPGGEKWMYVGQNKAGQVWHDITGNKPGTVTINADGWANFSVNGGSVSIWVKR

SEQ ID NO: 16570 - protein, 485 aa, Unidentified
HHNGTNHTMMQYFEWHLPNDGNHWNRLRDDASNLRNRGITAIWIPPAWKGTSQNDVGYGAYDLYDLGEFNQKGTVRTKYGTRSQLESAIHALKNNGVQVYGDVVMNHKGGADATENVLAVEVNPNNRNQEISGDYTIEAWTKFDFPGRGNTYSDFKWRWYHFDGVDWDQSRQFQNRIYKFRGDGKAWDWEVDSENGNYDYLMYADVDMDHPEVVNELRRWGEWYTNTLNLDGFRIDAVKHIKYSFTRDWLTHVRNATGKEMFAVAEFWKNDLGALENYLNKTNWNHSVFDVPLHYNLYNASNSGGNYDMAKLLNGTVVQKHPMHAVTFVDNHDSQPGESLESFVQEWFKPLAYALILTREQGYPSVFYGDYYGIPTHSVPAMKAKIDPILEARQNFAYGTQHDYFDHHNIIGWTREGNTTHPNSGLATIMSDGPGGEKWMYVGQNKAGQVWHDITGNKPGTVTINADGWANFSVNGGSVSIWVKR

SEQ ID NO: 16571 - protein, 485 aa, Unidentified
HHNGTNGTMMQYFEWHLPNDGNHWNRLRDDASNLRNRGITAIWIPPAWKGTSQNDVGYGAYDLYDLGEFNQKGTVRTKYGTRSQLESAIHALKNNGVQVYGDVVMNHKGGADATENVLAVEVNPNNRNQEISGDYTIEAWTKFDFPGRGNTYSDFKWRWYHFDGVDWDQSRQFQNRIYKFRGDGKAWDWEVDSENGNYDYLMYADVDMDHPEVVNELRRWGEWYTNTLNLDGFRIDAVKHIKYSFTRDWLTHVRNATGKEMFAVAEFWKNDLGALENYLNKTNWNHSVFDVPLHYNLYNASNSGGNYDMAKLLNGTVVQKHPMHAVTFVDNHDSQPGESLESFVQEWFKPLAYALILTREQGYPSVFYGDYYGIPTHSVPAMKAKIDPILEARQNFAYGTQHDYFDHHNIIGWTMEGNTTHPNSGLATIMSDGPGGEKWMYVGQNKAGQVWHDITGNKPGTVTINADGWANFSVNGGSVSIWVKR

SEQ ID NO: 16572 - protein, 485 aa, Unidentified
HHNGTNGTMMQYFEWHLPNDGNHWNRLRDDASNLRNRGITAIWIPPAWKGTSQNDVGYGAYDLYDLGEFNQKGTVRTKYGTRSQLESAIHALKNNGVQVYGDVVMNHKGGADATENVLAVEVNPNNRNQEISGDYTIEAWTKFDFPGRGNTYSDFKWRWYHFDGVDWDQSRQFQNRIYKFRGDGKAWDWEVDSENGNYDYLMYADVDMDHPEVVNELRRWGEWYTNTLNLDGFRIDAVKHIKYSFTRDWLTHVRNATGKEMFAVAEFWKNDLGALENYLNKTNWNHSVFDVPLHYNLYNASNSGGNYDMAKLLNGTVVQKHPMHAVTFVDNHDSQPGESLESFVQEWFKPLAYALILTREQGYPSVFYGDYYGIPTHSVPAMKAKIDPILEARQNFAYGTQHDYFDHHNIIGWTREGNTTHPNSGLATIMSDGPGGEKWMYVGQNKAGQVWHDITGNKPGTVTINADGWANFSVNGGAVSIWVKR

SEQ ID NO: 16573 - protein, 485 aa, Unidentified
HHNGTNGTMMQYFEWHLPNDGNHWNRLRDDASNLRNRGITAIWIPPAWKGTSQNDVGYGAYDLYDLGEFNQKGTVRTKYGTRSQLESAIHALKNNGVQVYGDVVMNHKGGADATENVLAVEVNPNNRNQEISGDYTIEAWTKFDFPGRGNTYSDFKWRWYHFDGVDWDQSRQFQNRIYKFRGDGKAWDWEVDSENGNYDYLMYADVDMDHPEVVNELRRWGEWYTNTLNCDGFRIDAVKHIKYSFTRDWLTHVRNATGKEMFAVAEFWKNDLGALENYLNKTNWNHSVFDVPLHYNLYNASNSGGNYDMAKLLNGTVVQKHPMHAVTFVDNHDSQPGESLESFVQEWFKPLAYALILTREQGYPSVFYGDYYGIPTHSVPAMKAKIDPILEARQNFAYGTQHDYFDHHNIIGWTREGNTTHPNSGLATIMSDGPGGEKWMYVGQNKAGQVWHDITGNKPGTVTINADGWANFSVNGGSVSIWVKR

SEQ ID NO: 16574 - protein, 485 aa, Unidentified
HHNGTNGTMMQYFEWHLPNDGNHWNRLRDDASNLRNRGITAIWIPPAWKGTSQNDVGYGAYDLYDLGEFNQKGTVRTKYGTRSQLESAIHALKNNGVQVYGDVVMNHKGGADATENVLAVEVNPNNRNQEISGDYTIEAWTKFDFPGRGNTYSDFKWRWYHFDGVDWDQSRQFQNRIYKFRGDGKAWDWEVDSENGNYDYLMYADVDMDHPEVVNELRRWGEWYTNTLNLDGFRIDAVKHIKYSFTRDWLTHVRNATGKEMFAVAEFWKNDLGALENYLNKTNWNHSVFDVPLHYNLYNASNSGGNYDMAKLLNGTVVQKHPMHAVTFVDNHDSQPGESLESFVQEWFKPLAYALILTREQGQPSVFYGDYYGIPTHSVPAMKAKIDPILEARQNFAYGTQHDYFDHHNIIGWTREGNTTHPNSGLATIMSDGPGGEKWMYVGQNKAGQVWHDITGNKPGTVTINADGWANFSVNGGSVSIWVKR

SEQ ID NO: 16575 - protein, 485 aa, Unidentified
HHNGTNGTMMQYFEWHLPNDGNHWNRLRDDASNLRNRGITAIWIPPAWKGTSQNDVGYGAYDLYDLGEFNQKGTVRTKYGTRSQLESAIHALKNNGVQVYGDVVMNHKGGADATENVLAVEVNPNNRNQEISGDYTIEAWTKFDFPGRGNTYSDFKWRWYHFDGVDWDQSRQFQNRIYKFRGDGKAWDWEVDSENGNYDYLMYADVDMDHPEVVNELRRWGEWYTNTLNLDGFRIDAVKHIKYSFTRDWLTHVRNATGKEMFAVAEFWKNDLGALENYLNKTNWNHSVFDVPLHYNLYNASNSGGNYDMAKLLNGTVVQKHCMHAVTFVDNHDSQPGESLESFVQEWFKPLAYALILTREQGYPSVFYGDYYGIPTHSVPAMKAKIDPILEARQNFAYGTQHDYFDHHNIIGWTREGNTTHPNSGLATIMSDGPGGEKWMYVGQNKAGQVWHDITGNKPGTVTINADGWANFSVNGGSVSIWVKR

SEQ ID NO: 16576 - protein, 485 aa, Unidentified
HHNGTNGTMMQYFEWHLPNDGNHWNRLRDDASNLRNRGITAIWIPPAWKGTSQNDVGYGAYDLYDLGEFNQKGTVRTKYGTRSQLESAIHALKNNGVQVYGDVVMNHKGGADATENVLAVEVNPNNRNQEISGDYTIEAWTKFDFPGRGNTYSDFKWRWYHFDGVDWDQSRQFQNRIYKFRGDGKAWDWEVDSENGNYDYLMYADVDMDHPEVVNELRRWGEWYTNTLNLDGFRIDAVKHIKYSFTRDWLTHVRNATGKEMFAVAEFWKNDLGALENYLNKTNWNHSVFDVPLHYNLYNASNYGGNYDMAKLLNGTVVQKHPMHAVTFVDNHDSQPGESLESFVQEWFKPLAYALILTREQGYPSVFYGDYYGIPTHSVPAMKAKIDPILEARQNFAYGTQHDYFDHHNIIGWTREGNTTHPNSGLATIMSDGPGGEKWMYVGQNKAGQVWHDITGNKPGTVTINADGWANFSVNGGSVSIWVKR

SEQ ID NO: 16577 - protein, 485 aa, Unidentified
HHNGTNGTMMQYFEWHLPNDGNHWNRLRDDASNLRNRGITAIWIPPAWKGTSQNDVGYGAYDLYDLGEFNQKGTVRTKYGTRSQLESAIHALKNNGVQVYGDVVMNHKGGADATENVLAVEVNPNNRNQEISGDYTIEAWTKFDFPGRGNTYSDFKWRWYHFDGVDWDQSRQFQNRIYKFRGDGKAWDWEVDSENGNYDYLMYADVDMDHPEVVNELRRWGEWYTNTLNLDGFRIDAVKHIKYSFTRDWLTHVRNATGKEMFAVAEFWKNDLGALENYLNKTNWNHSVFDVPLHYNLYNASNSGGNYDMAKLLNGTVVQKHPMHAVTFVDNHDSQPGESLESFVQEWFKPLAYALILTREQGYPSVFYGDYYGIPTHSVPAMPAKIDPILEARQNFAYGTQHDYFDHHNIIGWTREGNTTHPNSGLATIMSDGPGGEKWMYVGQNKAGQVWHDITGNKPGTVTINADGWANFSVNGGSVSIWVKR

SEQ ID NO: 16578 - protein, 485 aa, Unidentified
HHNGTNGTMMQYFEWHLPNDGNHWNRLRDDASNLRNRGITAIWIPPAWKGTSQNDVGYGAYDLYDLGEFNQKGTVRTKYGTRSQLESAIHALKNNGVQVYGDVVMNHKGGADATENFLAVEVNPNNRNQEISGDYTIEAWTKFDFPGRGNTYSDFKWRWYHFDGVDWDQSRQFQNRIYKFRGDGKAWDWEVDSENGNYDYLMYADVDMDHPEVVNELRRWGEWYTNTLNLDGFRIDAVKHIKYSFTRDWLTHVRNATGKEMFAVAEFWKNDLGALENYLNKTNWNHSVFDVPLHYNLYNASNSGGNYDMAKLLNGTVVQKHPMHAVTFVDNHDSQPGESLESFVQEWFKPLAYALILTREQGYPSVFYGDYYGIPTHSVPAMKAKIDPILEARQNFAYGTQHDYFDHHNIIGWTREGNTTHPNSGLATIMSDGPGGEKWMYVGQNKAGQVWHDITGNKPGTVTINADGWANFSVNGGSVSIWVKR

SEQ ID NO: 16579 - protein, 485 aa, Unidentified
HHNGTNGTMMQYFEWHLPNDGNHWNRLRDDASNLRNRGIIAIWIPPAWKGTSQNDVGYGAYDLYDLGEFNQKGTVRTKYGTRSQLESAIHALKNNGVQVYGDVVMNHKGGADATENVLAVEVNPNNRNQEISGDYTIEAWTKFDFPGRGNTYSDFKWRWYHFDGVDWDQSRQFQNRIYKFRGDGKAWDWEVDSENGNYDYLMYADVDMDHPEVVNELRRWGEWYTNTLNLDGFRIDAVKHIKYSFTRDWLTHVRNATGKEMFAVAEFWKNDLGALENYLNKTNWNHSVFDVPLHYNLYNASNSGGNYDMAKLLNGTVVQKHPMHAVTFVDNHDSQPGESLESFVQEWFKPLAYALILTREQGYPSVFYGDYYGIPTHSVPAMKAKIDPILEARQNFAYGTQHDYFDHHNIIGWTREGNTTHPNSGLATIMSDGPGGEKWMYVGQNKAGQVWHDITGNKPGTVTINADGWANFSVNGGSVSIWVKR

SEQ ID NO: 16580 - protein, 485 aa, Unidentified
HHNGTNGTMMQYFEWHLPNDGNHWNRLRDDASNLRNRGITAIWIPPAWKGTSQNDVGYGAYDLYDLGEFNQKGTVRTKYGTRSQLESAIHALKNNGVQVYGDVVMNHKGGADATENVLAVEVNPNNRNQEISGDYTIEAWTKFDFPGRGNTYSDFKWRWYHFDGVDWDQSRQFQNRIYKFRGDGKAWDWEVDSENGNYDYLMYADVDMDHPEVVNELRRWGEWYTNTLNLDGFRIDAVKHIKYSFTRDWLTHVRNATGKEMFAVAEFWKNDLGALENYLNKTNWNHSVFDVPLHYNLYNASNSGGNYDMAKLLNGTVVQKHPMHAVTFVDNHDSQPGESLEAFVQEWFKPLAYALILTREQGYPSVFYGDYYGIPTHSVPAMKAKIDPILEARQNFAYGTQHDYFDHHNIIGWTREGNTTHPNSGLATIMSDGPGGEKWMYVGQNKAGQVWHDITGNKPGTVTINADGWANFSVNGGSVSIWVKR

SEQ ID NO: 16581 - protein, 485 aa, Unidentified
HHNGTNGTMMQYFEWHLPNDGNHWNRLRDDASNLRNRGITAIWIPPAWKGTSQNDVGYGAYDLYDLGEFNQKGTVRTKYGTRSQLESAIHALKNNGVQVYGDVVMNHKGGADATENVLAVEVNPNNRNQEISGDYTIEAWTKFDFPGRGNTYSDFKWRWYHFDGVDWDQSRQFQNRIYKFRGDGKAWDWEVDSENGNYDYLMYADVDMDHPEVVNELRRWGEWYTNTLNLDGFRIDAVKHIKYSFTRDWYTHVRNATGKEMFAVAEFWKNDLGALENYLNKTNWNHSVFDVPLHYNLYNASNSGGNYDMAKLLNGTVVQKHPMHAVTFVDNHDSQPGESLESFVQEWFKPLAYALILTREQGYPSVFYGDYYGIPTHSVPAMKAKIDPILEARQNFAYGTQHDYFDHHNIIGWTREGNTTHPNSGLATIMSDGPGGEKWMYVGQNKAGQVWHDITGNKPGTVTINADGWANFSVNGGSVSIWVKR

SEQ ID NO: 16582 - protein, 485 aa, Unidentified
HHNGTNGTMMQYFEWHLPNDGNHWNRLRDDASNLRNRGITAIWIPPAWKGTSQNDVGYGEYDLYDLGEFNQKGTVRTKYGTRSQLESAIHALKNNGVQVYGDVVMNHKGGADATENVLAVEVNPNNRNQEISGDYTIEAWTKFDFPGRGNTYSDFKWRWYHFDGVDWDQSRQFQNRIYKFRGDGKAWDWEVDSENGNYDYLMYADVDMDHPEVVNELRRWGEWYTNTLNLDGFRIDAVKHIKYSFTRDWLTHVRNATGKEMFAVAEFWKNDLGALENYLNKTNWNHSVFDVPLHYNLYNASNSGGNYDMAKLLNGTVVQKHPMHAVTFVDNHDSQPGESLESFVQEWFKPLAYALILTREQGYPSVFYGDYYGIPTHSVPAMKAKIDPILEARQNFAYGTQHDYFDHHNIIGWTREGNTTHPNSGLATIMSDGPGGEKWMYVGQNKAGQVWHDITGNKPGTVTINADGWANFSVNGGSVSIWVKR

SEQ ID NO: 16583 - protein, 485 aa, Unidentified
HHNGTNGTMMQYFEWHLPNDGNHWNRLRDDASNLRNRGITAIWIPPAWKGTSQNDVGYGAYDLYDLGEFNQKGTVRTKYGTRSQLESAIHALKNNGVQVYGDVVMNHKGGADATENVLAVEVNPNNRNQEISGDYTIEAWTKFDFPGRGNTYSDFKWRWYHFDGVDWDQSRQFQNRIYKFRGDGKAWDWEVDSENGNYDYLMYADVDMDHPEVVNELRRWGEWYTNTLNLDGFRIDAVKHIKYSFTRDWLTHVRNATGKEMFAVAEFWKNDLGALENYLNKTNWNHSVFDVPLHYNLYNASNSGGNYDMAKLLNGTVVQKHPMHAVTFVDNHDSQPGESLESFVQEWFKPLAYALILTREQGYPSVFYGDYYGIPTHSVPAMKAKIDPILEARQNFAYGTQHDYFDHHNIIGWTREGNTTHSNSGLATIMSDGPGGEKWMYVGQNKAGQVWHDITGNKPGTVTINADGWANFSVNGGSVSIWVKR

SEQ ID NO: 16584 - protein, 485 aa, Unidentified
HHNGTNGTMMQYFEWHLPNDGNHWNRLRDDASNLRNRGITAIWIPPAWKGTSQNDVGYGAYDLYDLGEFNQKGTVRTKYGTRSQLESAIHALKNNGVQVYGDVVMNHKGGADATENVLAVEVNPNNRNQEISGDYTIEAWTKFDFPGRGNTYSDFKWRWYHFDGVDWDQSRQFQNRIYKFRGDGKAWDWEVDSENGNYDYLMYADVDMDHPEVVNELRRWGEWYTNTLNLDGFRIDAVKHIKYSFTRDWLTHVRNATGKEMFAVAEFWKNDLGALENYLNKTNWNHSVFDVPLHYNLYNASNSGGNYDMAKLLNGTVVQKHPMHAVTFVDNHDSQPGESLESFVQEWFKPLAYALILTREQGYPSVFYGDYYGIPTHSVPAMKAKIDPILEARQNFAYGTQHDYFDHHNHIGWTREGNTTHPNSGLATIMSDGPGGEKWMYVGQNKAGQVWHDITGNKPGTVTINADGWANFSVNGGSVSIWVKR

SEQ ID NO: 16585 - protein, 485 aa, Unidentified
HHNGTNGTMMQYFEWHLPNDGNHWNRLRDDASNLRNRGITAIWIPPAWKGTSQNDVGYGAYDLYDLGEFNQKGTVRTKYGTRSQLESAIHALKNNGVQVYGDVVMNHKGGADATENVLAVEVNPNNRNQEISLDYTIEAWTKFDFPGRGNTYSDFKWRWYHFDGVDWDQSRQFQNRIYKFRGDGKAWDWEVDSENGNYDYLMYADVDMDHPEVVNELRRWGEWYTNTLNLDGFRIDAVKHIKYSFTRDWLTHVRNATGKEMFAVAEFWKNDLGALENYLNKTNWNHSVFDVPLHYNLYNASNSGGNYDMAKLLNGTVVQKHPMHAVTFVDNHDSQPGESLESFVQEWFKPLAYALILTREQGYPSVFYGDYYGIPTHSVPAMKAKIDPILEARQNFAYGTQHDYFDHHNIIGWTREGNTTHPNSGLATIMSDGPGGEKWMYVGQNKAGQVWHDITGNKPGTVTINADGWANFSVNGGSVSIWVKR

SEQ ID NO: 16586 - protein, 485 aa, Unidentified
HHNGTNGTMMQYFEWHLPNDGNHWNRLRDDASNLRNRGITAIWIPPAWKGTSQNDVGYGAYDLYDLGEFNQKGTVRTKYGTRSQLESAIHALKNNGVQVYGDVVMNHKGGADATENVLAVEVNPNNRNQEISGDYTIEAWTKFDFPGRGNTYSDFKWRWYHFDGVDWDYSRQFQNRIYKFRGDGKAWDWEVDSENGNYDYLMYADVDMDHPEVVNELRRWGEWYTNTLNLDGFRIDAVKHIKYSFTRDWLTHVRNATGKEMFAVAEFWKNDLGALENYLNKTNWNHSVFDVPLHYNLYNASNSGGNYDMAKLLNGTVVQKHPMHAVTFVDNHDSQPGESLESFVQEWFKPLAYALILTREQGYPSVFYGDYYGIPTHSVPAMKAKIDPILEARQNFAYGTQHDYFDHHNIIGWTREGNTTHPNSGLATIMSDGPGGEKWMYVGQNKAGQVWHDITGNKPGTVTINADGWANFSVNGGSVSIWVKR

SEQ ID NO: 16587 - protein, 485 aa, Unidentified
HHNGTNGTMMQYFEWHLPNDGNHWNRLRDDASNLRNRGITAIWIPPAWKGTSQNDVGYGAYDLYDLGEFNQKGTVRTKYGTRSQLESAIHALKNNGVQVYGDVVMNHKGGADATENVLAVEVNPNNRNQEISGDYTIEAWTKFDFPGRGNTYSDFKWRWYHFDGVDWDQSRQFQNRIYKFRGDGKAWDWEVDSENGNYDYLMYADVDMDHPEVVNELRRWGEWYTNTLNLDGFRIDAVKHIKYSFTRDWLTHVRNATGKEMFAVAEFWKNDLGALENYLNKTNWNHSVFDVPLHYNLYNASNSGGNYDMAKLLNGTVVQKHPMHAVTFVDNHDSQPGESLESFVQEWFKPLAYALILTREYGYPSVFYGDYYGIPTHSVPAMKAKIDPILEARQNFAYGTQHDYFDHHNIIGWTREGNTTHPNSGLATIMSDGPGGEKWMYVGQNKAGQVWHDITGNKPGTVTINADGWANFSVNGGSVSIWVKR

SEQ ID NO: 16588 - protein, 485 aa, Unidentified
HHNGTNGTMMQYFEWHLPNDGNHWNRLRDDASNLRNRGITAIWIPPAWKGTSQNDVGYGAYDLYDLGEFNQKGTVRTKYGTRSQLESAIHALKNNGVQVYGDVVMNHKGGADATENVLAVEVNPNNRNQEISGDYTYEAWTKFDFPGRGNTYSDFKWRWYHFDGVDWDQSRQFQNRIYKFRGDGKAWDWEVDSENGNYDYLMYADVDMDHPEVVNELRRWGEWYTNTLNLDGFRIDAVKHIKYSFTRDWLTHVRNATGKEMFAVAEFWKNDLGALENYLNKTNWNHSVFDVPLHYNLYNASNSGGNYDMAKLLNGTVVQKHPMHAVTFVDNHDSQPGESLESFVQEWFKPLAYALILTREQGYPSVFYGDYYGIPTHSVPAMKAKIDPILEARQNFAYGTQHDYFDHHNIIGWTREGNTTHPNSGLATIMSDGPGGEKWMYVGQNKAGQVWHDITGNKPGTVTINADGWANFSVNGGSVSIWVKR

SEQ ID NO: 16589 - protein, 485 aa, Unidentified
HHNGTNGTMMQYFEWHLPNDGNHWNRLRDDASNLRNRGITAIWIPPAWKGTSQNDVGYGAYDLYDLGEFNQKGTVRTKYGTRSQLESAIHALKNNGVQVYGDVVMNHKGGADATENVLAVEVNPNNRNQEISGDYTIEAWTKFDFPGRGNTYSDFKWRWYHFDGVDWDQSRQFQNRIYKFRGDGKAWDWEVDSENGNYDYLMYADVDMDHPEVVNELRRWGEWYTNTLNLDGFRIDAVKHIKYSFTRDWLTHVRNATGKEMFAVAEFWKNDLGALENYLNKTNWNHSVFDVPLHYNLYNASNSGGNYDMAKLLNGTVVQKHPMHAVTFVDNHDSQPGESLESFVQEWFKPLAYALILTREQGYPSVFYGDYYGIPTHSVPAMKAKIDPILEARQNFAYGTQHDYFDQHNIIGWTREGNTTHPNSGLATIMSDGPGGEKWMYVGQNKAGQVWHDITGNKPGTVTINADGWANFSVNGGSVSIWVKR

SEQ ID NO: 16590 - protein, 485 aa, Unidentified
HHNGTNGTMMQYFEWHLPNDGNHWNRLRDDASNLRNRGITAIWIPPAWKGTSQNDVGYGAYDLYDLGEFNQKGTVRTKYGTRSQLESAIHALKNNGVQVYGDVVMNHKGGADATENVLAVEVNPNNRNQEISGDYTIEAWTKFDFPGRGNTYSDFKWRWYHFDGVDWDQSRQFQNRIYKFRGDGKAWDWEVDSENGNYDYLMYADVDMDHPEVVNELRRWGEWYTNTLNLDGFRIDAVKHIKYSFTRDWLTHVRNATGKEMFAVAEFWKNDLGALENYLNKTNWNHSVFDVPLHYNLYNASNSGGNYDMAKLLNGTVVQKHPMHAVTFVDNHDSQPGESLESFVQEWFKPLAYALILTREQGYPSVFYGDYYGIPTHSVPAMKAKIDIILEARQNFAYGTQHDYFDHHNIIGWTREGNTTHPNSGLATIMSDGPGGEKWMYVGQNKAGQVWHDITGNKPGTVTINADGWANFSVNGGSVSIWVKR

SEQ ID NO: 16591 - protein, 485 aa, Unidentified
HHNGTNGTMMQYFEWHLPNDGNHWNRLRDDASNLRNRGITAIWIPPAWKGTSQNDVGYGAYDLYDLGEFNQKGTVRTKYGTRSQLESAIHALKNNGVQVYGDVVMNHKGGEDATENVLAVEVNPNNRNQEISGDYTIEAWTKFDFPGRGNTYSDFKWRWYHFDGVDWDQSRQFQNRIYKFRGDGKAWDWEVDSENGNYDYLMYADVDMDHPEVVNELRRWGEWYTNTLNLDGFRIDAVKHIKYSFTRDWLTHVRNATGKEMFAVAEFWKNDLGALENYLNKTNWNHSVFDVPLHYNLYNASNSGGNYDMAKLLNGTVVQKHPMHAVTFVDNHDSQPGESLESFVQEWFKPLAYALILTREQGYPSVFYGDYYGIPTHSVPAMKAKIDPILEARQNFAYGTQHDYFDHHNIIGWTREGNTTHPNSGLATIMSDGPGGEKWMYVGQNKAGQVWHDITGNKPGTVTINADGWANFSVNGGSVSIWVKR

SEQ ID NO: 16592 - protein, 485 aa, Unidentified
HHNGTNGTMMQYFEWHLPNDGNHWNRLRDDASNLRNRGITAIWIPPAWKGTSQNDVGYGAYDLYDLGEFNQKQTVRTKYGTRSQLESAIHALKNNGVQVYGDVVMNHKGGADATENVLAVEVNPNNRNQEISGDYTIEAWTKFDFPGRGNTYSDFKWRWYHFDGVDWDQSRQFQNRIYKFRGDGKAWDWEVDSENGNYDYLMYADVDMDHPEVVNELRRWGEWYTNTLNLDGFRIDAVKHIKYSFTRDWLTHVRNATGKEMFAVAEFWKNDLGALENYLNKTNWNHSVFDVPLHYNLYNASNSGGNYDMAKLLNGTVVQKHPMHAVTFVDNHDSQPGESLESFVQEWFKPLAYALILTREQGYPSVFYGDYYGIPTHSVPAMKAKIDPILEARQNFAYGTQHDYFDHHNIIGWTREGNTTHPNSGLATIMSDGPGGEKWMYVGQNKAGQVWHDITGNKPGTVTINADGWANFSVNGGSVSIWVKR

SEQ ID NO: 16593 - protein, 485 aa, Unidentified
HHSGTNGTMMQYFEWHLPNDGNHWNRLRDDASNLRNRGITAIWIPPAWKGTSQNDVGYGAYDLYDLGEFNQKGTVRTKYGTRSQLESAIHALKNNGVQVYGDVVMNHKGGADATENVLAVEVNPNNRNQEISGDYTIEAWTKFDFPGRGNTYSDFKWRWYHFDGVDWDQSRQFQNRIYKFRGDGKAWDWEVDSENGNYDYLMYADVDMDHPEVVNELRRWGEWYTNTLNLDGFRIDAVKHIKYSFTRDWLTHVRNATGKEMFAVAEFWKNDLGALENYLNKTNWNHSVFDVPLHYNLYNASNSGGNYDMAKLLNGTVVQKHPMHAVTFVDNHDSQPGESLESFVQEWFKPLAYALILTREQGYPSVFYGDYYGIPTHSVPAMKAKIDPILEARQNFAYGTQHDYFDHHNIIGWTREGNTTHPNSGLATIMSDGPGGEKWMYVGQNKAGQVWHDITGNKPGTVTINADGWANFSVNGGSVSIWVKR

SEQ ID NO: 16594 - protein, 485 aa, Unidentified
HHNGTNGTMMQYFEWHLPNDGNHWNRLRDDASNLRNRGITAIWIPPAWKGTSQNDVGYGAYDLYDLGEFNQKGTVRTKYGTRSQLESAIHALKNNGVQVYGDVVMNHKGGADATENVLAVEVNPNNRNQEISGDYTIEAWTKFDFPGRGNTYSDFKWRWYHFDGVDWDQSRQFQNRIYKFRGDGKAWDWEVDSENGNYDYLMYADVDMDHPEVVNELRRWGEWYTNTLNLDGFRIDAVKHIKYSFTRDWLTHVRNATGKEMFAVAEFWKNDLGALENYLNKTNWNHSVFDVPLHYNLYNASNSGGNYDMAKLLNGTVVQKHPMHAVTFVDNHDSQPGESLESFVQEWFKPLAYALILTREQGYPSVFYGDYYGIPTHSVPAMKAKIDPILEARQNFAYGTQHDYFDHHNIIGWTREGNTTHPNSGLATIMSDGPGGEKWMYVGQNKAGQVWHDITGNKPGTVTINADGWAMFSVNGGSVSIWVKR

SEQ ID NO: 16595 - protein, 485 aa, Unidentified
HHNGTNGTMMQYFEWHLPNDGNHWNRLRDDASNLRNRGITAIWIPPAWKGTSQNDVGYGAYDLYDLGEFNQKGTVRTKYGTRSQLESAIHALKNNGVQVYGDVVMNHKGGADATENVLAVEVNPNNRNQEISGDYTIEAWTKFDFPGRGNTYSDFKWRWYHFDGVDWDQSRQFQNRIYKFRGDGKAWDWEVDSENGNYDYLMYADVDMDHPEVVNELRRWGEWYTNTLNLDGFRIDAVKHIKYSFTRDWLTHVRNATGKEMFHVAEFWKNDLGALENYLNKTNWNHSVFDVPLHYNLYNASNSGGNYDMAKLLNGTVVQKHPMHAVTFVDNHDSQPGESLESFVQEWFKPLAYALILTREQGYPSVFYGDYYGIPTHSVPAMKAKIDPILEARQNFAYGTQHDYFDHHNIIGWTREGNTTHPNSGLATIMSDGPGGEKWMYVGQNKAGQVWHDITGNKPGTVTINADGWANFSVNGGSVSIWVKR

SEQ ID NO: 16596 - protein, 485 aa, Unidentified
HHNGTNGTMMQYFEWHLPNDGNHWNRLRDDASNLRNRGITAIWIPPAWKGTSQNDVGYGAYDLYDLGEFNQKGTVRTKYGTRSQLESAIHALKNNGVQVYGDVVMNHKGGADATENVLAVEVNPNNRNQEISGDYTIEAWTKFDFPGRGNTYSDFKWRWYHFDGVDWDQSRQFQNRIYKFRGDGKAWDWEVDSENGNYDYLMYADVDMDHPEVVNELRRWGEWYTNTLNLDGFRIDAVKHIKYSFTRDWLTHVRNATGKEMFAVAEFWKNDLGALENYLNKTNWNHSVFDVPLNYNLYNASNSGGNYDMAKLLNGTVVQKHPMHAVTFVDNHDSQPGESLESFVQEWFKPLAYALILTREQGYPSVFYGDYYGIPTHSVPAMKAKIDPILEARQNFAYGTQHDYFDHHNIIGWTREGNTTHPNSGLATIMSDGPGGEKWMYVGQNKAGQVWHDITGNKPGTVTINADGWANFSVNGGSVSIWVKR

SEQ ID NO: 16597 - protein, 485 aa, Unidentified
HHNGTNGTMMQYFEWHLPNDGNHWNRLRDDASNLRNRGITAIWIPPAWKGTSQNDVGYGAYDLYDLGEFNQKGTVRTKYGTRSQLESAIHALKNNGVQVYGDVVMNHKGGADATENVLAVEVNPNNRNQEISGDYTIEAWTKFDFPGRGNTYSDFKWRWYHFDGVDWDQSRQFQNRIYKFRGDGKAWDWEVDSENGNYDYLMYADVDMDHPEVVNELRRWGEWYTNTLNLDGFRIDAVKHIKYSFTRDWLTHVRNATGKEMFAVAEFWKNDLGALENYLNKTNWNHSVFDVPLHYNLYNASNSGGNYDMAKLLNGTVVQKHPMHAVTFVDNHDSQPGESLESFVQEWFKPLAYALILTREQGYPSVFYGDYYGIPTHSVPAMKAKIDPILEARQNFAYGTQHDYFDHHNIIGWTREGNTTHPNSGLATIMSDGPGGEKWMYVGQNKAGQVWHDITGNKPGTVTINFDGWANFSVNGGSVSIWVKR

SEQ ID NO: 16598 - protein, 485 aa, Unidentified
HHNGTNGTMMQYFEWHLPNDGNHWNRLRDDASNLRNRGITAIWIPPAWKGTSQNDVGYGAYDLYDLGEFNQKGTVRTKYGTRSQLESAIHALKNNGVQVYGDVVMNHKGGADATENVLAVEVNPNNRNQEISGDYTIEAWTKFDFPGRGNTYSDFKWRWYHFDGVDWDQSRQFQNRIYKFRGDGKAWDWEVDSENGNYDYLMYADVDMDHPEVVNELRRWGEWYTNTLNLDGFRIDAVKHIKYSFTRDWLTHVRNATGKEMFAVAEFWKNDLGALENYLNKTNWNHSVFDVPLHYNLYNASNSGGNYDMAKLLNGTVVQKHPMHAVTFVDNHDSQPGESLESFVQEWFKNLAYALILTREQGYPSVFYGDYYGIPTHSVPAMKAKIDPILEARQNFAYGTQHDYFDHHNIIGWTREGNTTHPNSGLATIMSDGPGGEKWMYVGQNKAGQVWHDITGNKPGTVTINADGWANFSVNGGSVSIWVKR

SEQ ID NO: 16599 - protein, 485 aa, Bacillus sp.
HHNGTNGTMMQYFEWHLPNDGNHWNRLRDDASNLRNRGITAIWIPPAWKGTSQNDVGYGAYDLYDLGEFNQKGTVRTKYGTRSQLESAIHALKNNGVQVYGDVVMNHKGGADATENVLAVEVNPNNRNQEISGDYTIEAWTKFDFPGRGNTYSDFKWRWYHFDGVDWDQSRQFQNRIYKFRGDGKAWDWEVDSENGNYDYLMYADVDMDHPEAVNELRRWGEWYTNTLNLDGFRIDAVKHIKYSFTRDWLTHVRNATGKEMFAVAEFWKNDLGALENYLNKTNWNHSVFDVPLHYNLYNASNSGGNYDMAKLLNGTVVQKHPMHAVTFVDNHDSQPGESLESFVQEWFKPLAYALILTREQGYPSVFYGDYYGIPTHSVPAMKAKIDPILEARQNFAYGTQHDYFDHHNIIGWTREGNTTHPNSGLATIMSDGPGGEKWMYVGQNKAGQVWHDITGNKPGTVTINADGWANFSVNGGSVSIWVKR

SEQ ID NO: 16600 - protein, 485 aa, Bacillus sp.
HHNGTNGTMMQYFEWHLPNDGNHWNRLRDDASNLRNRGITAIWIPPAWKGTSQNDVGYGAYDLYDLGEFNQKGTVRTKYGTRSQLESAIHALKNNGVQVYGDVVMNHKGGADATENVLAVEVNPNNRNQEISGDYTIEAWTKFDFPGRGNTYSDFKWRWYHFDGVDWDQSRQFQNRIYKFRGDGKAWDWEVDSENGNNDYLMYADVDMDHPEVVNELRRWGEWYTNTLNLDGFRIDAVKHIKYSFTRDWLTHVRNATGKEMFAVAEFWKNDLGALENYLNKTNWNHSVFDVPLHYNLYNASNSGGNYDMAKLLNGTVVQKHPMHAVTFVDNHDSQPGESLESFVQEWFKPLAYALILTREQGYPSVFYGDYYGIPTHSVPAMKAKIDPILEARQNFAYGTQHDYFDHHNIIGWTREGNTTHPNSGLATIMSDGPGGEKWMYVGQNKAGQVWHDITGNKPGTVTINADGWANFSVNGGSVSIWVKR

SEQ ID NO: 16601 - protein, 485 aa, Unidentified
HHNGTNGTMMQYFEWHLPNDGNHWNRLRDDASNLRNRGITAIWIPPAWKGTSQNDVGYGAYDLYDLGEFNQKGTVRTKYGTRSQLESAIHALKNNGVQVYGDVVMNHKGGADATENVLAVEVNPNNRNQEISGDYTIEAWTKFDFPGRGNTYSDFKWRWYHFDGVDWDQSRQFQNRIYKFRGDGKAWDWEVDSENGNYDYLMYADVDMDHPEVVNELRRWGEWYTNTLNLDGFRIDAVKHIKYSFTRDWLTHVRNATGKEMFAVAEFWKNDLGALENYLNKTNWNHSVFDVPLHYNLYNASNSGGNYDMAKLLNGTVVQKHPMHAVTFVDNHDSQPGESLESFVQEWFKPLAYALILTREQGYPSVFYGDYYGIPTHSVPAMKAKIDPILEARQNFAYGTQHDYFDHHNIIGWTREGNTTHPNSGLATIMSDGPGGEKWMYVGQNKAGQNWHDITGNKPGTVTINADGWANFSVNGGSVSIWVKR

SEQ ID NO: 16602 - protein, 485 aa, Bacillus sp.
HHNGTNGTMMQYFEWHLPNDGNHWNRLRDDASNLRNRGITAIWIPPAWKGTSQNDVGYGAYDLYDLGEFNQKGTVRTKYGTRSQLESAIHALKNNGVQVYGDVVMNHKGGADATENVLAVEVNPNNRNQEISGDYTIEAWTKFDFPGRGNTYSDFKWRWYHFDGVDWDQSRQFQNRIYKFRGDGKAWDWEVDSENGNYDYLMYADLDMDHPEVVNELRRWGEWYTNTLNLDGFRIDAVKHIKYSFTRDWLTHVRNATGKEMFAVAEFWKNDLGALENYLNKTNWNHSVFDVPLHYNLYNASNSGGNYDMAKLLNGTVVQKHPMHAVTFVDNHDSQPGESLESFVQEWFKPLAYALILTREQGYPSVFYGDYYGIPTHSVPAMKAKIDPILEARQNFAYGTQHDYFDHHNIIGWTREGNTTHPNSGLATIMSDGPGGEKWMYVGQNKAGQVWHDITGNKPGTVTINADGWANFSVNGGSVSIWVKR

SEQ ID NO: 16603 - protein, 485 aa, Bacillus sp.
HHNGTNGTMMQYFEWHLPNDGNHWNRLRDDASNLRNRGITAIWIPPAWKGTSQNDVGYGAYDLYDLGEFNQKGTVRTKYGTRSQLESAIHALKNNGVQVYGDVVMNHKGGADATENVLAVEVNPNNRNQEISGDYTIEAWTKFDFPGRGNTYSDFKWRWYHFDGVDWDQSRQFQNRIYKFRGDGKAWDWEVDSENGNYDYLMYADYDMDHPEVVNELRRWGEWYTNTLNLDGFRIDAVKHIKYSFTRDWLTHVRNATGKEMFAVAEFWKNDLGALENYLNKTNWNHSVFDVPLHYNLYNASNSGGNYDMAKLLNGTVVQKHPMHAVTFVDNHDSQPGESLESFVQEWFKPLAYALILTREQGYPSVFYGDYYGIPTHSVPAMKAKIDPILEARQNFAYGTQHDYFDHHNIIGWTREGNTTHPNSGLATIMSDGPGGEKWMYVGQNKAGQVWHDITGNKPGTVTINADGWANFSVNGGSVSIWVKR

SEQ ID NO: 16604 - protein, 485 aa, Unidentified
HHNGTNGTMMQYFEWHLPNDGNHWNRLRDDASNLRNRGITAIWIPPAWKGTSQNDVGYGAYDLYDLGEFNQKGTVRTKYGTRSQLESAIHALKNNGVQVYGDVVMNHKGGADATENVLAVEVNPNNRNQEISGDYTIEAWTKFDFPGRGNTYSDFKWRWYHFDGVDWDQSRQFQNRIYKFRGDGKAWDWEVDSENGNYDYLMYADVDMDHPEVVNELRRWGEWYTNTLNLDGFRIDAVKHIKYSFTRDWLTHVRNATGKEMFAVAEFWKNDLGALENYLNKTNWNHSVFDVPLHYNLYNASNSGGNYDMAKLLNGTVVQKHPMHAVTFVDNHDSQPGESLESFVQEWFKPLAYALILTREQGYPSVFYGDYYGIPTHSVPAMKAKIDPILEARQNFAYGTQHDYFDHHNIIGWTREGNTTHPNSGLATIMSDGPGGEKWMYVGQNKAGQVWHDITGNKPGTVTINADGWANFSVNGWSVSIWVKR

SEQ ID NO: 16605 - protein, 485 aa, Unidentified
HHNGTNGTMMQYFEWHLPNDGNHWNRLRDDASNLRNRGITAIWIPPAWKGTSQNDVGYGAYDLYDLGEFNQKGTVRTKYGTRSQLESAIHALKNNGVQVYGDVVMNHKGGADATENVLAVEVNPNNRNQEISGDYTIEAWTKFDFPGRGNTYSDFKWRWYHFDGVDWDQSRQFQNRIYKFRGDGKAWDWEVDSENGNYDYLMYADVDMDHPEVVNELRRWGEWYTNTLNLDGFRIDAVKHIKYSFTRDWLTHVRNATGKEMFAVAEFWKNDLGALENYLNKTNWNHSVFDVPLHYNLYNASNSGGNYDMAKLLNGTVVQKHPMHAVTFVDNHDSQPGESLESFVQEGFKPLAYALILTREQGYPSVFYGDYYGIPTHSVPAMKAKIDPILEARQNFAYGTQHDYFDHHNIIGWTREGNTTHPNSGLATIMSDGPGGEKWMYVGQNKAGQVWHDITGNKPGTVTINADGWANFSVNGGSVSIWVKR

SEQ ID NO: 16606 - protein, 485 aa, Unidentified
HHNGTNGTMMQYFEWHLPNDGNHWNRLRDDASNLRNRGITAIWIPPAWKGTSQNDVGYGAYDLYDLGEFNQKGTVRTKYGTRSQLESAIHALKNNGVQVYGDVVMNHKGGADATENVLAVEVNPNNRNQEISGDYTIEAWTKFDFPGRGNTYSDFKWRWYHFDGVDWDQSRQFQNRIYKFRGDGKAWDWEVDSENGNYDYLMYADVDMDHPEVVNELRRWGEWYTNTLNLDGFRIDAVKHIKYSFTRDWLTHVRNATGKEMFAVAEFWKNDLGALENYLNKTNWNHSVFDVPLHYNLYNASNFGGNYDMAKLLNGTVVQKHPMHAVTFVDNHDSQPGESLESFVQEWFKPLAYALILTREQGYPSVFYGDYYGIPTHSVPAMKAKIDPILEARQNFAYGTQHDYFDHHNIIGWTREGNTTHPNSGLATIMSDGPGGEKWMYVGQNKAGQVWHDITGNKPGTVTINADGWANFSVNGGSVSIWVKR

SEQ ID NO: 16607 - protein, 485 aa, Unidentified
HHNGTNGTMMQYFEWHLPNDGNHWNRLRDDASNLRNRGITAIWIPPAWKGTSQNDVGYGAYDLYDLGEFNQKGTVRTKYGTRSQLESAIHALKNNGVQVYGDVVMNHKGGADATENVLAVEVNPNNRNQEISGDYTIEAWTKFDFPGRGNTYSDFKWRWYHFDGVDWDQSRQFQNRIYKFRGDGKAWDWEVDSENGNYDYLMYADVDMDHPEVVNELRRWGEWYTNTLNLDGFRIDAVKHIKYSFTRDWLTHVRNATGKEMFAVAEFWKNDLGALENYLNKTNWNHSVFDVPLHYNLYNASNSGGNYDMAKLLNGTVVQKHPMHAVTFVDNHDSQPGESLESFVQEWFKPLAYALILTREQGYPSVFYGDYYGIPTHSVPAMKAKIDPILEARQNFAYGTQHDYFDHHNIIGWTREGNTTHPNSGLATIMSDGPGGEKKMYVGQNKAGQVWHDITGNKPGTVTINADGWANFSVNGGSVSIWVKR

SEQ ID NO: 16608 - protein, 485 aa, Unidentified
HHNGTNGTMMQYFEWHLPNDGNHWNRLRDDASNLRNRGITAIWIPPAWKGTSQNDVGYGAYDLYDLGEFNQKGTVRTKYGTRSQLESAIHALKNNGVQVYGDVVMNHKGGADATENVLAVEVNPNNRNQEISGDYTIEAWTKFDFPGRGNTYSDFKWRWYHFDGVDWDQSRQFQNRIYKFRGDGKAWDWEVDSENGNYDYLMYADVDMDHPEVVNELRRWGEWYTNTLNLDGFRIDAVKHIKYSFTRDWLTHVRNATGKEMFAVAEFWKNDLGALENYLNKTNWNHSVFDVPLHYNLYNASNSGGNYDMAKLLNGTVVQKHPMHAVTFVDNHDSQPGESLESFVQEAFKPLAYALILTREQGYPSVFYGDYYGIPTHSVPAMKAKIDPILEARQNFAYGTQHDYFDHHNIIGWTREGNTTHPNSGLATIMSDGPGGEKWMYVGQNKAGQVWHDITGNKPGTVTINADGWANFSVNGGSVSIWVKR

SEQ ID NO: 16609 - protein, 485 aa, Unidentified
HHNGTNGTMMQYFEWHLPNDGNHWNRLRDDASNLRNRGITAIWIPPAWKGTSQNDVGYGAYDLYDLGEFNQKGTVRTKYGTRSQLESAIHALKNNGVQVYGDVVMNHKGGADATENVLAVEVNPNNRNQEISGDYTIEAWTKFDFPGRGNTYSDFKWRWYHFDGVDWDQSRQFQNRIYKFMGDGKAWDWEVDSENGNYDYLMYADVDMDHPEVVNELRRWGEWYTNTLNLDGFRIDAVKHIKYSFTRDWLTHVRNATGKEMFAVAEFWKNDLGALENYLNKTNWNHSVFDVPLHYNLYNASNSGGNYDMAKLLNGTVVQKHPMHAVTFVDNHDSQPGESLESFVQEWFKPLAYALILTREQGYPSVFYGDYYGIPTHSVPAMKAKIDPILEARQNFAYGTQHDYFDHHNIIGWTREGNTTHPNSGLATIMSDGPGGEKWMYVGQNKAGQVWHDITGNKPGTVTINADGWANFSVNGGSVSIWVKR

SEQ ID NO: 16610 - protein, 485 aa, Unidentified
HHNGTNGTMMQYFEWHLPNDGNHWNRLRDDASNLRNRGITAIWIPPAWKGTSQNDVGYGAYDLYDLGEFNQKGTVRTKYGTRSQLESAIHALKNNGVQVYGDVVMNHKGGADATENVLAVEVNPNNRNQEISGDYTIEAWTKFDFPGRGNTYSDFKWRWYHFDGVDWDQSRQFQNRIYKFRGDGKAWDWEVDSENGNYDYLMYADVDMDHPEVVNELRRWGEWYTNTLNLDGFRIDAVKHIKYSFTRDWLTHVRNATGKEMFAVAEFWKNDLGALENYLNKTNWNHSVFDVPLHYNLYNASNSGGNYDMAKLLNGTVVQKHPMHAVTFVDNHDSQPGESLESFVQEWFKPLAYALILTREQGYPSVFYGDYYGIPTHSVPAMKAKIDPILEARQNFAYGTQHDYFDHHNIIGWTREGNTTHPNSGLATIMSDGPGGESWMYVGQNKAGQVWHDITGNKPGTVTINADGWANFSVNGGSVSIWVKR

SEQ ID NO: 16611 - protein, 485 aa, Unidentified
HHNGTNGTMMQYFEWHLPNDGNHWNRLRDDASNLRNRGITAIWIPPAWKGTSQNDVGYGAYDLYDLGEFNQKGTVRTKYGTRSQLESAIHALKNNGVQVYGDVVMNHKGGADATENVLAVEVNPNNRNQEISGDYTIEAWTKFDFPGRGNTYSDFKWRWYHFDGVDWDQSRQFQNRIYKFRGDGKAWDWEVDSENGNYDYLMYADVDMDHPEVVNELRRWGEWYTNTLNLDGFRIDAVKHIKYSFTRDWLTHVRNATGKEMRAVAEFWKNDLGALENYLNKTNWNHSVFDVPLHYNLYNASNSGGNYDMAKLLNGTVVQKHPMHAVTFVDNHDSQPGESLESFVQEWFKPLAYALILTREQGYPSVFYGDYYGIPTHSVPAMKAKIDPILEARQNFAYGTQHDYFDHHNIIGWTREGNTTHPNSGLATIMSDGPGGEKWMYVGQNKAGQVWHDITGNKPGTVTINADGWANFSVNGGSVSIWVKR

SEQ ID NO: 16612 - protein, 483 aa, Bacillus sp.
HHNGTNGTMMQYFEWHLPNDGNHWNRLRDDASNLRNRGITAIWIPPAWKGTSQNDVGYGAYDLYDLGEFNQKGTVRTKYGTRSQLESAIHALKNNGVQVYGDVVMNHKGGADATENVLAVEVNPNNRNQEISGDYTIEAWTKFDFPGRGNTYSDFKWRWYHFDGVDWDQSRQFQNRIYKFRGKAWDWEVDSENGNYDYLMYADVDMDHPEVVNELRRWGEWYTNTLNLDGFRIDAVKHIKYSFTRDWLTHVRNATGKIMFAVAEFWKNDLGALENYLNKTNWNHSVFDVPLHYNLYNASNSGGNYDMAKLLNGTVVQKHPMHAVTFVDNHDSQPGESLESFVQEWFKPLAYALILTREQGYPSVFYGDYYGIPTHSVPAMKAKIDPILEARQNFAYGTQHDYFDHHNIIGWTREGNTTHPNSGLATIMSDGPGGEKWMYVGQNKAGQVWHDITGNKPGTVTINADGWANFSVNGGSVSIWVKR

SEQ ID NO: 16613 - protein, 483 aa, Bacillus sp.
HHNGTNGTMMQYFEWHLPNDGNHWNRLRDDASNLRNRGITAIWIPPAWKGTSQNDVGYGAYDLYDLGEFNQKGTVRTKYGTRSQLESAIHALKNNGVQVYGDVVMNHKGGADATENVLAVEVNPNNRNQEISGDYTIEAWTKFDFPGRGNTYSDFKWRWYHFDGVDWDQSRQFQNRIYKFRGKAWDWEVDSENGNYFYLMYADVDMDHPEVVNELRRWGEWYTNTLNLDGFRIDAVKHIKYSFTRDWLTHVRNATGKEMFAVAEFWKNDLGALENYLNKTNWNHSVFDVPLHYNLYNASNSGGNYDMAKLLNGTVVQKHPMHAVTFVDNHDSQPGESLESFVQEWFKPLAYALILTREQGYPSVFYGDYYGIPTHSVPAMKAKIDPILEARQNFAYGTQHDYFDHHNIIGWTREGNTTHPNSGLATIMSDGPGGEKWMYVGQNKAGQVWHDITGNKPGTVTINADGWANFSVNGGSVSIWVKR

SEQ ID NO: 16614 - protein, 485 aa, Unidentified
HHNGTNGTMMQYFEWHLPNDGNHWNRLRDDASNLRNNGITAIWIPPAWKGTSQNDVGYGAYDLYDLGEFNQKGTVRTKYGTRSQLESAIHALKNNGVQVYGDVVMNHKGGADATENVLAVEVNPNNRNQEISGDYTIEAWTKFDFPGRGNTYSDFKWRWYHFDGVDWDQSRQFQNRIYKFRGDGKAWDWEVDSENGNYDYLMYADVDMDHPEVVNELRRWGEWYTNTLNLDGFRIDAVKHIKYSFTRDWLTHVRNATGKEMFAVAEFWKNDLGALENYLNKTNWNHSVFDVPLHYNLYNASNSGGNYDMAKLLNGTVVQKHPMHAVTFVDNHDSQPGESLESFVQEWFKPLAYALILTREQGYPSVFYGDYYGIPTHSVPAMKAKIDPILEARQNFAYGTQHDYFDHHNIIGWTREGNTTHPNSGLATIMSDGPGGEKWMYVGQNKAGQVWHDITGNKPGTVTINADGWANFSVNGGSVSIWVKR

SEQ ID NO: 16615 - protein, 485 aa, Unidentified
HHNGTNGTMMQYFEWHLPNDGNHWNRLRDDASNLRNRGITAIWIPPAWKGTSQNDVGYGAYDLYDLGEFNQKGTVRTKYGTRSQLESAIHALKNNGVQVYGDVVMNHKGGADATENVLAVEVNPNNRNQEISGDYTIEAWTKFDFPGRGNTYSDFKWRWYHFDGVDWDQSRQFQNRIYKFRGDGKAWDWEVDSENGNYDYLMYADVDMDHPEVVNELRRWGEWYTNTLNLDGFRIDAVKHIKYSFTRDWLTHVRNATGKEMFAVAEFWKNDLGALENYLNKTNWNHSVFDVPLHYNLYNASNSGGNYDMAKLLNGTVVQKHPMHAVTFVDNHDSQPGESLESFVQEWFKPLAYALILTREQGYPSVFYGDYYGIPTHSVPAMKAKIDPILEARQNFAYGTQHDYFDHHNIIGWTREGNTTHPNSGLATIMSDGPGGEKWMYVGQNKAGQVWHDITGNKPGTVTINADGWANFSVSGGSVSIWVKR

SEQ ID NO: 16616 - protein, 485 aa, Unidentified
HHNGTNGTMMQYFEWHLPNDGNHWNRLRDDASNLRNRGITAIWIPPAWKGTSQNDVGYGAYDLYDLGEFNQKGTVRTKYGTRSQLESAIHALKNNGVQVYGDVVMNHKGGADATENVLAVEVNPNNRNQEISGDYTIEAWTKFDFPGRGNTYSDFKWRWYHFDGVDWDQSRQFQNRIYKFRGDGKAWDWEVDSENGNYDYLMYADVDMDHPEVVNELRRWGEWYTNTLNLDGFRIDAVKHIKYSFTRDWLTHVRNATGKEPFAVAEFWKNDLGALENYLNKTNWNHSVFDVPLHYNLYNASNSGGNYDMAKLLNGTVVQKHPMHAVTFVDNHDSQPGESLESFVQEWFKPLAYALILTREQGYPSVFYGDYYGIPTHSVPAMKAKIDPILEARQNFAYGTQHDYFDHHNIIGWTREGNTTHPNSGLATIMSDGPGGEKWMYVGQNKAGQVWHDITGNKPGTVTINADGWANFSVNGGSVSIWVKR

SEQ ID NO: 16617 - protein, 485 aa, Unidentified
HHNGTNGTMMQYFEWHLPNDGNHWNRLRDDASNLRNRGITAIWIPPAWKGTSQNDVGYGAYDLYDLGEFNQKGTVRTKYGTRSQLESAIHALKNNGVQVYGDVVMNHKGGADATENVLAVEVNPNNRNQEISGDYTIEAWTKFDFPGRGNTYSDFKWRWYHFDGVDWDQSRQFQNRIYKFRGDGKAWDWEVDSENGNYDYLMYADVDMDHPEVVNELRRWGEWYTNTLNLDGFRIDAVKHIKYSFTRDWLTHVPNATGKEMFAVAEFWKNDLGALENYLNKTNWNHSVFDVPLHYNLYNASNSGGNYDMAKLLNGTVVQKHPMHAVTFVDNHDSQPGESLESFVQEWFKPLAYALILTREQGYPSVFYGDYYGIPTHSVPAMKAKIDPILEARQNFAYGTQHDYFDHHNIIGWTREGNTTHPNSGLATIMSDGPGGEKWMYVGQNKAGQVWHDITGNKPGTVTINADGWANFSVNGGSVSIWVKR

SEQ ID NO: 16618 - protein, 485 aa, Bacillus sp.
HHNGTNGTMMQYFEWHLPNDGNHWNRLRDDASNLRNRGITAIWIPPAWKGTSQNDVGYGAYDLYDLGEFNQKGTVRTKYGTRSQLESAIHALKNNGVQVYGDVVMNHKGGADATENVLAVEVNPNNRNQEISGDYTIEAWTKFDFPGRGNTYSDFKWRWYHFDGVDWDQSRQFQNRIYKFRGDGKAWDWEVDSENGNYDYLMYADNDMDHPEVVNELRRWGEWYTNTLNLDGFRIDAVKHIKYSFTRDWLTHVRNATGKEMFAVAEFWKNDLGALENYLNKTNWNHSVFDVPLHYNLYNASNSGGNYDMAKLLNGTVVQKHPMHAVTFVDNHDSQPGESLESFVQEWFKPLAYALILTREQGYPSVFYGDYYGIPTHSVPAMKAKIDPILEARQNFAYGTQHDYFDHHNIIGWTREGNTTHPNSGLATIMSDGPGGEKWMYVGQNKAGQVWHDITGNKPGTVTINADGWANFSVNGGSVSIWVKR

SEQ ID NO: 16619 - protein, 485 aa, Unidentified
HHNGTNGTMMQYFEWHLPNDGNHWNRLRDDASNLRNRGITAIWIPPAWKGTSQNDVGYGAYDLYDLGEFNQKGTVRTKYGTRSQLESAIHALKNNGVQVYGDVVMNHKGGADATENVLAVEVNPNNRNQEISGDYTIEAWTKFDFPGRGNTYSDFKWRWYHFDGVDWDQSRQFQNRIYKFRGDGKAWDWEVDSENGNYDYLMYADVDMDHPEVVNELRRWGEWYTNTLNLDGFRIDAVKHIKYSFTRDWLTHVRNATGKEMFAVAEFWKNDLGALENYLNKTNWNHSVFDVPLHYNLYNASNSGGNYDMAKLLNGTVVQKHPMHAVTFVDNHDSQPGESLESFVQEWFKPLAYALILTREQGYPSVFYGDYYGIPTHSVPAMKAKIDPILEARQNFAYGTQHDYFDHHNMIGWTREGNTTHPNSGLATIMSDGPGGEKWMYVGQNKAGQVWHDITGNKPGTVTINADGWANFSVNGGSVSIWVKR

SEQ ID NO: 16620 - protein, 485 aa, Bacillus sp.
HHNGTNGTMMQYFEWHLPNDGNHWNRLRDDASNLRNRGITAIWIPPAWKGTSQNDVGYGAYDLYDLGEFNQKGTVRTKYGTRSQLESAIHALKNNGVQVYGDVVMNHKGGADATENVLAVEVNPNNRNQEISGDYTIEAWTKFDFPGRGNTYSDFKWRWYHFDGVDWDQSRQFQNRIYKFRGDGKAWDWEVDSENGNYDYLMYADVDMDHPEMVNELRRWGEWYTNTLNLDGFRIDAVKHIKYSFTRDWLTHVRNATGKEMFAVAEFWKNDLGALENYLNKTNWNHSVFDVPLHYNLYNASNSGGNYDMAKLLNGTVVQKHPMHAVTFVDNHDSQPGESLESFVQEWFKPLAYALILTREQGYPSVFYGDYYGIPTHSVPAMKAKIDPILEARQNFAYGTQHDYFDHHNIIGWTREGNTTHPNSGLATIMSDGPGGEKWMYVGQNKAGQVWHDITGNKPGTVTINADGWANFSVNGGSVSIWVKR

SEQ ID NO: 16621 - protein, 485 aa, Unidentified
HHNGTNGTMMQYFEWHLPNDGNHWNRLRDDASNLRNRGITAIWIPPAWKGTSQNDVGYGAYDLYDLGEFNQKGTVRTKYGTRSQLESAIHALKNNGVQVYGDVVMNHKGGADATENVLAVEVNPNNRNQEISGDYTIEAWTKFDFPGRGNTYSDFKWRWYHFDGVDWDQSRQFQNRIYKFRGDGKAWDWEVDSENGNYDYLMYADVDMDHPEVVNELRRWGEWYTNTLNLDGFRIDAVKHIKYSFTRDWLTHVRNATGKEMFAVAEFWKNDLGALENYLNKTPWNHSVFDVPLHYNLYNASNSGGNYDMAKLLNGTVVQKHPMHAVTFVDNHDSQPGESLESFVQEWFKPLAYALILTREQGYPSVFYGDYYGIPTHSVPAMKAKIDPILEARQNFAYGTQHDYFDHHNIIGWTREGNTTHPNSGLATIMSDGPGGEKWMYVGQNKAGQVWHDITGNKPGTVTINADGWANFSVNGGSVSIWVKR

SEQ ID NO: 16622 - protein, 485 aa, Unidentified
HHNGTNGTMMQYFEWHLPNDGNHWNRLRDDASNLRNRGITAIWIPPAWKGTSQNDVGYGAYDLYDLGEFNQKGTVRTKYGTRSQLESAIHALKNNGVQVYGDVVMNHKGGADATENVLAVEVNPNNRNQEISGDYTIEAWTKFDFPGRGNTYSDFKWRWYHFDGVDWDQSRQFQNRIYKFRGDGKAWDWEVDSENGNYDYLMYADVDMDHPEVVNELRRWGEWYTNTLNLDGFRIDAVKHIKYSFTRDWLTHVRNATGKEMFAVAEFWKNDLGALENYLNKTNWNHSVFDVPLHYNLYNASNSGGNYDMAKLLNGTVVQKHPMHAVTFVDNHDSQPGESLESFVQEWFKPLAYALILTREQGYPSVFYGDYYGIPTHSVPAMKAKIDPILEARQNFAYGTQHDYFDHHNIIGWTREGNTTHPNSGLATIMSDGPGGEKWMYVGQNKAGQVWHDIVGNKPGTVTINADGWANFSVNGGSVSIWVKR

SEQ ID NO: 16623 - protein, 485 aa, Unidentified
HHNGTNGTMMQYFEWHLPNDGNHWNRLRDDASNLRNRGITAIWIPPAWKGTSQNDVGYGAYDLYDLGEFNQKGTVRTKYGTRSQLESAIHALKNNGVQVYGDVVMNHKGGADATENVLAVEVNPNNRNQEISGDYTIEAWTKFDFPGRGNTYSDFKWRWYHFDGVDWDQSRQFQNRIYKFRGDGKAWDWEVDSENGNYDYLMYADVDMDHPEVVNELRRWGEWYTNTLNLDGFRIDAVKHIKYSFTRDWLTHVRNATGKEMFAVAEFWKNDLGALENYLNKTNWNHSVFDVPLHYNLYNASNSGGNYDMAKLLNGTVVQKHPMHAVTFVDNHDSQPGESLESFVQEWFKPLAYALILTREQGYPSVFYGDYYGIPTHSVPAMKAKIDPILEARQWFAYGTQHDYFDHHNIIGWTREGNTTHPNSGLATIMSDGPGGEKWMYVGQNKAGQVWHDITGNKPGTVTINADGWANFSVNGGSVSIWVKR

SEQ ID NO: 16624 - protein, 485 aa, Unidentified
HHNGTNGTMMQYFEWHLPNDGNHWNRLRDDASNLRNRGITAIWIPPAWKGTSQNDVGYGAYDLYDLGEFNQKGTVRTKYGTRSQLESAIHALKNNGVQVYGDVVMNHKGGADATENVLAVEVNPNNRNQEISGDYTIEAWTKFDFPGRGNTYSDFKWRWYHFDGVDWDQSRQFQNRIYKFRGDGKAWDWEVDSENGNYDYLMYADVDMDHPEVVNELRRWGEWYTNTLNLDGFRIDAVKHIKYSFTRDWLTHVRNATGKEMFAVAEFWKNDLGALENYLNKTNWNHSVFDVPLHYNLYNASNSGGNYDMAKLLNGTVVQKHPMHAVTFVDNHDSQPGESLESFVQEWFKPLAYALILTREQGYPSVFYGDYYGIPTHSVPAMKAKIDPILEARQNFAYGTQHDYFDHHNIIGWTREGNTTHPNSGLATIMSDGPGGEKWMYVGQNKAGQVWHDITGNKPGTVTINADGWANFSVNGHSVSIWVKR

SEQ ID NO: 16625 - protein, 485 aa, Unidentified
HHNGTNGTMMQYFEWHLPNDGNHWNRLRDDASNLRNRGITAIWIPPAWKGTSQNDVGYGAYDLYDLGEFNQKGTVRTKYGTRSQLESAIHALKNNGVQVYGDVVMNHKGGADATENVLAVEVNPNNRNQEISGDYTIEAWTKFDFPGRGNTYSDFKWRWYHFDGVDWDQSRQFQNRIYKFRGDGKAWDWEVDSENGNYDYLMYADVDMDHPEVVNELRRWGEWYTNTLNLDGFRIDAVKHIKYSFTRDWLTHVRNATGKEMFAVAEFWKNDLGALENYLNKTNWNHSVFDVPLHYNLYNASNSGGNYDMAKLLNGTVVQKHPMHAVTFVDNHDSQPGESLESFVQEWFKPLAYALILTREQGYPSVFYGDYYGIPTHSVPAMKAKIDPILEARQNFAYGTQHDYFDHHNIIGWTREGNTTHPNSGLATIMSDGPGGEKWMYVGQNKAGQVWHDITGNKPGTVTINADGWANFSVNGGQVSIWVKR

SEQ ID NO: 16626 - protein, 485 aa, Unidentified
HHNGTNGTMMQYFEWHLPNDGNHWNRLRDDASNLRNRGITAIWIPPAWKGTSQNDVGYGAYDLYDLGEFNQKGTVRTKYGTRSQLESAIHALKNNGVGVYGDVVMNHKGGADATENVLAVEVNPNNRNQEISGDYTIEAWTKFDFPGRGNTYSDFKWRWYHFDGVDWDQSRQFQNRIYKFRGDGKAWDWEVDSENGNYDYLMYADVDMDHPEVVNELRRWGEWYTNTLNLDGFRIDAVKHIKYSFTRDWLTHVRNATGKEMFAVAEFWKNDLGALENYLNKTNWNHSVFDVPLHYNLYNASNSGGNYDMAKLLNGTVVQKHPMHAVTFVDNHDSQPGESLESFVQEWFKPLAYALILTREQGYPSVFYGDYYGIPTHSVPAMKAKIDPILEARQNFAYGTQHDYFDHHNIIGWTREGNTTHPNSGLATIMSDGPGGEKWMYVGQNKAGQVWHDITGNKPGTVTINADGWANFSVNGGSVSIWVKR

SEQ ID NO: 16627 - protein, 485 aa, Unidentified
HHNGTNGTMMQYFEWHLPNDGNHWNRLRDDASNLRNRGITAIWIPPAWKGTSQNDVGYGAYDLYDLGEFNQKGTVRTKYGTRSQLESAIHALKNNGVQVYGDVVMNHKGGADATENVLAVEVNPNNRNQEISGDYTIEAWTKFDFPGRGNTYSDFKWRWYHFDGVDWDQSRQFQNRIYKFRGDGKAWDWEVDSENGNYDYLMYADVDMDHPEVVNELRRWGEWYTNTLNLDGFRIDAVKHIKYSFTRDWLTHVRNATGKEMFAVAEFWKNDLGALENYLNKTNWNHSVFDVPLHYNLYNASNSGGNYDMAKLLNGTVVQKHPMHAVTFVDNHDSQPGESLESFIQEWFKPLAYALILTREQGYPSVFYGDYYGIPTHSVPAMKAKIDPILEARQNFAYGTQHDYFDHHNIIGWTREGNTTHPNSGLATIMSDGPGGEKWMYVGQNKAGQVWHDITGNKPGTVTINADGWANFSVNGGSVSIWVKR

SEQ ID NO: 16628 - protein, 485 aa, Unidentified
HHNGTNGTMMQYFEWHLPNDGNHWNRLRDDASNLRNRGITAIWIPPAWKGTSQNDVGYGAYDLYDLGEFNQKGTVRTKYGTRSQLESAIHALKNNGVQVYGDVVMNHKGGADATENVLAVEVNPNNRNQEISGDYTIEAWTKFDFPGRGNTYSDFKWRWYHFDGVDWDQSRQFQNRIYKFRGDGKAWDWEVDSENGNYDYLMYADVDMDHPEVVNELRRWGEWYTNTLNLDGFRIDAVKHIKYSFTRDWLTHVRNATGKEMFWVAEFWKNDLGALENYLNKTNWNHSVFDVPLHYNLYNASNSGGNYDMAKLLNGTVVQKHPMHAVTFVDNHDSQPGESLESFVQEWFKPLAYALILTREQGYPSVFYGDYYGIPTHSVPAMKAKIDPILEARQNFAYGTQHDYFDHHNIIGWTREGNTTHPNSGLATIMSDGPGGEKWMYVGQNKAGQVWHDITGNKPGTVTINADGWANFSVNGGSVSIWVKR

SEQ ID NO: 16629 - protein, 485 aa, Unidentified
HHNGTNGTMMQYFEWHLPNDGNHWNRLRDDASNLRNRGIAAIWIPPAWKGTSQNDVGYGAYDLYDLGEFNQKGTVRTKYGTRSQLESAIHALKNNGVQVYGDVVMNHKGGADATENVLAVEVNPNNRNQEISGDYTIEAWTKFDFPGRGNTYSDFKWRWYHFDGVDWDQSRQFQNRIYKFRGDGKAWDWEVDSENGNYDYLMYADVDMDHPEVVNELRRWGEWYTNTLNLDGFRIDAVKHIKYSFTRDWLTHVRNATGKEMFAVAEFWKNDLGALENYLNKTNWNHSVFDVPLHYNLYNASNSGGNYDMAKLLNGTVVQKHPMHAVTFVDNHDSQPGESLESFVQEWFKPLAYALILTREQGYPSVFYGDYYGIPTHSVPAMKAKIDPILEARQNFAYGTQHDYFDHHNIIGWTREGNTTHPNSGLATIMSDGPGGEKWMYVGQNKAGQVWHDITGNKPGTVTINADGWANFSVNGGSVSIWVKR

SEQ ID NO: 16630 - protein, 485 aa, Unidentified
HHNGTNGTMMQYFEWHLPNDGNHWNRLRDDASNLRNRGITAIWIPPAWKGTSQNDVGYGAYDLYDLGEFNQKSTVRTKYGTRSQLESAIHALKNNGVQVYGDVVMNHKGGADATENVLAVEVNPNNRNQEISGDYTIEAWTKFDFPGRGNTYSDFKWRWYHFDGVDWDQSRQFQNRIYKFRGDGKAWDWEVDSENGNYDYLMYADVDMDHPEVVNELRRWGEWYTNTLNLDGFRIDAVKHIKYSFTRDWLTHVRNATGKEMFAVAEFWKNDLGALENYLNKTNWNHSVFDVPLHYNLYNASNSGGNYDMAKLLNGTVVQKHPMHAVTFVDNHDSQPGESLESFVQEWFKPLAYALILTREQGYPSVFYGDYYGIPTHSVPAMKAKIDPILEARQNFAYGTQHDYFDHHNIIGWTREGNTTHPNSGLATIMSDGPGGEKWMYVGQNKAGQVWHDITGNKPGTVTINADGWANFSVNGGSVSIWVKR

SEQ ID NO: 16631 - protein, 485 aa, Unidentified
HHNGTNGTMMQYFEWHLPNDGNHWNRLRDDASNLRNRGITAIWIPPAWKGTSQNDVGYGAYDLYDLGEFNQKGTVRTKYGTRSQLESAIHALKNNGVQVYGDVVMNHKGGADATENVLAVEVNPNNRNQEISGDYTIEAWTKFDFPGRGNTYSDFKWRWYHFDGVDWDQSRQFQNRIYKFRGDGKAWDWEVDSENGNYDYLMYADVDMDHPEVVNELRRWGEWYTNTLNLDGFRIDAVKHIKYSFTRDWLTHVRNATGKEMFAVAEFWKNDLGALENYLNKTNWNHSVFDVPLHYNLYNASNSGGNYDMAKLLNGTVVQKHPMHAVTFVDNHDSQPGESLESFVQEWFKPLAYALILTREQGYPSVFRGDYYGIPTHSVPAMKAKIDPILEARQNFAYGTQHDYFDHHNIIGWTREGNTTHPNSGLATIMSDGPGGEKWMYVGQNKAGQVWHDITGNKPGTVTINADGWANFSVNGGSVSIWVKR

SEQ ID NO: 16632 - protein, 485 aa, Unidentified
HHNGTNGTMMQYFEWHLPNDGNHWNRLRDDASNLRNRGITAIWIPPAWKGTSQNDVGYGAYDLYDLGEFNQKGTVRTKYGTRSQLESAIHALKNNGVQVYGDVVMNHKGGADATENVLAVEVNPNNRNQEISGDYTIEAWTKFDFPGRGNTYSDFKWRWYHFDGVDWDQSRQFQNRIYKFRGDGKAWDWEVDSENGNYDYLMYADVDMDHPEVVNELRRWGEWYTNTLNLDGFRIDAVKHIKYSFTRDWLTHVRNATGKEMFAVAEFWKNDLGALENYLNKTNWNHSVFDVPLHYNLYNASNSGGNYDMAKLLNGTVVQKLPMHAVTFVDNHDSQPGESLESFVQEWFKPLAYALILTREQGYPSVFYGDYYGIPTHSVPAMKAKIDPILEARQNFAYGTQHDYFDHHNIIGWTREGNTTHPNSGLATIMSDGPGGEKWMYVGQNKAGQVWHDITGNKPGTVTINADGWANFSVNGGSVSIWVKR

SEQ ID NO: 16633 - protein, 485 aa, Unidentified
HHNGTNGTMMQYFEWHLPNDGNHWNRLRDDASNLRNRGITAIWIPPAWKGTSQNDVGYGAYDLYDLGEFNQKGTVRTKYGTRSQLESAIHALKNNGVQVYGDVVMNHKGGADATENVLAVEVNPNNRNQEISGDYTIEAWTKFDFPGRGNTYSDFKWRWYHFDGVDWDQSRQFQNRIYKFRGDGKAWDWEVDSENGNYDYLMYADVDMDHPEVVNELRRWGEWYTNTLNLDGFRIDAVKHIKYSFTRDWLTHVRNATGKEMFAVAEFWKNDLGALENYLNKTNWNHSVFDVPLHYNLYNASNSGGNYDMAKLLNGTVVQKHPMHAVTFVDNHDSQPGESLESFVQEWFKPLAYALILTREQGYCSVFYGDYYGIPTHSVPAMKAKIDPILEARQNFAYGTQHDYFDHHNIIGWTREGNTTHPNSGLATIMSDGPGGEKWMYVGQNKAGQVWHDITGNKPGTVTINADGWANFSVNGGSVSIWVKR

SEQ ID NO: 16634 - protein, 485 aa, Unidentified
HHNGTNGTMMQYFEWHLPNDGNHWNRLRDDASNLRNRGITAIWIPPAWKGTSQNDVGYGAYDLYDLGEFNQKGTVRTKYGTRSQLESAIHALKNNGVQVYGDVVMNHKGGADATENVLAVEVNPNNRNQEISGDYTIEAWTKFDFPGRGNTYSDFKWRWYHFDGVDWDQSRQFQNRIYKFRGDGKAWDWEVDSENGNYDYLMYADVDMDHPEVVNELRRWGEWYTNTLNLDGFRIDAVKHIKYSFTRDWLTHVRNATGKEMFAVAEFWKNDLGALENYLNKTNWNHSVFDVPLHYNLYNASNSGGNYDMAKLLNGTVVQKHPMHAVTFVDNHDSQPGESLESFVQEWFKPLAYALILTREQGYPSVFYGDYYGIPTHSVPAMKAKIPPILEARQNFAYGTQHDYFDHHNIIGWTREGNTTHPNSGLATIMSDGPGGEKWMYVGQNKAGQVWHDITGNKPGTVTINADGWANFSVNGGSVSIWVKR

SEQ ID NO: 16635 - protein, 485 aa, Unidentified
HHNGTNGTMMQYFEWHLPNDGNHWNRLRDDASNLRNRGITAIWIPPAWKGTSQNDVGYGAYDLYDLGEFNQKGTVRTKYGTRSQLESAIHALKNNGVQVYGDVVMNHKGGADATENVLAVEVNPNNRNQEISGDYTIEAWTKFDFPGRGNTYSDFKWRWYHFDGVDWDQSRQFQNRIYKFRGDGKAWDWEVDSENGNYDYLMYADVDMDHPEVVNELRRWGEWYTNTLNLDGFRIDAVKHIKYSFTRDWLTHVRNATGKEMFAVAEFWKNDLGALENYLNKTNYNHSVFDVPLHYNLYNASNSGGNYDMAKLLNGTVVQKHPMHAVTFVDNHDSQPGESLESFVQEWFKPLAYALILTREQGYPSVFYGDYYGIPTHSVPAMKAKIDPILEARQNFAYGTQHDYFDHHNIIGWTREGNTTHPNSGLATIMSDGPGGEKWMYVGQNKAGQVWHDITGNKPGTVTINADGWANFSVNGGSVSIWVKR

SEQ ID NO: 16636 - protein, 485 aa, Unidentified
HHNGTNGTMMQYFEWHLPNDGNHWNRLRDDASNLRNRGITAIWIPPAWKGTSQNDVGYGAYDLYDLGEFNQKGTVRTKYGTRSQLESAIHALKNNGVQVYGDVVMNHKGGADATENVLAVEVNPNNRNQEISGDYTIEAWTKFDFPGRGNTYSDFKWRWYHFDGVDWDQSRQFQNRIYKFRGDGKAWDWEVDSENGNYDYLMYADVDMDHPEVVNELRRWGEWYTNTLNLDGFRIDAVKHILYSFTRDWLTHVRNATGKEMFAVAEFWKNDLGALENYLNKTNWNHSVFDVPLHYNLYNASNSGGNYDMAKLLNGTVVQKHPMHAVTFVDNHDSQPGESLESFVQEWFKPLAYALILTREQGYPSVFYGDYYGIPTHSVPAMKAKIDPILEARQNFAYGTQHDYFDHHNIIGWTREGNTTHPNSGLATIMSDGPGGEKWMYVGQNKAGQVWHDITGNKPGTVTINADGWANFSVNGGSVSIWVKR

SEQ ID NO: 16637 - protein, 485 aa, Unidentified
HHNGTNGTMMQYFEWHLPNDGNHWNRLRDDASNLRNRGITAIWIPPAWKGTSQNDVGYGAYDLYDLGEFNQKGTVRTKYGTRSQLESAIHALKNNGVQVYGDVVMNHKGGADATENVLAVEVNPNNRNQEISGDYTIEAWTKFDFPGRGNTYSDFKWRWYHFDGVDWDQSRQFQNRIYKFRGDGKAWDWEVDSENGNYDYLMYADVDMDHPEVVNELRRWGEWYTNTLNLDGFRIDAVKHIKYSFTRDWLTHVRNATGWEMFAVAEFWKNDLGALENYLNKTNWNHSVFDVPLHYNLYNASNSGGNYDMAKLLNGTVVQKHPMHAVTFVDNHDSQPGESLESFVQEWFKPLAYALILTREQGYPSVFYGDYYGIPTHSVPAMKAKIDPILEARQNFAYGTQHDYFDHHNIIGWTREGNTTHPNSGLATIMSDGPGGEKWMYVGQNKAGQVWHDITGNKPGTVTINADGWANFSVNGGSVSIWVKR

SEQ ID NO: 16638 - protein, 485 aa, Unidentified
HHNGTNGTMMQYFEWHLPNDGNHWNRLRDDASNLRNRGITAIWIPPAWKGTSQNDVGYGAYDLYDLGEFNQKGTVRTKYGTRSQLESAIHALKNNGVQVYGDVVMNHKGGADATENVLAVEVNPNNRNQEISGDYTIEAWTKFDFPGRGNTYSDFKWRWYHFDGVDWDQSRQFQNRIYKFRGDGKAWDWEVDSENGNYDYLMYADVDMDHPEVVNELRRWGEWYTNTLNLDGFRIDAVKHIKYSFTRDWLTHVRNATGKEMFAVAEFWKNDLGALENYLNKTNWNHSVFDVPLHYNLYNASNAGGNYDMAKLLNGTVVQKHPMHAVTFVDNHDSQPGESLESFVQEWFKPLAYALILTREQGYPSVFYGDYYGIPTHSVPAMKAKIDPILEARQNFAYGTQHDYFDHHNIIGWTREGNTTHPNSGLATIMSDGPGGEKWMYVGQNKAGQVWHDITGNKPGTVTINADGWANFSVNGGSVSIWVKR

SEQ ID NO: 16639 - protein, 485 aa, Unidentified
HHNGTNGTMMQYFEWHLPNDGNHWNRLRDDASNLRNRGITAIWIPPAWKGTSQNDVGYGAYDLYDLGEFNQKGTVRTKYGTRSQLESAIHALKNNGVQVYGDVVMNHKGGADATENVLAVEVNPNNRNQEISGDYTIEAWTKFDFPGRGNTYSDFKWRWYHFDGVDWDQSRQFQNRIYKFRGDGKAWDWEVDSENGNYDYLMYADVDMDHPEVVNELRRWGEWYTNTLNLDGFRIDAVKHIKYSFTRDWLTHVRNATGKEMKAVAEFWKNDLGALENYLNKTNWNHSVFDVPLHYNLYNASNSGGNYDMAKLLNGTVVQKHPMHAVTFVDNHDSQPGESLESFVQEWFKPLAYALILTREQGYPSVFYGDYYGIPTHSVPAMKAKIDPILEARQNFAYGTQHDYFDHHNIIGWTREGNTTHPNSGLATIMSDGPGGEKWMYVGQNKAGQVWHDITGNKPGTVTINADGWANFSVNGGSVSIWVKR

SEQ ID NO: 16640 - protein, 485 aa, Unidentified
HHNGTNGTMMQYFEWHLPNDGNHWNRLRDDASNLRNRGITAIWIPPAWKGTSQNDVGYGAYDLYDLGEFNQKGTVRTKYGTRSQLESAIHALKNNGVQVYGDVVMNHKGGADATENVLAVEVNPNNRNQEISGDYTIEAWTKFDFPGRGNTYSDFKWRWYHFDGVDWDQSRQFQNRIYKFRGDGKAWDWEVDSENGNYDYLMYADVDMDHCEVVNELRRWGEWYTNTLNLDGFRIDAVKHIKYSFTRDWLTHVRNATGKEMFAVAEFWKNDLGALENYLNKTNWNHSVFDVPLHYNLYNASNSGGNYDMAKLLNGTVVQKHPMHAVTFVDNHDSQPGESLESFVQEWFKPLAYALILTREQGYPSVFYGDYYGIPTHSVPAMKAKIDPILEARQNFAYGTQHDYFDHHNIIGWTREGNTTHPNSGLATIMSDGPGGEKWMYVGQNKAGQVWHDITGNKPGTVTINADGWANFSVNGGSVSIWVKR

SEQ ID NO: 16641 - protein, 485 aa, Unidentified
HHNGTNGTMMQYFEWHLPNDGNHWNRLRDDASNLRNRGITAIWIPPAWKGTSQNDVGYGAYDLYDLGEFNQKGTVRTKYGTRSQLESAIHALKNNGVQVYGDVVMNHKGGADATENVLAVEVNPNNRNQEISGDYTIEAWTKFDFPGRGNTYSDFKWRWYHFDGVDWDQSRQFQNRIYKFRGDGKAWDWEVDSENGNYDYLMYADVDMDHPEVVNELRRWGEWYTNTLNLDGFRIDAVKHIKYSFTRDWLTHVHNATGKEMFAVAEFWKNDLGALENYLNKTNWNHSVFDVPLHYNLYNASNSGGNYDMAKLLNGTVVQKHPMHAVTFVDNHDSQPGESLESFVQEWFKPLAYALILTREQGYPSVFYGDYYGIPTHSVPAMKAKIDPILEARQNFAYGTQHDYFDHHNIIGWTREGNTTHPNSGLATIMSDGPGGEKWMYVGQNKAGQVWHDITGNKPGTVTINADGWANFSVNGGSVSIWVKR

SEQ ID NO: 16642 - protein, 485 aa, Bacillus sp.
HHNGTNGTMMQYFEWHLPNDGNHWNRLRDDASNLRNRGITAIWIPPAWKGTSQNDVGYGAYDLYDLGEFNQKGTVRTKYGTRSQLESAIHALKNNGVQVYGDVVMNHKGGADATENVLAVEVNPNNRNQEISGDYTIEAWTKFDFPGRGNTYSDFKWRWYHFDGVDWDQSRQFQNRIYKFRGDGKAWDWEVDAENGNYDYLMYADVDMDHPEVVNELRRWGEWYTNTLNLDGFRIDAVKHIKYSFTRDWLTHVRNATGKEMFAVAEFWKNDLGALENYLNKTNWNHSVFDVPLHYNLYNASNSGGNYDMAKLLNGTVVQKHPMHAVTFVDNHDSQPGESLESFVQEWFKPLAYALILTREQGYPSVFYGDYYGIPTHSVPAMKAKIDPILEARQNFAYGTQHDYFDHHNIIGWTREGNTTHPNSGLATIMSDGPGGEKWMYVGQNKAGQVWHDITGNKPGTVTINADGWANFSVNGGSVSIWVKR

SEQ ID NO: 16643 - protein, 483 aa, Bacillus sp.
HHNGTNGTMMQYFEWHLPNDGNHWNRLRDDASNLRNRGITAIWIPPAWKGTSQNDVGYGAYDLYDLGEFNQKGTVRTKYGTRSQLESAIHALKNNGVQVYGDVVMNHKGGADATENVLAVEVNPNNRNQEISGDYTIEAWTKFDFPGRGNTYSDFKWRWYHFDGVDWDQSRQFQNRIYKFRGKAWDWEVDSENGNYDYLMYADVDMDHPEVVNELRRWGEWYTNTLNLDGFRIDAVKHIKFSFTRDWLTHVRNATGKEMFAVAEFWKNDLGALENYLNKTNWNHSVFDVPLHYNLYNASNSGGNYDMAKLLNGTVVQKHPMHAVTFVDNHDSQPGESLESFVQEWFKPLAYALILTREQGYPSVFYGDYYGIPTHSVPAMKAKIDPILEARQNFAYGTQHDYFDHHNIIGWTREGNTTHPNSGLATIMSDGPGGEKWMYVGQNKAGQVWHDITGNKPGTVTINADGWANFSVNGGSVSIWVKR

SEQ ID NO: 16644 - protein, 483 aa, Bacillus sp.
HHNGTNGTMMQYFEWHLPNDGNHWNRLRDDASNLRNRGITAIWIPPAWKGTSQNDVGYGAYDLYDLGEFNQKGTVRTKYGTRSQLESAIHALKNNGVQVYGDVVMNHKGGADATENVLAVEVNPNNRNQEISGDYTIEAWTKFDFPGRGNTYSDFKWRWYHFDGVDWDQSRQFQNRIYKFRGKAWDWEVDSENGNYDYLMYADVDMDYPEVVNELRRWGEWYTNTLNLDGFRIDAVKHIKYSFTRDWLTHVRNATGKEMFAVAEFWKNDLGALENYLNKTNWNHSVFDVPLHYNLYNASNSGGNYDMAKLLNGTVVQKHPMHAVTFVDNHDSQPGESLESFVQEWFKPLAYALILTREQGYPSVFYGDYYGIPTHSVPAMKAKIDPILEARQNFAYGTQHDYFDHHNIIGWTREGNTTHPNSGLATIMSDGPGGEKWMYVGQNKAGQVWHDITGNKPGTVTINADGWANFSVNGGSVSIWVKR

SEQ ID NO: 16645 - protein, 485 aa, Unidentified
HHNGTNGTMMQYFEWHLPNDGNHWNRLRDDASNLRNRGITAIWIPPAWKGTSQNDVGYGAYDLYDLGEFNQKGTVRTKYGTRSQLESAIHALKNNGVQVYGDVVMNHKGGADATENVLAVEVNPNNRNQEISGDYTIEAWTKFDFPGRGNTYSDFKWRWYHFDGVDWDQSRQFQNRIYKFRGDGKAWDWEVDSENGNYDYLMYADVDMDHPEVVNELRRWGEWYTNTLNLDGFRIDAVKHIKYSFTRDWLTHVRNASGKEMFAVAEFWKNDLGALENYLNKTNWNHSVFDVPLHYNLYNASNSGGNYDMAKLLNGTVVQKHPMHAVTFVDNHDSQPGESLESFVQEWFKPLAYALILTREQGYPSVFYGDYYGIPTHSVPAMKAKIDPILEARQNFAYGTQHDYFDHHNIIGWTREGNTTHPNSGLATIMSDGPGGEKWMYVGQNKAGQVWHDITGNKPGTVTINADGWANFSVNGGSVSIWVKR

SEQ ID NO: 16646 - protein, 485 aa, Unidentified
HHNGTNGTMMQYFEWHLPNDGNHWNRLRDDASNLRNRGITAIWIPPAWKGTSQNDVGYGAYDLYDLGEFNQKGTVRTKYGTRSQLESAIHALKNNGVQVYGDVVMNHKGGADATENVLAVEVNPNNRNQEISGDYTIEAWTKFDFPGRGNTYSDFKWRWYHFDGVDWDQSRQFQNRIYKFRGDGKAWDWEVDSENGNYDYLMYADVDMDHPEVVNELRRWGEWYTNTLNLDGFRIDAVKHIKYSFTRDWLTHVRNATGKEMFAVAEFWKNDLGALENYLNKTNWNHSVFDVPLHYNLYNASNQGGNYDMAKLLNGTVVQKHPMHAVTFVDNHDSQPGESLESFVQEWFKPLAYALILTREQGYPSVFYGDYYGIPTHSVPAMKAKIDPILEARQNFAYGTQHDYFDHHNIIGWTREGNTTHPNSGLATIMSDGPGGEKWMYVGQNKAGQVWHDITGNKPGTVTINADGWANFSVNGGSVSIWVKR

SEQ ID NO: 16647 - protein, 483 aa, Bacillus sp.
HHNGTNGTMMQYFEWHLPNDGNHWNRLRDDASNLRNRGITAIWIPPAWKGTSQNDVGYGAYDLYDLGEFNQKGTVRTKYGTRSQLESAIHALKNNGVQVYGDVVMNHKGGADATENVLAVEVNPNNRNQEISGDYTIEAWTKFDFPGRGNTYSDFKWRWYHFDGVDWDQSRQFQNRIYKFRGKAWDWEVDSENGFYDYLMYADVDMDHPEVVNELRRWGEWYTNTLNLDGFRIDAVKHIKYSFTRDWLTHVRNATGKEMFAVAEFWKNDLGALENYLNKTNWNHSVFDVPLHYNLYNASNSGGNYDMAKLLNGTVVQKHPMHAVTFVDNHDSQPGESLESFVQEWFKPLAYALILTREQGYPSVFYGDYYGIPTHSVPAMKAKIDPILEARQNFAYGTQHDYFDHHNIIGWTREGNTTHPNSGLATIMSDGPGGEKWMYVGQNKAGQVWHDITGNKPGTVTINADGWANFSVNGGSVSIWVKR

SEQ ID NO: 16648 - protein, 485 aa, Unidentified
HHNGTNGTMMQYFEWHLPNDGNHWNRLRDDASNLRNRGITAIWIPPAWKGTSQNDVGYGAYDLYDLGEFNQKGTVRTKYGTRSQLESAIHALKNNGVQVYGDVVMNHKGGADATENVLAVEVNPNNRNQEISGDYTIEAWTKFDFPGRGNTYSDFKWRWYHFDGVDWDQSRQFQNRIYKFRGDGKAWDWEVDSENGNYDYLMYADVDMDHPEVVNELRRWGEWYTNTLNLDGFRIDAVKHIKYSFTRDWLTHVRNATGKEMFAVAEFWKNDLGALENYLNKTNTNHSVFDVPLHYNLYNASNSGGNYDMAKLLNGTVVQKHPMHAVTFVDNHDSQPGESLESFVQEWFKPLAYALILTREQGYPSVFYGDYYGIPTHSVPAMKAKIDPILEARQNFAYGTQHDYFDHHNIIGWTREGNTTHPNSGLATIMSDGPGGEKWMYVGQNKAGQVWHDITGNKPGTVTINADGWANFSVNGGSVSIWVKR

SEQ ID NO: 16649 - protein, 483 aa, Bacillus sp.
HHNGTNGTMMQYFEWHLPNDGNHWNRLRDDASNLRNRGITAIWIPPAWKGTSQNDVGYGAYDLYDLGEFNQKGTVRTKYGTRSQLESAIHALKNNGVQVYGDVVMNHKGGADATENVLAVEVNPNNRNQEISGDYTIEAWTKFDFPGRGNTYSDFKWRWYHFDGVDWDQSRQFQNRIYKFRGKAWDWEVDSENGNYDYLMYADVDMDHPEVVAELRRWGEWYTNTLNLDGFRIDAVKHIKYSFTRDWLTHVRNATGKEMFAVAEFWKNDLGALENYLNKTNWNHSVFDVPLHYNLYNASNSGGNYDMAKLLNGTVVQKHPMHAVTFVDNHDSQPGESLESFVQEWFKPLAYALILTREQGYPSVFYGDYYGIPTHSVPAMKAKIDPILEARQNFAYGTQHDYFDHHNIIGWTREGNTTHPNSGLATIMSDGPGGEKWMYVGQNKAGQVWHDITGNKPGTVTINADGWANFSVNGGSVSIWVKR

SEQ ID NO: 16650 - protein, 485 aa, Bacillus sp.
HHNGTNGTMMQYFEWHLPNDGNHWNRLRDDASNLRNRGITAIWIPPAWKGTSQNDVGYGAYDLYDLGEFNQKGTVRTKYGTRSQLESAIHALKNNGVQVYGDVVMNHKGGADATENVLAVEVNPNNRNQEISGDYTIEAWTKFDFPGRGNTYSDFKWRWYHFDGVDWDQSRQFQNRIYKFRGDGKAWDWEVDSENGNYDYLMYADVDMDHPEVVNELRRWGEWYTNTLNLDGFRIDAVKHIKYSFTRDWLTHVRNATGKEMFAVAEFWKNDLGALENYLNKTNWNHSVFDVPLHYNLYNASNSGGNYDMAKLLNGTVVQKHPMHAVTFVDNHDSQPGESLESFVQEWFKPLAYALILFREQGYPSVFYGDYYGIPTHSVPAMKAKIDPILEARQNFAYGTQHDYFDHHNIIGWTREGNTTHPNSGLATIMSDGPGGEKWMYVGQNKAGQVWHDITGNKPGTVTINADGWANFSVNGGSVSIWVKR

SEQ ID NO: 16651 - protein, 485 aa, Unidentified
HHNGTNGTMMQYFEWHLPNDGNHWNRLRDDASNLRNRGITAIWIPPAWKGTSQNDVGYGAYDLYDLGEFNQKGTVRTKYGTRSQLESAIHALKNNGVQVYGDVVMNHKGGADATENVLAVEVNPNNRNQEISGDYTIEAWTKFDFPGRGNTYSDFKWRWYHFDGVDWDQSRQFQNRIYKFRGDGKAWDWEVDSENGNYDYLMYADVDMDHPEVVNELRRWGEWYTNTLNLDGFRIDAVKHIKYSFTRDWLTHVRNATGKEFFAVAEFWKNDLGALENYLNKTNWNHSVFDVPLHYNLYNASNSGGNYDMAKLLNGTVVQKHPMHAVTFVDNHDSQPGESLESFVQEWFKPLAYALILTREQGYPSVFYGDYYGIPTHSVPAMKAKIDPILEARQNFAYGTQHDYFDHHNIIGWTREGNTTHPNSGLATIMSDGPGGEKWMYVGQNKAGQVWHDITGNKPGTVTINADGWANFSVNGGSVSIWVKR

SEQ ID NO: 16652 - protein, 485 aa, Unidentified
HHNGTNGTMMQYFEWHLPNDGNHWNRLRDDASNLRNRGITAIWIPPAWKGTSQNDVGYGAYDLYDLGEFNQKGTVRTKYGTRSQLESAIHALKNNGVQVYGDVVMNHKGGADATENVLAVEVNPSNRNQEISGDYTIEAWTKFDFPGRGNTYSDFKWRWYHFDGVDWDQSRQFQNRIYKFRGDGKAWDWEVDSENGNYDYLMYADVDMDHPEVVNELRRWGEWYTNTLNLDGFRIDAVKHIKYSFTRDWLTHVRNATGKEMFAVAEFWKNDLGALENYLNKTNWNHSVFDVPLHYNLYNASNSGGNYDMAKLLNGTVVQKHPMHAVTFVDNHDSQPGESLESFVQEWFKPLAYALILTREQGYPSVFYGDYYGIPTHSVPAMKAKIDPILEARQNFAYGTQHDYFDHHNIIGWTREGNTTHPNSGLATIMSDGPGGEKWMYVGQNKAGQVWHDITGNKPGTVTINADGWANFSVNGGSVSIWVKR

SEQ ID NO: 16653 - protein, 485 aa, Unidentified
HHNGTNGTMMQYFEWHLPNDGNHWNRLRDDASNLRNRGITAIWIPPAWKGTSQNDVGYGAYDLYDLGEFNQKGTVRTKYGTRSQLESAIHALKNNGVQVYGDVVMNHKGGADATENVLAVEVNPNNRNQEISGDYTIEAWTKFDFPGRGNTYSDFKWRWYHFDGVDWDQSRQFQNRIYKFRGDGKAWDWEVDSENGNYDYLMYADVDMDHPEVVNELRRWGEWYTNTLNLDGFRIDAVKHIKYSFTRDWLTHVRNATGKEMFAVAEFWKNDLGALENYLNKTNWNHSVFDVPLHYNLDNASNSGGNYDMAKLLNGTVVQKHPMHAVTFVDNHDSQPGESLESFVQEWFKPLAYALILTREQGYPSVFYGDYYGIPTHSVPAMKAKIDPILEARQNFAYGTQHDYFDHHNIIGWTREGNTTHPNSGLATIMSDGPGGEKWMYVGQNKAGQVWHDITGNKPGTVTINADGWANFSVNGGSVSIWVKR

SEQ ID NO: 16654 - protein, 485 aa, Unidentified
HHNGTNGTMMQYFEWHLPNDGNHWNRLRDDASNLRNRGITAIWIPPAWKGTSQNDVGYGAYDLYDLGEFNQKGTVRTKYGTRSQLESAIHALKNNGVQVYGDVVMNHKGGADATENVLAVEVNPNNRNQEISGDYTIEAWTKFDFPGRGNTYSDFKWRWYHFDGVDWDQSRQFQNRIYKFRGDGKAWDWEVDSENGNYDYLMYADVDMDHPEVVNELRRWGEWYTNTLNLDGFRIDAVKHIKYSFTRDWLTHVRNATGKEMFAVAEFWKNDLGALENYLNKTNWNHSVFDVPLHYNLYNASNSGGNYDMAKLLNGTVVQKHPMHAVTFVDNHDSQPGESLESFVQEWFKPLAYALILTREQGYPSVFYGDYYGIPTHSVPAMKAKIDPILEARQNFAYGTQHDYFDHHNIIGWTREGNTTHPNSGLATIMSDGPGGEKWMYVGQNKAGQVWHDITGDKPGTVTINADGWANFSVNGGSVSIWVKR

SEQ ID NO: 16655 - protein, 485 aa, Unidentified
HHNGTNGTMMQYFEWHLPNDGNHWNRLRDDASNLRNRGITAIWIPPAWKGTSQNDVGYGAYDLYDLGEFNQKGTVRTKYGTRSQLESAIHALKNNGVQVYGDVVMNHKGGADATENVLAVEVNPNNRNQEISGDYTIEAWTKFDFPGRGNTYSDFKWRWYHFDGVDWDQSRQFQNRIYKFRGDGKAWDWEVDSENGNYDYLMYADVDMDHPEVVNELRRWGEWYDNTLNLDGFRIDAVKHIKYSFTRDWLTHVRNATGKEMFAVAEFWKNDLGALENYLNKTNWNHSVFDVPLHYNLYNASNSGGNYDMAKLLNGTVVQKHPMHAVTFVDNHDSQPGESLESFVQEWFKPLAYALILTREQGYPSVFYGDYYGIPTHSVPAMKAKIDPILEARQNFAYGTQHDYFDHHNIIGWTREGNTTHPNSGLATIMSDGPGGEKWMYVGQNKAGQVWHDITGNKPGTVTINADGWANFSVNGGSVSIWVKR

SEQ ID NO: 16656 - protein, 485 aa, Unidentified
HHNGTNGTMMQYFEWHLPNDGNHWNRLRDDASNLRNRGITAIWIPPAWKGTSQNDVGYGAYDLYDLGEFNQKGTVRTKYGTRSQLESAIHALKNNGVQVYGDVVMNHKGGADATENVLAVEVNPNNRNQEISGDYTIEAWTKFDFPGRGNTYSDFKWRWYHFDGVDWDQSRQFQNRIYKFRGDGKAWDWEVDSENGNYDYLMYADVDMDHPEVVNELRRWGEWYTNTLNLDGFRIDAVKHIKYSFTRDWLTHVRNATGKEMFAVAEFWKNDLGALENYLNKTNWNHSVFDVPLHYNLYNASNSGGNYDMAKLLNGTVVQKHPLHAVTFVDNHDSQPGESLESFVQEWFKPLAYALILTREQGYPSVFYGDYYGIPTHSVPAMKAKIDPILEARQNFAYGTQHDYFDHHNIIGWTREGNTTHPNSGLATIMSDGPGGEKWMYVGQNKAGQVWHDITGNKPGTVTINADGWANFSVNGGSVSIWVKR

SEQ ID NO: 16657 - protein, 485 aa, Unidentified
HHNGTNGTMMQYFEWHLPNDGNHWNRLRDDASNLRNRGITAIWIPPAWKGTSQNDVGYGAYDLYDLGEFNQKGTVRTKYGTRSQLESAIHALKNNGVQVYGDVVMNHKGGADATENVLAVEVNPNNRNQEISGDYTIEAWTKFDFPGRGNTYSDFKWRWYHFDGVDWDQSRQFQNRIYKFRGDGKAWDWEVDSENGNYDYLMYADVDMDHPEVVNELRRWGEWYTNTLNLDGFRIDAVKHIKYSFTRDWLTHVRNATGKEMFAVAEFWKNDLGALENYLNKTNWNHSVFDVPLHYNLYNASNSGGNYDMAKLLNGTVVQKHPMHAVTFVDNHDSQPGESLESFVQEWFKPLAYALILTREQGLPSVFYGDYYGIPTHSVPAMKAKIDPILEARQNFAYGTQHDYFDHHNIIGWTREGNTTHPNSGLATIMSDGPGGEKWMYVGQNKAGQVWHDITGNKPGTVTINADGWANFSVNGGSVSIWVKR

SEQ ID NO: 16658 - protein, 485 aa, Unidentified
HHNGTNGTMMQYFEWHLPNDGNHWNRLRDDASNLRNRGITAIWIPPAWKGTSQNDVGYGAYDLYDLGEFNQKGTVRTKYGTRSQLESAIHALKNNGVQVYGDVVMNHKGGADATENVLAVEVNPNNRNQEISGDYTIEAWTKFDFPGRGNTYSDFKWRWYHFDGVDWDQSRQFQNRIYKFRGDGKAWDWEVDSENGNYDYLMYADVDMDHPEVVNELRRWGEWYTNTLNLDGFRIDAVKHIKYSFTRDWLTHVRNATGKEMFAVAEFWKNDLGALENYLNKTNWNHSVFDVPLHYNLYNASNSGGNYDMAKLLNGTVVQKHPMHAVTFVDNHDSQPGESLESFVQEWFKPLAYALILTREQGYPSVFYGDYYGIPTHSVPAMKAKIDPILEARQNFAYGTQHDYFDHHNIIGWTREGNTTPPNSGLATIMSDGPGGEKWMYVGQNKAGQVWHDITGNKPGTVTINADGWANFSVNGGSVSIWVKR

SEQ ID NO: 16659 - protein, 485 aa, Unidentified
HHNGTNGTMMQYFEWHLPNDGNHWNRLRDDASNLRNRGITAIWIPPAWKGTSQNDVGYGAYDLYDLGEFNQKGTVRTKYGTRSQLESAIHALKNNGVQVYGDVVMNHKGGADATENVLAVEVNPNNRNQEISGDYTIEAWTKFDFPGRGNTYSDFKWRWYHFDGVDWDQSRQFQNRIYKDRGDGKAWDWEVDSENGNYDYLMYADVDMDHPEVVNELRRWGEWYTNTLNLDGFRIDAVKHIKYSFTRDWLTHVRNATGKEMFAVAEFWKNDLGALENYLNKTNWNHSVFDVPLHYNLYNASNSGGNYDMAKLLNGTVVQKHPMHAVTFVDNHDSQPGESLESFVQEWFKPLAYALILTREQGYPSVFYGDYYGIPTHSVPAMKAKIDPILEARQNFAYGTQHDYFDHHNIIGWTREGNTTHPNSGLATIMSDGPGGEKWMYVGQNKAGQVWHDITGNKPGTVTINADGWANFSVNGGSVSIWVKR

SEQ ID NO: 16660 - protein, 485 aa, Unidentified
HHNGTNGTMMQYFEWHLPNDGNHWNRLRDDASNLRNRGITAIWIPPAWKGTSQNDVGYGAYDLYDLGEFNQKGTVRTKYGTRSQLESAIHALKNNGVQVYGDVVMNHKGGADATENVLAVEVNPNNRNQEISGDYTIEAWTKFDFPGRGNTYSDFKWRWYHFDGVDWDQSRQFQNRIYKFRGDGKAWDWEVDSENGNYDYLMYADVDMDHPEVVNELRRWGEWYTNTLNLDGFRIDAVKHIKYSFTRDWLTHVRFATGKEMFAVAEFWKNDLGALENYLNKTNWNHSVFDVPLHYNLYNASNSGGNYDMAKLLNGTVVQKHPMHAVTFVDNHDSQPGESLESFVQEWFKPLAYALILTREQGYPSVFYGDYYGIPTHSVPAMKAKIDPILEARQNFAYGTQHDYFDHHNIIGWTREGNTTHPNSGLATIMSDGPGGEKWMYVGQNKAGQVWHDITGNKPGTVTINADGWANFSVNGGSVSIWVKR

SEQ ID NO: 16661 - protein, 485 aa, Unidentified
HHNGTNGTMMQYFEWHLPNDGNHWNRLRDDASNLRNRGITAIWIPPAWKGTSQNDVGYGAYDLYDLGEFNQKGTVRTKYGTRSQLESAIHALKNNGVQVYGDVVMNHKGGADATENVLAVEVNPNNRNQEISGDYTIEAWTKFDFPGRGNTYSDFKWRWYHFDGVDWDQSRQFQNRIYKFRGDGKAWDWEVDSENDNYDYLMYADVDMDHPEVVNELRRWGEWYTNTLNLDGFRIDAVKHIKYSFTRDWLTHVRNATGKEMFAVAEFWKNDLGALENYLNKTNWNHSVFDVPLHYNLYNASNSGGNYDMAKLLNGTVVQKHPMHAVTFVDNHDSQPGESLESFVQEWFKPLAYALILTREQGYPSVFYGDYYGIPTHSVPAMKAKIDPILEARQNFAYGTQHDYFDHHNIIGWTREGNTTHPNSGLATIMSDGPGGEKWMYVGQNKAGQVWHDITGNKPGTVTINADGWANFSVNGGSVSIWVKR

SEQ ID NO: 16662 - protein, 485 aa, Bacillus sp.
HHNGTNGTMMQYFEWHLPNDGNHWNRLRDDASNLRNRGITAIWIPPAWKGTSQNDVGYGAYDLYDLGEFNQKGTVRTKYGTRSQLESAIHALKNNGVQVYGDVVMNHKGGADATENVLAVEVNPNNRNQEISGDYTIEAWTKFDFPGRGNTYSDFKWRWYHFDGVDWDQSRQFQNRIYKFRGXXKAWDWEVDSENGNYDYLMYADVDMDYPEVVNELRRWGEWYTNTLNLDGFRIDAVKHIKYSFTRDWLTHVRNATGKEMFAVAEFWKNDLGALENYLNKTNWNHSVFDVPLHYNLYNASNSGGNYDMAKLLNGTVVQKHPMHAVTFVDNHDSQPGESLESFVQEWFKPLAYALILTREQGYPSVFYGDYYGIPTHSVPAMKAKIDPILEARQNFAYGTQHDYFDHHNIIGWTREGNTTHPNSGLATIMSDGPGGEKWMYVGQNKAGQVWHDITGNKPGTVTINADGWANFSVNGGSVSIWVKR

SEQ ID NO: 16663 - protein, 485 aa, Unidentified
HHNGTNGTMMQYFEWHLPNDGNHWNRLRDDASNLRNRGITAIWIPPAWKGTSQNDVGYGAYDLYDLGEFNQKGTVRTKYGTRSQLESAIHALKNNGVQVYGDVVMNHKGGADATENVLAVEVNPNNRNQEISGDYTIEAWTKFDFPGRGNTYSDFKWRWYHFDGVDWDQSRQFQNRIYKFRGDGKAWDWEVDSENGNYDYLMYADVDMDHPEVVNELRRWGEWYTNTLNLDGFRIDAVKHIKYSFTRDWLTHVRNATGKEMFAVAEFWKNDLGALENYLNKTNWNHSVFDVPLHYNLYNASNVGGNYDMAKLLNGTVVQKHPMHAVTFVDNHDSQPGESLESFVQEWFKPLAYALILTREQGYPSVFYGDYYGIPTHSVPAMKAKIDPILEARQNFAYGTQHDYFDHHNIIGWTREGNTTHPNSGLATIMSDGPGGEKWMYVGQNKAGQVWHDITGNKPGTVTINADGWANFSVNGGSVSIWVKR

SEQ ID NO: 16664 - protein, 485 aa, Unidentified
HHNGTNGTMMQYFEWHLPNDGNHWNRLRDDASNLRNRGITAIWIPPAWKGTSQNDVGYGAYDLYDLGEFNQKGTVRTKYGTRSQLESAIHALKNNGVQVYGDVVMNHKGGADATENVLAVEVNPNNRNQEISGDYTIEAWTKFDFPGRGNTYSDFKWRWYHFDGVDWDQSRQFQNRIYKFRGDGKAWDWEVDSENGNYDYLMYADVDMDHPEVVNELRRWGEWYTNTLNLDGFRIDAVKHIKYSFTRDWLTHVRNATGKEMFAVAEFWKNDLGALENYLNKTNWNHSVFDVPLHYNLYNASNMGGNYDMAKLLNGTVVQKHPMHAVTFVDNHDSQPGESLESFVQEWFKPLAYALILTREQGYPSVFYGDYYGIPTHSVPAMKAKIDPILEARQNFAYGTQHDYFDHHNIIGWTREGNTTHPNSGLATIMSDGPGGEKWMYVGQNKAGQVWHDITGNKPGTVTINADGWANFSVNGGSVSIWVKR

SEQ ID NO: 16665 - protein, 483 aa, Bacillus sp.
HHNGTNGTMMQYFEWHLPNDGNHWNRLRDDASNLRNRGITAIWIPPAWKGTSQNDVGYGAYDLYDLGEFNQKGTVRTKYGTRSQLESAIHALKNNGVQVYGDVVMNHKGGADATENVLAVEVNPNNRNQEISGDYTIEAWTKFDFPGRGNTYSDFKWRWYHFDGVDWDQSRQFRNRIYKFRGKAWDWEVDSENGNYDYLMYADVDMDHPEVVNELRRWGEWYTNTLNLDGFRIDAVKHIKYSFTRDWLTHVRNATGKEMFAVAEFWKNDLGALENYLNKTNWNHSVFDVPLHYNLYNASNSGGNYDMAKLLNGTVVQKHPMHAVTFVDNHDSQPGESLESFVQEWFKPLAYALILTREQGYPSVFYGDYYGIPTHSVPAMKAKIDPILEARQNFAYGTQHDYFDHHNIIGWTREGNTTHPNSGLATIMSDGPGGEKWMYVGQNKAGQVWHDITGNKPGTVTINADGWANFSVNGGSVSIWVKR

SEQ ID NO: 16666 - protein, 485 aa, Unidentified
HHNGTNGTMMQYFEWHLPNDGNHWNRLRDDASNLRNRGITAIWIPPAWKGTSQNDVGYGAYDLYDLGEFNQKGTVRTKYGTRSQLESAIHALKNNGVQVYGDVVMNHKGGADATENVLAVEVNPNNRNQEISGDYTIEAWTKFDFPGRGNTYSDFKWRWYHFDGVDWDQSRQFQNRIYKFRGDGKAWDWEVDSENGNYDYLMYADVDMDHPEVVNELRRWGEWYTNTLNLDGFRIDAVKHIKYSFTRDWLTHVRNATGKEMFAVAEFWKNDLGALENYLNKTNWNHSVFDVPLHYNLYNASNSGGNYDMAKLLNGTVVQKHPMHAVTFVDNHDSQPGESLESFVQEWFKPLAYALILTREQGYPSVFYGDYYGIPTHSVPAMKAKIDPILEARQNFAYGTQHDYFDHHNIIGWTREGNTTHPNSGLATIMSDGPGGEKWMYVGQNKAGQVWHDITGNKPGTVTINADGNANFSVNGGSVSIWVKR

SEQ ID NO: 16667 - protein, 485 aa, Unidentified
HHNGTNGTMMQYFEWHLPNDGNHWNRLRDDASNLRNRGITAIWIPPAWKGTSQNDVGYGAYDLYDLGEFNQKGTVRTKYGTRSQLESAIHALKNNGVQVYGDVVMNHKGGADATENVLAVEVNPNNRNQEISGDYTIEAWTKFDFPGRGNTYSDFKWRWYHFDGVDWDQSRQFQNRIYKFRGDGKAWDWEVDSENGNYDYLMYADVDMDHPEVVNELRRWGEWYTNTLNLDGFRIDAVKHIKYSFTRDWLTHVRNATGKEMFAVAEFWKNDLGALENYLNKTNWNHSVFDVPLHYNLYNASNSGGNYDMAKLLNGTVVQKHPMHAVTFVDNHDSQPGESLESFVQEWFKPLAYALILTREQGYPSVFYGDYYGIPTHSVPAMKAKIDPILEARQNFAYGTQHDYFDHHNIIGWTREGNTTHPNSGLATIMSDGPGGEKWMYVGQNKAGQVWHDITGNKPGTVTINADGHANFSVNGGSVSIWVKR

SEQ ID NO: 16668 - protein, 485 aa, Unidentified
HHNGTNGTMMQYFEWHLPNDGNHWNRLRDDASNLRNRGITAIWIPPAWKGTSQNDVGYGAYDLYDLGEFNQKGTVRTKYGTRSQLESAIHALKNNGVQVYGDVVMNHKGGADATENVLAVEVNPNNRNQEISGDYTIEAWTKFDFPGRGNTYSDFKWRWYHFDGVDWDQSRQFQNRIYKFRGDGKAWDWEVDSENGNYDYLMYADVDMDHPEVVNELRRWGEWYTNTLNLDGFRIDAVKHIKYSFTRDWLTHVRNATGKEMFAVAEFWKNDLGALENYLNKTNWNHSVFDVPLHYNLYNASNSGGNYDMAKLLNGTVVQKHPMHAVTFVDNHDSQPGESLESFVQEWFKPLAYALILTREQGYPSVFYGDYYGIPTHSVPAMKAKIDPILVARQNFAYGTQHDYFDHHNIIGWTREGNTTHPNSGLATIMSDGPGGEKWMYVGQNKAGQVWHDITGNKPGTVTINADGWANFSVNGGSVSIWVKR

SEQ ID NO: 16669 - protein, 485 aa, Unidentified
HHNGTNGTMMQYFEWHLPNDGNHWNYLRDDASNLRNRGITAIWIPPAWKGTSQNDVGYGAYDLYDLGEFNQKGTVRTKYGTRSQLESAIHALKNNGVQVYGDVVMNHKGGADATENVLAVEVNPNNRNQEISGDYTIEAWTKFDFPGRGNTYSDFKWRWYHFDGVDWDQSRQFQNRIYKFRGDGKAWDWEVDSENGNYDYLMYADVDMDHPEVVNELRRWGEWYTNTLNLDGFRIDAVKHIKYSFTRDWLTHVRNATGKEMFAVAEFWKNDLGALENYLNKTNWNHSVFDVPLHYNLYNASNSGGNYDMAKLLNGTVVQKHPMHAVTFVDNHDSQPGESLESFVQEWFKPLAYALILTREQGYPSVFYGDYYGIPTHSVPAMKAKIDPILEARQNFAYGTQHDYFDHHNIIGWTREGNTTHPNSGLATIMSDGPGGEKWMYVGQNKAGQVWHDITGNKPGTVTINADGWANFSVNGGSVSIWVKR

SEQ ID NO: 16670 - protein, 485 aa, Unidentified
HHNGTNGTMMQYFEWHLPNDGNHWNRLRDDASNLRNRGITAIWIPPAWKGTSQNDVGYGAYDLYDLGEFNQKGTVRTKYGTRSQLESAIHALKNNGVEVYGDVVMNHKGGADATENVLAVEVNPNNRNQEISGDYTIEAWTKFDFPGRGNTYSDFKWRWYHFDGVDWDQSRQFQNRIYKFRGDGKAWDWEVDSENGNYDYLMYADVDMDHPEVVNELRRWGEWYTNTLNLDGFRIDAVKHIKYSFTRDWLTHVRNATGKEMFAVAEFWKNDLGALENYLNKTNWNHSVFDVPLHYNLYNASNSGGNYDMAKLLNGTVVQKHPMHAVTFVDNHDSQPGESLESFVQEWFKPLAYALILTREQGYPSVFYGDYYGIPTHSVPAMKAKIDPILEARQNFAYGTQHDYFDHHNIIGWTREGNTTHPNSGLATIMSDGPGGEKWMYVGQNKAGQVWHDITGNKPGTVTINADGWANFSVNGGSVSIWVKR

SEQ ID NO: 16671 - protein, 485 aa, Unidentified
HHNGTNGTMMQYFEWHLPNDGNHWNRLRDDASNLRNRGITAIWIPPAWKGTSQNDVGYGAYDLYDLGEFNQKGTVRTKYGTRSQLESAIHALKNNGVQVYGDVVMNHKGGADATENVLAVEVNPNNRNQEISGDYTIEAWTKFDFPGRGNTYSDFKWRWYHFDGVDWDQSRQFQNRIYKFRGDGKAWDWEVDSENGNYDYLMYADVDMDHPEVVNELRRWGEWYTNTLNLDGFRIDAVKHIKYSFTRDWLTHVRNATGKEMFAVAEFWKNDLGALENYLNKTNWNHSVFDVPLHYNLYNASNSGGNYDMAKLLNGTVVQKHPMHAVTFVDNHDSQPGESLESFVQEWFKPLAYALILTREQGYPSVFYGDYYGIPTHSVPAMKAKIDPILEARQNFAYGTQHDYFDHHNIIGWTREGNTTHPNSGLATIMSDGPGGEKWMYVGQNKAGQVWHDITGNKPGTVTIGADGWANFSVNGGSVSIWVKR

SEQ ID NO: 16672 - protein, 485 aa, Unidentified
HHNGTNGTMMQYFEWHLPNDGNHWNRLRDDASNLRNRGITAIWIPPAWKGTSQNDVGYGAYDLYDLGEFNQKGTVRTKYGTRSQLESAIHALKNNGVQVYGDVVMNHKGGADATENVLAVEVNPNNRNQEISGDYTIEAWTKFDFPGRGNTYSDFKWRWYHFDGVDWDQSRQFQNRIYKFRGDGKAWDWEVDSENGNYDYLMYADVDMDHPEVVNELRRWGEWYTNTLNLDGFRIDAVKHIKYSFTRDWLTHVRNATGKEMFEVAEFWKNDLGALENYLNKTNWNHSVFDVPLHYNLYNASNSGGNYDMAKLLNGTVVQKHPMHAVTFVDNHDSQPGESLESFVQEWFKPLAYALILTREQGYPSVFYGDYYGIPTHSVPAMKAKIDPILEARQNFAYGTQHDYFDHHNIIGWTREGNTTHPNSGLATIMSDGPGGEKWMYVGQNKAGQVWHDITGNKPGTVTINADGWANFSVNGGSVSIWVKR

SEQ ID NO: 16673 - protein, 485 aa, Unidentified
HHNGTNGTMMQYFEWHLPNDGNHWNRLRDDASNLRNRGITAIWIPPAWKGTSQNDVGYGAYDLYDLGEFNQKGTVRTKYGTRSQLESAIHALKNNGVQVYGDVVMNHKGGADATENVLAVEVNPNNRNQEISGDYTIEAWTKFDFPGRGNTYSDFKWRWYHFDGVDWDQSRQFQNRIYKFRGDGKAWDWEVDSENGNYDYLMYADVDMDHPEVVNELRRWGEWYTNTLNLDGFRIDAVKHIKYSFTRDWLTHVRNATGKEMFAVAEFWKNDLGALENYLNKTNWNHSVFDVPLHYNLYNASNSGGNYDMAKLLNGTVVQKHPMHAVTFVDNHDSQPGESLESFVQEWFKPLAYALILTREQGYPSVFYGDYYGIPTHSVPAMKAKIDPILEARQNFAYGTQHDYFDHHNIIGWTREGNTTHPNSGLATIMSDGPGGEKWMYVGQNKAGQVWHDITGNKPGTVTINADGWANFSVNGGFVSIWVKR

SEQ ID NO: 16674 - protein, 485 aa, Bacillus sp.
HHNGTNGTMMQYFEWHLPNDGNHWNRLRDDASNLRNRGITAIWIPPAWKGTSQNDVGYGAYDLYDLGEFNQKGTVRTKYGTRSQLESAIHALKNNGVQVYGDVVMNHKGGADATENVLAVEVNPNNRNQEISGDYTIEAWTKFDFPGRGNTYSDFKWRWYHFDGVDWDQSRQFQNRIYKFRGDGKAWDWEVDSENGNYDYLMYADVDMDHPVVVNELRRWGEWYTNTLNLDGFRIDAVKHIKYSFTRDWLTHVRNATGKEMFAVAEFWKNDLGALENYLNKTNWNHSVFDVPLHYNLYNASNSGGNYDMAKLLNGTVVQKHPMHAVTFVDNHDSQPGESLESFVQEWFKPLAYALILTREQGYPSVFYGDYYGIPTHSVPAMKAKIDPILEARQNFAYGTQHDYFDHHNIIGWTREGNTTHPNSGLATIMSDGPGGEKWMYVGQNKAGQVWHDITGNKPGTVTINADGWANFSVNGGSVSIWVKR

SEQ ID NO: 16675 - protein, 485 aa, Unidentified
HHNGTNGTMMQYFEWHLPNDGNHWNRLRDDASNLRNRGITAIWIPPAWKGTSQNDVGYGAYDLYDLGEFNQKGTVRTKYGTRSQLESAIHALKNNGVQVYGDVVMNHKGGADATENVLAVEVNPNNRNQEIRGDYTIEAWTKFDFPGRGNTYSDFKWRWYHFDGVDWDQSRQFQNRIYKFRGDGKAWDWEVDSENGNYDYLMYADVDMDHPEVVNELRRWGEWYTNTLNLDGFRIDAVKHIKYSFTRDWLTHVRNATGKEMFAVAEFWKNDLGALENYLNKTNWNHSVFDVPLHYNLYNASNSGGNYDMAKLLNGTVVQKHPMHAVTFVDNHDSQPGESLESFVQEWFKPLAYALILTREQGYPSVFYGDYYGIPTHSVPAMKAKIDPILEARQNFAYGTQHDYFDHHNIIGWTREGNTTHPNSGLATIMSDGPGGEKWMYVGQNKAGQVWHDITGNKPGTVTINADGWANFSVNGGSVSIWVKR

SEQ ID NO: 16676 - protein, 485 aa, Unidentified
HHNGTNGTMMQYFEWHLPNDGNHWNRLRDDASNLRNRGITAIWIPPAWKGTSQNDVGYGAYDLYDLGEFNQKGTVRTKYGTRSQLESAIHALKNNGVQVYGDVVMNHKGGADATENVLAVEVNPNNRNQEISGDYTIEAWTKFDFPGRGNTYSDFKWRWYHFDGVDWDQSRQFQNRIYKFRGDGKAWDWEVDSENGNYDYLMYADVDMDHPEVVNELRRWGEWYTNTLNLDGFRIDAVKHIKYSFTRDWLTHVRNATGKEMFAVAEFWKNDLGALENYLNKTNWNHSVFDVPLHYNLYNASNSGGNYDMAKLLNGTVVQKHPMHAVTFVDNHDSQPGESLESFVQEWFKPLAYALILTREQGAPSVFYGDYYGIPTHSVPAMKAKIDPILEARQNFAYGTQHDYFDHHNIIGWTREGNTTHPNSGLATIMSDGPGGEKWMYVGQNKAGQVWHDITGNKPGTVTINADGWANFSVNGGSVSIWVKR

SEQ ID NO: 16677 - protein, 485 aa, Unidentified
HHNGTNGTMMQYFEWHLPNDGNHWNRLRDDASNLRNRGITAIWIPPAWKGTSQNDVGYGAYDLYDLGEFNQKGTVRTKYGTRSQLESAIHALKNNGVQVYGDVVMNHKGGADATENVLAVEVNPNNRNQEISGDYTIEAWTKFDSPGRGNTYSDFKWRWYHFDGVDWDQSRQFQNRIYKFRGDGKAWDWEVDSENGNYDYLMYADVDMDHPEVVNELRRWGEWYTNTLNLDGFRIDAVKHIKYSFTRDWLTHVRNATGKEMFAVAEFWKNDLGALENYLNKTNWNHSVFDVPLHYNLYNASNSGGNYDMAKLLNGTVVQKHPMHAVTFVDNHDSQPGESLESFVQEWFKPLAYALILTREQGYPSVFYGDYYGIPTHSVPAMKAKIDPILEARQNFAYGTQHDYFDHHNIIGWTREGNTTHPNSGLATIMSDGPGGEKWMYVGQNKAGQVWHDITGNKPGTVTINADGWANFSVNGGSVSIWVKR

SEQ ID NO: 16678 - protein, 485 aa, Unidentified
HHNGTNGTMMQYFEWHLPNDGNHWNRLRDDASNLRNRGITAIWIPPAWKGTSQNDVGYGAYDLYDLGEFNQKGTVRTKYGTRSQLESAIHALKNNGVQVYGDVVMNHKGGADATENVLAVEVNPNNRNQEISGDYTIEAWTKFDFPGRGNTYSDFKWRWYHFDGVDWDQSRQFQNRIYKFRGDGKAWDWEVDSENGNYDYLMYADVDMDHPEVVNELRRWGEWYTNTLNLDGFRIDAVKHIKYSFTRDWLTHFRNATGKEMFAVAEFWKNDLGALENYLNKTNWNHSVFDVPLHYNLYNASNSGGNYDMAKLLNGTVVQKHPMHAVTFVDNHDSQPGESLESFVQEWFKPLAYALILTREQGYPSVFYGDYYGIPTHSVPAMKAKIDPILEARQNFAYGTQHDYFDHHNIIGWTREGNTTHPNSGLATIMSDGPGGEKWMYVGQNKAGQVWHDITGNKPGTVTINADGWANFSVNGGSVSIWVKR

SEQ ID NO: 16679 - protein, 485 aa, Unidentified
HHNGTNGTMMQYFEWHLPNDGNHWNRLRDDASNLRNRGITAIWIPPAWKGTSQNDVGYGAYDLYDLGEFNQKGTVRTKYGTRSQLESAIHALKNNGVQVYGDVVMNHKGGADATENVLAVEVNPNNRNQEISGDYTIEAWTKFDFPGRGNTYSDFKWRWYHFDGVDWDQSRQFQNRIYKFRGDGKAWDWEVDSENGNYDYLMYADVDMDHPEVVNELRRWGEWYTNTLNLDGFRIDAVKHIKYSFTRDWLTHVRNATGKEMFAVAEFWKNDLGALENYLNKTNWNHSVFDVPLHYNLYNASNSGGNYDMAKLLNGTVVQKHPMHAVTFVDNHDSQPGESMESFVQEWFKPLAYALILTREQGYPSVFYGDYYGIPTHSVPAMKAKIDPILEARQNFAYGTQHDYFDHHNIIGWTREGNTTHPNSGLATIMSDGPGGEKWMYVGQNKAGQVWHDITGNKPGTVTINADGWANFSVNGGSVSIWVKR

SEQ ID NO: 16680 - protein, 485 aa, Unidentified
HHNGTNGTMMQYFEWHLPNDGNHWNRLRDDASNLRNRGITAIWIPPAWKGTSQNDVGYGAYDLYDLGEFNQKGTVRTKYGTRSQLESAIHALKNNGVQVYGDVVMNHKGGADATENVLAVEVNPNNRNQEISGDYTIEAWTKFDFPGRGNTYSDFKWRWYHFDGVDWDQSRQFQNRIYKFRGDGKAWDWEVDSENGNYDYLMYADVDMDHPEVVNELRRWGEWYTNTLNLDGFRIDAVKHIKYSFTRDWLTHVRNATGKEMFAVAEFWKNDLGALENYLNKTNANHSVFDVPLHYNLYNASNSGGNYDMAKLLNGTVVQKHPMHAVTFVDNHDSQPGESLESFVQEWFKPLAYALILTREQGYPSVFYGDYYGIPTHSVPAMKAKIDPILEARQNFAYGTQHDYFDHHNIIGWTREGNTTHPNSGLATIMSDGPGGEKWMYVGQNKAGQVWHDITGNKPGTVTINADGWANFSVNGGSVSIWVKR

SEQ ID NO: 16681 - protein, 485 aa, Unidentified
HHNGTNGTMMQYFEWHLPNDGNHWNRLRDDASNLRNRGITVIWIPPAWKGTSQNDVGYGAYDLYDLGEFNQKGTVRTKYGTRSQLESAIHALKNNGVQVYGDVVMNHKGGADATENVLAVEVNPNNRNQEISGDYTIEAWTKFDFPGRGNTYSDFKWRWYHFDGVDWDQSRQFQNRIYKFRGDGKAWDWEVDSENGNYDYLMYADVDMDHPEVVNELRRWGEWYTNTLNLDGFRIDAVKHIKYSFTRDWLTHVRNATGKEMFAVAEFWKNDLGALENYLNKTNWNHSVFDVPLHYNLYNASNSGGNYDMAKLLNGTVVQKHPMHAVTFVDNHDSQPGESLESFVQEWFKPLAYALILTREQGYPSVFYGDYYGIPTHSVPAMKAKIDPILEARQNFAYGTQHDYFDHHNIIGWTREGNTTHPNSGLATIMSDGPGGEKWMYVGQNKAGQVWHDITGNKPGTVTINADGWANFSVNGGSVSIWVKR

SEQ ID NO: 16682 - protein, 485 aa, Unidentified
HHNGTNGTMMQYFEWHLPNDGNHWNRLRDDASNLRNRGITAIWIPPAWKGTSQNDVGYGAYDLYDLGEFNQKGTVRTKYGTRSQLESAIHALKNNGVQVYGDVVMNHKGGADATENVLAVEVNPNNRNQEISGDYTIEAWTKFDFPGRGNTYSDFKWRWYHFDGVDWDQSRQFQNRIYKFRGDGKAWDWEVDSENGNYDYLMYADVDMDHPEVVNELRRWGEWYTNTLNLDGFRIDAVKHIKYSFTRDWLTHVRNATGKEDFAVAEFWKNDLGALENYLNKTNWNHSVFDVPLHYNLYNASNSGGNYDMAKLLNGTVVQKHPMHAVTFVDNHDSQPGESLESFVQEWFKPLAYALILTREQGYPSVFYGDYYGIPTHSVPAMKAKIDPILEARQNFAYGTQHDYFDHHNIIGWTREGNTTHPNSGLATIMSDGPGGEKWMYVGQNKAGQVWHDITGNKPGTVTINADGWANFSVNGGSVSIWVKR

SEQ ID NO: 16683 - protein, 485 aa, Unidentified
HHNGTNGTMMQYFEWHLPNDGNHWNRLRDDASNLRNRGITAIWIPPAWKGTSQNDVGYGAYDLYDLGEFNQKGTVRTKYGTRSQLESAIHALKNNGVQVYGDVVMNHKGGADATENVLAVEVNPNNRNQEISGDYTIEAWTKFDFPGRGNTYSDFKWRWYHFDGVDWDQSRQFQNRIYKFYGDGKAWDWEVDSENGNYDYLMYADVDMDHPEVVNELRRWGEWYTNTLNLDGFRIDAVKHIKYSFTRDWLTHVRNATGKEMFAVAEFWKNDLGALENYLNKTNWNHSVFDVPLHYNLYNASNSGGNYDMAKLLNGTVVQKHPMHAVTFVDNHDSQPGESLESFVQEWFKPLAYALILTREQGYPSVFYGDYYGIPTHSVPAMKAKIDPILEARQNFAYGTQHDYFDHHNIIGWTREGNTTHPNSGLATIMSDGPGGEKWMYVGQNKAGQVWHDITGNKPGTVTINADGWANFSVNGGSVSIWVKR

SEQ ID NO: 16684 - protein, 483 aa, Bacillus sp.
HHNGTNGTMMQYFEWHLPNDGNHWNRLRDDASNLRNRGITAIWIPPAWKGTSQNDVGYGAYDLYDLGEFNQKGTVRTKYGTRSQLESAIHALKNNGVQVYGDVVMNHKGGADATENVLAVEVNPNNRNQEISGDYTIEAWTKFDFPGRGNTYSDFKWRWYHFDGVDWDQSRQFQNRIYKFRGKAWDWEVDSEFGNYDYLMYADVDMDHPEVVNELRRWGEWYTNTLNLDGFRIDAVKHIKYSFTRDWLTHVRNATGKEMFAVAEFWKNDLGALENYLNKTNWNHSVFDVPLHYNLYNASNSGGNYDMAKLLNGTVVQKHPMHAVTFVDNHDSQPGESLESFVQEWFKPLAYALILTREQGYPSVFYGDYYGIPTHSVPAMKAKIDPILEARQNFAYGTQHDYFDHHNIIGWTREGNTTHPNSGLATIMSDGPGGEKWMYVGQNKAGQVWHDITGNKPGTVTINADGWANFSVNGGSVSIWVKR

SEQ ID NO: 16685 - protein, 485 aa, Unidentified
HHNGTNGTMMQYFEWHLPNDGNHWNRLRDDASNLRNRGITAIWIPPAWKGTSQNDVGYGAYDLYDLGEFNQKGTVRTKYGTRSQLESAIHALKNNGVQVYGDVVMNHKGGADATENVLAVEVNPNNRNQEIYGDYTIEAWTKFDFPGRGNTYSDFKWRWYHFDGVDWDQSRQFQNRIYKFRGDGKAWDWEVDSENGNYDYLMYADVDMDHPEVVNELRRWGEWYTNTLNLDGFRIDAVKHIKYSFTRDWLTHVRNATGKEMFAVAEFWKNDLGALENYLNKTNWNHSVFDVPLHYNLYNASNSGGNYDMAKLLNGTVVQKHPMHAVTFVDNHDSQPGESLESFVQEWFKPLAYALILTREQGYPSVFYGDYYGIPTHSVPAMKAKIDPILEARQNFAYGTQHDYFDHHNIIGWTREGNTTHPNSGLATIMSDGPGGEKWMYVGQNKAGQVWHDITGNKPGTVTINADGWANFSVNGGSVSIWVKR

SEQ ID NO: 16686 - protein, 485 aa, Unidentified
HHNGTNGTMMQYFEWHLPNDGNHWNRLRDDASNLRNRGITAIWIPPAWKGTSQNDVGYGAYDLYDLGEFNQKGTVRTKYGTRSQLESAIHALKNNGVQVYGDVVMNHKGGADATENVLAVEVNPNNRNQEISGDYTIEAWTKFDFPGRGNTYSDFKWRWYHFDGVDWDQSRQFQNRIYKFRGDGKAWDWEVDSENGNYDYLMYADVDMDHPEVVNELRRWGEWYTNTLNLDGFRIDAVKHIKYSFTRDWLTHVRNATGKEMFAVAEFWKNDLGALENYLNKTNWNHSVFDVPLHYNLYNASNSGGNYDMAKLLNGTVVCKHPMHAVTFVDNHDSQPGESLESFVQEWFKPLAYALILTREQGYPSVFYGDYYGIPTHSVPAMKAKIDPILEARQNFAYGTQHDYFDHHNIIGWTREGNTTHPNSGLATIMSDGPGGEKWMYVGQNKAGQVWHDITGNKPGTVTINADGWANFSVNGGSVSIWVKR

SEQ ID NO: 16687 - protein, 485 aa, Unidentified
HHNGTNGTMMQYFEWHLPNDGNHWNRLRDDASNLRNRGITAIWIPPAWKGTSQNDVGYGAYDLYDLGEFNQKGTVRTKYGTRSQLESAIHALKNNGVQVYGDVVMNHKGGADATENVLAVEVNPNNRNQEISGDYTIEAWTKFDFPGRGNTYSDFKWRWYHFDGVDWDQSRQFQNRIYKFRGDGKAWDWEVDSENGNYDYLMYADVDMDHPEVVNELRRWGEWYTNTLNLDGFRIDAVKHIKYSFTRDWLTHVRNATGKEMFAVAEFWKNDLGALENYLNKTNWNHSVFDVPLHYNLYNASNSGGNYDMAKLLNGTVVQKHPEHAVTFVDNHDSQPGESLESFVQEWFKPLAYALILTREQGYPSVFYGDYYGIPTHSVPAMKAKIDPILEARQNFAYGTQHDYFDHHNIIGWTREGNTTHPNSGLATIMSDGPGGEKWMYVGQNKAGQVWHDITGNKPGTVTINADGWANFSVNGGSVSIWVKR

SEQ ID NO: 16688 - protein, 485 aa, Bacillus sp.
HHNGTNGTMMQYFEWHLPNDGNHWNRLRDDASNLRNRGITAIWIPPAWKGTSQNDVGYGAYDLYDLGEFNQKGTVRTKYGTRSQLESAIHALKNNGVQVYGDVVMNHKGGADATENVLAVEVNPNNRNQEISGDYTIEAWTKFDFPGRGNTYSDFKWRWYHFDGVDWDQSRQFQNRIYKFRGDGKAWDWEVDSENGNYDYLMYADVDMDHPEVVNELRRWGEWYTNTLNLDGFRIDAVKHIKYSFTRDWLTHVRNATGKEMFAVAEFWKNDLGALENYLNKTNWNHSVFDVPLHYNLYNASNSGGNYDMAKLLNGTVVQKHPMHAVTFVDNHDSQPGESLESFVQEWFKPLAYALILTREQGYPSVFYGDYYGIPTHSVPAMKAKIDPILEARQNFAYGTQHDYFDHHNIIGWTREGNTTHPNSGLATIMSDGPGGEKWMYVGQDKAGQVWHDITGNKPGTVTINADGWANFSVNGGSVSIWVKR

SEQ ID NO: 16689 - protein, 485 aa, Unidentified
HHNGTNGTMMQYFEWHLPNDGNHWNRLRDDASNLRNRGIKAIWIPPAWKGTSQNDVGYGAYDLYDLGEFNQKGTVRTKYGTRSQLESAIHALKNNGVQVYGDVVMNHKGGADATENVLAVEVNPNNRNQEISGDYTIEAWTKFDFPGRGNTYSDFKWRWYHFDGVDWDQSRQFQNRIYKFRGDGKAWDWEVDSENGNYDYLMYADVDMDHPEVVNELRRWGEWYTNTLNLDGFRIDAVKHIKYSFTRDWLTHVRNATGKEMFAVAEFWKNDLGALENYLNKTNWNHSVFDVPLHYNLYNASNSGGNYDMAKLLNGTVVQKHPMHAVTFVDNHDSQPGESLESFVQEWFKPLAYALILTREQGYPSVFYGDYYGIPTHSVPAMKAKIDPILEARQNFAYGTQHDYFDHHNIIGWTREGNTTHPNSGLATIMSDGPGGEKWMYVGQNKAGQVWHDITGNKPGTVTINADGWANFSVNGGSVSIWVKR

SEQ ID NO: 16690 - protein, 485 aa, Unidentified
HHNGTNGTMMQYFEWHLPNDGNHWNRLRDDASNLRNRGITAIWIPPAWKGTSQNDVGYGAYDLYDLGEFNQKGTVRTKYGTRSQLESAIHALKNNGVQVYGDVVMNHKGGADATENVLAVEVNPNNRNQEISGDYTIEAWTKFDFPGRGNTYSDFKWRWYHFDGVDWDQSRQFQNRIYKFRGDGKAWDWEVDSENGNYDYLMYADVDMDHPEVVNELRRWGEWYTNTLNLDGFRIDAVKHIKYSFTRDWLTHVRNATGKEMFAVAEFWKNDLGALENYLNKTNWNHSVFDVPLHYNLYNASNSGGNYDMAKLLNGTVVQKHPMHAVTFVDNHDSQPGESLESFVQEWFKPLAYALILTREQGYPSVFYGDYYGIPTHSVPAMKAKIDPILEARQNFAYGTQHDYFDHHNIIGWTREGNTTHPNSGLATIMSDGPGGEVWMYVGQNKAGQVWHDITGNKPGTVTINADGWANFSVNGGSVSIWVKR

SEQ ID NO: 16691 - protein, 485 aa, Unidentified
HHNGTNGTMMQYFEWHLPNDGNHWNRLRDDASNLRNRGITAIWIPPAWKGTSQNDVGYGAYDLYDLGEFNQKGTVRTKYGTRSQLESAIHALKNNGVQVYGDVVMNHKGGADATENVLAVEVNPNNRNQEISGDYTNEAWTKFDFPGRGNTYSDFKWRWYHFDGVDWDQSRQFQNRIYKFRGDGKAWDWEVDSENGNYDYLMYADVDMDHPEVVNELRRWGEWYTNTLNLDGFRIDAVKHIKYSFTRDWLTHVRNATGKEMFAVAEFWKNDLGALENYLNKTNWNHSVFDVPLHYNLYNASNSGGNYDMAKLLNGTVVQKHPMHAVTFVDNHDSQPGESLESFVQEWFKPLAYALILTREQGYPSVFYGDYYGIPTHSVPAMKAKIDPILEARQNFAYGTQHDYFDHHNIIGWTREGNTTHPNSGLATIMSDGPGGEKWMYVGQNKAGQVWHDITGNKPGTVTINADGWANFSVNGGSVSIWVKR

SEQ ID NO: 16692 - protein, 485 aa, Unidentified
HHNGTNGTMMQYFEWHLPNDGNHWNRLRDDASNLRNRGITAIWIPPAWKGTSQNDVGYGAYDLYDLGEFNQKGTVRTKYGTRSQLESAIHALKNNGVQVYGDVVMNHKGGADATENVLAVEVNPNNRNQEISGDYTIEAWTKFDFPGRGNTYSDFKWRWYHFDGVDWDQSRQFQNRIYKFRGDGKAWDWEVDSENGNYDYLMYADVDMDHPEVVNELRRWGEWYTNTLNLDGFRIDAVKHIKYSFTRDWLTHVRNATGKEMFAVAEFWKNDLGALENYLNKTNWNHSVFDVPLHYNLYNASNSGGNYDMAKLLNGTVVQKHPMHAVTFVDNHDSQPGESLESFVQEWFKPLAYALILTREQGYPSVFYGDYYGIPTHSVPAMKAKIDPILEARQNFAYGTQHDYFDHHNIIGWTREGNTTHPNSGLATIMSDGPGGEKLMYVGQNKAGQVWHDITGNKPGTVTINADGWANFSVNGGSVSIWVKR

SEQ ID NO: 16693 - protein, 485 aa, Bacillus sp.
HHNGTNGTMMQYFEWHLPNDGNHWNRLRDDASNLRNRGITAIWIPPAWKGTSQNDVGYGAYDLYDLGEFNQKGTVRTKYGTRSQLESAIHALKNNGVQVYGDVVMNHKGGADATENVLAVEVNPNNRNQEISGDYTIEAWTKFDFPGRGNTYSDFKWRWYHFDGVDWDQSRQFQNRIYKFRGDGKAWDWEVDSENGNYDYLMYADDDMDHPEVVNELRRWGEWYTNTLNLDGFRIDAVKHIKYSFTRDWLTHVRNATGKEMFAVAEFWKNDLGALENYLNKTNWNHSVFDVPLHYNLYNASNSGGNYDMAKLLNGTVVQKHPMHAVTFVDNHDSQPGESLESFVQEWFKPLAYALILTREQGYPSVFYGDYYGIPTHSVPAMKAKIDPILEARQNFAYGTQHDYFDHHNIIGWTREGNTTHPNSGLATIMSDGPGGEKWMYVGQNKAGQVWHDITGNKPGTVTINADGWANFSVNGGSVSIWVKR

SEQ ID NO: 16694 - protein, 485 aa, Unidentified
HHNGTNGTMMQYFEWHLPNDGNHWNRLRDDASNLRNRGITAIWIPPAWKGTSQNDVGYGAYDLYDLGEFNQKGTVRTKYGTRSQLESAIHALKNNGVQVYGDVVMNHKGGADATENVLAVEVNPNNRNQEISGDYTIEAWTKFDFPGRGNTYSDFKWRWYHFDGVDWDQSRQFQNRIYKFRGDGKAWDWEVDSENGNYDYLMYADVDMDHPEVVNELRRWGEWYTNTLNLDGFRIDAVKHIKYSFTRDWLTHVRNATGKEMFAVAEFWKNDLGALENYLNKTNWNHSVFDVPLHYNLYNASNSGGNYDMAKLLNGTVVQKHPMHAVTFVDNHDSQPGESLESFVQEWFKPLAYALILTREQGYPSVFYGDYYGIPTHSVPAMKAKIDPILEARQNFAYGTQHDYFDHHNIIGWTREGNTTHPNSGLATIMSDGPGGEKWMYVGQNKAGQVWHDITGLKPGTVTINADGWANFSVNGGSVSIWVKR

SEQ ID NO: 16695 - protein, 485 aa, Unidentified
HHNGTNGTMMQYFEWHLPNDGNHWNRLRDDASNLRNRGITAIWIPPAWKGTSQNDVGYGAYDLYDLGEFNQKGTVRTKYGTRSQLESAIHALKNNGVQVYGDVVMNHKGGADATENVLAVEVNPNNRNQEISGDYTIEAWTKFDFPGRGNTYSDFKWRWYHFDGVDWDQSRQFQNRIYKFRGDGKAWDWEVDSENGNYDYLMYADVDMDHPEVVNELRRWGEWYTNTLNLDGFRIDAVKHIKYSFTRDWLTHVRNATGKEMFAVAEFWKNDLGALENYLNKTNWNHSVFDVPLHYNLYNASNSGGNYDMAKLLNGTVVQKHPMHAVTFVDNHDSQPGESLESFVQEWFKPLAYALILTREQGYPSVFYGDYCGIPTHSVPAMKAKIDPILEARQNFAYGTQHDYFDHHNIIGWTREGNTTHPNSGLATIMSDGPGGEKWMYVGQNKAGQVWHDITGNKPGTVTINADGWANFSVNGGSVSIWVKR

SEQ ID NO: 16696 - protein, 485 aa, Unidentified
HHNGTNGTMMQYFEWHLPNDGNHWNRLRDDASNLRNRGITAIWIPPAWKGTSQNDVGYGAYDLYDLGEFNQKGTVRTKYGTRSQLESAIHALKNNGVQVYGDVVMNHKGGADATENVLAVEVNPNNRNQEISGDYTIEAWTKFDFPGRGNTYSDFKWRWYHFDGVDWDQSRQFQNRIYKFRGDGKAWDWEVDSENGNYDYLMYADVDMDHPEVVNELRRWGEWYTNTLNLDGFRIDAVKHIKYSFTRDWLTHVRNATGKEMFAVAEFWKNDLGALENYLNKTNWNHSVFDVPLHYNLYNASNSGGNYDMAKLLNGTVVQKHPMHAVTFVDNHDSQPGESLESFVQEWFKPLAYALILTREQGYPSVFYGDYYGIPTHSVPAMKAKIDPILEARQNFAYGTQHDYFDHHNIIGWTREGNTTHPNSGLATIMSDAPGGEKWMYVGQNKAGQVWHDITGNKPGTVTINADGWANFSVNGGSVSIWVKR

SEQ ID NO: 16697 - protein, 485 aa, Unidentified
HHNGTNGTMMQYFEWHLPNDGNHWNRLRDDASNLRNRGITAIWIPPAWKGTSQNDVGYGAYDLYDLGEFNQKGTVRTKYGTRSQLESAIHALKNNGVQVYGDVVMNHKGGADATENVLAVEVNPNNRNQEISGDYTIEAWTKFDFPGRGNTYSDFKWRWYHFDGVDWDQSRQFQNRIYKFRGDGKAWDWEVDSENGNYDYLMYADVDMDHPEVVNELRRWGEWYTNTLNLDGFRIDAVKHIKYSFTRDWLTHVRNATGKEMFAVAEFWKNDLGALENYLNKTNWNHSVFDVPLHYNLYNASNSGGNYDMAKLLPGTVVQKHPMHAVTFVDNHDSQPGESLESFVQEWFKPLAYALILTREQGYPSVFYGDYYGIPTHSVPAMKAKIDPILEARQNFAYGTQHDYFDHHNIIGWTREGNTTHPNSGLATIMSDGPGGEKWMYVGQNKAGQVWHDITGNKPGTVTINADGWANFSVNGGSVSIWVKR

SEQ ID NO: 16698 - protein, 485 aa, Unidentified
HHNGTNGTMMQYFEWHLPNDGNHWNRLRDDASNLRNRGITAIWIPPAWKGTSQNDVGYGAYDLYDLGEFNQKGTVRTKYGTRSQLESAIHALKNNGVQVYGDVVMNHKGGADATENVLAVEVNPNNRNQEISGDYTIEAWTKFDFPGRGNTYSDFKWRWYHFDGVDWDQSRQFQNRIYKFRGDGKAWDWEVDSENGNYDYLMYADVDMDHPEVVNELRRWGEWYTNTLNLDGFRIDAVKHIKYSFTRDWLTHVRNATGKEMFAVAEFWKNDLGALENYLNKTNWNHSVFDVPLHYNLYNASNSGGNYDMAKLLNGTVVQKHPMHAVTFVDNHDSQPGESLESFVQEWFKPLAYALILTREQGYPSVFYGDYYGIPTHSVPAMKAKIDPILEARQNFAYGTQHDYFDHHNIIGWTREGNTTHPNSGLATIMSDGPGGEKWMYVGQNKAGQVWHDITGNKPGTVTINADGWAAFSVNGGSVSIWVKR

SEQ ID NO: 16699 - protein, 485 aa, Unidentified
HHNGTNGTMMQYFEWHLPNDGNHWNRLRDDASNLRNRGITAIWIPPAWKGTSQNDVGYGAYDLYDLGEFNQKGTVRTKYGTRSQLESAIHALKNNGVQVYGDVVMNHKGGADATENVLAVEVNPNNRNQEISGDYTIEAWTKFDFPGRGNTYSDFKWRWYHFDGVDWDQSRQFQNRIYKFRGDGKAWDWEVDSENGNYDYLMYADVDMDHPEVVNELRRWGEWYTNTLNLDGFRIDAVKHIKYSFTRDWLTHVRNATGKEMFAVAEFWKNDLGALENYLNKTNWNHSVFDVPLHYNLYNASNSGGNYDMAKLLNGTVVQKHPMHAVTFVDNHDSQPGESLESFVQEWFKPLAYALILTREQGYPSVFYGDYYGIPTHSVPAMKAKIDPILEARQNFAYGTQHDYFDHHNIIGWTRLGNTTHPNSGLATIMSDGPGGEKWMYVGQNKAGQVWHDITGNKPGTVTINADGWANFSVNGGSVSIWVKR

SEQ ID NO: 16700 - protein, 485 aa, Unidentified
HHNGTNGTMMQYFEWHLPNDGNHWNRLRDDASNLRNRGITAIWIPPAWKGTSQNDVGYGAYDLYDLGEFNQKGTVRTKYGTRSQLEGAIHALKNNGVQVYGDVVMNHKGGADATENVLAVEVNPNNRNQEISGDYTIEAWTKFDFPGRGNTYSDFKWRWYHFDGVDWDQSRQFQNRIYKFRGDGKAWDWEVDSENGNYDYLMYADVDMDHPEVVNELRRWGEWYTNTLNLDGFRIDAVKHIKYSFTRDWLTHVRNATGKEMFAVAEFWKNDLGALENYLNKTNWNHSVFDVPLHYNLYNASNSGGNYDMAKLLNGTVVQKHPMHAVTFVDNHDSQPGESLESFVQEWFKPLAYALILTREQGYPSVFYGDYYGIPTHSVPAMKAKIDPILEARQNFAYGTQHDYFDHHNIIGWTREGNTTHPNSGLATIMSDGPGGEKWMYVGQNKAGQVWHDITGNKPGTVTINADGWANFSVNGGSVSIWVKR

SEQ ID NO: 16701 - protein, 485 aa, Unidentified
HHNGTNGTMMQYFEWHLPNDGNHWNRLRDDASNLRNRGITAIWIPPAWKGTSQNDVGYGAYDLYDLGEFNQKGTVRTKYGTRSQLESAIHALKNNGVQVYGDVVMNHKGGADATENVLAVEVNPNNRNQEISGDYTIEAWTKFDFPGRGNTYSDFKWRWYHFDGVDWDQSRQFQNRIYKFRGDGKAWDWEVDSENGNYDYLMYADVDMDHPEVVNELRRWGEWYTNTLNLDGFRIDAVKHIKYSFTRDWLTHVRNATGKEMFAVAEFWKNDLGALENYLNKTNWNHSVFDVPLHYNLYNASNSGGNYDMAKLLNGTVVQKHPMHAVTFVDNHDSQPGESLESFVQEWFKPLAYALILTREQGYPSVFYGDYYGIPTHSVPAMKAKIDPILEARQNFAYGTQHDYFDHHNIIGWTREGNTTHPNSGLATIMSDGPGGEKWMYVGQNKAGQVWHDITGNKPGTVTINADGWANFSVHGGSVSIWVKR

SEQ ID NO: 16702 - protein, 485 aa, Unidentified
HHNGTNGTMMQYFEWHLPNDGNHWNRLRDDASNLRNRGITAIWIPPAWKGTSQNDVGYGAYDLYDLGEFNQKGTVRTKYGTRSQLESAIHALKNNGVQVYGDVVMNHKGGADATENVLAVEVNPNNRNQEISGDYTIEAWTKFDFPGRGNTYSDFKWRWYHFDGVDWDQSRQFQNRIYKFRGDGKAWDWEVDSENGNYDYLMYADVDMDHPEVVNELRRWGEWYTNTLNLDGFRIDAVKHIKYSFTRDWLTHVRNATGKEMFAVAEFWKNDLGALENYLNKTNWNHSVFDVPLHYNLYNASNSGGNYDMAKLLNGTVVQKHPMHAVTFVDNHDSQPGESLESFVQEWFKPLAYALILTREQGYPSVFYGDYYGIPTHSVPAMKAKIDPILEARQNFAYGTQHDYFDHHNIIGWTREGNTTHPNSGLATIMSDGPGGEKWMYVGQNKAGQVWHDITGNKPGTVTICADGWANFSVNGGSVSIWVKR

SEQ ID NO: 16703 - protein, 485 aa, Unidentified
HHNGTNGTMMQYFEWHLPNDGNHWNRLRDDASNLRNRGITAIWIPPAWKGTSQNDVGYGAYDLYDLGEFNQKGTVRTKYGTRSQLESAIHALKNNGVQVYGDVVMNHKGGADATENVLAVEVNPNNRNQEISGDYTIEADTKFDFPGRGNTYSDFKWRWYHFDGVDWDQSRQFQNRIYKFRGDGKAWDWEVDSENGNYDYLMYADVDMDHPEVVNELRRWGEWYTNTLNLDGFRIDAVKHIKYSFTRDWLTHVRNATGKEMFAVAEFWKNDLGALENYLNKTNWNHSVFDVPLHYNLYNASNSGGNYDMAKLLNGTVVQKHPMHAVTFVDNHDSQPGESLESFVQEWFKPLAYALILTREQGYPSVFYGDYYGIPTHSVPAMKAKIDPILEARQNFAYGTQHDYFDHHNIIGWTREGNTTHPNSGLATIMSDGPGGEKWMYVGQNKAGQVWHDITGNKPGTVTINADGWANFSVNGGSVSIWVKR

SEQ ID NO: 16704 - protein, 485 aa, Unidentified
HHNGTNGTMMQYFEWHLPNDGNHWNRLRDDASNLRNRGITAIWIPPAWKGTSQNDVGYGAYDLYDLGEFNQKGTVRTKYGTRSQLESAIHALKNNGVQVYGDVVMNHKGGADATENVLAVEVNPNNRNQEISGDYTIEAWTKFDFPGRGNTYSDFKWRWYHFDGVDWDQSRQFQNRIYKFRGDGKAWDWEVDSENGNYDYLMYADVDMDHPEVVNELRRWGEWYTNTLNLDGFRIDAVKHIKYSFTRDWLTHVRNATGKEMFAVAEFWKNDLGALENYLNKTNGNHSVFDVPLHYNLYNASNSGGNYDMAKLLNGTVVQKHPMHAVTFVDNHDSQPGESLESFVQEWFKPLAYALILTREQGYPSVFYGDYYGIPTHSVPAMKAKIDPILEARQNFAYGTQHDYFDHHNIIGWTREGNTTHPNSGLATIMSDGPGGEKWMYVGQNKAGQVWHDITGNKPGTVTINADGWANFSVNGGSVSIWVKR

SEQ ID NO: 16705 - protein, 485 aa, Unidentified
HHNGTNGTMMQYFEWHLPNDGNHWNRLRDDASNLRNRGITAIWIPPAWKGTSQNDVGYGAYDLYDLGEFNQKGTVRTKYGTRSQLESAIHALKNNGVQVYGDVVMNHKGGADATENVLAVEVNPNNRNQEISGDYTIEAWTKFDFPGRGNTYSDFKWRWYHFDGVDWDQSRQFQNRIYKFRGDGKAWDWEVDSENGNYDYLMYADVDMDHPEVVNELRRWGEWYTNTLNLDGFRIDAVKHIKYSFTRDWLTHVRNATGKEMFAVAEFWKNDLGALENYLNKTNWNHSVFDVPLHYNLYNASNSGGNYDMAKLLNGTVVQKHPMPAVTFVDNHDSQPGESLESFVQEWFKPLAYALILTREQGYPSVFYGDYYGIPTHSVPAMKAKIDPILEARQNFAYGTQHDYFDHHNIIGWTREGNTTHPNSGLATIMSDGPGGEKWMYVGQNKAGQVWHDITGNKPGTVTINADGWANFSVNGGSVSIWVKR

SEQ ID NO: 16706 - protein, 485 aa, Bacillus sp.
HHNGTNGTMMQYFEWHLPNDGNHWNRLRDDASNLRNRGITAIWIPPAWKGTSQNDVGYGAYDLYDLGEFNQKGTVRTKYGTRSQLESAIHALKNNGVQVYGDVVMNHKGGADATENVLAVEVNPNNRNQEISGDYTIEAWTKFDFPGRGNTYSDFKWRWYHFDGVDWDQSRQFQNRIYKFRGDGKAWDWEVDSENGNYDYLMYADVDMDHPEGVNELRRWGEWYTNTLNLDGFRIDAVKHIKYSFTRDWLTHVRNATGKEMFAVAEFWKNDLGALENYLNKTNWNHSVFDVPLHYNLYNASNSGGNYDMAKLLNGTVVQKHPMHAVTFVDNHDSQPGESLESFVQEWFKPLAYALILTREQGYPSVFYGDYYGIPTHSVPAMKAKIDPILEARQNFAYGTQHDYFDHHNIIGWTREGNTTHPNSGLATIMSDGPGGEKWMYVGQNKAGQVWHDITGNKPGTVTINADGWANFSVNGGSVSIWVKR

SEQ ID NO: 16707 - protein, 485 aa, Bacillus sp.
HHNGTNGTMMQYFEWHLPNDGNHWNRLRDDASNLRNRGITAIWIPPAWKGTSQNDVGYGAYDLYDLGEFNQKGTVRTKYGTRSQLESAIHALKNNGVQVYGDVVMNHKGGADATENVLAVEVNPNNRNQEISGDYTIEAWTKFDFPGRGNTYSDFKWRWYHFDGVDWDQSRQFQNRIYKFRGDGKAWDWEVDSENGNYDYLMYADHDMDHPEVVNELRRWGEWYTNTLNLDGFRIDAVKHIKYSFTRDWLTHVRNATGKEMFAVAEFWKNDLGALENYLNKTNWNHSVFDVPLHYNLYNASNSGGNYDMAKLLNGTVVQKHPMHAVTFVDNHDSQPGESLESFVQEWFKPLAYALILTREQGYPSVFYGDYYGIPTHSVPAMKAKIDPILEARQNFAYGTQHDYFDHHNIIGWTREGNTTHPNSGLATIMSDGPGGEKWMYVGQNKAGQVWHDITGNKPGTVTINADGWANFSVNGGSVSIWVKR

SEQ ID NO: 16708 - protein, 485 aa, Unidentified
HHNGTNGTMMQYFEWHLPNDGNHWNRLRDDASNLRNRGITAIWIPPAWKGTSQNDVGYGAYDLYDLGEFNQKGTVRTKYGTRSQLESAIHALKNNGVQVYGDVVMNHKGGADATENVLAVEVNPNNRNQEISGDYTIEAWTKFDFPGRGNTYSDFKWRWYHFDGVDWDQSRQFQNRIYKFRGDGKAWDWEVDSENGNYDYLMYADVDMDHPEVVNELRRWGEWYTNTLNLDGFRIDAVKHIKYSFTRDWLTHVRNATGKEMFAVAEFWKNDLGALENYLNKTNWNHSVFDVPLHYNLYNASNSGGNYDMAKLLNGTVVQWHPMHAVTFVDNHDSQPGESLESFVQEWFKPLAYALILTREQGYPSVFYGDYYGIPTHSVPAMKAKIDPILEARQNFAYGTQHDYFDHHNIIGWTREGNTTHPNSGLATIMSDGPGGEKWMYVGQNKAGQVWHDITGNKPGTVTINADGWANFSVNGGSVSIWVKR

SEQ ID NO: 16709 - protein, 485 aa, Unidentified
HHNGTNGTMMQYFEWHLPNDGNHWNRLRDDASNLRNRGITAIWIPPAWKGTSQNDVGYGAYDLYDLGEFNQKGTVRTKYGTRSQLESAIHALKNNGVQVYGDVVMNHKGGADATENVLAVEVNPNNRNQEISGDYTIEAWTKFDFPGRGNTYSDFKWRWYHFDGVDWDQSRQFQNRPYKFRGDGKAWDWEVDSENGNYDYLMYADVDMDHPEVVNELRRWGEWYTNTLNLDGFRIDAVKHIKYSFTRDWLTHVRNATGKEMFAVAEFWKNDLGALENYLNKTNWNHSVFDVPLHYNLYNASNSGGNYDMAKLLNGTVVQKHPMHAVTFVDNHDSQPGESLESFVQEWFKPLAYALILTREQGYPSVFYGDYYGIPTHSVPAMKAKIDPILEARQNFAYGTQHDYFDHHNIIGWTREGNTTHPNSGLATIMSDGPGGEKWMYVGQNKAGQVWHDITGNKPGTVTINADGWANFSVNGGSVSIWVKR

SEQ ID NO: 16710 - protein, 485 aa, Unidentified
HHNGTNGTMMQYFEWHLPNDGNHWNRLRDDASNLRNRGITAIWIPPAWKGTSQNDVGYGAYDLYDLGEFNQKGTVRTKYGTRSQLESAIHALKNNGVQVYGDVVMNHKGGADATENVLAVEVNPNNRNQEISGDYTIEAWTKFDFPGRGNTYSDFKWRWYHFDGVDWDQSRQFQNRIYKFRGDGKAWDWEVDSENGNYDYLMYADVDMDHPEVVNELRRWGEWYTNTLNLDGFRIDAVKHIKYSFTRDWLTHVRNATGKEMFAVAEFWKNDLGALENYLNSTNWNHSVFDVPLHYNLYNASNSGGNYDMAKLLNGTVVQKHPMHAVTFVDNHDSQPGESLESFVQEWFKPLAYALILTREQGYPSVFYGDYYGIPTHSVPAMKAKIDPILEARQNFAYGTQHDYFDHHNIIGWTREGNTTHPNSGLATIMSDGPGGEKWMYVGQNKAGQVWHDITGNKPGTVTINADGWANFSVNGGSVSIWVKR

SEQ ID NO: 16711 - protein, 485 aa, Bacillus sp.
HHNGTNGTMMQYFEWHLPNDGNHWNRLRDDASNLRNRGITAIWIPPAWKGTSQNDVGYGAYDLYDLGEFNQKGTVRTKYGTRSQLESAIHALKNNGVQVYGDVVMNHKGGADATENVLAVEVNPNNRNQEISGDYTIEAWTKFDFPGRGNTYSDFKWRWYHFDGVDWDQSRQFQNRIYKFRGXXKAWDWEVDSENGLYDYLMYADVDMDHPEVVNELRRWGEWYTNTLNLDGFRIDAVKHIKYSFTRDWLTHVRNATGKEMFAVAEFWKNDLGALENYLNKTNWNHSVFDVPLHYNLYNASNSGGNYDMAKLLNGTVVQKHPMHAVTFVDNHDSQPGESLESFVQEWFKPLAYALILTREQGYPSVFYGDYYGIPTHSVPAMKAKIDPILEARQNFAYGTQHDYFDHHNIIGWTREGNTTHPNSGLATIMSDGPGGEKWMYVGQNKAGQVWHDITGNKPGTVTINADGWANFSVNGGSVSIWVKR

SEQ ID NO: 16712 - protein, 485 aa, Unidentified
HHNGTNGTMMQYFEWHLPNDGNHWNRLRDDASNLRNRGITAIWIPPAWKGTSQNDVGYGAYDLYDLGEFNQKGTVRTKYGTRSQLESAIHALKNNGVQVYGDVVMNHKGGADATENVLAVEVNPNNRNQEISGDYTIEAWTKFDFPGRGNTYSDFKWRWYHFDGVDWDQSRQFQNRIYKFRGDGKAWDWEVDSENGNYDYLMYADVDMDHPEVVNELRRWGEWYTNTLNLDGFRIDAVKHIKYSFTRDWLTHVRNATGKEMFAVAEFWKNDLGALENYLNKTNWNHSVFDVPLHYNLYNASNSGGNYDMAKLLNGTVVQKHPMHAVTFVDNHDSQPGESLESFVQAWFKPLAYALILTREQGYPSVFYGDYYGIPTHSVPAMKAKIDPILEARQNFAYGTQHDYFDHHNIIGWTREGNTTHPNSGLATIMSDGPGGEKWMYVGQNKAGQVWHDITGNKPGTVTINADGWANFSVNGGSVSIWVKR

SEQ ID NO: 16713 - protein, 485 aa, Unidentified
HHNGTNGTMMQYFEWHLPNDGNHWNRLRDDASNLRNRGITAIWIPPAWKGTSQNDVGYGAYDLYDLGEFNQKGTVRTKYGTRSQLESAIHALKNNGVQVYGDVVMNHKSGADATENVLAVEVNPNNRNQEISGDYTIEAWTKFDFPGRGNTYSDFKWRWYHFDGVDWDQSRQFQNRIYKFRGDGKAWDWEVDSENGNYDYLMYADVDMDHPEVVNELRRWGEWYTNTLNLDGFRIDAVKHIKYSFTRDWLTHVRNATGKEMFAVAEFWKNDLGALENYLNKTNWNHSVFDVPLHYNLYNASNSGGNYDMAKLLNGTVVQKHPMHAVTFVDNHDSQPGESLESFVQEWFKPLAYALILTREQGYPSVFYGDYYGIPTHSVPAMKAKIDPILEARQNFAYGTQHDYFDHHNIIGWTREGNTTHPNSGLATIMSDGPGGEKWMYVGQNKAGQVWHDITGNKPGTVTINADGWANFSVNGGSVSIWVKR

SEQ ID NO: 16714 - protein, 485 aa, Unidentified
HHNGTNGTMMQYFEWHLPNDGNHWNRLRDDASNLRNRGITAIWIPPAWKGTSQNDVGYGAYDLYDLGEFNQKGTVRTKYGTRSQLESAIHALKNNGVQVYGDVVMNHKGGADATENVLAVEVNPNNRNQEISGDYTIEAWTKFDFPGRGNTYSDFKWRWYHFDGVDWDQSRQFQNRIYKFRGDGKAWDWEVDSENGNYDYLMYADVDMDHPEVVNELRRWGEWYTNTLNLDGFRIDAVKHIKYSFTRDWLTHVRNATGKEMFAVAEFWKNDLGALENYLNKTNWNHSVFDVPLHYNLYNASNSGGNYDMAKLLNGTVVQKHPMHAVTFVDNHDSQPGESLESFVQEWFKPLAYALILTREQGYPSVFYGDYYGIPTHSVPAMKAKIDPILEARQNFAYGTQHDYFDHHNIIGWTREGNTTHPNSGLATIMSDGPGGEKWMYVGQNKAGQVWHDITGIKPGTVTINADGWANFSVNGGSVSIWVKR

SEQ ID NO: 16715 - protein, 485 aa, Unidentified
HHNGTNGTMMQYFEWHLPNDGNHWNRLRDDASNLRNRGITAIWIPPAWKGTSQNDVGYGAYDLYDLGEFNQKGTVRTKYGTRSQLESAIHALKNNGVQVYGDVVMNHKGGADATENVLAVEVNPNNRNQEISGDYTIEAWTKFDFPGRGNTYSDFKWRWYHFDGVDWDQSRQFQNRIYKFRGDGKAWDWEVDSENGNYDYLMYADVDMDHPEVVNELRRWGEWYTNTLNLDGFRIDAVKHIKYSFTRDWLTHVRNAQGKEMFAVAEFWKNDLGALENYLNKTNWNHSVFDVPLHYNLYNASNSGGNYDMAKLLNGTVVQKHPMHAVTFVDNHDSQPGESLESFVQEWFKPLAYALILTREQGYPSVFYGDYYGIPTHSVPAMKAKIDPILEARQNFAYGTQHDYFDHHNIIGWTREGNTTHPNSGLATIMSDGPGGEKWMYVGQNKAGQVWHDITGNKPGTVTINADGWANFSVNGGSVSIWVKR

SEQ ID NO: 16716 - protein, 485 aa, Unidentified
HHNGTNGTMMQYFEWHLPNDGNHWNRLRDDASNLRNRGITDIWIPPAWKGTSQNDVGYGAYDLYDLGEFNQKGTVRTKYGTRSQLESAIHALKNNGVQVYGDVVMNHKGGADATENVLAVEVNPNNRNQEISGDYTIEAWTKFDFPGRGNTYSDFKWRWYHFDGVDWDQSRQFQNRIYKFRGDGKAWDWEVDSENGNYDYLMYADVDMDHPEVVNELRRWGEWYTNTLNLDGFRIDAVKHIKYSFTRDWLTHVRNATGKEMFAVAEFWKNDLGALENYLNKTNWNHSVFDVPLHYNLYNASNSGGNYDMAKLLNGTVVQKHPMHAVTFVDNHDSQPGESLESFVQEWFKPLAYALILTREQGYPSVFYGDYYGIPTHSVPAMKAKIDPILEARQNFAYGTQHDYFDHHNIIGWTREGNTTHPNSGLATIMSDGPGGEKWMYVGQNKAGQVWHDITGNKPGTVTINADGWANFSVNGGSVSIWVKR

SEQ ID NO: 16717 - protein, 485 aa, Unidentified
HHNGTNGTMMQYFEWHLPNDGNHWNRLRDDASNLRNRGITAIWIPPAWKGTSQNDVGYGAYDLYDLGEFNQKGTVRTTYGTRSQLESAIHALKNNGVQVYGDVVMNHKGGADATENVLAVEVNPNNRNQEISGDYTIEAWTKFDFPGRGNTYSDFKWRWYHFDGVDWDQSRQFQNRIYKFRGDGKAWDWEVDSENGNYDYLMYADVDMDHPEVVNELRRWGEWYTNTLNLDGFRIDAVKHIKYSFTRDWLTHVRNATGKEMFAVAEFWKNDLGALENYLNKTNWNHSVFDVPLHYNLYNASNSGGNYDMAKLLNGTVVQKHPMHAVTFVDNHDSQPGESLESFVQEWFKPLAYALILTREQGYPSVFYGDYYGIPTHSVPAMKAKIDPILEARQNFAYGTQHDYFDHHNIIGWTREGNTTHPNSGLATIMSDGPGGEKWMYVGQNKAGQVWHDITGNKPGTVTINADGWANFSVNGGSVSIWVKR

SEQ ID NO: 16718 - protein, 485 aa, Unidentified
HHNGTNGTMMQYFEWHLPNDGNHWNRLRDDASNLRNRGITAIWIPPAWKGTSQNDVGYGAYDLYDLGEFNQKGTVRTKYGTRSQLESAIHALKNNGVQVYGDVVMNHKGGADATENVLAVEVNPNNRNQEISGDYTIEAWTKFDFPGRGNTYSDFKWRWYHFDGVDWDQSRQFQNRIYKFRGDGKAWDWEVDSENGNYDYLMYADVDMDHPEVVNELRRWGEWYTNTLNLDGFRIDAVKHIKYSFTRDWLTHVRNATGKEMFAVAEFWKNDLGALENYLNKTNWNHSVFDVPLHYNLYNASNSGGNYDMAKLLNGTVVQKHPMHAVTFVDNHDSQPGESLESFVQEHFKPLAYALILTREQGYPSVFYGDYYGIPTHSVPAMKAKIDPILEARQNFAYGTQHDYFDHHNIIGWTREGNTTHPNSGLATIMSDGPGGEKWMYVGQNKAGQVWHDITGNKPGTVTINADGWANFSVNGGSVSIWVKR

SEQ ID NO: 16719 - protein, 485 aa, Bacillus sp.
HHNGTNGTMMQYFEWHLPNDGNHWNRLRDDASNLRNRGITAIWIPPAWKGTSQNDVGYGAYDLYDLGEFNQKGTVRTKYGTRSQLESAIHALKNNGVQVYGDVVMNHKGGADATENVLAVEVNPNNRNQEISGDYTIEAWTKFDFPGRGNTYSDFKWRWYHFDGVDWDQSRQFQNRIYKFRGDGKAWDWEVDSENGNYDYLMYADIDMDHPEVVNELRRWGEWYTNTLNLDGFRIDAVKHIKYSFTRDWLTHVRNATGKEMFAVAEFWKNDLGALENYLNKTNWNHSVFDVPLHYNLYNASNSGGNYDMAKLLNGTVVQKHPMHAVTFVDNHDSQPGESLESFVQEWFKPLAYALILTREQGYPSVFYGDYYGIPTHSVPAMKAKIDPILEARQNFAYGTQHDYFDHHNIIGWTREGNTTHPNSGLATIMSDGPGGEKWMYVGQNKAGQVWHDITGNKPGTVTINADGWANFSVNGGSVSIWVKR

SEQ ID NO: 16720 - protein, 485 aa, Unidentified
HHNGTNGTMMQYFEWHLPNDGNHWNRLRDDASNLRNRGITAIWIPPAWKGTSQNDVGYGAYDLYDLGEFNQKGTVRTKYGTRSQLESAIHALKNNGVQVYGDVVMNHKGGADATENVLAVEVNPNNRNQEISGDYTIEAWTKFDFPGRGNTYSDFKWRWYHFDGVDWDQSRQFQNRIYKFRGDGKAWDWEVDSENGNYDYLMYADVDMDHPEVVNELRRWGEWYTNTLNLDGFRIDAVKHIKYSFTRDWLTHVRNATGKEMFAVAEFWKNDLGALENYLNKTNWNHSVFDVPLHYNLYNASNSGGNYDMAKLLNGTVVQKHPMHAVTFVDNHDSQPGESLESFVQEWFKPLAYALILTREQGYPSVFYGDYYGIPTHSVPAMKAKIDPILEARQNFAYGTQHDYFDHHNRIGWTREGNTTHPNSGLATIMSDGPGGEKWMYVGQNKAGQVWHDITGNKPGTVTINADGWANFSVNGGSVSIWVKR

SEQ ID NO: 16721 - protein, 485 aa, Unidentified
HHNGTNGTMMQYFEWHLPNDGNHWNRLRDDASNLRNRGITCIWIPPAWKGTSQNDVGYGAYDLYDLGEFNQKGTVRTKYGTRSQLESAIHALKNNGVQVYGDVVMNHKGGADATENVLAVEVNPNNRNQEISGDYTIEAWTKFDFPGRGNTYSDFKWRWYHFDGVDWDQSRQFQNRIYKFRGDGKAWDWEVDSENGNYDYLMYADVDMDHPEVVNELRRWGEWYTNTLNLDGFRIDAVKHIKYSFTRDWLTHVRNATGKEMFAVAEFWKNDLGALENYLNKTNWNHSVFDVPLHYNLYNASNSGGNYDMAKLLNGTVVQKHPMHAVTFVDNHDSQPGESLESFVQEWFKPLAYALILTREQGYPSVFYGDYYGIPTHSVPAMKAKIDPILEARQNFAYGTQHDYFDHHNIIGWTREGNTTHPNSGLATIMSDGPGGEKWMYVGQNKAGQVWHDITGNKPGTVTINADGWANFSVNGGSVSIWVKR

SEQ ID NO: 16722 - protein, 485 aa, Unidentified
HHNGTNGTMMQYFEWHLPNDGNHWNRLRDDASNLRNRGITAIWIPPAWKGTSQNDVGYGAYDLYDLGEFNQKGTVRTKYGTRSQLESAIHALKNNGVQVYGDVVMNHKGGADATENVLAVEVNPNNRNQEISGDYTIEAWTKFDFPGRGNTYSDFKWRWYHFDGVDWDQSRQFQNRIYKFRGDGKAWDWEVDSENGNYDYLMYADVDMDHPEVVNELRRWGEWYTNTLNLDGFRIDAVKHIKYSFTRDWLTHVRNATGKEMFAVAEFWKNDLGALENYLNKTNWNHSVFDVPLHYNLYNASNSGGNYDMAKLLNGTVVQKHPMHAVTFVDNHDSQPGESLESFVQEWFKPLAYALILTRERGYPSVFYGDYYGIPTHSVPAMKAKIDPILEARQNFAYGTQHDYFDHHNIIGWTREGNTTHPNSGLATIMSDGPGGEKWMYVGQNKAGQVWHDITGNKPGTVTINADGWANFSVNGGSVSIWVKR

SEQ ID NO: 16723 - protein, 485 aa, Unidentified
HHNGTNGTMMQYFEWHLPNDGNHWNRLRDDASNLRNRGITAIWIPPAWKGTSQNDVGYGAYDLYDLGEFNQKGTVRTKYGTRSQLESAIHALKNNGVQVYGDVVMNHKGGADATENVLAEEVNPNNRNQEISGDYTIEAWTKFDFPGRGNTYSDFKWRWYHFDGVDWDQSRQFQNRIYKFRGDGKAWDWEVDSENGNYDYLMYADVDMDHPEVVNELRRWGEWYTNTLNLDGFRIDAVKHIKYSFTRDWLTHVRNATGKEMFAVAEFWKNDLGALENYLNKTNWNHSVFDVPLHYNLYNASNSGGNYDMAKLLNGTVVQKHPMHAVTFVDNHDSQPGESLESFVQEWFKPLAYALILTREQGYPSVFYGDYYGIPTHSVPAMKAKIDPILEARQNFAYGTQHDYFDHHNIIGWTREGNTTHPNSGLATIMSDGPGGEKWMYVGQNKAGQVWHDITGNKPGTVTINADGWANFSVNGGSVSIWVKR

SEQ ID NO: 16724 - protein, 485 aa, Unidentified
HHNGTNGTMMQYFEWHLPNDGNHWNRLRDDASNLRNRGITAIWIPPAWKGTSQNDVGYGAYDLYDLGEFNQKGTVRTKYGTRSQLESAIHALKNNGVQVYGDVVMNHKGGADATENVLAVEVNPNNRNQEISGDYTIEAWTKFDFPGRGNTYSDFKWRWYHFDGVDWDQSRQFQNRIYKFRGDGKAWDWEVDSENGNYDYLMYADVDMDHPEVVNELRRWGEWYTNTLNLDGFRIDAVKHIKYSFTRDWLTHVRNATGKEMFAVAEFWKNDLGALENYLNKTNWNHSVFDVPLHYNLYNASNSGGNYDMAKLLNGTVVQKHPMHAVTFVDNHDSQPGESLESFVQEWFKPLAYALILTREQGYPSVFYGDYYGIPTHSVPAMKAKIDPILEARQCFAYGTQHDYFDHHNIIGWTREGNTTHPNSGLATIMSDGPGGEKWMYVGQNKAGQVWHDITGNKPGTVTINADGWANFSVNGGSVSIWVKR

SEQ ID NO: 16725 - protein, 485 aa, Unidentified
HHNGTNGSMMQYFEWHLPNDGNHWNRLRDDASNLRNRGITAIWIPPAWKGTSQNDVGYGAYDLYDLGEFNQKGTVRTKYGTRSQLESAIHALKNNGVQVYGDVVMNHKGGADATENVLAVEVNPNNRNQEISGDYTIEAWTKFDFPGRGNTYSDFKWRWYHFDGVDWDQSRQFQNRIYKFRGDGKAWDWEVDSENGNYDYLMYADVDMDHPEVVNELRRWGEWYTNTLNLDGFRIDAVKHIKYSFTRDWLTHVRNATGKEMFAVAEFWKNDLGALENYLNKTNWNHSVFDVPLHYNLYNASNSGGNYDMAKLLNGTVVQKHPMHAVTFVDNHDSQPGESLESFVQEWFKPLAYALILTREQGYPSVFYGDYYGIPTHSVPAMKAKIDPILEARQNFAYGTQHDYFDHHNIIGWTREGNTTHPNSGLATIMSDGPGGEKWMYVGQNKAGQVWHDITGNKPGTVTINADGWANFSVNGGSVSIWVKR

SEQ ID NO: 16726 - protein, 485 aa, Unidentified
HHNGTNGTMMQYFEWHLPNDGNHWNRLRDDASNLRNRGITAIWIPPAWKGTSQNDVGYGAYDLYDLGEFNQKGTVRTKYGTRSQLESAIHALKNNGVQVYGDVVMNHKGGADTTENVLAVEVNPNNRNQEISGDYTIEAWTKFDFPGRGNTYSDFKWRWYHFDGVDWDQSRQFQNRIYKFRGDGKAWDWEVDSENGNYDYLMYADVDMDHPEVVNELRRWGEWYTNTLNLDGFRIDAVKHIKYSFTRDWLTHVRNATGKEMFAVAEFWKNDLGALENYLNKTNWNHSVFDVPLHYNLYNASNSGGNYDMAKLLNGTVVQKHPMHAVTFVDNHDSQPGESLESFVQEWFKPLAYALILTREQGYPSVFYGDYYGIPTHSVPAMKAKIDPILEARQNFAYGTQHDYFDHHNIIGWTREGNTTHPNSGLATIMSDGPGGEKWMYVGQNKAGQVWHDITGNKPGTVTINADGWANFSVNGGSVSIWVKR

SEQ ID NO: 16727 - protein, 485 aa, Unidentified
HHNGTNGTMMQYFEWHLPNDGNHWNRLRDDASNLRNRGITAIWIPPAWKGTSQNDVGYGAYDLYDLGEFNQKGTVRTKYGTRSQLESAIHALKNNGVQVYGDVVMNHKGGADATENVLAVEVNPNNRNQEISGDYTIEAWTKFDFPGRGNTYSDFKWRWYHFDGVDWDQSRQFQNRIYKFRGDGKAWDWEVDSENGNYDYLMYADVDMDHPEVVNELRRWGEWYTNTLNLDGFRIDAVKHIKYSFTRDWLTHVRNATGKEMFAVAEFWKNDLGALENYLNKTNWNHSVFDVPLHYNLYNASNSGGNYDMAKLLNGTVVQKHPMHAVTFVDNHDSQPGESLESFVQEWFKPLAYALILTREQGYPSVFYGDYYGIPTHSVPAMKAKIDPILEARQNFAYGTQHDYFDHHNIIGWTREGNTTHPNSGLATIMSDGPGGEKDMYVGQNKAGQVWHDITGNKPGTVTINADGWANFSVNGGSVSIWVKR

SEQ ID NO: 16728 - protein, 485 aa, Unidentified
HHNGTNGTMMQYFEWHLPNDGNHWNRLRDDASNLRNRGITAIWIPPAWKGTSQNDVGYGAYDLYDLGEFNQKGTVRTKYGTRSQLESAIHALKNNGVQVYGDVVMNHKGGADATENVLAVEVNPNNRNQEISGDYTIEAWTKFDFPGRGNTYSDFKWRWYHFDGVDWDQSRQFQNRIYKFRGDGKAWDWEVDSENGNYDYLMYADVDMDHPEVVNELRRWGEWYTNTLNLDGFRIDAVKHIKYSFTRDWLTHVRNATGKEMFAVAEFWKNDLGALENYLNKTNWNHSVFDVPLHYNLYNASNSGGNYDMAKLLNGTVVQKHPMHAVTFVDNHDSQPGESLESFVQEWFKPLAYALILTREQGYPSVFYGDYYGIPTHSVPAMKAKIDPILEARQNFAYGTQHDYFDHHNIIGWTREGNTTHPNSGLATIMSDGPGGEKWMYVGQNKAGQVWHDITGNKPGTVTINYDGWANFSVNGGSVSIWVKR

SEQ ID NO: 16729 - protein, 485 aa, Unidentified
HHNGTNGTMMQYFEWHLPNDGNHWNRLRDDASNLRNRGITHIWIPPAWKGTSQNDVGYGAYDLYDLGEFNQKGTVRTKYGTRSQLESAIHALKNNGVQVYGDVVMNHKGGADATENVLAVEVNPNNRNQEISGDYTIEAWTKFDFPGRGNTYSDFKWRWYHFDGVDWDQSRQFQNRIYKFRGDGKAWDWEVDSENGNYDYLMYADVDMDHPEVVNELRRWGEWYTNTLNLDGFRIDAVKHIKYSFTRDWLTHVRNATGKEMFAVAEFWKNDLGALENYLNKTNWNHSVFDVPLHYNLYNASNSGGNYDMAKLLNGTVVQKHPMHAVTFVDNHDSQPGESLESFVQEWFKPLAYALILTREQGYPSVFYGDYYGIPTHSVPAMKAKIDPILEARQNFAYGTQHDYFDHHNIIGWTREGNTTHPNSGLATIMSDGPGGEKWMYVGQNKAGQVWHDITGNKPGTVTINADGWANFSVNGGSVSIWVKR

SEQ ID NO: 16730 - protein, 485 aa, Unidentified
HHNGTNGTMMQYFEWHLPNDGNHWNRLRDDASNLRNRGITAIWIPPAWKGTSQNDVGYGAYDLYDLGEFNQKGTVRTKYGTRSQLESAIHALKNNGVQVYGDVVFNHKGGADATENVLAVEVNPNNRNQEISGDYTIEAWTKFDFPGRGNTYSDFKWRWYHFDGVDWDQSRQFQNRIYKFRGDGKAWDWEVDSENGNYDYLMYADVDMDHPEVVNELRRWGEWYTNTLNLDGFRIDAVKHIKYSFTRDWLTHVRNATGKEMFAVAEFWKNDLGALENYLNKTNWNHSVFDVPLHYNLYNASNSGGNYDMAKLLNGTVVQKHPMHAVTFVDNHDSQPGESLESFVQEWFKPLAYALILTREQGYPSVFYGDYYGIPTHSVPAMKAKIDPILEARQNFAYGTQHDYFDHHNIIGWTREGNTTHPNSGLATIMSDGPGGEKWMYVGQNKAGQVWHDITGNKPGTVTINADGWANFSVNGGSVSIWVKR

SEQ ID NO: 16731 - protein, 485 aa, Unidentified
HHNGTNGTMMQYFEWHLPNDGNHWNRLRDDASNLRNRGIDAIWIPPAWKGTSQNDVGYGAYDLYDLGEFNQKGTVRTKYGTRSQLESAIHALKNNGVQVYGDVVMNHKGGADATENVLAVEVNPNNRNQEISGDYTIEAWTKFDFPGRGNTYSDFKWRWYHFDGVDWDQSRQFQNRIYKFRGDGKAWDWEVDSENGNYDYLMYADVDMDHPEVVNELRRWGEWYTNTLNLDGFRIDAVKHIKYSFTRDWLTHVRNATGKEMFAVAEFWKNDLGALENYLNKTNWNHSVFDVPLHYNLYNASNSGGNYDMAKLLNGTVVQKHPMHAVTFVDNHDSQPGESLESFVQEWFKPLAYALILTREQGYPSVFYGDYYGIPTHSVPAMKAKIDPILEARQNFAYGTQHDYFDHHNIIGWTREGNTTHPNSGLATIMSDGPGGEKWMYVGQNKAGQVWHDITGNKPGTVTINADGWANFSVNGGSVSIWVKR

SEQ ID NO: 16732 - protein, 485 aa, Bacillus sp.
HHNGTNGTMMQYFEWHLPNDGNHWNRLRDDASNLRNRGITAIWIPPAWKGTSQNDVGYGAYDLYDLGEFNQKGTVRTKYGTRSQLESAIHALKNNGVQVYGDVVMNHKGGADATENVLAVEVNPNNRNQEISGYYTIEAWTKFDFPGRGNTYSDFKWRWYHFDGVDWDQSRQFQNRIYKFRGXXKAWDWEVDSENGNYDYLMYADVDMDHPEVVNELRRWGEWYTNTLNLDGFRIDAVKHIKYSFTRDWLTHVRNATGKEMFAVAEFWKNDLGALENYLNKTNWNHSVFDVPLHYNLYNASNSGGNYDMAKLLNGTVVQKHPMHAVTFVDNHDSQPGESLESFVQEWFKPLAYALILTREQGYPSVFYGDYYGIPTHSVPAMKAKIDPILEARQNFAYGTQHDYFDHHNIIGWTREGNTTHPNSGLATIMSDGPGGEKWMYVGQNKAGQVWHDITGNKPGTVTINADGWANFSVNGGSVSIWVKR

SEQ ID NO: 16733 - protein, 485 aa, Bacillus sp.
HHNGTNGTMMQYFEWHLPNDGNHWNRLRDDASNLRNRGITAIWIPPAWKGTSQNDVGYGAYDLYDLGEFNQKGTVRTKYGTRSQLESAIHALKNNGVQVYGDVVMNHKGGADATENVLAVEVNPNNRNQEISGDYTIEAWTKFDFPGRGNTYSDFKWRWYHFDGVDWDQSRQFQNRIYKFRGDGKAWDWEVDSENGNYDYLMYADVDMDHPETVNELRRWGEWYTNTLNLDGFRIDAVKHIKYSFTRDWLTHVRNATGKEMFAVAEFWKNDLGALENYLNKTNWNHSVFDVPLHYNLYNASNSGGNYDMAKLLNGTVVQKHPMHAVTFVDNHDSQPGESLESFVQEWFKPLAYALILTREQGYPSVFYGDYYGIPTHSVPAMKAKIDPILEARQNFAYGTQHDYFDHHNIIGWTREGNTTHPNSGLATIMSDGPGGEKWMYVGQNKAGQVWHDITGNKPGTVTINADGWANFSVNGGSVSIWVKR

SEQ ID NO: 16734 - protein, 485 aa, Unidentified
HHNGTNGTMMQYFEWHLPNDGNHWNRLRDDASNLRNRGITAIWIPPAWKGTSQNDVGYGAYDLYDLGEFNQKGTVRTKYGTRSQLESAIHALKNNGVQVYGDVVMNHKGGADATENVLAVEVNPNNREQEISGDYTIEAWTKFDFPGRGNTYSDFKWRWYHFDGVDWDQSRQFQNRIYKFRGDGKAWDWEVDSENGNYDYLMYADVDMDHPEVVNELRRWGEWYTNTLNLDGFRIDAVKHIKYSFTRDWLTHVRNATGKEMFAVAEFWKNDLGALENYLNKTNWNHSVFDVPLHYNLYNASNSGGNYDMAKLLNGTVVQKHPMHAVTFVDNHDSQPGESLESFVQEWFKPLAYALILTREQGYPSVFYGDYYGIPTHSVPAMKAKIDPILEARQNFAYGTQHDYFDHHNIIGWTREGNTTHPNSGLATIMSDGPGGEKWMYVGQNKAGQVWHDITGNKPGTVTINADGWANFSVNGGSVSIWVKR

SEQ ID NO: 16735 - protein, 485 aa, Unidentified
HHNGTNGTMMQYFEWHLPNDGNHWNRLRDDASNLRNRGITAIWIPPAWKGTSQNDVGYGAYDLYDLGEFNQKGTVRTKYGTRSQLESAIHALKNNGVQVYGDVVMNHKGGADATENVLAVEVNPNNRNQEISGDYTIEAWTKFDFPGRGNTYSDFKWRWYHFDGVDWDQSRQFQNRIYKFRGDGKAWDWEVDSENGNYDYLMYADVDMDHPEVVNELRRWGEWYTNTLNLDGFRIDAVKHIKYSFTRDWLTHVRNATGKEMFAVAEFWKNDLGALENYLNKTNWNHSVFDVPLHYNLYNASNSGGNYDMAKLLNGTVVQKHPMHAVTFVDNHDSQPGESLESFVQEWFKPLAYALILTREQGYPSVFYGDYYGIPTHSVPAMKAKIDPILEARQNFAYGTQHDYNDHHNIIGWTREGNTTHPNSGLATIMSDGPGGEKWMYVGQNKAGQVWHDITGNKPGTVTINADGWANFSVNGGSVSIWVKR

SEQ ID NO: 16736 - protein, 485 aa, Unidentified
HHNGTNGTMMQYFEWHLPNDGNHWNRLRDDASNLRNRGITAIWIPPAWKGTSQNDVGYGAYDLYDLGEFNQKGTVRTKYGTRSQLESAIHALKNNGVQVYGDVVMNHKGGADATENVLAVEVNPNNRNQEISGDYTIEAWTKFDFPGRGNTYSDFKWRWYHFDGVDWDQSRQFQNRIYKFRGDGKAWDWEVDSENGNYDYLMYADVDMDHPEVVNELRRWGEWYTNTLNLDGFRIDAVKHIKYSFTRDWLTHVRNATGKEMFAVAEFWKNDLGALENYLNKTNWNHSVFDVPLHYNLYNASNSGGNYDMAKLLNGTVVQKHPMHAVTFVDNHDSQPGESLESFVQEWFKPLAYALILTREQGYPSVFYGDYYGIPTHSVPAMKAKIDPILEARQNFAYGTQHDYFDHHNIIGWTREGNTTHINSGLATIMSDGPGGEKWMYVGQNKAGQVWHDITGNKPGTVTINADGWANFSVNGGSVSIWVKR

SEQ ID NO: 16737 - protein, 485 aa, Unidentified
HHNGTNGTMMQYFEWHLPNDGNHWNRLRDDASNLRNRGITAIWIPPAWKGTSQNDVGYGAYDLYDLGEFNQKGTVRTKYGTRSQLESAIHALKNNGVQVYGDVVMNHKGGADATENVLAVEVNPNNRNQEISGDYTIEAWTKFDFPGRGNTYSDFKWRWYHFDGVDWDQSRQFQNRIYKFRGDGKAWDWEVDSENGNYDYLMYADVDMDHPEVVNELRRWGEWYTNTLNLDGFRIDAVKHIKYSFTRDWLTHVRNATGKEMFAVAEFWKNDLGALENYLNKTNWNHSVFDVPLHYNLYNASNSGGNYDMAKLLNGTVVQKHPMHAVTFVDNHDSQPGESLESFVQEWFKPLAYALILTREQGYPSVFYGDYYGIPTHSVPAMKAKIDPILEARQNFAYGTQHDYFDHHNIIGWTREGNTTHPNSGLATIMSDGPGGEKYMYVGQNKAGQVWHDITGNKPGTVTINADGWANFSVNGGSVSIWVKR

SEQ ID NO: 16738 - protein, 485 aa, Unidentified
HHNGTNGTMMQYFEWHLPNDGNHWNRLRDDASNLRNRGITAIWIPPAWKGTSQNDVGYGAYDLYDLGEFNQKGTVRTKYGTRSQLESAIHALKNNGVQVYGDVVMNHKGGADATENVLAVEVNPNNRNQEISGDYTIEAWTKFDFPGRGNTYSDFKWRWYHFDGVDWDQSRQFQNRIYKFRGDGKAWDWEVDSENGNYDYLMYADVDMDHPEVVNELRRWGEWYTNTLNLDGFRIDAVKHIKYSFTRDWLTHVRNATGKEMFAVAEFWKNDLGALENYLNKTNWNHSVFDVPLHYNLYNGSNSGGNYDMAKLLNGTVVQKHPMHAVTFVDNHDSQPGESLESFVQEWFKPLAYALILTREQGYPSVFYGDYYGIPTHSVPAMKAKIDPILEARQNFAYGTQHDYFDHHNIIGWTREGNTTHPNSGLATIMSDGPGGEKWMYVGQNKAGQVWHDITGNKPGTVTINADGWANFSVNGGSVSIWVKR

SEQ ID NO: 16739 - protein, 485 aa, Unidentified
HHNGTNGTMMQYFEWHLPNDGNHWNRLRDDASNLRNRGITAIWIPPAWKGTSQNDVGYGAYDLYDLGEFNQKGTVRTKYGTRSQLESAIHALKNNGVQVYGDVVMNHKGGADATENVLAVEVNPNNRNQEISGDYTIEAWTKFDFPGRGNTYSDFKWRWYHFDGVDWDQSRQFQNRIYKFRGDGKAWDWEVDSENGNYDYLMYADVDMDHPEVVNELRRWGEWYTNTLNLDGFRIDAVKHIKYSFTRDWLTHVRNATGKEMFAVAEFWKNDLGALENYLNKTNWNHSVFDVPLHYNLYNASNSGGNYDMAKLLNGTVVQKHPMHAVTFVDNHDSQPGESLESFVQEWFKPLAYALILTREQGYPSVFYGDYYGIPTHSVPAMKAKIDPILEARQNEAYGTQHDYFDHHNIIGWTREGNTTHPNSGLATIMSDGPGGEKWMYVGQNKAGQVWHDITGNKPGTVTINADGWANFSVNGGSVSIWVKR

SEQ ID NO: 16740 - protein, 485 aa, Unidentified
HHNGTNGTMMQYFEWHLPNDGNHWNRLRDDASNLRNRGITAIWIPPAWKGTSQNDVGYGAYDLYDLGEFNQKGTVRTKYGTRSQLESAIHALKNNGVQVYGDVVMNHKGGADATENVLAVEVNPNNRNQEISGDYTIEAWTKFDFPGRGNTYSDFKWRWYHFDGVDWDQSRQFQNRIYKFRGDGKAWDWEVDSENGNYDYLMYADVDMDHPEVVNELRRWGEWYTNTLNLDGFRIDAVKHIKYSFTRDWLTHVRNATGKEMFAVAEFWKNDLGALENYLNKTNWNHSVFDVPLHYNLYNASNSGGNYDMAKLLNGTVVQKHPMHAVTFVDNHDSQPGESLESFVQEWFKPLAYALILTREQGYPSVFYGDYYGIPTHSVPAMKAKIDPILEARQNFAYGTQHDYFDHHNIIGWTREGNTTHPVSGLATIMSDGPGGEKWMYVGQNKAGQVWHDITGNKPGTVTINADGWANFSVNGGSVSIWVKR

SEQ ID NO: 16741 - protein, 485 aa, Unidentified
HHNGTNGTMMQYFEWHLPNDGNHWNRLRDDASNLRNRGITAIWIPPAWKGTSQNDVGYGAYDLYDLGEFNQKGTVRTKYGTRSQLESAIHALKNNGVQVYGDVVMNHKGGADATENVLAVEVNPNNRNQEISGDYTIEAWTKFDFPGRGNTYSDFKWRWYHFDGVDWDQSRQFQNRIYKFRGDGKAWDWEVDSENGNYDYLMYADVDMDHPEVVNELRRWGEWYTNTLNLDGFRIDAVKHIKYSFTRDWLTHVRNATGKEMFAVAEFWKNDLGALENYLNKTNWNHSVFDVPLHYNLYNASNSGGNYDMAKLLNGTVVQKHPMHAVTFVDNHDSQPGESLESFVQEWFKPLAYALILTREMGYPSVFYGDYYGIPTHSVPAMKAKIDPILEARQNFAYGTQHDYFDHHNIIGWTREGNTTHPNSGLATIMSDGPGGEKWMYVGQNKAGQVWHDITGNKPGTVTINADGWANFSVNGGSVSIWVKR

SEQ ID NO: 16742 - protein, 485 aa, Unidentified
HHNGTNGTMMQYFEWHLPNDGNHWNRLRDDASNLRNRGITAIWIPPAWKGTSQNDVGYGAYDLYDLGEFNQKGTVRTKYGTRSQLESAIHALKNNGVQVYGDVVMNHKGGADATENVLHVEVNPNNRNQEISGDYTIEAWTKFDFPGRGNTYSDFKWRWYHFDGVDWDQSRQFQNRIYKFRGDGKAWDWEVDSENGNYDYLMYADVDMDHPEVVNELRRWGEWYTNTLNLDGFRIDAVKHIKYSFTRDWLTHVRNATGKEMFAVAEFWKNDLGALENYLNKTNWNHSVFDVPLHYNLYNASNSGGNYDMAKLLNGTVVQKHPMHAVTFVDNHDSQPGESLESFVQEWFKPLAYALILTREQGYPSVFYGDYYGIPTHSVPAMKAKIDPILEARQNFAYGTQHDYFDHHNIIGWTREGNTTHPNSGLATIMSDGPGGEKWMYVGQNKAGQVWHDITGNKPGTVTINADGWANFSVNGGSVSIWVKR

SEQ ID NO: 16743 - protein, 485 aa, Unidentified
HHNGTNGTMMQYFEWHLPNDGNHWNRLRDDASNLRNRGITAIWIPPAWKGTSQNDVGYGAYDLYDLGEFNQKGTVRTKYGTRSQLESAIHALKNNGVQVYGDVVMNHKGGADATENVLAVEVNPNNRNQEISGDYTIEAWTKFDFPGRGNTYSDFKWRWYHFDGVDWDQSRQFQNRIYKFRGDGKAWDWEVDSENGNYDYLMYADVDMDHPEVVNELRRWGEWYTNTLNLDGFRIDAVKHIKYSFTRDWLTHVDNATGKEMFAVAEFWKNDLGALENYLNKTNWNHSVFDVPLHYNLYNASNSGGNYDMAKLLNGTVVQKHPMHAVTFVDNHDSQPGESLESFVQEWFKPLAYALILTREQGYPSVFYGDYYGIPTHSVPAMKAKIDPILEARQNFAYGTQHDYFDHHNIIGWTREGNTTHPNSGLATIMSDGPGGEKWMYVGQNKAGQVWHDITGNKPGTVTINADGWANFSVNGGSVSIWVKR

SEQ ID NO: 16744 - protein, 485 aa, Unidentified
HHNGTNGTMMQYFEWHLPNDGNHWNRLRDDASNLRNRGITAIWIPPAWKGTSQNDVGYGAYDLYDLGEFNQKGTVRTKYGTRSQLESAIHALKNNGVQVYGDVVMNHKGGADATENVLAVEVNPNNRNQEISGDYTIEAWTEFDFPGRGNTYSDFKWRWYHFDGVDWDQSRQFQNRIYKFRGDGKAWDWEVDSENGNYDYLMYADVDMDHPEVVNELRRWGEWYTNTLNLDGFRIDAVKHIKYSFTRDWLTHVRNATGKEMFAVAEFWKNDLGALENYLNKTNWNHSVFDVPLHYNLYNASNSGGNYDMAKLLNGTVVQKHPMHAVTFVDNHDSQPGESLESFVQEWFKPLAYALILTREQGYPSVFYGDYYGIPTHSVPAMKAKIDPILEARQNFAYGTQHDYFDHHNIIGWTREGNTTHPNSGLATIMSDGPGGEKWMYVGQNKAGQVWHDITGNKPGTVTINADGWANFSVNGGSVSIWVKR

SEQ ID NO: 16745 - protein, 485 aa, Unidentified
HHNGTNGTMMQYFEWHLPNDGNHWNRLRDDASNLRNRGITAIWIPPAWKGTSQNDVGYGAYDLYDLGEFNQKGTVRTKYGTRSQLESAIHALKNNGVQVYGDVVMNHKGGADATENVLAVEVNPNNRNQEISGDYTIEAWTKFDFPGRGNTYSDFKWRWYHFDGVDWDQSRQFQNRIYKFRGDGKAWDWEVDSENGNYDYLMYADVDMDHPEVVNELRRWGEWYTNTLNLDGFRIDAVKHIKYSFTRDWLTHVRNATGKEMFAVAEFWKNDLGALENYLNKTNWNHSVFDVPLHYNLYNASNSGGNYDMAKLLNGTVVQKHPMHAVTFVDNHDSQPGESLESFVQEWFKPLAYALILTREQGYPSVFYGDYYGIPTHSVPAMKAKIDPILEARQNFAYGTQHDYFDHHNIIGWTREGNTTHPNSGLATIMSDGPCGEKWMYVGQNKAGQVWHDITGNKPGTVTINADGWANFSVNGGSVSIWVKR

SEQ ID NO: 16746 - protein, 485 aa, Bacillus sp.
HHNGTNGTMMQYFEWHLPNDGNHWNRLRDDASNLRNRGITAIWIPPAWKGTSQNDVGYGAYDLYDLGEFNQKGTVRTKYGTRSQLESAIHALKNNGVQVYGDVVMNHKGGADATENVLAVEVNPNNRNQEISGDYTIEAWTKFDFPGRGNTYSDFKWRWYHFDGVDWDQSRQFQNRIYKFRGAXKAWDWEVDSEYGNYDYLMYADVDMDHPEVVNELRRWGEWYTNTLNLDGFRIDAVKHIKYSFTRDWLTHVRNATGKEMFAVAEFWKNDLGALENYLNKTNWNHSVFDVPLHYNLYNASNSGGNYDMAKLLNGTVVQKHPMHAVTFVDNHDSQPGESLESFVQEWFKPLAYALILTREQGYPSVFYGDYYGIPTHSVPAMKAKIDPILEARQNFAYGTQHDYFDHHNIIGWTREGNTTHPNSGLATIMSDGPGGEKWMYVGQNKAGQVWHDITGNKPGTVTINADGWANFSVNGGSVSIWVKR

SEQ ID NO: 16747 - protein, 485 aa, Unidentified
HHNGTNGTMMQYFEWHLPNDGNHWNRLRDDASNLRNRGITAIWIPPAWKGTSQNDVGYGAYDLYDLGEFNQKGTVRTKYGTRSQLESAIHALKNNGVQVYGDVVMNHKGGADATENVLAVEVNPNNRNQEISGDYTIEAWTKFDFPGRGNTYSDFKWRWYHFDGVDWDQSRQFQNRIYKFRGDGKAWDWEVDSENGNYDYLMYADVDMDHPEVVNELRRWGEWYTNTLNLDGFRIDAVKHIKYSFTRDWLTHVRNATGKEMFAVAEFWKNDLGALENYLNKTNWNHSVFDVPLHYNLYNASNSGGNYDMAKLLNGTVVQKHPMHAVTFVDNHDSQPGESLESFVQEWFKPLAYALILTREQGYPSVFYGDYYGIPTHSVPAMKAKIDPILEARQNFAYGTQHDYFDHHNIIGWTREGNTTHPNSGLATIMSDGPGGEKWMYVGQNKAGQVWHDITGNKPGTVTINIDGWANFSVNGGSVSIWVKR

SEQ ID NO: 16748 - protein, 485 aa, Unidentified
HHNGTNGTMMQYFEWHLPNDGNHWNRLRDDASNLRNRGITAIWIPPAWKGTSQNDVGYGAYDLYDLGEFNQKGTVRTKYGTRSQLESAIHALKNNGVQVYGDVVMNHKGGADATENVLAVEVNPNNRNQEISGDYTIEAWTKFDFPGRGNTYSDFKWRWYHFDGVDWDQSRQFQNRIYKFRGDGKAWDWEVDSENGNYDYLMYADVDMDHPEVVNELRRWGEWYTNTLNLDGFRIDAVKHIKYSFTRDWLTHVRNATGKEMFAVAEFWKNDLGALENYLNKTNWNHSVFDVPLHYNLYNASNSGGNYDMAKLLNGTVVQKHPMHAVTFVDNHDSQPGESLESFVQEWFKPLAYALILTREQGYPSVFYGDYYGIPTHSVPAMKAKIDPILEARQNFAYGTQHDYFDHHNIIGWTREGNTTHPNSGLATIMSDGPGGEKWMYVGQNKAGQVWHDITGNKPGTVTINADGWANFSVTGGSVSIWVKR

SEQ ID NO: 16749 - protein, 485 aa, Unidentified
HHNGTNGTMMQYFEWHLPNDGNHWNRLRDDASNLRNRGITAIWIPPAWKGTSQNDVGYGAYDLYDLGEFNQKGTVRTKYGTRSQLESAIHALKNNGVQVYGDVVMNHKGGADATENVLAVEVNPNNRNQEISGDYTIEAWTKIDFPGRGNTYSDFKWRWYHFDGVDWDQSRQFQNRIYKFRGDGKAWDWEVDSENGNYDYLMYADVDMDHPEVVNELRRWGEWYTNTLNLDGFRIDAVKHIKYSFTRDWLTHVRNATGKEMFAVAEFWKNDLGALENYLNKTNWNHSVFDVPLHYNLYNASNSGGNYDMAKLLNGTVVQKHPMHAVTFVDNHDSQPGESLESFVQEWFKPLAYALILTREQGYPSVFYGDYYGIPTHSVPAMKAKIDPILEARQNFAYGTQHDYFDHHNIIGWTREGNTTHPNSGLATIMSDGPGGEKWMYVGQNKAGQVWHDITGNKPGTVTINADGWANFSVNGGSVSIWVKR

SEQ ID NO: 16750 - protein, 485 aa, Unidentified
HHNGTNGTMMQYFEWHLPNDGNHWNRLRDDASNLRNRGITAIWIPPAWKGTSQNDVGYGAYDLYDLGEFNQKGTVRTKYGTRSQLESAIHALKNNGVQVYGDVVMNHKGGADATENVLAVEVNPNNRNQEISGDYTIEAWTKFDFPGRGNTYSDFKWRWYHFDGVDWDQSRQFQNRIYKFRGDGKAWDWEVDSENGNYDYLMYADVDMDHPEVVNELRRWGEWYTNTLNLDGFRIDAVKHIKYSFTRDWLTHVRNATGKEMFAVAEFWKNDLGALENYLNKTNENHSVFDVPLHYNLYNASNSGGNYDMAKLLNGTVVQKHPMHAVTFVDNHDSQPGESLESFVQEWFKPLAYALILTREQGYPSVFYGDYYGIPTHSVPAMKAKIDPILEARQNFAYGTQHDYFDHHNIIGWTREGNTTHPNSGLATIMSDGPGGEKWMYVGQNKAGQVWHDITGNKPGTVTINADGWANFSVNGGSVSIWVKR

SEQ ID NO: 16751 - protein, 485 aa, Unidentified
HHNGTNGTMMQYFEWHLPNDGNHWNRLRDDASNLRNRGITAIWIPPAWKGTSQNDVGYGAYDLYDLGEFNQKGTVRTKYGTRSQLESAIHALKNNGVQVYGDVVMNHKGGADAVENVLAVEVNPNNRNQEISGDYTIEAWTKFDFPGRGNTYSDFKWRWYHFDGVDWDQSRQFQNRIYKFRGDGKAWDWEVDSENGNYDYLMYADVDMDHPEVVNELRRWGEWYTNTLNLDGFRIDAVKHIKYSFTRDWLTHVRNATGKEMFAVAEFWKNDLGALENYLNKTNWNHSVFDVPLHYNLYNASNSGGNYDMAKLLNGTVVQKHPMHAVTFVDNHDSQPGESLESFVQEWFKPLAYALILTREQGYPSVFYGDYYGIPTHSVPAMKAKIDPILEARQNFAYGTQHDYFDHHNIIGWTREGNTTHPNSGLATIMSDGPGGEKWMYVGQNKAGQVWHDITGNKPGTVTINADGWANFSVNGGSVSIWVKR

SEQ ID NO: 16752 - protein, 485 aa, Unidentified
HHNGTNGTMMQYFEWHLPNDGNHWNRLRDDASNLRNRGITAIWIPPAWKGTSQNDVGYGAYDLYDLGEFNQKGTVRTKYGTRSQLESAIHALKNNGVQVYGDVVMNHKGGADATENVLAVEVNPNNRNQEISGDYTIEAWTKFDFPGRGNTYSDFKWRWYHFDGVDWDQSRQFQNRIYKFRGDGKAWDWEVDSENGNYDYLMYADVDMDHPEVVNELRRWGEWYTNTLNLDGFRIDAVKHIKYSFTRDWLTHVRNATGKEMFAVAEFWKNDLGALENYLNKTNWNHSVFDVPLHYNLYNASNSGGNYDMAKLLNGTVVQKHPMHAVTFVDNHDSQPGESLESFVQEWFKPLAYALILTMEQGYPSVFYGDYYGIPTHSVPAMKAKIDPILEARQNFAYGTQHDYFDHHNIIGWTREGNTTHPNSGLATIMSDGPGGEKWMYVGQNKAGQVWHDITGNKPGTVTINADGWANFSVNGGSVSIWVKR

SEQ ID NO: 16753 - protein, 485 aa, Unidentified
HHNGTNGTMMQYFEWHLPNDGNHWNRLRDDASNLRNRGITAIWIPPAWKGTSQNDVGYGAYDLYDLGEFNQKGTVRTKYGTRSQLESAIHALKNNGVQVYGDVVMNHKGGADATENVLAVEVNPNNRNQEISGDYTIEAMTKFDFPGRGNTYSDFKWRWYHFDGVDWDQSRQFQNRIYKFRGDGKAWDWEVDSENGNYDYLMYADVDMDHPEVVNELRRWGEWYTNTLNLDGFRIDAVKHIKYSFTRDWLTHVRNATGKEMFAVAEFWKNDLGALENYLNKTNWNHSVFDVPLHYNLYNASNSGGNYDMAKLLNGTVVQKHPMHAVTFVDNHDSQPGESLESFVQEWFKPLAYALILTREQGYPSVFYGDYYGIPTHSVPAMKAKIDPILEARQNFAYGTQHDYFDHHNIIGWTREGNTTHPNSGLATIMSDGPGGEKWMYVGQNKAGQVWHDITGNKPGTVTINADGWANFSVNGGSVSIWVKR

SEQ ID NO: 16754 - protein, 485 aa, Unidentified
HHNGTNGTMMQYFEWHLPNDGNHWNRLRDDASNLRNRGITAIWIPPAWKGTSQNDVGYGAYDLYDLGEFNQKGTVRTKYGTRSQLESAIHALKNNGVQVYGDVVMNHKGGADATENVLAVEVNPNNRNQEISGDYTIEAWTKFDFPGRGNTYSDFKWRWYHFDGVDWDQSRQFQNRIYKFRGDGKAWDWEVDSENGNYDYLMYADVDMDHPEVVNELRRWGEWYTNTLNLDGFRIDAVKHIKYSFTRDWLTHVRNATGKEMFAVAEFWKNDLGALENYLNKTNWNHSVFDVPLHYNLYNASNSGGNYDMAKLLNGTVVQKHPMHAVTFVDNHDSQPGESLESFVQEWFKPLAYALILTREQGYPSVFYGDYYGIPTHSVPAMKAKIDPILEARQNFAYGTQHDYFDHHNIIGWTREGNTTHPNSGLATIMSDGPGGEKAMYVGQNKAGQVWHDITGNKPGTVTINADGWANFSVNGGSVSIWVKR

SEQ ID NO: 16755 - protein, 485 aa, Unidentified
HHNGTNGTMMQYFEWHLPNDGNHWNRLRDDASNLRNRGITAIWIPPAWKGTSQNDVGYGAYDLYDLGEFNQKGTVRTKYGTRSQLESAIHALKNNGVQVYGDVVMNHKGGADATENVLAVEVNPNNRNQEISGDYTIEAWTKFDFPGRGNTYSDFKWRWYHFDGVDWDQSRQFQNRIYKFRGDGKAWDWEVDSENGNYDYLMYADVDMDHPEVVNELRRWGEWYTNTLNLDGFRIDAVKHIKYSFTRDWLTHVRNATGKEMFAVAEFWKNDLGALENYLNKTNWNHSVFDVPLHYNLYNASNSGGNYDMAKLLNGTVVQKHPMHAVTFVDNHDSQPGESLESFVQEWFKPLAYALILTREQGYPSVFYGDYYGIPTHSVPAMKAKIDPILEARQNFAYGTQHDYFDHHNIIGWTREGNTTHPNSGLATIMSDGPGGEKWMYVGQNKAGQVWHDITGNKPGTVTINAIGWANFSVNGGSVSIWVKR

SEQ ID NO: 16756 - protein, 485 aa, Unidentified
HHNGTNGTMMQYFEWHLPNDGNHWNRLRDDASNLRNRGITAIWIPPAWKGTSQNDVGYGAYDLYDLGEFNQKGTVRTKYGTRSQLESAIHALKNNGVQVYGDVVMNHKGGADATENVLAVEVNPNNRNQEISGDYTIEAWTKFDFPGRGNTYSDFKWRWYHFDGVDWDQSRQFQNRIYKFRGDGKAWDWEVDSENGNYDYLMYADVDMDHPEVVNELRRWGEWYTNTLNLDGFRIDAVKHIKYSFTRDWLTHVRNATGKEMFAVAEFWKNDLGALENYLNKTNWNHSVFDVPLHYNLYNASNSGGNYDMAKLLNGTVVQKHPMHAVTFVDNHDSQPGESLESFVQENFKPLAYALILTREQGYPSVFYGDYYGIPTHSVPAMKAKIDPILEARQNFAYGTQHDYFDHHNIIGWTREGNTTHPNSGLATIMSDGPGGEKWMYVGQNKAGQVWHDITGNKPGTVTINADGWANFSVNGGSVSIWVKR

SEQ ID NO: 16757 - protein, 485 aa, Unidentified
HHNGTNGTMMQYFEWHLPNDGNHWNRLRDDASNLRNRGITAIWIPPAWKGTSQNDVGYGSYDLYDLGEFNQKGTVRTKYGTRSQLESAIHALKNNGVQVYGDVVMNHKGGADATENVLAVEVNPNNRNQEISGDYTIEAWTKFDFPGRGNTYSDFKWRWYHFDGVDWDQSRQFQNRIYKFRGDGKAWDWEVDSENGNYDYLMYADVDMDHPEVVNELRRWGEWYTNTLNLDGFRIDAVKHIKYSFTRDWLTHVRNATGKEMFAVAEFWKNDLGALENYLNKTNWNHSVFDVPLHYNLYNASNSGGNYDMAKLLNGTVVQKHPMHAVTFVDNHDSQPGESLESFVQEWFKPLAYALILTREQGYPSVFYGDYYGIPTHSVPAMKAKIDPILEARQNFAYGTQHDYFDHHNIIGWTREGNTTHPNSGLATIMSDGPGGEKWMYVGQNKAGQVWHDITGNKPGTVTINADGWANFSVNGGSVSIWVKR

SEQ ID NO: 16758 - protein, 485 aa, Unidentified
HHNGTNGTMMQYFEWHLPNDGNHWNRLRDDASNLRNRGITAIWIPPAWKPTSQNDVGYGAYDLYDLGEFNQKGTVRTKYGTRSQLESAIHALKNNGVQVYGDVVMNHKGGADATENVLAVEVNPNNRNQEISGDYTIEAWTKFDFPGRGNTYSDFKWRWYHFDGVDWDQSRQFQNRIYKFRGDGKAWDWEVDSENGNYDYLMYADVDMDHPEVVNELRRWGEWYTNTLNLDGFRIDAVKHIKYSFTRDWLTHVRNATGKEMFAVAEFWKNDLGALENYLNKTNWNHSVFDVPLHYNLYNASNSGGNYDMAKLLNGTVVQKHPMHAVTFVDNHDSQPGESLESFVQEWFKPLAYALILTREQGYPSVFYGDYYGIPTHSVPAMKAKIDPILEARQNFAYGTQHDYFDHHNIIGWTREGNTTHPNSGLATIMSDGPGGEKWMYVGQNKAGQVWHDITGNKPGTVTINADGWANFSVNGGSVSIWVKR

SEQ ID NO: 16759 - protein, 485 aa, Unidentified
HHNGTNGTMMQYFEWHLPNDGNHWNRLRDDASNLRNRGITAIWIPPAWKGTSQNDVGYGAYDLYDLGEFNQKGTVRTKYGTRSQLESAIHALKNNGVQVYGDVVMNHKGGADATENVLAVEVNPNNRNQEISGDYTIEAWTKFDFPGRGNTYSDFKWRWYHFDGVDWDQSRQFQNRIYKFRGDGKAWDWEVDSENGNYDYLMYADVDMDHPEVVNELRRWGEWYTNTLNLDGFRIDAVKHIKYSFTRDWLTHVRNATGKEMFAVAEFWKNDLGALENYLNKTNWNHSVFDVPLHYNLYNASNSGGNYDMAKLLNGTVVQKHPMHAVTFVDNHDSQPGESLESFVQEWFKPLAYALILTRPQGYPSVFYGDYYGIPTHSVPAMKAKIDPILEARQNFAYGTQHDYFDHHNIIGWTREGNTTHPNSGLATIMSDGPGGEKWMYVGQNKAGQVWHDITGNKPGTVTINADGWANFSVNGGSVSIWVKR

SEQ ID NO: 16760 - protein, 485 aa, Unidentified
HHNGTNGTMMQYFEWHLPNDGNHWNRLRDDASNLRNRGITAIWIPPAWKGTSQNDVGYGAYDLYDLGEFNQKGTVRTKYGTRSQLESAIHALKNNGVQVYGDVVMNHKGGADATENVLAVEVNPNNRNQEISGDYTIEAWTKFDFPGRGNTYSDFKWRWYHFDGVDWDQSRQFQNRIYKFRGDGKAWDWEVDSENGNYDYLMYADVDMDHPEVVNELRRWGEWYTNTLNLDGFRIDAVKHIKYSFTRDWLTHVRNATGKEMFAVAEFWKNDLGALENYLNKTNWNHSVFDVPLHYNLYNASNSGGNYDMAKLLNGTVVQKHPMHAVTFVDNHDSQPGESLESFVQEWFKPLAYALILTREQGYPSVFYGDYYGIPTHSVPAMKAKIDPILEARQNFAYGTQHDYFDHHNIIGWTREGNTTHPNSGLATIMSDGPGGEKWMYVGQNKAGQVWHDICGNKPGTVTINADGWANFSVNGGSVSIWVKR

SEQ ID NO: 16761 - protein, 485 aa, Bacillus sp.
HHNGTNGTMMQYFEWHLPNDGNHWNRLRDDASNLRNRGITAIWIPPAWKGTSQNDVGYGAYDLYDLGEFNQKGTVRTKYGTRSQLESAIHALKNNGVQVYGDVVMNHKGGADATENVLAVEVNPNNRNQEISGDYTIEAWTKFDFPGRGNTYSDFKWRWYHFDGVDWDQSRQFQNRIYKFRGDGKAWDWEVDSENGNYDYLMYADVDMDHPEVVNELRRWGEWYTNTLNLDGFRIDAVKHIKISFTRDWLTHVRNATGKEMFAVAEFWKNDLGALENYLNKTNWNHSVFDVPLHYNLYNASNSGGNYDMAKLLNGTVVQKHPMHAVTFVDNHDSQPGESLESFVQEWFKPLAYALILTREQGYPSVFYGDYYGIPTHSVPAMKAKIDPILEARQNFAYGTQHDYFDHHNIIGWTREGNTTHPNSGLATIMSDGPGGEKWMYVGQNKAGQVWHDITGNKPGTVTINADGWANFSVNGGSVSIWVKR

SEQ ID NO: 16762 - protein, 485 aa, Unidentified
HHNGTNGTMMQYFEWHLPNDGNHWNRLRDDASNLRNRGITAIWIPPAWKGTSQNDVGYGAYDLYDLGEFNQKGTVRTKYGTRSQLESAIHALKNNGVQVYGDVVMNHKGGADATENVLAVEVNPNNRNQEISGDYTIEAWTKFDFPGRGNTYSDFKWRWYHFDGVDWDQSRQFQNRIYKFRGDGKAWDWEVDSENGNYDYLMYADVDMDHPEVVNELRRWGEWYTNTLNLDGFRIDAVKHIKYSFTRDWLTHVRNATGKEMFAVAEFWKNDLGALENYLNKTNWNHSVFDVPLHYNLYNASNSGGNYDMAKLLNGTVVQKRPMHAVTFVDNHDSQPGESLESFVQEWFKPLAYALILTREQGYPSVFYGDYYGIPTHSVPAMKAKIDPILEARQNFAYGTQHDYFDHHNIIGWTREGNTTHPNSGLATIMSDGPGGEKWMYVGQNKAGQVWHDITGNKPGTVTINADGWANFSVNGGSVSIWVKR

SEQ ID NO: 16763 - protein, 485 aa, Unidentified
HHNGTNGTMMQYFEWHLPNDGNHWNRLRDDASNLRNRGITAIWIPPAWKGTSQNDVGYGAYDLYDLGEFNQKGTVRTKYGTRSQLESAIHALKNNGVQVYGDVVMNHKGGADATENVLAVEVNPNNRNQEISGDYTIEAWTKFDFPGRGNTYSDFKWRWYHFDGVDWDQSRQFQNRIYKFRGDGKAWDWEVDSENGNYDYLMYADVDMDHPEVVNELRRWGEWYTNTLNLDGFRIDAVKHIKYSFTRDWLTHVRNATGKEMFAVAEFWKNDLGALENYLNKTNWNHSVFDVPLHYNLYNASNSGGNYDMAKLLNGTVVQKHPMHAVTFVDNHDSQPGESLESFVQEWFKPLAYALILTREQGYPSVFYGDYYGIPTHSVPAMKAKIDPILEARQNFAYGTQHDYFDHHNIIGWTREGNTTHPYSGLATIMSDGPGGEKWMYVGQNKAGQVWHDITGNKPGTVTINADGWANFSVNGGSVSIWVKR

SEQ ID NO: 16764 - protein, 485 aa, Unidentified
HHNGTNGTMMQYFEWHLPNDGNHWNRLRDDASNLRNRGITAIWIPPAWKGTSQNDVGYGAYDLYDLGEFNQKGTVRTKYGTRSQLESAIHALKNNGVQVYGDVVMNHKGGADATENVLAVEVNPNNRNQEISGDYTIEAWTKFDFPGRGNTYSDFKWRWYHFDGVDWDQSRQFQNRIYKFRGDGKAWDWEVDSENGNYDYLMYADVDMDHPEVVNELRRWGEWYTNTLNLDGFRIDAVKHIKYSFTRDWLTHVRNATGKEMFAVAEFWKNDLGALENYLNKTNWNHSVFDVPLHYNLYNASNSGGNYDMAKLLNGTVVQKHPYHAVTFVDNHDSQPGESLESFVQEWFKPLAYALILTREQGYPSVFYGDYYGIPTHSVPAMKAKIDPILEARQNFAYGTQHDYFDHHNIIGWTREGNTTHPNSGLATIMSDGPGGEKWMYVGQNKAGQVWHDITGNKPGTVTINADGWANFSVNGGSVSIWVKR

SEQ ID NO: 16765 - protein, 485 aa, Unidentified
HHNGTNGTMMQYFEWHLPNDGNHWNRLRDDASNLRNRGITAIWIPPAWKGTSQNDVGYGAYDLYDLGEFNQKGTVRTKYGTRSQLESAIHALKNNGVQVYGDVVMNHKGGADAMENVLAVEVNPNNRNQEISGDYTIEAWTKFDFPGRGNTYSDFKWRWYHFDGVDWDQSRQFQNRIYKFRGDGKAWDWEVDSENGNYDYLMYADVDMDHPEVVNELRRWGEWYTNTLNLDGFRIDAVKHIKYSFTRDWLTHVRNATGKEMFAVAEFWKNDLGALENYLNKTNWNHSVFDVPLHYNLYNASNSGGNYDMAKLLNGTVVQKHPMHAVTFVDNHDSQPGESLESFVQEWFKPLAYALILTREQGYPSVFYGDYYGIPTHSVPAMKAKIDPILEARQNFAYGTQHDYFDHHNIIGWTREGNTTHPNSGLATIMSDGPGGEKWMYVGQNKAGQVWHDITGNKPGTVTINADGWANFSVNGGSVSIWVKR

SEQ ID NO: 16766 - protein, 485 aa, Unidentified
HHNGTNGTMMQYFEWHLPNDGNHWNRLRDDASNLRNRGITAIWIPPAWKGTSQNDVGYGAYDLYDLGEFNQKGTVRTKYGTRSQLESAIHALKNNGVQVYGDVVMNHKGGADATECVLAVEVNPNNRNQEISGDYTIEAWTKFDFPGRGNTYSDFKWRWYHFDGVDWDQSRQFQNRIYKFRGDGKAWDWEVDSENGNYDYLMYADVDMDHPEVVNELRRWGEWYTNTLNLDGFRIDAVKHIKYSFTRDWLTHVRNATGKEMFAVAEFWKNDLGALENYLNKTNWNHSVFDVPLHYNLYNASNSGGNYDMAKLLNGTVVQKHPMHAVTFVDNHDSQPGESLESFVQEWFKPLAYALILTREQGYPSVFYGDYYGIPTHSVPAMKAKIDPILEARQNFAYGTQHDYFDHHNIIGWTREGNTTHPNSGLATIMSDGPGGEKWMYVGQNKAGQVWHDITGNKPGTVTINADGWANFSVNGGSVSIWVKR

SEQ ID NO: 16767 - protein, 485 aa, Unidentified
HHNGTNGTMMQYFEWHLPNDGNHWNRLRDDASNLRNRGITAIWIPPAWKGTSQNDVGYGAYDLYDLGEFNQKGTVRTKYGTRSQLESAIHALKNNGVQVYGDVVMNHKGGADATENVLAVEVNPNNRNQEISGDYTIEAWTKFDFPGRGNTYSDFKWRWYHFDGVDWDQSRQFQNRIYKFRGDGKAWDWEVDSENGNYDYLMYADVDMDHPEVVNELRVWGEWYTNTLNLDGFRIDAVKHIKYSFTRDWLTHVRNATGKEMFAVAEFWKNDLGALENYLNKTNWNHSVFDVPLHYNLYNASNSGGNYDMAKLLNGTVVQKHPMHAVTFVDNHDSQPGESLESFVQEWFKPLAYALILTREQGYPSVFYGDYYGIPTHSVPAMKAKIDPILEARQNFAYGTQHDYFDHHNIIGWTREGNTTHPNSGLATIMSDGPGGEKWMYVGQNKAGQVWHDITGNKPGTVTINADGWANFSVNGGSVSIWVKR

SEQ ID NO: 16768 - protein, 485 aa, Unidentified
HHNGTNGTMMQYFEWHLPNDGNHWNRLRDDASNLRNRGITAIWIPPAWKGTSQNDVGYGAYDLYDLGEFNQKGTVRTKYGTRSQLESAIHALKNNGVQVYGDVVMNHKGGADATENVLAVEVNPNNRNQEISGDYTIEAWTKFDFPGRGNTYSDFKWRWYHFDGVDWDQSRQFQNRIYKFRGDGKAWDWEVDSENGNYDYLMYADVDMDHPEVVNELRRWGEWYTNTLNLDGFRIDAVKHIKYSFTRDWLTHVRNATGKEMFAVAEFWKNDLGALENYLNKTNWNHSVFDVPLHYNLYNASNSGGNYDMAKLLNGTVVQKHPMHAVTFVDNHDSQPGESLESFVQEWFKPLAYALILTREQGYPSVFYGDYYGIPTHSVPAMKAKIDPILEARQNFAYGTQHDYFDHHNIIGWTREGPTTHPNSGLATIMSDGPGGEKWMYVGQNKAGQVWHDITGNKPGTVTINADGWANFSVNGGSVSIWVKR

SEQ ID NO: 16769 - protein, 485 aa, Unidentified
HHNGTNTTMMQYFEWHLPNDGNHWNRLRDDASNLRNRGITAIWIPPAWKGTSQNDVGYGAYDLYDLGEFNQKGTVRTKYGTRSQLESAIHALKNNGVQVYGDVVMNHKGGADATENVLAVEVNPNNRNQEISGDYTIEAWTKFDFPGRGNTYSDFKWRWYHFDGVDWDQSRQFQNRIYKFRGDGKAWDWEVDSENGNYDYLMYADVDMDHPEVVNELRRWGEWYTNTLNLDGFRIDAVKHIKYSFTRDWLTHVRNATGKEMFAVAEFWKNDLGALENYLNKTNWNHSVFDVPLHYNLYNASNSGGNYDMAKLLNGTVVQKHPMHAVTFVDNHDSQPGESLESFVQEWFKPLAYALILTREQGYPSVFYGDYYGIPTHSVPAMKAKIDPILEARQNFAYGTQHDYFDHHNIIGWTREGNTTHPNSGLATIMSDGPGGEKWMYVGQNKAGQVWHDITGNKPGTVTINADGWANFSVNGGSVSIWVKR

SEQ ID NO: 16770 - protein, 485 aa, Unidentified
HHNGTNGTMMQYFEWHLPNDGNHWNRLRDDASNLRNRGITAIWIPPAWKGTSQNDVGYGAYDLYDLGEFNQKGTVRTKYGTRSQLESAIHALKNNGVTVYGDVVMNHKGGADATENVLAVEVNPNNRNQEISGDYTIEAWTKFDFPGRGNTYSDFKWRWYHFDGVDWDQSRQFQNRIYKFRGDGKAWDWEVDSENGNYDYLMYADVDMDHPEVVNELRRWGEWYTNTLNLDGFRIDAVKHIKYSFTRDWLTHVRNATGKEMFAVAEFWKNDLGALENYLNKTNWNHSVFDVPLHYNLYNASNSGGNYDMAKLLNGTVVQKHPMHAVTFVDNHDSQPGESLESFVQEWFKPLAYALILTREQGYPSVFYGDYYGIPTHSVPAMKAKIDPILEARQNFAYGTQHDYFDHHNIIGWTREGNTTHPNSGLATIMSDGPGGEKWMYVGQNKAGQVWHDITGNKPGTVTINADGWANFSVNGGSVSIWVKR

SEQ ID NO: 16771 - protein, 485 aa, Unidentified
HHNGTNGTMMQYFEWHLPNDGNHWNRLRDDASNLRNRGITAIWIPPAWKGTSQNDVGYGAYDLYDLGEFNQKGTVRTKYGTRSQLESAIHALKNNGVQVYGDVVMNHKGGADATENVLAVEVNPNNRNQEISGDYTIEAWTKFDFPGRGNTYSDFKWRWYHFDGVDWDQSRQFQNRIYKFRGDGKAWDWEVDSENGNYDYLMYADVDMDHPEVVNELRRWGEWYTNTLNLDGFRIDAVKHIKYSFTRDWLTHVRNADGKEMFAVAEFWKNDLGALENYLNKTNWNHSVFDVPLHYNLYNASNSGGNYDMAKLLNGTVVQKHPMHAVTFVDNHDSQPGESLESFVQEWFKPLAYALILTREQGYPSVFYGDYYGIPTHSVPAMKAKIDPILEARQNFAYGTQHDYFDHHNIIGWTREGNTTHPNSGLATIMSDGPGGEKWMYVGQNKAGQVWHDITGNKPGTVTINADGWANFSVNGGSVSIWVKR

SEQ ID NO: 16772 - protein, 485 aa, Unidentified
HHNGTNGTMMQYFEWHLPNDGNHWNRLRDDASNLRNRGITAIWIPPAWKGTSQNDVGYGAYDLYDLGEFNQKGTVRTKYGTRSQLESAIHALKNNGVQVYGDVVMNHKGGADATENVLAVEVNPNNRNQEISGDYTIEAWTKFDFPGRGNTYSDFKWRWYHFDGVDWDQSRQFQNRIYKFRGDGKAWDWEVDSENGNYDYLMYADVDMDHPEVVNELRRWGEWYTNTLNLDGFRIDAVKHIKYSFTRDWLTHVRNATGKEMFAVAEFWKNDLGALENYLNKTNWNHSVFDVPLHYNLYNASNSGGNYDMAKLLNGTVVQKHPMHAVTFVDNHDSQPGESLESFVQEWFKPLAYALILTREQGSPSVFYGDYYGIPTHSVPAMKAKIDPILEARQNFAYGTQHDYFDHHNIIGWTREGNTTHPNSGLATIMSDGPGGEKWMYVGQNKAGQVWHDITGNKPGTVTINADGWANFSVNGGSVSIWVKR

SEQ ID NO: 16773 - protein, 485 aa, Bacillus sp.
HHNGTNGTMMQYFEWHLPNDGNHWNRLRDDASNLRNRGITAIWIPPAWKGTSQNDVGYGAYDLYDLGEFNQKGTVRTKYGTRSQLESAIHALKNNGVQVYGDVVMNHKGGADATENVLAVEVNPNNRNQEISGDYTIEAWTKFDFPGRGNTYSDFKWRWYHFDGVDWDQSRQFQNRIYKFRGDGKAWDWEVDSENGNYDYLMYADVDMDHPEVVNELRRWGEWYTNTLNLDGFRIDAVKHIKLSFTRDWLTHVRNATGKEMFAVAEFWKNDLGALENYLNKTNWNHSVFDVPLHYNLYNASNSGGNYDMAKLLNGTVVQKHPMHAVTFVDNHDSQPGESLESFVQEWFKPLAYALILTREQGYPSVFYGDYYGIPTHSVPAMKAKIDPILEARQNFAYGTQHDYFDHHNIIGWTREGNTTHPNSGLATIMSDGPGGEKWMYVGQNKAGQVWHDITGNKPGTVTINADGWANFSVNGGSVSIWVKR

SEQ ID NO: 16774 - protein, 485 aa, Unidentified
HHNGTNGTMMQYFEWHLPNDGNHWNRLRDDASNLRNRGITAIWIPPAWKGTSQNDVGYGAYDLYDLGEFNQKGTVRTKYGTRSQLESAIHALKNNGVQVYGDVVMNHKGGADATENVLAVEVNPNNRNQEISGDYTIEAWTKFDFPGRGNTYSDFKWRWYHFDGVDWDQSRQFQNRIYKFRGDGKAWDWEVDSENGNYDYLMYADVDMDHPEVVNELRRWGEWYTNTLNLDGFRIDAVKHIKYSFTRDWLTHVRNATGKEMFAVAEFWKNDLGALENYLNKTNWNHSVFDVPLHYNLYNASNSGGNYDMAKLLNGTVVQKHPMHAVTFVDNHDSQPGESLESFVQEWFKPLAYALILTREQGYPSVFYGDYYGIPTHSVPAMKAKIDPILEARQNFAEGTQHDYFDHHNIIGWTREGNTTHPNSGLATIMSDGPGGEKWMYVGQNKAGQVWHDITGNKPGTVTINADGWANFSVNGGSVSIWVKR

SEQ ID NO: 16775 - protein, 485 aa, Unidentified
HHNGTNGTMMQYFEWHLPNDGNHWNRLRDDASNLRNRGITAIWIPPAWKGTSQNDVGYGAYDLYDLGEFNQKGTVRTKYGTRSQLESAIHALKNNGVQVYGDVVMNHKGGADATENVLAVEVNPNNRNQEISGDYTIEAWTKFDFPGRGNTYSDFKWRWYHFDGVDWDQSRQFQNRIYKFEGDGKAWDWEVDSENGNYDYLMYADVDMDHPEVVNELRRWGEWYTNTLNLDGFRIDAVKHIKYSFTRDWLTHVRNATGKEMFAVAEFWKNDLGALENYLNKTNWNHSVFDVPLHYNLYNASNSGGNYDMAKLLNGTVVQKHPMHAVTFVDNHDSQPGESLESFVQEWFKPLAYALILTREQGYPSVFYGDYYGIPTHSVPAMKAKIDPILEARQNFAYGTQHDYFDHHNIIGWTREGNTTHPNSGLATIMSDGPGGEKWMYVGQNKAGQVWHDITGNKPGTVTINADGWANFSVNGGSVSIWVKR

SEQ ID NO: 16776 - protein, 485 aa, Unidentified
HHNGTNGTMMQYFEWHLPNDGNHWNRLRDDASNLRNRGITAIWIPPAWKGTSQNDVGYGAYDLYDLGEFNQKGTVRTKYGTRSQLESAIHALKNNGVQVYGDVVMNHKGGADATENVLAVEVNPNNRNQEISGDYTIEAWTKFDFPGRGNTYSDFKWRWYHFDGVDWDQSRQFQNRIYKFRGDGKAWDWEVDSENGNYDYLMYADVDMDHPEVVNELRRWGEWYTNTLNLTGFRIDAVKHIKYSFTRDWLTHVRNATGKEMFAVAEFWKNDLGALENYLNKTNWNHSVFDVPLHYNLYNASNSGGNYDMAKLLNGTVVQKHPMHAVTFVDNHDSQPGESLESFVQEWFKPLAYALILTREQGYPSVFYGDYYGIPTHSVPAMKAKIDPILEARQNFAYGTQHDYFDHHNIIGWTREGNTTHPNSGLATIMSDGPGGEKWMYVGQNKAGQVWHDITGNKPGTVTINADGWANFSVNGGSVSIWVKR

SEQ ID NO: 16777 - protein, 485 aa, Bacillus sp.
HHNGTNGTMMQYFEWHLPNDGNHWNRLRDDASNLRNRGITAIWIPPAWKGTSQNDVGYGAYDLYDLGEFNQKGTVRTKYGTRSQLESAIHALKNNGVQVYGDVVMNHKGGADATENVLAVEVNPNNRNQEISGDYTIEAWTKFDFPGRGNTYSDFKWRWYHFDGVDWDQSRQFQNRIYKFRGDGKAWDWEVDSENGNYDYLMYADVDMDIPEVVNELRRWGEWYTNTLNLDGFRIDAVKHIKYSFTRDWLTHVRNATGKEMFAVAEFWKNDLGALENYLNKTNWNHSVFDVPLHYNLYNASNSGGNYDMAKLLNGTVVQKHPMHAVTFVDNHDSQPGESLESFVQEWFKPLAYALILTREQGYPSVFYGDYYGIPTHSVPAMKAKIDPILEARQNFAYGTQHDYFDHHNIIGWTREGNTTHPNSGLATIMSDGPGGEKWMYVGQNKAGQVWHDITGNKPGTVTINADGWANFSVNGGSVSIWVKR

SEQ ID NO: 16778 - protein, 485 aa, Bacillus sp.
HHNGTNGTMMQYFEWHLPNDGNHWNRLRDDASNLRNRGITAIWIPPAWKGTSQNDVGYGAYDLYDLGEFNQKGTVRTKYGTRSQLESAIHALKNNGVQVYGDVVMNHKGGADATENVLAVEVNPNNRNQEISGDYTIEAWTKFDFPGRGNTYSDFKWRWYHFDGVDWDQSRQFQNRIYKFRGDGKAWDWEVDSENGNYDYLMWADVDMDHPEVVNELRRWGEWYTNTLNLDGFRIDAVKHIKYSFTRDWLTHVRNATGKEMFAVAEFWKNDLGALENYLNKTNWNHSVFDVPLHYNLYNASNSGGNYDMAKLLNGTVVQKHPMHAVTFVDNHDSQPGESLESFVQEWFKPLAYALILTREQGYPSVFYGDYYGIPTHSVPAMKAKIDPILEARQNFAYGTQHDYFDHHNIIGWTREGNTTHPNSGLATIMSDGPGGEKWMYVGQNKAGQVWHDITGNKPGTVTINADGWANFSVNGGSVSIWVKR

SEQ ID NO: 16779 - protein, 485 aa, Unidentified
HHNGTNGTMMQYFEWHLPNDGNHWNRLRDDASNLRNRGITAIWIPPAWKGTSQNDVGYGAYDLYDLGEFNQKGTVRTKYGTRSQLESAIHALKNNGVQVYGDVVMNHKGGADATENVLAVEVNPNNRNQEISVDYTIEAWTKFDFPGRGNTYSDFKWRWYHFDGVDWDQSRQFQNRIYKFRGDGKAWDWEVDSENGNYDYLMYADVDMDHPEVVNELRRWGEWYTNTLNLDGFRIDAVKHIKYSFTRDWLTHVRNATGKEMFAVAEFWKNDLGALENYLNKTNWNHSVFDVPLHYNLYNASNSGGNYDMAKLLNGTVVQKHPMHAVTFVDNHDSQPGESLESFVQEWFKPLAYALILTREQGYPSVFYGDYYGIPTHSVPAMKAKIDPILEARQNFAYGTQHDYFDHHNIIGWTREGNTTHPNSGLATIMSDGPGGEKWMYVGQNKAGQVWHDITGNKPGTVTINADGWANFSVNGGSVSIWVKR

SEQ ID NO: 16780 - protein, 485 aa, Unidentified
HHNGTNGTMMQYFEWHLPNDGNHWNRLRDDASNLRNRGITAIWIPPAWKGTSQNDVGYGAYDLYDLGEFNQKGTVRTKYGTRSQLESAIHALKNNGVQVYGDVVMNHKGGADATENVLAVEVNPNNRNQEISGDYTIEAWTKFDFPGRGNTYSDFKWRWYHFDGVDWDQSRQFQNRIYKFRGDGKAWDWEVDSENGNYDYLMYADVDMDHPEVVNELRRWGEWYTNTLNLDGFRIDAVKHIKYSFTRDWLTHVRNATGKEMFAVAEFWKNDLGALENYLNKTNWNHSVFDVPLHYNLYNASNSGGNYDMAKLLNGTVVQKHPMHAVTFVDNHDSQPGESLESFVQEWFKPLAYALILTREQMYPSVFYGDYYGIPTHSVPAMKAKIDPILEARQNFAYGTQHDYFDHHNIIGWTREGNTTHPNSGLATIMSDGPGGEKWMYVGQNKAGQVWHDITGNKPGTVTINADGWANFSVNGGSVSIWVKR

SEQ ID NO: 16781 - protein, 485 aa, Unidentified
HHNGTNGTMMQYFEWHLPNDGNHWNRLRDDASNLRNRGITAIWIPPAWKGTSQNDVGYGAYDLYDLGEFNQKGTVRTKYGTRSQLESAIHALKNNGVQVYGDVVMNHKGGADATENVLAVEVNPNNRNQEISGDYTIEAWTKFDFPGRGNTYSDFKWRWYHFDGVDWDQSRQFQNRIYKFRGDGKAWDWEVDSENGNYDYLMYADVDMDHPEVVNELRRWGEWYTNTLNLDGFRIDAVKHIKYSFTRDWLTHVRNATGKEMFAVAEFWKNDLGALENYLNKTNWNHSVFDVPLHYNLYNASNSGGNYDMAKLLNGTVVQKHPMHAVTFVDNHDSQPGESLESFVQEWFKPLAYALILTREQGYPSVFYGDYYGIPTHSVPAMKAKIDPILEARQNFAYGTQHDYFDHHNIIGWTREGNTTHPNSGLATIMSDGPGGEKWMYVGQNKAGQVWHDITGNKPGTVTINADGSANFSVNGGSVSIWVKR

SEQ ID NO: 16782 - protein, 485 aa, Unidentified
HHNGTNGTMMQYFEWHLPNDGNHWNRLRDDASNLRNRGITAIWIPPAWKGTSQNDVGYGAYDLYDLGEFNQKGTVRTKYGTRSQLESAIHALKNNGVQVYGDVVMNHKGGADATENVLAVEVNPNNRNQEISGDYTIEAWTKFDFPGRGNTYSDFKWRWYHFDGVDWDQSRQFQNRIYKFRGDGKAWDWEVDSENGNYDYLMYADVDMDHPEVVNELRRWGEWYLNTLNLDGFRIDAVKHIKYSFTRDWLTHVRNATGKEMFAVAEFWKNDLGALENYLNKTNWNHSVFDVPLHYNLYNASNSGGNYDMAKLLNGTVVQKHPMHAVTFVDNHDSQPGESLESFVQEWFKPLAYALILTREQGYPSVFYGDYYGIPTHSVPAMKAKIDPILEARQNFAYGTQHDYFDHHNIIGWTREGNTTHPNSGLATIMSDGPGGEKWMYVGQNKAGQVWHDITGNKPGTVTINADGWANFSVNGGSVSIWVKR

SEQ ID NO: 16783 - protein, 485 aa, Unidentified
HHNGTNGTMMQYFEWHLPNDGNHWNRLRDDASNLRNRGITAIWIPPAWKGTSQNDVGYGAYDLYDLGEFNQKGTVRTKYGTRSQLESAIHALKNNGVQVYGDVVMNHKGGADATENVLAVEVNPNNRNQEISGDYTIEAWTKFDFPGRGNTYSDFKWRWYHFDGVDWDQSRQFQNRIYKFRGDGKAWDWEVDSENGNYDYLMYADVDMDHPEVVNELRRWGEWYTNTLNLDGFRIDAVKHIKYSFTRDWLTHVRNATGKEMFAVAEFWKNDLGALENYLNKTNWNHSVFDVPLHYNLYNASNSGGNYDMAKLLNGTVVQKHPMHAVTFVDNHDSQPGESLESFVQEWFKPLAYALILTREQGYPSVFYGDYYGIPTHSVPAMKAKIDPILEARQNFAYGTQHDYFDHHNIIGWTREGNTTHPMSGLATIMSDGPGGEKWMYVGQNKAGQVWHDITGNKPGTVTINADGWANFSVNGGSVSIWVKR

SEQ ID NO: 16784 - protein, 485 aa, Unidentified
HHNGTNGTMMQYFEWHLPNDGNHWNRLRDDASNLRNRGITAIWIPPAWKGTSQNDVGYGAYDLYDLGEFNQKGTVRTKYGTRSQLESAIHALKNNGVQVYGDVVMNHKGGADATENVLAVEVNPNNRNQEISGDYTIEAWTKFDFPGRGNTYSDFKWRWYHFDGVDWDQSRQFQNRIYKFRGDGKAWDWEVDSENGNYDYLMYADVDMDHPEVVNELRRWGEWYTNTLNLDGFRIDAVKHIKYSFTRDWLTHVRNATGKEMFAVAEFWKNDLGALENYLNKTNWNHSVFDVPLHYNLYNASNSGGNYDMAKLLNGTVVQKHPMHAVTFVDNHDSQPGESLESFVQEWFKPLAYALILTREQGYPSVFYGDYYGIPTHSVPAMKAKIDPILEARQDFAYGTQHDYFDHHNIIGWTREGNTTHPNSGLATIMSDGPGGEKWMYVGQNKAGQVWHDITGNKPGTVTINADGWANFSVNGGSVSIWVKR

SEQ ID NO: 16785 - protein, 485 aa, Unidentified
HHNGTNGTMMQYFEWHLPNDGNHWNRLRDDASNLRNRGITAIWIPPAWKGTSQNDVGYGAYDLYDLGEFNQKGTVRTKYGTRSQLESAIHALKNNGVQVYGDVVMNHKGGADATENVLAVEVNPNNRNQEISGDYTIEAPTKFDFPGRGNTYSDFKWRWYHFDGVDWDQSRQFQNRIYKFRGDGKAWDWEVDSENGNYDYLMYADVDMDHPEVVNELRRWGEWYTNTLNLDGFRIDAVKHIKYSFTRDWLTHVRNATGKEMFAVAEFWKNDLGALENYLNKTNWNHSVFDVPLHYNLYNASNSGGNYDMAKLLNGTVVQKHPMHAVTFVDNHDSQPGESLESFVQEWFKPLAYALILTREQGYPSVFYGDYYGIPTHSVPAMKAKIDPILEARQNFAYGTQHDYFDHHNIIGWTREGNTTHPNSGLATIMSDGPGGEKWMYVGQNKAGQVWHDITGNKPGTVTINADGWANFSVNGGSVSIWVKR

SEQ ID NO: 16786 - protein, 485 aa, Unidentified
HHNGTNETMMQYFEWHLPNDGNHWNRLRDDASNLRNRGITAIWIPPAWKGTSQNDVGYGAYDLYDLGEFNQKGTVRTKYGTRSQLESAIHALKNNGVQVYGDVVMNHKGGADATENVLAVEVNPNNRNQEISGDYTIEAWTKFDFPGRGNTYSDFKWRWYHFDGVDWDQSRQFQNRIYKFRGDGKAWDWEVDSENGNYDYLMYADVDMDHPEVVNELRRWGEWYTNTLNLDGFRIDAVKHIKYSFTRDWLTHVRNATGKEMFAVAEFWKNDLGALENYLNKTNWNHSVFDVPLHYNLYNASNSGGNYDMAKLLNGTVVQKHPMHAVTFVDNHDSQPGESLESFVQEWFKPLAYALILTREQGYPSVFYGDYYGIPTHSVPAMKAKIDPILEARQNFAYGTQHDYFDHHNIIGWTREGNTTHPNSGLATIMSDGPGGEKWMYVGQNKAGQVWHDITGNKPGTVTINADGWANFSVNGGSVSIWVKR

SEQ ID NO: 16787 - protein, 485 aa, Unidentified
HHNGTNGTMMQYFEWHLPNDGNHWNRLRDDASNLRNRGITAIWIPPAWKGTSQNDVGYGAYDLYDLGEFNQKGTVRTKYGTRSQLESAIHALKNNGVQVYGDVVMNHKGGADATENVLYVEVNPNNRNQEISGDYTIEAWTKFDFPGRGNTYSDFKWRWYHFDGVDWDQSRQFQNRIYKFRGDGKAWDWEVDSENGNYDYLMYADVDMDHPEVVNELRRWGEWYTNTLNLDGFRIDAVKHIKYSFTRDWLTHVRNATGKEMFAVAEFWKNDLGALENYLNKTNWNHSVFDVPLHYNLYNASNSGGNYDMAKLLNGTVVQKHPMHAVTFVDNHDSQPGESLESFVQEWFKPLAYALILTREQGYPSVFYGDYYGIPTHSVPAMKAKIDPILEARQNFAYGTQHDYFDHHNIIGWTREGNTTHPNSGLATIMSDGPGGEKWMYVGQNKAGQVWHDITGNKPGTVTINADGWANFSVNGGSVSIWVKR

SEQ ID NO: 16788 - protein, 485 aa, Unidentified
HHNGTNGTMMQYFEWHLPNDGNHWNRLRDDASNLRNRGITAIWIPPAWKGTSQNDVGYGAYDLYDLGEFNQKGTVRTKYGTRSQLESAIHALKNNGVQVYGDVVMNHKGGADATENVLAVEVNPNNRNQEISGDYTIEAWTKFDFPGRGNTYSDFKWRWYHFDGVDWDQSRQFQNRIYKFRGDGKAWDWEVDSENGNYDYLMYADVDMDHPEVVNELRRWGEWYTNTLNLDGFRIDAVKHIKYSFTRDWLTHVRNATGKEMFAVAEFWKNDLGALENYLNKTNWNHSVFDVPLHYNLYNASNSGGNYDMAKLLNGTVVQKHPMHAVTFVDNHDSQPGESLESFVQEWFKPLAYALILTREQGYPSVFYGDYYGIPTHSVPAMKAKIDPILEARQNFAYGTQHDYFDHHNIIGWTRNGNTTHPNSGLATIMSDGPGGEKWMYVGQNKAGQVWHDITGNKPGTVTINADGWANFSVNGGSVSIWVKR

SEQ ID NO: 16789 - protein, 485 aa, Unidentified
HHNGTNGTMMQYFEWHLPNDGNHWNRLRDDASNLRNRGITAIWIPPAWKGTSQNDVGYGAYDLYDLGEFNQKGTVRTKYGTRSQLESAIHALKNNGVQVYGDVVMNHKGGADATENVLAVEVNPNNRNQEISGDYTIEAWTKFDFPGRGNTYSDFKWRWYHFDGVDWDQSRQFQNRIYKFRGDGKAWDWEVDSENGNYDYLMYADVDMDHPEVVNELRRWGEWYTNTLNLDGFRIDAVKHIKYSFTRDWLTHVRNATGKEMFAVAEFWKNDLGALENYLNKTNWNHSVFDVPLHYNLENASNSGGNYDMAKLLNGTVVQKHPMHAVTFVDNHDSQPGESLESFVQEWFKPLAYALILTREQGYPSVFYGDYYGIPTHSVPAMKAKIDPILEARQNFAYGTQHDYFDHHNIIGWTREGNTTHPNSGLATIMSDGPGGEKWMYVGQNKAGQVWHDITGNKPGTVTINADGWANFSVNGGSVSIWVKR

SEQ ID NO: 16790 - protein, 485 aa, Unidentified
HHNGTNGTMMQYFEWHLPNDGNHWNRLRDDASNLRNRGITAIWIPPAWKGTSQNDVGYGAYDLYDLGEFNQKGTVRTKYGTRSQLESAIHALKNNGVQVYGDVVMNHKGGADATENVLAVEVNPNNRNQEISGDYTIEAWTKFDFPGRGNTYSDFKWRWYHFDGVDWDQSRQFQNRIYKFRGDGKAWDWEVDSENGNYDYLMYADVDMDHPEVVNELRRWGEWYTNTLNLDGFRIDAVKHIKYSFTRDWLTHVRNAYGKEMFAVAEFWKNDLGALENYLNKTNWNHSVFDVPLHYNLYNASNSGGNYDMAKLLNGTVVQKHPMHAVTFVDNHDSQPGESLESFVQEWFKPLAYALILTREQGYPSVFYGDYYGIPTHSVPAMKAKIDPILEARQNFAYGTQHDYFDHHNIIGWTREGNTTHPNSGLATIMSDGPGGEKWMYVGQNKAGQVWHDITGNKPGTVTINADGWANFSVNGGSVSIWVKR

SEQ ID NO: 16791 - protein, 485 aa, Unidentified
HHNGTNGTMMQYFEWHLPNDGNHWNRLRDDASNLRNRGITAIWIPPAWKGTSQNDVGYGAYDLYDLGEFNQKGTVRTKYGTRSQLESAIHALKNNGVQVYGDVVMNHKGKADATENVLAVEVNPNNRNQEISGDYTIEAWTKFDFPGRGNTYSDFKWRWYHFDGVDWDQSRQFQNRIYKFRGDGKAWDWEVDSENGNYDYLMYADVDMDHPEVVNELRRWGEWYTNTLNLDGFRIDAVKHIKYSFTRDWLTHVRNATGKEMFAVAEFWKNDLGALENYLNKTNWNHSVFDVPLHYNLYNASNSGGNYDMAKLLNGTVVQKHPMHAVTFVDNHDSQPGESLESFVQEWFKPLAYALILTREQGYPSVFYGDYYGIPTHSVPAMKAKIDPILEARQNFAYGTQHDYFDHHNIIGWTREGNTTHPNSGLATIMSDGPGGEKWMYVGQNKAGQVWHDITGNKPGTVTINADGWANFSVNGGSVSIWVKR

SEQ ID NO: 16792 - protein, 485 aa, Unidentified
HHNGTNGTMMQYFEWHLPNDGNHWNRLRDDASNLRNRGITAIWIPPAWKGTSQNDVGYGAYDLYDLGEFNQKGTVRTKYGTRSQLESAIHALKNNGVQVYGDVVMNHKGGADATENVLAVEVNPNNRNQEISGDYTIEAWTKFDFPGRGNTYSDFKWRWYHFDGVDPDQSRQFQNRIYKFRGDGKAWDWEVDSENGNYDYLMYADVDMDHPEVVNELRRWGEWYTNTLNLDGFRIDAVKHIKYSFTRDWLTHVRNATGKEMFAVAEFWKNDLGALENYLNKTNWNHSVFDVPLHYNLYNASNSGGNYDMAKLLNGTVVQKHPMHAVTFVDNHDSQPGESLESFVQEWFKPLAYALILTREQGYPSVFYGDYYGIPTHSVPAMKAKIDPILEARQNFAYGTQHDYFDHHNIIGWTREGNTTHPNSGLATIMSDGPGGEKWMYVGQNKAGQVWHDITGNKPGTVTINADGWANFSVNGGSVSIWVKR

SEQ ID NO: 16793 - protein, 485 aa, Unidentified
HHNGTNGTMMQYFEWHLPNDGNHWNRLRDDASNLRNRGITAIWIPPAWKGTSQNDVGYGAYDLYDLGEFNQKGTVRTKYGTRSQLESAIHALKNNGVQVYGDVVMNHKGGADATENVLAVEVNPNNRNQEISGDYTIEAWTKFDFPGRGNTYSDFKWRWYHFDGVDWDQSRQFQNRIYKFRGDGKAWDWEVDSENGNYDYLMYADVDMDHPEVVNELRRWGEWYTNTLNLDGFRIDAVKHIKYSFTRDWLTHVRNATGKEMFAVAEFWKNDLGALENYLNKTNWNHSVFDVPLHYNLYNASNSGGNYDMAKLLNGTVVQKHPMHAVTFVDNHDSQPGESLEGFVQEWFKPLAYALILTREQGYPSVFYGDYYGIPTHSVPAMKAKIDPILEARQNFAYGTQHDYFDHHNIIGWTREGNTTHPNSGLATIMSDGPGGEKWMYVGQNKAGQVWHDITGNKPGTVTINADGWANFSVNGGSVSIWVKR

SEQ ID NO: 16794 - protein, 485 aa, Bacillus sp.
HHNGTNGTMMQYFEWHLPNDGNHWNRLRDDASNLRNRGITAIWIPPAWKGTSQNDVGYGAYDLYDLGEFNQKGTVRTKYGTRSQLESAIHALKNNGVQVYGDVVMNHKGGADATENVLAVEVNPNNRNQEISGDYTIEAWTKFDFPGRGNTYSDFKWRWYHFDGVDWDQSRQFQNRIYKFRGDGKAWDWEVDSELGNYDYLMYADVDMDHPEVVNELRRWGEWYTNTLNLDGFRIDAVKHIKYSFTRDWLTHVRNATGKEMFAVAEFWKNDLGALENYLNKTNWNHSVFDVPLHYNLYNASNSGGNYDMAKLLNGTVVQKHPMHAVTFVDNHDSQPGESLESFVQEWFKPLAYALILTREQGYPSVFYGDYYGIPTHSVPAMKAKIDPILEARQNFAYGTQHDYFDHHNIIGWTREGNTTHPNSGLATIMSDGPGGEKWMYVGQNKAGQVWHDITGNKPGTVTINADGWANFSVNGGSVSIWVKR

SEQ ID NO: 16795 - protein, 485 aa, Unidentified
HHNGTNGTMMQYFEWHLPNDGNHWNRLRDDASNLRNRGITAIWIPPAWKGTSQNDVGYGAYDLYDLGEFNQKGTVRTKYGTRSQLESAIHALKNNGVQVYGDVVMNHKGGADATENVLAVEVNPNNRNQEISGDYTIEAWTKFDFPGRGNTYSDFKWRWYHFDGVDWDQSRQFQNRIYKFRGDGKAWDWEVDSENGNYDYLMYADVDMDHPEVVNELRRWGEWYTNTLNLDGFRIDAVKHIKYSFTRDWLTHVRNATGKEMFAVAEFWKNDLGALENYLNKTNWNHSVFDVPLHYNLYNASNSGGNYDMAKLLNGTVVQKHPMHAVTFVDNHDSQPGESLESFCQEWFKPLAYALILTREQGYPSVFYGDYYGIPTHSVPAMKAKIDPILEARQNFAYGTQHDYFDHHNIIGWTREGNTTHPNSGLATIMSDGPGGEKWMYVGQNKAGQVWHDITGNKPGTVTINADGWANFSVNGGSVSIWVKR

SEQ ID NO: 16796 - protein, 485 aa, Bacillus sp.
HHNGTNGTMMQYFEWHLPNDGNHWNRLRDDASNLRNRGITAIWIPPAWKGTSQNDVGYGAYDLYDLGEFNQKGTVRTKYGTRSQLESAIHALKNNGVQVYGDVVMNHKGGADATENVLAVEVNPNNRNQEISGDYTIEAWTKFDFPGRGNTYSDFKWRWYHFDGVDWDQSRQFQNRIYKFRGDGKAWDWEVDSENGWYDYLMYADVDMDHPEVVNELRRWGEWYTNTLNLDGFRIDAVKHIKYSFTRDWLTHVRNATGKEMFAVAEFWKNDLGALENYLNKTNWNHSVFDVPLHYNLYNASNSGGNYDMAKLLNGTVVQKHPMHAVTFVDNHDSQPGESLESFVQEWFKPLAYALILTREQGYPSVFYGDYYGIPTHSVPAMKAKIDPILEARQNFAYGTQHDYFDHHNIIGWTREGNTTHPNSGLATIMSDGPGGEKWMYVGQNKAGQVWHDITGNKPGTVTINADGWANFSVNGGSVSIWVKR

SEQ ID NO: 16797 - protein, 485 aa, Unidentified
HHNGTNGTMMQYFEWHLPNDGNHWNRLRDDASNLRNRGITAIWIPPAWKGTSQNDVGYGAYDLYDLGEFNQKGTVRTKYGTRSQLESAIHALKNNGVQVYGDVVMNHKGGADATENVLAVEVNPNNRNQEISGDYTIEAWTKFDFPGRGNTYSDFKWRWYHFDGVDWDQSRQFQNRIYKFRGDGKAWDWEVDSENGNYDYLMYADVDMDHPEVVNELRRWGEWYTNTLNLDGFRIDAVKHIKYSFTRDWLTHVRNATGKEMFAVAEFWKNDLGALENYLNKTNWNHSVFDVPLHYNLYNASNSGGNSDMAKLLNGTVVQKHPMHAVTFVDNHDSQPGESLESFVQEWFKPLAYALILTREQGYPSVFYGDYYGIPTHSVPAMKAKIDPILEARQNFAYGTQHDYFDHHNIIGWTREGNTTHPNSGLATIMSDGPGGEKWMYVGQNKAGQVWHDITGNKPGTVTINADGWANFSVNGGSVSIWVKR

SEQ ID NO: 16798 - protein, 485 aa, Unidentified
HHNGTNGTMMQYFEWHLPNDGNHWNRLRDDASNLRNRGITAIWIPPAWKGTSQNDVGYGAYDLYDLGEFNQKGTVRTKYGTRSQLESAIHALKNNGVQVYGDVVMNHKGGADATENVLAVEVNPNIRNQEISGDYTIEAWTKFDFPGRGNTYSDFKWRWYHFDGVDWDQSRQFQNRIYKFRGDGKAWDWEVDSENGNYDYLMYADVDMDHPEVVNELRRWGEWYTNTLNLDGFRIDAVKHIKYSFTRDWLTHVRNATGKEMFAVAEFWKNDLGALENYLNKTNWNHSVFDVPLHYNLYNASNSGGNYDMAKLLNGTVVQKHPMHAVTFVDNHDSQPGESLESFVQEWFKPLAYALILTREQGYPSVFYGDYYGIPTHSVPAMKAKIDPILEARQNFAYGTQHDYFDHHNIIGWTREGNTTHPNSGLATIMSDGPGGEKWMYVGQNKAGQVWHDITGNKPGTVTINADGWANFSVNGGSVSIWVKR

SEQ ID NO: 16799 - protein, 485 aa, Unidentified
HHNGTNGTMMQYFEWHLPNDGNHWNRLRDDASNLRNRGITAIWIPPAWKGTSQNDVGYGAYDLYDLGEFNQKGTVRTKYGTRSQLESAIHALKNNGVQVYGDVVMNHKGGADATENVLAVEVNPNNRNQEISGDYTIEAWTKFDFPGRGNTYSDFKWRWYHFDGVDWDQSRQFQNRIYKFRGDGKAWDWEVDSENGNYDYLMYADVDMDHPEVVNELRRWGEWYTNTLNLDGFRIDAVKHIKYSFTRDWLTHVRNATGKEMFAVAEFWKNDLGALENYLNKTNWNHSVFDVPLHYNLYNASNSGGNYDMAKLLNGTVVQKHPMHAVTFVDNHDSQPGESLESFVQEWFKPLAYALILTREQGYPSVFYGDYYGIPTHSVPAMKAKIDPILEARQNFAYGTQHDYFDHHNIIGWTREGNTTHQNSGLATIMSDGPGGEKWMYVGQNKAGQVWHDITGNKPGTVTINADGWANFSVNGGSVSIWVKR

SEQ ID NO: 16800 - protein, 485 aa, Unidentified
HHNGTNGTMMQYFEWHLPNDGNHWNRLRDDASNLRNRGITAIWIPPAWKGTSQNDVGYGAYDLYDLGEFNQKGTVRTKYGTRSQLESAIHALKNNGVQVYGDVVMNHKGGADATENVLAVEVNPNNRNQEISGDYTIEAWTKFDFPGRGNTYSDFKWRWYHFDGVDWDQSRQFQNRIYKFRGDGKAWDWEVDSENGNYDYLMYADVDMDHPEVVNELRRWGEWYTNTLNLDGFRIDAVKHIKYSFTRDWLTHVRNATGKEMFAVAEFWKNDLGALENYLNKTNWNHSVFDVPLHYNLYNASNSGGNYDMAKLLNGTVVQKHPMHAVTFVDNHDSQPGESLESFVQEWFKPLAYALILTREQGYPSVFYGDYYGIPTHSVPAMKAKIDPILEARQNFAYGTQHDYFDHHNIIGWTREGNTTHGNSGLATIMSDGPGGEKWMYVGQNKAGQVWHDITGNKPGTVTINADGWANFSVNGGSVSIWVKR

SEQ ID NO: 16801 - protein, 485 aa, Unidentified
HHNGTNGTMMQYFEWHLPNDGNHWNRLRDDASNLRNRGITAIWIPPAWKGTSQNDVGYGAYDLYDLGEFNQKGTVRTKYGTRSQLESAIHALKNNGVQVYGDVVMNHKGGADATENVLAVEVNPNNRNQEISGDYTIEAWTKFDFPGRGNTYSDFKWRWYHFDGVDWDQSRQFQNRIYKFRGDGKAWDWEVDSENGNYDYLMYADVDMDHPEVVNELRRWGEWYTNTLNLDGFRIDAVKHIKYSFTRDWLTPVRNATGKEMFAVAEFWKNDLGALENYLNKTNWNHSVFDVPLHYNLYNASNSGGNYDMAKLLNGTVVQKHPMHAVTFVDNHDSQPGESLESFVQEWFKPLAYALILTREQGYPSVFYGDYYGIPTHSVPAMKAKIDPILEARQNFAYGTQHDYFDHHNIIGWTREGNTTHPNSGLATIMSDGPGGEKWMYVGQNKAGQVWHDITGNKPGTVTINADGWANFSVNGGSVSIWVKR

SEQ ID NO: 16802 - protein, 485 aa, Unidentified
HHNGTNGTMMQYFEWHLPNDGNHWNRLRDDASNLRNRGITAIWIPPAWKGTSQNDVGYGAYDLYDLGEFNQKGTVRTKYGTRSQLESAIHALKNNGVQVYGDVVMNHKGGADATENVLAVEVNPNNRNQEISGDYTIEAWTKFDFPGRGNTYSDFKWRWYHFDGVDWDQSRQFQNRIYKFRGDGKAWDWEVDSENGNYDYLMYADVDMDHPEVVNELRRWGEWYTNTLNLDGFRIDAVKHIKYSFTRDWLTHVRNATGKEMFAVAEFWKNDLGALENYLNKTNWNHSVFDVPLHYNLYNASNSGGNYDMAKLLNGTVVQKHPMHAVTFVDNHDSQPGESLESFVQEWFKPLAYALILTREQGYPSVFYGDYYGIPTHSVPAMKAKIDPILEARQNFAYGTQHDYFDHHNIIGWTREGNTTHPNSGLATIMSDGPGGEKIMYVGQNKAGQVWHDITGNKPGTVTINADGWANFSVNGGSVSIWVKR

SEQ ID NO: 16803 - protein, 485 aa, Unidentified
HHNGTNGTMMQYFEWHLPNDGNHWNRLRDDASNLRNRGITAIWIPPAWKGTSQNDVGYGAYDLYDLGEFNQKGTVRTKYGTRSQLESAIHALKNNGVQVYGDVVMNHKGGADATENVLAVEVNPNNRNQEISGDYTIEAWTKFDFPGRGNTYSDFKWRWYHFDGVDWDQSRQFQNRIYKFRGDGKAWDWEVDSENGNYDYLMYADVDMDHPEVVNELRRWGEWYTNTLNLDGFRIDAVKHIKYSFTRDWLTHVRNATGKEMFAVAEFWKNDLGALENYLNKTNWNHSVFDVPLHYNLYNASNSGGNYDMAKLLNGTVVQKTPMHAVTFVDNHDSQPGESLESFVQEWFKPLAYALILTREQGYPSVFYGDYYGIPTHSVPAMKAKIDPILEARQNFAYGTQHDYFDHHNIIGWTREGNTTHPNSGLATIMSDGPGGEKWMYVGQNKAGQVWHDITGNKPGTVTINADGWANFSVNGGSVSIWVKR

SEQ ID NO: 16804 - protein, 485 aa, Unidentified
HHNGTNGTMMQYFEWHLPNDGNHWNRLRDDASNLRNRGITAIWIPPAWKGTSQNDVGYGAYDLYDLGEFNQKGTVRTKYGTRSQLESAIHALKNNGVQVYGDVVMNHKGGADATENVLAVEVNPNNRNQEISGDYTIEAWTKFDFPGRGNTYSDFKWRWYHFDGVDWDQSRQFQNRIYKFRGDGKAWDWEVDSENGNYDYLMYADVDMDHPEVVNELRRWGEWYTNTLNLDGFRIDAVKHIKYSFTRDWLTHVRNATGKEMFAVAEFWKNDLGALENYLNKTNWNHSVFDVPLHYNLYNASNSGGNYDMAKLLNGTVVQKHPMHAVTFVDNHDSQPGESLESFVQEWFKPLAYALILTREQGYPSVFYGDYYGIPTHSVPAMKAKIDPILEARQNFAYGTQHDYFDHHNIIGWTREGNTTAPNSGLATIMSDGPGGEKWMYVGQNKAGQVWHDITGNKPGTVTINADGWANFSVNGGSVSIWVKR

SEQ ID NO: 16805 - protein, 485 aa, Unidentified
HHNGTNGTMMQYFEWHLPNDGNHWNRLRDDASNLRNRGITAIWIPPAWKGTSQNDVGYGAYDLYDLGEFNQKGTVRTKYGTRSQLESAIHALKNNGVQVYGDVVMNHKGGADATENVLAVEVNPNNRNQEISGDYTIEAWTKFDFPGRGNTYSDFKWRWYHFDGVDWDQSRQFQNRIYKFRGDGKAWDWEVDSENGNYDYLMYADVDMDHPEVVNELRRWGEWYTNTLNLDGFRIDAVKHIKYSFTRDWLTHVRNATGKEMFAVAEFWKNDLGALENYLNKTNWNHSVFDVPLHYNLYNASNSGGNYDMAKLLNGTVVQKHPMHAVTFVDNHDSQPGESLESFVQEWFKPLAYALILTREQGYPSVFYGDYYGIPTHSVPAMKAKIDPILEARQNFAYGTQHDYFDHHNIIGWTREGNTTHPNSGLATIMSDGPGGEKWMYVGQNKAGQVWHDITGNKPMTVTINADGWANFSVNGGSVSIWVKR

SEQ ID NO: 16806 - protein, 485 aa, Unidentified
HHNGTNGTMMQYFEWHLPNDGNHWNRLRDDASNLRNRGITAIWIPPAWKGTSQNDVGYGAYDLYDLGEFNQKGTVRTKYGTRSQLESAIHALKNNGVQVYGDVVMNHKGGADATENVLAVEVNPNNRNQEISGDYTIEAWTKFDFPGRGNTYSDFKWRWYHFDGVDWDQSRQFQNRIYKFRGDGKAWDWEVDSENGNYDYLMYADVDMDHPEVVNELRRWGEWYTNTLNLDGFRIDAVKHIKYSFTRDWLTHVRNATGKEMFAVAEFWKNDLGALENYLNKTNWNHSVFDVPLHYNLYNASNSGGNYDMAKLLNGTVVQKHEMHAVTFVDNHDSQPGESLESFVQEWFKPLAYALILTREQGYPSVFYGDYYGIPTHSVPAMKAKIDPILEARQNFAYGTQHDYFDHHNIIGWTREGNTTHPNSGLATIMSDGPGGEKWMYVGQNKAGQVWHDITGNKPGTVTINADGWANFSVNGGSVSIWVKR

SEQ ID NO: 16807 - protein, 485 aa, Unidentified
HHNGTNGTMMQYFEWHLPNDGNHWNRLRDDASNLRNRGITAIWIPPAWKGTSQNDVGYGAYDLYDLGEFNQKGTVRTKYGTRSQLEPAIHALKNNGVQVYGDVVMNHKGGADATENVLAVEVNPNNRNQEISGDYTIEAWTKFDFPGRGNTYSDFKWRWYHFDGVDWDQSRQFQNRIYKFRGDGKAWDWEVDSENGNYDYLMYADVDMDHPEVVNELRRWGEWYTNTLNLDGFRIDAVKHIKYSFTRDWLTHVRNATGKEMFAVAEFWKNDLGALENYLNKTNWNHSVFDVPLHYNLYNASNSGGNYDMAKLLNGTVVQKHPMHAVTFVDNHDSQPGESLESFVQEWFKPLAYALILTREQGYPSVFYGDYYGIPTHSVPAMKAKIDPILEARQNFAYGTQHDYFDHHNIIGWTREGNTTHPNSGLATIMSDGPGGEKWMYVGQNKAGQVWHDITGNKPGTVTINADGWANFSVNGGSVSIWVKR

SEQ ID NO: 16808 - protein, 485 aa, Unidentified
HHNGTNGTMMQYFEWHLPNDGNHWNRLRDDASNLRNRGIGAIWIPPAWKGTSQNDVGYGAYDLYDLGEFNQKGTVRTKYGTRSQLESAIHALKNNGVQVYGDVVMNHKGGADATENVLAVEVNPNNRNQEISGDYTIEAWTKFDFPGRGNTYSDFKWRWYHFDGVDWDQSRQFQNRIYKFRGDGKAWDWEVDSENGNYDYLMYADVDMDHPEVVNELRRWGEWYTNTLNLDGFRIDAVKHIKYSFTRDWLTHVRNATGKEMFAVAEFWKNDLGALENYLNKTNWNHSVFDVPLHYNLYNASNSGGNYDMAKLLNGTVVQKHPMHAVTFVDNHDSQPGESLESFVQEWFKPLAYALILTREQGYPSVFYGDYYGIPTHSVPAMKAKIDPILEARQNFAYGTQHDYFDHHNIIGWTREGNTTHPNSGLATIMSDGPGGEKWMYVGQNKAGQVWHDITGNKPGTVTINADGWANFSVNGGSVSIWVKR

SEQ ID NO: 16809 - protein, 485 aa, Unidentified
HHNGTNGTMMQYFEWHLPNDGNHWNRLRDDASNLRNRGITAIWIPPAWKGTSQNDVGYGAYDLYDLGEFNQKGTVRTKYGTRSQLESAIHALKNNGVQVYGDVVMNHKGGADATENVLAVEVNPNNRNQEISGDYTIEAWTKFDFPGRGNTYSDFKWRWYHFDGVDWDQSRQFQNRIYKFRGDGKAWDWEVDSENGNYDYLMYADVDMDHPEVVNELRRWGEWYTNTLNLDGFRIDAVKHIKYSFTRDWLTHVRNATGKEMFAVAEFWKNDLGALENYLNKTNWNHSVFDVPLHYNLYNASNSGGNYDMAKLLNGTVVQKHPMHAVTFVDNHDSQPGESLESFVQEWFKPLAYALILTREQGYPSVFYGDYYGIPTHSVPAMKAKIDPILEARQNFAYGTQHDYFDHHNIIGWTREGNTTHPNSGLATIMSDGPGGEKWMYVGQNKAGQVWHDITGNKPGTVTINADGWANFSVFGGSVSIWVKR

SEQ ID NO: 16810 - protein, 485 aa, Unidentified
HHNGTNGTMMQYFEWHLPNDGNHWNRLRDDASNLRNRGITAIWIPPAWKGTSQNDVGYGAYDLYDLGEFNQKGTVRTKYGTRSQLESAIHALKNNGVQVYGDVVMNHKGGADATENVLAVEVNPNNRNQEISGDYTIEAWTKFDFPGRGNTYSDFKWRWYHFDGVDWDQSRQFQNRIYKGRGDGKAWDWEVDSENGNYDYLMYADVDMDHPEVVNELRRWGEWYTNTLNLDGFRIDAVKHIKYSFTRDWLTHVRNATGKEMFAVAEFWKNDLGALENYLNKTNWNHSVFDVPLHYNLYNASNSGGNYDMAKLLNGTVVQKHPMHAVTFVDNHDSQPGESLESFVQEWFKPLAYALILTREQGYPSVFYGDYYGIPTHSVPAMKAKIDPILEARQNFAYGTQHDYFDHHNIIGWTREGNTTHPNSGLATIMSDGPGGEKWMYVGQNKAGQVWHDITGNKPGTVTINADGWANFSVNGGSVSIWVKR

SEQ ID NO: 16811 - protein, 485 aa, Unidentified
HHNGTNGTMMQYFEWHLPNDGNHWNRLRDDASNLRNRGITAIWIPPAWKGTSQNDVGYGAYDLYDLGEFNQKGTVRTKYGTRSQLESAIHALKNNGVQVYGDVVMNHKGGADATENVLAVEVNPNNRNQEISGDYTIEAWTKFDFPGRGNTYSDFKWRWYHFDGVDWDQSRQFQNRIYKFRGDGKAWDWEVDSENGNYDYLMYADVDMDHPEVVNELRRWGEWYTNTLNLDGFRIDAVKHIKYSFTRDWLTHVRNATGKEMFAVAEFWKNDLGALENYLNKTNWNHSVFDVPLHYNLYNASNSGGNYDMAKLLNGTVVQKHPMHAVTFVDNHDSQPGESLESFVQEWFKPLAYALILTREQGYPSVFYGDYYGIPTHSVPAMKAKIDPILEARQNFAYGTQHDYFDHHNIIGWTRFGNTTHPNSGLATIMSDGPGGEKWMYVGQNKAGQVWHDITGNKPGTVTINADGWANFSVNGGSVSIWVKR

SEQ ID NO: 16812 - protein, 485 aa, Unidentified
HHNGTNGTMMQYFEWHLPNDGNHWNRLRDDASNLRNRGITAIWIPPAWKGTSQNDVGYGAYDLYDLGEFNQKGTVRTKYGTRSQLESAIHALKNNGVQVYGDVVMNHKGGADATENVLAVEVNPNNRNQEISGDYTIEAWTKFDFPGRGNTYSDFKWRWYHFDGVDWDQSRQFQNRIYKFRGDGKAWDWEVDSENGNYDYLMYADVDMDHPEVVNELRRWGEWYTNTLNLDGFRIDAVKHIKYSFTRDWLTHVRNATGKEMFAVAEFWKNDLGALENYLNKTNWNHSVFDVPLHYNLYNASNSGGNYDMAKLLNGTVVQKHPMHAVTFVDNHDSQPGESLESFAQEWFKPLAYALILTREQGYPSVFYGDYYGIPTHSVPAMKAKIDPILEARQNFAYGTQHDYFDHHNIIGWTREGNTTHPNSGLATIMSDGPGGEKWMYVGQNKAGQVWHDITGNKPGTVTINADGWANFSVNGGSVSIWVKR

SEQ ID NO: 16813 - protein, 485 aa, Unidentified
HHNGTNGTMMQYFEWHLPNDGNHWNRLRDDASNLRNRGITAIWIPPAWKGTSQNDVGYGAYDLYDLGEFNQKGTVRTKYGTRSQLESAIHALKNNGVQVYGDVVMNHKGGADATENVLAVEVNPNNRNQEISGDYTIEAWTKFDFPGRGNTYSDFKWRWYHFDGVDWDQSRQFQNRIYKFRGDGKAWDWEVDSENGNYDYLMYADVDMDHPEVVNELRRWGEWYTNTLNLDGFRIDAVKHIKYSFTRDWLTHVRNATGKEMFAVAEFWKNDLGALENYLNKTNWNHSVFDVPLHYNLYNASNSGGNYDMAKLLNGTVVQKHPMTAVTFVDNHDSQPGESLESFVQEWFKPLAYALILTREQGYPSVFYGDYYGIPTHSVPAMKAKIDPILEARQNFAYGTQHDYFDHHNIIGWTREGNTTHPNSGLATIMSDGPGGEKWMYVGQNKAGQVWHDITGNKPGTVTINADGWANFSVNGGSVSIWVKR

SEQ ID NO: 16814 - protein, 485 aa, Bacillus sp.
HHNGTNGTMMQYFEWHLPNDGNHWNRLRDDASNLRNRGITAIWIPPAWKGTSQNDVGYGAYDLYDLGEFNQKGTVRTKYGTRSQLESAIHALKNNGVQVYGDVVMNHKGGADATENVLAVEVNPNNRNQEISGDYTIEAWTKFDFPGRGNTYSDFKWRWYHFDGVDWDQSRQFQNRIYKFRGDGKAWDWEVDSEWGNYDYLMYADVDMDHPEVVNELRRWGEWYTNTLNLDGFRIDAVKHIKYSFTRDWLTHVRNATGKEMFAVAEFWKNDLGALENYLNKTNWNHSVFDVPLHYNLYNASNSGGNYDMAKLLNGTVVQKHPMHAVTFVDNHDSQPGESLESFVQEWFKPLAYALILTREQGYPSVFYGDYYGIPTHSVPAMKAKIDPILEARQNFAYGTQHDYFDHHNIIGWTREGNTTHPNSGLATIMSDGPGGEKWMYVGQNKAGQVWHDITGNKPGTVTINADGWANFSVNGGSVSIWVKR

SEQ ID NO: 16815 - protein, 485 aa, Unidentified
HHNGTNGTMMQYFEWHLPNDGNHWTRLRDDASNLRNRGITAIWIPPAWKGTSQNDVGYGAYDLYDLGEFNQKGTVRTKYGTRSQLESAIHALKNNGVQVYGDVVMNHKGGADATENVLAVEVNPNNRNQEISGDYTIEAWTKFDFPGRGNTYSDFKWRWYHFDGVDWDQSRQFQNRIYKFRGDGKAWDWEVDSENGNYDYLMYADVDMDHPEVVNELRRWGEWYTNTLNLDGFRIDAVKHIKYSFTRDWLTHVRNATGKEMFAVAEFWKNDLGALENYLNKTNWNHSVFDVPLHYNLYNASNSGGNYDMAKLLNGTVVQKHPMHAVTFVDNHDSQPGESLESFVQEWFKPLAYALILTREQGYPSVFYGDYYGIPTHSVPAMKAKIDPILEARQNFAYGTQHDYFDHHNIIGWTREGNTTHPNSGLATIMSDGPGGEKWMYVGQNKAGQVWHDITGNKPGTVTINADGWANFSVNGGSVSIWVKR

SEQ ID NO: 16816 - protein, 485 aa, Unidentified
HHNGTNGTMMQYFEWHLPNDGNHWNRLRDDASNLRNRGITAIWIPPAWKGTSQNDVGYGAYDLYDLGEFNQKGTVRTKYGTRSQLESAIHALKNNGHQVYGDVVMNHKGGADATENVLAVEVNPNNRNQEISGDYTIEAWTKFDFPGRGNTYSDFKWRWYHFDGVDWDQSRQFQNRIYKFRGDGKAWDWEVDSENGNYDYLMYADVDMDHPEVVNELRRWGEWYTNTLNLDGFRIDAVKHIKYSFTRDWLTHVRNATGKEMFAVAEFWKNDLGALENYLNKTNWNHSVFDVPLHYNLYNASNSGGNYDMAKLLNGTVVQKHPMHAVTFVDNHDSQPGESLESFVQEWFKPLAYALILTREQGYPSVFYGDYYGIPTHSVPAMKAKIDPILEARQNFAYGTQHDYFDHHNIIGWTREGNTTHPNSGLATIMSDGPGGEKWMYVGQNKAGQVWHDITGNKPGTVTINADGWANFSVNGGSVSIWVKR

SEQ ID NO: 16817 - protein, 485 aa, Unidentified
HHNGTNGTMMQYFEWHLPNDGNHWNRLRDDASNLRNRGITAIWIPPAWKGTSQNDVGYGAYDLYDLGEFNQKGTVRTKYGTRSQLESAIHALKNNGVQVYGDVVMNHKGGADATENVLAVEVNPNNRNQEISGDYTIEAWTKFDFPGRGNTYSDFKWRWYHFDGVDWDQSRQFQNRIYKFRGDGKAWDWEVDSENGNYDYLMYADVDMDHPEVVNELRRWGEWYTNTLNLDGFRIDAVKHIKYSFTRDWLTHVRNATGKEMFAVAEFWKNDLGALENYLNKTNWNHSVFDVPLHYNLYNASNSGGNYDMAKLLNGTVVQKHPMHAVTFVDNHDSQPGESLESFVQEWFKPLAYALILTREQGYPSVFYGDYYGIPTHSVPAMKAKIDPILEARQNFAYGTQHDYFDHHNIIGWTREGNTTLPNSGLATIMSDGPGGEKWMYVGQNKAGQVWHDITGNKPGTVTINADGWANFSVNGGSVSIWVKR

SEQ ID NO: 16818 - protein, 485 aa, Unidentified
HHNGTNGTMMQYFEWHLPNDGNHWNRLRDDASNLRNRGITAIWIPPAWKGTSQNDVGYGAYDLYDLGEFNQKGTVRTKYGTRSQLESAIHALKNNGVQVYGDVVMNHKGGADATENVLAVEVNPNNRNQEISGDYTIEAWTKFDFPGRGNTYSDFKWRWYHFDGVDWDQSRQFQNRIYKFRGDGKAWDWEVDSENGNYDYLMYADVDMDHPEVVNELRRWGEWYTNTLNLDGFRIDAVKHIKYSFTRDWLTHVRNATGKEMFAVAEFWKNDLGALENYLNKTNWNHSVFDVPLHYNLYNASNSGGNYDMAKLLNGTVVQKHPMHAVTFVDNHDSQPGESLESFVQEWFKPLAYALILTRETGYPSVFYGDYYGIPTHSVPAMKAKIDPILEARQNFAYGTQHDYFDHHNIIGWTREGNTTHPNSGLATIMSDGPGGEKWMYVGQNKAGQVWHDITGNKPGTVTINADGWANFSVNGGSVSIWVKR

SEQ ID NO: 16819 - protein, 485 aa, Unidentified
HHNGTNGTMMQYFEWHLPNDGNHWNRLRDDASNLRNAGITAIWIPPAWKGTSQNDVGYGAYDLYDLGEFNQKGTVRTKYGTRSQLESAIHALKNNGVQVYGDVVMNHKGGADATENVLAVEVNPNNRNQEISGDYTIEAWTKFDFPGRGNTYSDFKWRWYHFDGVDWDQSRQFQNRIYKFRGDGKAWDWEVDSENGNYDYLMYADVDMDHPEVVNELRRWGEWYTNTLNLDGFRIDAVKHIKYSFTRDWLTHVRNATGKEMFAVAEFWKNDLGALENYLNKTNWNHSVFDVPLHYNLYNASNSGGNYDMAKLLNGTVVQKHPMHAVTFVDNHDSQPGESLESFVQEWFKPLAYALILTREQGYPSVFYGDYYGIPTHSVPAMKAKIDPILEARQNFAYGTQHDYFDHHNIIGWTREGNTTHPNSGLATIMSDGPGGEKWMYVGQNKAGQVWHDITGNKPGTVTINADGWANFSVNGGSVSIWVKR

SEQ ID NO: 16820 - protein, 485 aa, Unidentified
HHNGTNGTMMQYFEWHLPNDGNHWNRLRDDASNLRNRGITAIWIPPAWKGTSQNDVGYGAYDLYDLGEFNQKGTVRTKYGTRSQLESAIHALKNNGVQVYGDVVMNHKGGADATENVLAVEVNPNNRNQEISGDYTIEAWTKFDFPGRGNTYSDFKWRWYHFDGVDWDQSRQFQNRIYKFRGDGKAWDWEVDSENGNYDYLMYADVDMDHPEVVNELRRWGEWYTNTLNLDGFRIDAVKHIKYSFTRDWLTHVRNATGKEMFAVAEFWKNDLGALENYLNKTNWNHSVFDVPLHYNLYNASNSGGNYDMAKLLNGTVVQKHPMHAVTFVDNHDSQPGESLESFVQEWFKPLAYALILTREQGYPSVFYGDYYGIPTHSVPAMKAKIDPILEARQNFAYGTQHDYFDHHNIIGWTREGNTTHPNSGLATIMSDGPGGEKWMYVGQNKAGQVWHDITGVKPGTVTINADGWANFSVNGGSVSIWVKR

SEQ ID NO: 16821 - protein, 485 aa, Bacillus sp.
HHNGTNGTMMQYFEWHLPNDGNHWNRLRDDASNLRNRGITAIWIPPAWKGTSQNDVGYGAYDLYDLGEFNQKGTVRTKYGTRSQLESAIHALKNNGVQVYGDVVMNHKGGADATENVLAVEVNPNNRNQEISGDYTIEAWTKFDFPGRGNTYSDFKWRWYHFDGVDWDQSRQFQNRIYKFRGXXKAWDWEVDSENGNYDYLMYADVDMDHPEAVNELRRWGEWYTNTLNLDGFRIDAVKHIKYSFTRDWLTHVRNATGKEMFAVAEFWKNDLGALENYLNKTNWNHSVFDVPLHYNLYNASNSGGNYDMAKLLNGTVVQKHPMHAVTFVDNHDSQPGESLESFVQEWFKPLAYALILTREQGYPSVFYGDYYGIPTHSVPAMKAKIDPILEARQNFAYGTQHDYFDHHNIIGWTREGNTTHPNSGLATIMSDGPGGEKWMYVGQNKAGQVWHDITGNKPGTVTINADGWANFSVNGGSVSIWVKR

SEQ ID NO: 16822 - protein, 485 aa, Unidentified
HHNGTNGTMMQYFEWHLPNDGNHWNRLRDDASNLRNRGITAIWIPPAWKGTSQNDVGYGAYDLYDLGEFNQKGTVRTKYGTRSQLESAIHALKNNGVQVYGDVVMNHKGGADATENVLAVEVNPNNRNQEISGDYTIEAWTKFDFPGRGNTYSDFKWRWYHFDGVDWDQSRQFQNRIYKFRGDGKAWDWEVDSENGNYDYLMYADVDMDHPEVVNELRRWGEWYTNTLNLDGFRIDAVKHIKYSFTRDWLTHVRNATGKEMFAVAEFWKNDLGALENYLNKTNWNHSVFDVPLHYNLYNASNTGGNYDMAKLLNGTVVQKHPMHAVTFVDNHDSQPGESLESFVQEWFKPLAYALILTREQGYPSVFYGDYYGIPTHSVPAMKAKIDPILEARQNFAYGTQHDYFDHHNIIGWTREGNTTHPNSGLATIMSDGPGGEKWMYVGQNKAGQVWHDITGNKPGTVTINADGWANFSVNGGSVSIWVKR

SEQ ID NO: 16823 - protein, 485 aa, Unidentified
HHNGTNGTMMQYFEWHLPNDGNHWNRLRDDASNLRNRGITAIWIPPAWKGTSQNDVGYGAYDLYDLGEFNQKGTVRTKYGTRSQLESAIHALKNNGVQVYGDVVMNHKGGADATENVLAVEVNPNNRNQEISGDYTIEAWTKFDFPGRGNTYSDFKWRWYHFDGVDDDQSRQFQNRIYKFRGDGKAWDWEVDSENGNYDYLMYADVDMDHPEVVNELRRWGEWYTNTLNLDGFRIDAVKHIKYSFTRDWLTHVRNATGKEMFAVAEFWKNDLGALENYLNKTNWNHSVFDVPLHYNLYNASNSGGNYDMAKLLNGTVVQKHPMHAVTFVDNHDSQPGESLESFVQEWFKPLAYALILTREQGYPSVFYGDYYGIPTHSVPAMKAKIDPILEARQNFAYGTQHDYFDHHNIIGWTREGNTTHPNSGLATIMSDGPGGEKWMYVGQNKAGQVWHDITGNKPGTVTINADGWANFSVNGGSVSIWVKR

SEQ ID NO: 16824 - protein, 485 aa, Unidentified
HHNGTNGTMMQYFEWHLPNDGNHWNRLRDDASNLRNRGITAIWIPPAWKGTSQNDVGYGAYDLYDLGEFNQKGTVRTKYGTRSQLESAIHALKNNGVQVYGDVVMNHKGGADATENVLAVEVNPNNRNQEISGDYTIEAWTKFDFPGRGNTYSDFKWRWYHFDGVDWDQSRQFQNRIYKFRGDGKAWDWEVDSENGNYDYLMYADVDMDHPEVVNELRRWGEWYTNTLNLDGFRIDAVKHIKYSFTRDWLTHVRNATGKEMVAVAEFWKNDLGALENYLNKTNWNHSVFDVPLHYNLYNASNSGGNYDMAKLLNGTVVQKHPMHAVTFVDNHDSQPGESLESFVQEWFKPLAYALILTREQGYPSVFYGDYYGIPTHSVPAMKAKIDPILEARQNFAYGTQHDYFDHHNIIGWTREGNTTHPNSGLATIMSDGPGGEKWMYVGQNKAGQVWHDITGNKPGTVTINADGWANFSVNGGSVSIWVKR

SEQ ID NO: 16825 - protein, 485 aa, Bacillus sp.
HHNGTNGTMMQYFEWHLPNDGNHWNRLRDDASNLRNRGITAIWIPPAWKGTSQNDVGYGAYDLYDLGEFNQKGTVRTKYGTRSQLESAIHALKNNGVQVYGDVVMNHKGGADATENVLAVEVNPNNRNQEISGDYTIEAWTKFDFPGRGNTYSDFKWRWYHFDGVDWDQSRQFQNRIYKFRGDGKAWDWEVDSENGNYDYLMVADVDMDHPEVVNELRRWGEWYTNTLNLDGFRIDAVKHIKYSFTRDWLTHVRNATGKEMFAVAEFWKNDLGALENYLNKTNWNHSVFDVPLHYNLYNASNSGGNYDMAKLLNGTVVQKHPMHAVTFVDNHDSQPGESLESFVQEWFKPLAYALILTREQGYPSVFYGDYYGIPTHSVPAMKAKIDPILEARQNFAYGTQHDYFDHHNIIGWTREGNTTHPNSGLATIMSDGPGGEKWMYVGQNKAGQVWHDITGNKPGTVTINADGWANFSVNGGSVSIWVKR

SEQ ID NO: 16826 - protein, 485 aa, Unidentified
HHNGTNGTMMQYFEWHLPNDGNHWNRLRDDASNLRNRGITAIWIPPAWKGTSQNDVGYGAYDLYDLGEFNQKGTVRTKYGTRSQLESAIHALKNNGVQVYGDVVMNHKGGADATENVLAVEVNPNNRNQEISGDYTIEAWTKFDFPGRGNTYSDFKWRWYHFDGVDWDQSRQFQNRIYKFRGDGKAWDWEVDSENGNYDYLMYADVDMDHPEVVNELRRWGEWYTNTLNLGGFRIDAVKHIKYSFTRDWLTHVRNATGKEMFAVAEFWKNDLGALENYLNKTNWNHSVFDVPLHYNLYNASNSGGNYDMAKLLNGTVVQKHPMHAVTFVDNHDSQPGESLESFVQEWFKPLAYALILTREQGYPSVFYGDYYGIPTHSVPAMKAKIDPILEARQNFAYGTQHDYFDHHNIIGWTREGNTTHPNSGLATIMSDGPGGEKWMYVGQNKAGQVWHDITGNKPGTVTINADGWANFSVNGGSVSIWVKR

SEQ ID NO: 16827 - protein, 485 aa, Unidentified
HHNGTNGTMMQYFEWHLPNDGNHWNRLRDDASNLRNRGITAIWIPPAWKGTSQNDVGYGAYDLYDLGEFNQKGTVRTKYGTRSQLESAIHALKNNGVQVYGDVVMNHKGGADATENVLAVEVNPNNRNQEISGDYTIEAWTKFDFPGRGNTYSDFKWRWYHFDGVDWDQSRQFQNRIYKFRGDGKAWDWEVDSENGNYDYLMYADVDMDHPEVVNELRRWGEWYTNTLNLDGFRIDAVKHIKYSFTRDWLTHVRNATGKEMFAVAEFWKNDLGALENYLNKTNWNHSVFDVPLHYNLYNASNSGGNYDMAKLLNGTVVQKHPMHAVTFVDNHDSQPGESLESFVQEWFKTLAYALILTREQGYPSVFYGDYYGIPTHSVPAMKAKIDPILEARQNFAYGTQHDYFDHHNIIGWTREGNTTHPNSGLATIMSDGPGGEKWMYVGQNKAGQVWHDITGNKPGTVTINADGWANFSVNGGSVSIWVKR

SEQ ID NO: 16828 - protein, 485 aa, Unidentified
HHNGTNGTMMQYFEWHLPNDGNHWNRLRDDASNLRNRGITAIWIPPAWKGTSQNDVGYGAYDLYDLGEFNQKGTVRTKYGTRSQLESAIHALKNNGVQVYGDVVMNHKGGADATENVLAVEVNPNNRNQEISGDYTIEAWTKFDFPGRGNTYSDFKWRWYHFDGVDWDQSRQFQNRIYKFRGDGKAWDWEVDSENGNYDYLMYADVDMDHPEVVNELRRWGEWYTNTLNLDGFRIDAVKHIKYSFTRDWLTHVRNATGKEMFAVAEFWKNDLGALENYLNKTNWNHSVFDVPLHYNLYNASNSGGNYDMAKLLNGTVVQKHPMHAVTFVDNHDSQPGESLESFVQEWFKPLAYALILTREQGYPSVFYGDYYGIPTHSVPAMKAKIDPILEARQKFAYGTQHDYFDHHNIIGWTREGNTTHPNSGLATIMSDGPGGEKWMYVGQNKAGQVWHDITGNKPGTVTINADGWANFSVNGGSVSIWVKR

SEQ ID NO: 16829 - protein, 485 aa, Unidentified
HHNGTNDTMMQYFEWHLPNDGNHWNRLRDDASNLRNRGITAIWIPPAWKGTSQNDVGYGAYDLYDLGEFNQKGTVRTKYGTRSQLESAIHALKNNGVQVYGDVVMNHKGGADATENVLAVEVNPNNRNQEISGDYTIEAWTKFDFPGRGNTYSDFKWRWYHFDGVDWDQSRQFQNRIYKFRGDGKAWDWEVDSENGNYDYLMYADVDMDHPEVVNELRRWGEWYTNTLNLDGFRIDAVKHIKYSFTRDWLTHVRNATGKEMFAVAEFWKNDLGALENYLNKTNWNHSVFDVPLHYNLYNASNSGGNYDMAKLLNGTVVQKHPMHAVTFVDNHDSQPGESLESFVQEWFKPLAYALILTREQGYPSVFYGDYYGIPTHSVPAMKAKIDPILEARQNFAYGTQHDYFDHHNIIGWTREGNTTHPNSGLATIMSDGPGGEKWMYVGQNKAGQVWHDITGNKPGTVTINADGWANFSVNGGSVSIWVKR

SEQ ID NO: 16830 - protein, 485 aa, Unidentified
HHNGTNGTMMQYFEWHLPNDGNHWNRLRDDASNLRNRGITAIWIPPAWKGTSQNDVGYGAYDLYDLGEFNQKGFVRTKYGTRSQLESAIHALKNNGVQVYGDVVMNHKGGADATENVLAVEVNPNNRNQEISGDYTIEAWTKFDFPGRGNTYSDFKWRWYHFDGVDWDQSRQFQNRIYKFRGDGKAWDWEVDSENGNYDYLMYADVDMDHPEVVNELRRWGEWYTNTLNLDGFRIDAVKHIKYSFTRDWLTHVRNATGKEMFAVAEFWKNDLGALENYLNKTNWNHSVFDVPLHYNLYNASNSGGNYDMAKLLNGTVVQKHPMHAVTFVDNHDSQPGESLESFVQEWFKPLAYALILTREQGYPSVFYGDYYGIPTHSVPAMKAKIDPILEARQNFAYGTQHDYFDHHNIIGWTREGNTTHPNSGLATIMSDGPGGEKWMYVGQNKAGQVWHDITGNKPGTVTINADGWANFSVNGGSVSIWVKR

SEQ ID NO: 16831 - protein, 485 aa, Bacillus sp.
HHNGTNGTMMQYFEWHLPNDGNHWNRLRDDASNLRNRGITAIWIPPAWKGTSQNDVGYGAYDLYDLGEFNQKGTVRTKYGTRSQLESAIHALKNNGVQVYGDVVMNHKGGADATENVLAVEVNPNNRNQEISGDYTIEAWTKFDFPGRGNTYSDFKWRWYHFDGVDWDQSRQFQNRIYKFRGDGKAWDWEVDSENGNYDYLMYADVDMDHPEVVNELRRWGEWYTNTLNLDGFRIDAVKHIKWSFTRDWLTHVRNATGKEMFAVAEFWKNDLGALENYLNKTNWNHSVFDVPLHYNLYNASNSGGNYDMAKLLNGTVVQKHPMHAVTFVDNHDSQPGESLESFVQEWFKPLAYALILTREQGYPSVFYGDYYGIPTHSVPAMKAKIDPILEARQNFAYGTQHDYFDHHNIIGWTREGNTTHPNSGLATIMSDGPGGEKWMYVGQNKAGQVWHDITGNKPGTVTINADGWANFSVNGGSVSIWVKR

SEQ ID NO: 16832 - protein, 485 aa, Unidentified
HHNGTNGTMMQYFEWHLPNDGNHWNRLRDDASNLRNRGITAIWIPPAWKGTSQNDVGYGAYDLYDLGEFNQKGTVRTKYGTRSQLESAIHALKNNGVQVYGDVVMNHKGGADATENVLAVEVNPNNRNQEISGDYTIEAWTKFDFPGRGNTYSDFKWRWYHFDGVDWDQSRQFQNRIYKFRGDGKAWDWEVDSENGNYDYLMYADVDMDHPEVVNELRRWGEWYTNTLNLDGFRIDAVKHIKYSFTRDWLTHVRNATGKEMFAVAEFWKNDLGALENYLNKTNWNHSVFDVPLHYNLYNASNSGGNYDMAKLLNGTVVQKHPMHAVTFVDNHDSQPGESLESFVQEWFKPLAYALILTREQGYPSVFYGDYYGIPTHSVPAMKAKIDPILEARQNFAYGTQHDYFDHHNIIGWTREGNTTHPNSGLATIMSDGPGGEKWMYVGQNKAGQVWHDITGNKPGTVTINADGWANFSVEGGSVSIWVKR

SEQ ID NO: 16833 - protein, 485 aa, Unidentified
HHNGTNGTMMQYFEWHLPNDGNHWNRLRDDASNLRNRGITAIWIPPAWKGTSQNDVGYGAYDLYDLGEFNQKGTVRTKYGTRSQLESAIHALKNNGVQVYGDVVMNHKGGADATENVLAVEVNPNNRNQEISGDYTIEAWTKFDFPGRGNTYSDFKWRWYHFDGVDWDQSRQFQNRIYKFRGDGKAWDWEVDSENGNYDYLMYADVDMDHPEVVNELRRWGEWYTNTLNLDGFRIDAVKHIKYSFTRDWLTHVRNATGKEMFAVAEFWKNDLGALENYLNKTNWNHSVFDVPLHYNLYTASNSGGNYDMAKLLNGTVVQKHPMHAVTFVDNHDSQPGESLESFVQEWFKPLAYALILTREQGYPSVFYGDYYGIPTHSVPAMKAKIDPILEARQNFAYGTQHDYFDHHNIIGWTREGNTTHPNSGLATIMSDGPGGEKWMYVGQNKAGQVWHDITGNKPGTVTINADGWANFSVNGGSVSIWVKR

SEQ ID NO: 16834 - protein, 485 aa, Unidentified
HHNGTNGTMMQYFEWHLPNDGNHWNRLRDDASNLRNRGITAIWIPPAWKGTSQNDVGYGAYDLYDLGEFNQKGTVRTKYGTRSQLESAIHALKNNGVQVYGDVVMNHKGGADATENVLAVEVNPNNRNQEISGDYTIEAWTKFDFPGRGNTYSDFKWRWYHFDGVDWDQSRQFQNRIYKFRGDGKAWDWEVDSENGNYDYLMYADVDMDHPEVVNELRRWGEWYTNTLNLDGFRIDAVKHIKYSFTRDWLTHVRNATGKEMFAVAEFWKNDLGALENYLNKTNWNHSVFDVPLHYNLYNASNSGGNYDMAKLLNGTVVQKHYMHAVTFVDNHDSQPGESLESFVQEWFKPLAYALILTREQGYPSVFYGDYYGIPTHSVPAMKAKIDPILEARQNFAYGTQHDYFDHHNIIGWTREGNTTHPNSGLATIMSDGPGGEKWMYVGQNKAGQVWHDITGNKPGTVTINADGWANFSVNGGSVSIWVKR

SEQ ID NO: 16835 - protein, 485 aa, Unidentified
HHNGTNGTMMQYFEWHLPNDGNHWNRLRDDASNLRNRGITAIWIPPAWKGTSQNDVGYGAYDLYDLGEFNQKGTVRTKYGTRSQLESAIHALKNNGVQVYGDGVMNHKGGADATENVLAVEVNPNNRNQEISGDYTIEAWTKFDFPGRGNTYSDFKWRWYHFDGVDWDQSRQFQNRIYKFRGDGKAWDWEVDSENGNYDYLMYADVDMDHPEVVNELRRWGEWYTNTLNLDGFRIDAVKHIKYSFTRDWLTHVRNATGKEMFAVAEFWKNDLGALENYLNKTNWNHSVFDVPLHYNLYNASNSGGNYDMAKLLNGTVVQKHPMHAVTFVDNHDSQPGESLESFVQEWFKPLAYALILTREQGYPSVFYGDYYGIPTHSVPAMKAKIDPILEARQNFAYGTQHDYFDHHNIIGWTREGNTTHPNSGLATIMSDGPGGEKWMYVGQNKAGQVWHDITGNKPGTVTINADGWANFSVNGGSVSIWVKR

SEQ ID NO: 16836 - protein, 485 aa, Unidentified
HHGGTNGTMMQYFEWHLPNDGNHWNRLRDDASNLRNRGITAIWIPPAWKGTSQNDVGYGAYDLYDLGEFNQKGTVRTKYGTRSQLESAIHALKNNGVQVYGDVVMNHKGGADATENVLAVEVNPNNRNQEISGDYTIEAWTKFDFPGRGNTYSDFKWRWYHFDGVDWDQSRQFQNRIYKFRGDGKAWDWEVDSENGNYDYLMYADVDMDHPEVVNELRRWGEWYTNTLNLDGFRIDAVKHIKYSFTRDWLTHVRNATGKEMFAVAEFWKNDLGALENYLNKTNWNHSVFDVPLHYNLYNASNSGGNYDMAKLLNGTVVQKHPMHAVTFVDNHDSQPGESLESFVQEWFKPLAYALILTREQGYPSVFYGDYYGIPTHSVPAMKAKIDPILEARQNFAYGTQHDYFDHHNIIGWTREGNTTHPNSGLATIMSDGPGGEKWMYVGQNKAGQVWHDITGNKPGTVTINADGWANFSVNGGSVSIWVKR

SEQ ID NO: 16837 - protein, 485 aa, Unidentified
HHNGTNGTMMQYFEWHLPNDGNHWNRLRDDASNLRNRGITAIWIPPAWKGTSQNDVGYGAYDLYDLGEFNQKGTVRTKYGTRSQLESAIHALKNNGVQVYGDVVMNHKGGADATENVLAVEVNPNNRNQEISGDYTIEAWTKFDFPGRGNTYSDFKWRWYHFDGVDWDQSRQFQNRIYKFRGDGKAWDWEVDSENGNYDYLMYADVDMDHPEVVNELRRWGEWYTNTLNLDGFRIDAVKHIKYSFTRDWLTHVRNAPGKEMFAVAEFWKNDLGALENYLNKTNWNHSVFDVPLHYNLYNASNSGGNYDMAKLLNGTVVQKHPMHAVTFVDNHDSQPGESLESFVQEWFKPLAYALILTREQGYPSVFYGDYYGIPTHSVPAMKAKIDPILEARQNFAYGTQHDYFDHHNIIGWTREGNTTHPNSGLATIMSDGPGGEKWMYVGQNKAGQVWHDITGNKPGTVTINADGWANFSVNGGSVSIWVKR

SEQ ID NO: 16838 - protein, 485 aa, Unidentified
HHNGTNGTMMQYFEWHLPNDGNHWNRLRDDASNLRNRGITAIWIPPAWKGTSQNDVGYGAYDLYDLGEFNQKGTVRTKYGTRSQLESAIHALKNNGVQVYGDVVMNHKGGADATENVLAVEVNPNNRNQEISGDYTIEAWTKFDFPGRGNTYSDFKWRWYHFDGVDWDQSRQFQNRIYKFRGDGKAWDWEVDSENGNYDYLMYADVDMDHPEVVNELRRWGEWYTNTLNLDGFRIDAVKHIKYSFTRDWLTHVRNATGKEMFAVAEFWKNDLGALENYLNKTNWNHSVFDVPLHYNLYNASNSGGNYDMAKLLNGTVVQKWPMHAVTFVDNHDSQPGESLESFVQEWFKPLAYALILTREQGYPSVFYGDYYGIPTHSVPAMKAKIDPILEARQNFAYGTQHDYFDHHNIIGWTREGNTTHPNSGLATIMSDGPGGEKWMYVGQNKAGQVWHDITGNKPGTVTINADGWANFSVNGGSVSIWVKR

SEQ ID NO: 16839 - protein, 485 aa, Unidentified
HHNGTNGTMMQYFEWHLPNDGNHWNRLRDDASNLRNRGITAIWIPPAWKGTSQNDVGYGAYDLYDLGEFNQKGTVRTKYGTRSQLESAIHQLKNNGVQVYGDVVMNHKGGADATENVLAVEVNPNNRNQEISGDYTIEAWTKFDFPGRGNTYSDFKWRWYHFDGVDWDQSRQFQNRIYKFRGDGKAWDWEVDSENGNYDYLMYADVDMDHPEVVNELRRWGEWYTNTLNLDGFRIDAVKHIKYSFTRDWLTHVRNATGKEMFAVAEFWKNDLGALENYLNKTNWNHSVFDVPLHYNLYNASNSGGNYDMAKLLNGTVVQKHPMHAVTFVDNHDSQPGESLESFVQEWFKPLAYALILTREQGYPSVFYGDYYGIPTHSVPAMKAKIDPILEARQNFAYGTQHDYFDHHNIIGWTREGNTTHPNSGLATIMSDGPGGEKWMYVGQNKAGQVWHDITGNKPGTVTINADGWANFSVNGGSVSIWVKR

SEQ ID NO: 16840 - protein, 485 aa, Unidentified
HHNGTNGTMMQYFEWHLPNDGNHWNRLRDDASNLRNRGITAIWIPPAWKGTSQNDVGYGAYDLYDLGEFNQKGTVRTKYGTRSQLESAIHALKNNGVQVYGDVVMNHKGGADATENVLAVEVNPNNRNQEISGDYTIEAWTKFDFPGRGNTYSDFKWRWYHFDGVDWDQSRQFQNRIYKFRGDGKAWDWEVDSENGNYDYLMYADVDMDHPEVVNELRRWGEWYTNTLNLDGFRIDAVKHIKYSFTRDWLTHVRNATGKEMFAVAEFWKNDLGALENYLNKTNWNHSVFDVPLHYNLYNASNSGGNYDMAKLLNGTVVQKHPMHAVTFVDNHDSQPGESLESFVQEWFKPLAYALILTREQGYPSVFYGDYYGIPTHSVPAMKAKIDPILEARQNFVYGTQHDYFDHHNIIGWTREGNTTHPNSGLATIMSDGPGGEKWMYVGQNKAGQVWHDITGNKPGTVTINADGWANFSVNGGSVSIWVKR

SEQ ID NO: 16841 - protein, 485 aa, Unidentified
HHNGTNGTMMQYFEWHLPNDGNHWNRLRDDASNLRNRGITAIWIPPAWKGTSQNDVGYGAYDLYDLGEFNQKGTVRTKYGTRSQLESAIHALKNNGVQVYGDVVMNHKGGADATENVLAVEVNPNNRNQEISGDYTIEAWTKFDFPGRGNTYSDFKWRWYHFDGVDWDQSRQFQNRIYKFRGDGKAWDWEVDSENGNYDYLMYADVDMDHPEVVNELRRWGEWYTNTLNLDGFRIDAVKHIKYSFTRDWLTHVRNATGKEMFAVAEFWKNDLGALENYLNKTNWNHSVFDVPLHYNLYNASNSGGNYDMAKLLNGTVVQKHPMHAVTFVDNHDSQPGESLESFVQEWFKPLAYALILTREQGYPSVFYGDYYGIPTHSVPAMKAKIDPILEARQNFAYGTQHDYFDHHNIIGWTREGNTTHPNSGLATIMSDGPGGEKWMYVGQNKAGQVWHDITGNKPGTVTINADGWADFSVNGGSVSIWVKR

SEQ ID NO: 16842 - protein, 485 aa, Unidentified
HHNGTNGTMMQYFEWHLPNDGNHWNRLRDDASNLRNRGITAIWIPPAWKGTSQNDVGYGAYDLYDLGEFNQKGTVRTKYGTRSQLESAIHALKNNGVQVYGDVVMNHKGGADATENVLAVEVNPNNRNQEISGDYTIEAWTKFDFPGRGNTYSDFKWRWYHFDGVDWDQSRQFQNRIYKFRGDGWAWDWEVDSENGNYDYLMYADVDMDHPEVVNELRRWGEWYTNTLNLDGFRIDAVKHIKYSFTRDWLTHVRNATGKEMFAVAEFWKNDLGALENYLNKTNWNHSVFDVPLHYNLYNASNSGGNYDMAKLLNGTVVQKHPMHAVTFVDNHDSQPGESLESFVQEWFKPLAYALILTREQGYPSVFYGDYYGIPTHSVPAMKAKIDPILEARQNFAYGTQHDYFDHHNIIGWTREGNTTHPNSGLATIMSDGPGGEKWMYVGQNKAGQVWHDITGNKPGTVTINADGWANFSVNGGSVSIWVKR

SEQ ID NO: 16843 - protein, 485 aa, Unidentified
HHNGTNPTMMQYFEWHLPNDGNHWNRLRDDASNLRNRGITAIWIPPAWKGTSQNDVGYGAYDLYDLGEFNQKGTVRTKYGTRSQLESAIHALKNNGVQVYGDVVMNHKGGADATENVLAVEVNPNNRNQEISGDYTIEAWTKFDFPGRGNTYSDFKWRWYHFDGVDWDQSRQFQNRIYKFRGDGKAWDWEVDSENGNYDYLMYADVDMDHPEVVNELRRWGEWYTNTLNLDGFRIDAVKHIKYSFTRDWLTHVRNATGKEMFAVAEFWKNDLGALENYLNKTNWNHSVFDVPLHYNLYNASNSGGNYDMAKLLNGTVVQKHPMHAVTFVDNHDSQPGESLESFVQEWFKPLAYALILTREQGYPSVFYGDYYGIPTHSVPAMKAKIDPILEARQNFAYGTQHDYFDHHNIIGWTREGNTTHPNSGLATIMSDGPGGEKWMYVGQNKAGQVWHDITGNKPGTVTINADGWANFSVNGGSVSIWVKR

SEQ ID NO: 16844 - protein, 485 aa, Unidentified
HHNGTNGTMMQYFEWHLPNDGNHWNRLRDDASNLRNRGITAIWIPPAWKGTSQNDVGYGAYDLYDLGEFNQKGTVRTKYGTRSQLESAIHALKNNGVQVYGDVVMNHKGGADATENVLAVEVNPNNRNQEISGDPTIEAWTKFDFPGRGNTYSDFKWRWYHFDGVDWDQSRQFQNRIYKFRGDGKAWDWEVDSENGNYDYLMYADVDMDHPEVVNELRRWGEWYTNTLNLDGFRIDAVKHIKYSFTRDWLTHVRNATGKEMFAVAEFWKNDLGALENYLNKTNWNHSVFDVPLHYNLYNASNSGGNYDMAKLLNGTVVQKHPMHAVTFVDNHDSQPGESLESFVQEWFKPLAYALILTREQGYPSVFYGDYYGIPTHSVPAMKAKIDPILEARQNFAYGTQHDYFDHHNIIGWTREGNTTHPNSGLATIMSDGPGGEKWMYVGQNKAGQVWHDITGNKPGTVTINADGWANFSVNGGSVSIWVKR

SEQ ID NO: 16845 - protein, 485 aa, Unidentified
HHNGTNGTMMQYFEWHLPNDGNHWNRLRDDASNLRNRGITAIWIPPAWKGTSQNDVGYGAYDLYDLGEFNQKGTVRTKYGTRSILESAIHALKNNGVQVYGDVVMNHKGGADATENVLAVEVNPNNRNQEISGDYTIEAWTKFDFPGRGNTYSDFKWRWYHFDGVDWDQSRQFQNRIYKFRGDGKAWDWEVDSENGNYDYLMYADVDMDHPEVVNELRRWGEWYTNTLNLDGFRIDAVKHIKYSFTRDWLTHVRNATGKEMFAVAEFWKNDLGALENYLNKTNWNHSVFDVPLHYNLYNASNSGGNYDMAKLLNGTVVQKHPMHAVTFVDNHDSQPGESLESFVQEWFKPLAYALILTREQGYPSVFYGDYYGIPTHSVPAMKAKIDPILEARQNFAYGTQHDYFDHHNIIGWTREGNTTHPNSGLATIMSDGPGGEKWMYVGQNKAGQVWHDITGNKPGTVTINADGWANFSVNGGSVSIWVKR

SEQ ID NO: 16846 - protein, 485 aa, Unidentified
HHNGTNGTMMQYFEWHLPNDGNHWNRLRDDASNLRNRGITAIWIPPAWKGTSQNDVGYGAYDLYDLGEFNQKGTVRTKYGTRSQLESAIHALKNNGVQVYGDVVMNHKGGADATENVLAVEVNPNNRNQEISGDYTIEAWTKFDFPGRGNTYSDFKWRWYHFDGVDWDQSRQFQNRIYKFRGDGKAWDWEVDSENGNYDYLMYADVDMDHPEVVNELRRWGEWYTNTLNLDGFRIDAVKHIKYSFTRDWLTHVRNATGKEMFAVAEFWKNDLGALENYLNKTNWNHSVFDVPLHYNLYNASNSGGNYDMAKLLNGTVVQKHPMHAVTFVDNHDSQPGESLESFVQEWFKPLAYALILTREQGYPSVFYGDYYGIPTHSVPAMKAKIDPILEARQNFAYGTQHDYFDHHNIIGWTREGNTTHDNSGLATIMSDGPGGEKWMYVGQNKAGQVWHDITGNKPGTVTINADGWANFSVNGGSVSIWVKR

SEQ ID NO: 16847 - protein, 485 aa, Unidentified
HHNGTNGTMMQYFEWHLPNDGNHWNRLRDDASNLRNRGITAIWIPPAWKGTSQNDVGYGAYDLYDLGEFNQKGTVRTKYGTRSQLESAIHALKNNGVQVYGDVVMNHKGGADATENVLAVEVNPNNRNQEISGDYTIEAWTKFDFPGRGNTYSDFKWRWYHFDGVDWDQSRQFQNRHYKFRGDGKAWDWEVDSENGNYDYLMYADVDMDHPEVVNELRRWGEWYTNTLNLDGFRIDAVKHIKYSFTRDWLTHVRNATGKEMFAVAEFWKNDLGALENYLNKTNWNHSVFDVPLHYNLYNASNSGGNYDMAKLLNGTVVQKHPMHAVTFVDNHDSQPGESLESFVQEWFKPLAYALILTREQGYPSVFYGDYYGIPTHSVPAMKAKIDPILEARQNFAYGTQHDYFDHHNIIGWTREGNTTHPNSGLATIMSDGPGGEKWMYVGQNKAGQVWHDITGNKPGTVTINADGWANFSVNGGSVSIWVKR

SEQ ID NO: 16848 - protein, 485 aa, Unidentified
HHNGTNGTMMQYFEWHLPNDGNHWNRLRDDASNLRNRGITAIWIPPAWKGTSQNDVGYGAYDLYDLGEFNQKGTVRTKYGTRSQLESAIHALKNNGVQVYGDVVMNHKGGADATENVLAVEVNPNNRNQEISGDYTIEAWTKFDFPGRGNTYSDFKWRWYHFDGVDWDQSRQFQNRIYKFRGDGKAWDWEVDSENGNYDYLMYADVDMDHPEVVNELRRWGEWYTNTLNLDGFRIDAVKHIKYSFTRDWLTHVRNATGKEMFAVQEFWKNDLGALENYLNKTNWNHSVFDVPLHYNLYNASNSGGNYDMAKLLNGTVVQKHPMHAVTFVDNHDSQPGESLESFVQEWFKPLAYALILTREQGYPSVFYGDYYGIPTHSVPAMKAKIDPILEARQNFAYGTQHDYFDHHNIIGWTREGNTTHPNSGLATIMSDGPGGEKWMYVGQNKAGQVWHDITGNKPGTVTINADGWANFSVNGGSVSIWVKR

SEQ ID NO: 16849 - protein, 485 aa, Unidentified
HHNGTNGTMMQYFEWHLPNDGNHWNRLRDDASNLRNRGITAIWIPPAWKGTSQNDVGYGAYDLYDLGEFNQKGTVRTKYGTRSQLESAIHALKNNGVQVYGDVVMNHKGGADATENVLAVEVNPNNRNQEISGDYTIEAWTKFDFPGRGNTYSDFKWRWYHFDGVDWDQSRQFQNRIYKFRGDGKAWDWEVDSENGNYDYLMYADVDMDHPEVVNELRRWGEWYTNTLNLDGFRIDAVKHIKYSFTRDWLTHVVNATGKEMFAVAEFWKNDLGALENYLNKTNWNHSVFDVPLHYNLYNASNSGGNYDMAKLLNGTVVQKHPMHAVTFVDNHDSQPGESLESFVQEWFKPLAYALILTREQGYPSVFYGDYYGIPTHSVPAMKAKIDPILEARQNFAYGTQHDYFDHHNIIGWTREGNTTHPNSGLATIMSDGPGGEKWMYVGQNKAGQVWHDITGNKPGTVTINADGWANFSVNGGSVSIWVKR

SEQ ID NO: 16850 - protein, 485 aa, Bacillus sp.
HHNGTNGTMMQYFEWHLPNDGNHWNRLRDDASNLRNRGITAIWIPPAWKGTSQNDVGYGAYDLYDLGEFNQKGTVRTKYGTRSQLESAIHALKNNGVQVYGDVVMNHKGGADATENVLAVEVNPNNRNQEISGDYTIEAWTKFDFPGRGNTYSDFKWRWYHFDGVDWDQSRQFQNRIYKFRGDGKAWDWEVDGENGNYDYLMYADVDMDHPEVVNELRRWGEWYTNTLNLDGFRIDAVKHIKYSFTRDWLTHVRNATGKEMFAVAEFWKNDLGALENYLNKTNWNHSVFDVPLHYNLYNASNSGGNYDMAKLLNGTVVQKHPMHAVTFVDNHDSQPGESLESFVQEWFKPLAYALILTREQGYPSVFYGDYYGIPTHSVPAMKAKIDPILEARQNFAYGTQHDYFDHHNIIGWTREGNTTHPNSGLATIMSDGPGGEKWMYVGQNKAGQVWHDITGNKPGTVTINADGWANFSVNGGSVSIWVKR

SEQ ID NO: 16851 - protein, 485 aa, Unidentified
HHNGTNGTMMQYFEWHLPNDGNHWNRLRDDASNLRNRGITAIWIPPAWKGTSQNDVGYGAYDLYDLGEFNQKGTVRTKYGTRSQLESAIHALKNNGVQVYGDVVMNHKGGADATENVLAVEVNPNNRNQEISGDYTIEAWTKFDFPGRGNTYSDFKWRWYHFDGVDWDQSRQFQNRIYKFRGDGKAWDWEVDSENGNYDYLMYADVDMDHPEVVNELRRWGEWYTNTLNLDGFRIDAVKHIKNSFTRDWLTHVRNATGKEMFAVAEFWKNDLGALENYLNKTNWNHSVFDVPLHYNLYNASNSGGNYDMAKLLNGTVVQKHPMHAVTFVDNHDSQPGESLESFVQEWFKPLAYALILTREQGYPSVFYGDYYGIPTHSVPAMKAKIDPILEARQNFAYGTQHDYFDHHNIIGWTREGNTTHPNSGLATIMSDGPGGEKWMYVGQNKAGQVWHDITGNKPGTVTINADGWANFSVNGGSVSIWVKR

SEQ ID NO: 16852 - protein, 485 aa, Unidentified
HHNGTNGTMMQYFEWHLPNDGNHWNRLRDDASNLRNRGITAIWIPPAWKGTSQNDVGYGAYDLYDLGEFNQKGTVRTKYGTRSQLESAIHALKNNGVQVYGDVVMNHKGGADATENVLAVEVNPNNRNQEISGDYTIEAWTKFDFPGRGNTYSDFKWRWYHFDGVDWDQSRQFQNRIYKFRGDGKAWDWEVDSENGNYDYLMYADVDMDHPEVVNELRRWGEWYTNTLNLDGFRIDAVKHIKYSFTRDWLTHVRNATGKEMFAVAEFWKNDLGALENYLNKTNWNHSVFDVPLHYNLYNASNSGGNYDMAKLLNGTVVQKHPMHAVTFVDNHDSQPGESLESFVQEWFKPLAYALILTREQGYPSVFYGDYYGIPTHSVPAMKAKIDPILEARQNFAYGTQHDYFDHHNIIGWTREGNTTHPNSGLATIMSDGPGGEKWMYVGQNKAGQVWLDITGNKPGTVTINADGWANFSVNGGSVSIWVKR

SEQ ID NO: 16853 - protein, 485 aa, Unidentified
HHNGTNGTMMQYFEWHLPNDGNHWNRLRDDASNLRNRGITAIWIPPAWKGTSQNDVGYGAYDLYDLGEFNQKGTVRTKYGTRSQLESAIHALKNNGVQVYGDVVMNHKGGADATENVLAVEVNPNNRNQEISGDYTISAWTKFDFPGRGNTYSDFKWRWYHFDGVDWDQSRQFQNRIYKFRGDGKAWDWEVDSENGNYDYLMYADVDMDHPEVVNELRRWGEWYTNTLNLDGFRIDAVKHIKYSFTRDWLTHVRNATGKEMFAVAEFWKNDLGALENYLNKTNWNHSVFDVPLHYNLYNASNSGGNYDMAKLLNGTVVQKHPMHAVTFVDNHDSQPGESLESFVQEWFKPLAYALILTREQGYPSVFYGDYYGIPTHSVPAMKAKIDPILEARQNFAYGTQHDYFDHHNIIGWTREGNTTHPNSGLATIMSDGPGGEKWMYVGQNKAGQVWHDITGNKPGTVTINADGWANFSVNGGSVSIWVKR

SEQ ID NO: 16854 - protein, 485 aa, Unidentified
HHNGTNGTMMQYFEWHLPNDGNHWNRLRDDASNLRNRGITAIWIPPAWKGTSQNDVGYGAYDLYDLGEFNQKGTVRTKYGTRSQLESAIHALKNNGVQVYGDVVMNHKGGADATENVLAVEVNPNNRNQEISGDYTIEAWTKFDFPGRGNTYSDFKWRWYHFDGVDWDQSRQFQNRIYKFRGDGKAWDWEVDSENGNYDYLMYADVDMDHPEVVNELRRWGEWYTNTLNLDGFRIDAVKHIKYSFTRDWLTHVRNATGKEMFAVAEFWKNDLGALENYLNKTNWNHVVFDVPLHYNLYNASNSGGNYDMAKLLNGTVVQKHPMHAVTFVDNHDSQPGESLESFVQEWFKPLAYALILTREQGYPSVFYGDYYGIPTHSVPAMKAKIDPILEARQNFAYGTQHDYFDHHNIIGWTREGNTTHPNSGLATIMSDGPGGEKWMYVGQNKAGQVWHDITGNKPGTVTINADGWANFSVNGGSVSIWVKR

SEQ ID NO: 16855 - protein, 485 aa, Unidentified
HHNGTNGTMMQYFEWHLPNDGNHWNRLRDDASNLRNRGITAIWIPPAWKGTSQNDVGYGAYDLYDLGEFNQKGTVRTKYGTRSQLESAIHALKNNGVQVYGDVVMNHKGGADATENVLAVEVNPNNRNQEISGDYTIEAWTKFDFPGRGNTYSDFKWRWYHTDGVDWDQSRQFQNRIYKFRGDGKAWDWEVDSENGNYDYLMYADVDMDHPEVVNELRRWGEWYTNTLNLDGFRIDAVKHIKYSFTRDWLTHVRNATGKEMFAVAEFWKNDLGALENYLNKTNWNHSVFDVPLHYNLYNASNSGGNYDMAKLLNGTVVQKHPMHAVTFVDNHDSQPGESLESFVQEWFKPLAYALILTREQGYPSVFYGDYYGIPTHSVPAMKAKIDPILEARQNFAYGTQHDYFDHHNIIGWTREGNTTHPNSGLATIMSDGPGGEKWMYVGQNKAGQVWHDITGNKPGTVTINADGWANFSVNGGSVSIWVKR

SEQ ID NO: 16856 - protein, 485 aa, Bacillus sp.
HHNGTNGTMMQYFEWHLPNDGNHWNRLRDDASNLRNRGITAIWIPPAWKGTSQNDVGYGAYDLYDLGEFNQKGTVRTKYGTRSQLESAIHALKNNGVQVYGDVVMNHKGGADATENVLAVEVNPNNRNQEISGDYTIEAWTKFDFPGRGNTYSDFKWRWYHFDGVDWDQSRQFQNRIYKFRGDGKAXDWEVDSENGNYDYLMYADVDMDHPEVVNELRRWGEWYTNTLNLDGFRIDAVKHIKYSFTRDWLTHVRNATGKEMFAVAEFWKNDLGALENYLNKTNWNHSVFDVPLHYNLYNASNSGGNYDMAKLLNGTVVQKHPMHAVTFVDNHDSQPGESLESFVQEWFKPLAYALILTREQGYPSVFYGDYYGIPTHSVPAMKAKIDPILEARQNFAYGTQHDYFDHHNIIGWTREGNTTHPNSGLATIMSDGPGGEKWMYVGQNKAGQVWHDITGNKPGTVTINADGWANFSVNGGSVSIWVKR

SEQ ID NO: 16857 - protein, 485 aa, Unidentified
HHNGTNGTMMQYFEWHLPNDGNHWNRLRDDASNLRNRGITAIWIPPAWKGTSQNDVGYGAYDLYDLGEFNQKGTVRTKYGTRSQLESAIHALKNNGVQVYGDVVMNHKGGADATENVLAVEVNPNNRNQEISGDYTIEAWTKFDFPGRGNTYSDFKWRWYHFDGVDWDQSRQFQNRIYKFRGDGKAWDWEVDSENGNYDYLMYADVDMDHPEVVNELRRWGEWYTNTLNLDGFRIDAVKHIKYSFTRDWLTHVRNATGKEMFAVAEFWKNDLGALENYLNKTNWNHSVFDVPLHYNLYNASNSGGNYDMAKLLNGTVVQKHPMHAVTFVDNHDSQPGESLESFVQEWFKPLAYALILTREQGYPSVFYGDYYGIPTHSVPAMTAKIDPILEARQNFAYGTQHDYFDHHNIIGWTREGNTTHPNSGLATIMSDGPGGEKWMYVGQNKAGQVWHDITGNKPGTVTINADGWANFSVNGGSVSIWVKR

SEQ ID NO: 16858 - protein, 485 aa, Unidentified
HHNGTNGTMMQYFEWHLPNDGNHWNRLRDDASNLRNRGITAIWIPPAWKGTSQNDVGYGAYDLYDLGEFNQKGTVRTKYGTRSQLESAIHALKNNGVQVYGDVVMNHKGGADATENVLAVEVNPNNRNQEISGDYTIEAWTKFDFPGRGNTYSDFKWRWYHFDGVDWDQSRQFQNRIYKFRGDGKAWDWEVDSENGNYDYLMYADVDMDHPEVVNELRRWGEWYTNTLNLDGFRIDAVKHIKYSFTRDWLTHVRNATGKEMFAVAEFWKNDLGALENYLNKTNWNHSVFDVPLHYNLYNASNSGGNYDMAKLLNGTVVQKHPMHAVTFVDNHDSQPGESLESFVQEWFKPLAYALILTREQGYPSVFYGDYYGIPTHSVPAMKAKIDPILEARQNFAYGTQHDYFDHHNIIGWTREGNTTHPNSGLATIMSDGPGGEKWMYVGQNKAGQVWHDITGNKPGTVTINADGLANFSVNGGSVSIWVKR

SEQ ID NO: 16859 - protein, 485 aa, Unidentified
HHNGTNGTMMQYFEWHLPNDGNHWNRLRDDASNLRNRGITAIWIPPAWKGTSQNDVGYGAYDLYDLGEFNQKGTVRTKYGTRSQLESAIHALKNNGVQVYGDVVMNHKGGADATENVLAVEVNPNNRNQEISGDYTIEAWTKFDFPGRGNTYSDFKWRWYHFDGVDWDQSRQFQNRIYKFRGDGKAWDWEVDSENGNYDYLMYADVDMDHPEVVNELRRWGEWYTNTLNLDGFRIDAVKHIKYSFTRDWLTHVRNATGKEMFAVAEFWKNDLGALENYLNKTNWNHSVFDVPLHYNLYNASNSGGNYDMAKLLNGTVVQKHPMHAVTFVDNHDSQPGESLESFVQEWFKPLAYALILTREQGVPSVFYGDYYGIPTHSVPAMKAKIDPILEARQNFAYGTQHDYFDHHNIIGWTREGNTTHPNSGLATIMSDGPGGEKWMYVGQNKAGQVWHDITGNKPGTVTINADGWANFSVNGGSVSIWVKR

SEQ ID NO: 16860 - protein, 485 aa, Unidentified
HHNGTNGTMMQYFEWHLPNDGNHWNRLRDDASNLRNRGITAIWIPPAWKGTSQNDVGYGAYDLYDLGYFNQKGTVRTKYGTRSQLESAIHALKNNGVQVYGDVVMNHKGGADATENVLAVEVNPNNRNQEISGDYTIEAWTKFDFPGRGNTYSDFKWRWYHFDGVDWDQSRQFQNRIYKFRGDGKAWDWEVDSENGNYDYLMYADVDMDHPEVVNELRRWGEWYTNTLNLDGFRIDAVKHIKYSFTRDWLTHVRNATGKEMFAVAEFWKNDLGALENYLNKTNWNHSVFDVPLHYNLYNASNSGGNYDMAKLLNGTVVQKHPMHAVTFVDNHDSQPGESLESFVQEWFKPLAYALILTREQGYPSVFYGDYYGIPTHSVPAMKAKIDPILEARQNFAYGTQHDYFDHHNIIGWTREGNTTHPNSGLATIMSDGPGGEKWMYVGQNKAGQVWHDITGNKPGTVTINADGWANFSVNGGSVSIWVKR

SEQ ID NO: 16861 - protein, 485 aa, Unidentified
HHNGTNGTMMQYFEWHLPNDGNHWNRLRDDASNLRNRGITAIWIPPAWKGTSQNDVGYGAYDLYDLGEFNQKGTVRTKYGTRSQLESAIHALKNNGVQVYGDVVMNHKGGADATENVLAVEVNPNNRNQEISGDYTIEAWTKFDFPGRGNTYSDFKWRWYHFDGVDWDQSRQFQNRIYKFRGDGKAWDWEVDSENGNYDYLMYADVDMDHPEVVNELRRWGEWYTNTLNLDGFRIDAVKHIKYSFTRDWLTHVRNATGKEMFAVAEFWKNDLGALENYLNKTNWNHSVFDVPLHYNLYNASNSGGNYDMAKLLNGTVVQKHPMHAVTFVDNHDSQPGESLESFVQEWFKPLAYALILTREQGYPSVFYGDYYGIPTHSVPAMKAKIDPILMARQNFAYGTQHDYFDHHNIIGWTREGNTTHPNSGLATIMSDGPGGEKWMYVGQNKAGQVWHDITGNKPGTVTINADGWANFSVNGGSVSIWVKR

SEQ ID NO: 16862 - protein, 485 aa, Unidentified
HHNGTNGTMMQYFEWHLPNDGNHWNRLRDDASNLRNRGITAIWIPPAWKGTSQNDVGYGAYDLYDLGEFNQKGTVRTKYGTRSQLESAIHALKNNGVQVYGDVVMNHKGGADATENVLAVEVNPNNRNQEISGDYTIEAWTNFDFPGRGNTYSDFKWRWYHFDGVDWDQSRQFQNRIYKFRGDGKAWDWEVDSENGNYDYLMYADVDMDHPEVVNELRRWGEWYTNTLNLDGFRIDAVKHIKYSFTRDWLTHVRNATGKEMFAVAEFWKNDLGALENYLNKTNWNHSVFDVPLHYNLYNASNSGGNYDMAKLLNGTVVQKHPMHAVTFVDNHDSQPGESLESFVQEWFKPLAYALILTREQGYPSVFYGDYYGIPTHSVPAMKAKIDPILEARQNFAYGTQHDYFDHHNIIGWTREGNTTHPNSGLATIMSDGPGGEKWMYVGQNKAGQVWHDITGNKPGTVTINADGWANFSVNGGSVSIWVKR

SEQ ID NO: 16863 - protein, 485 aa, Unidentified
HHNGTNGTMMQYFEWHLPNDGNHWNRLRDDASNLRNRGITAIWIPPAWKGTSQNDVGYGAYDLYDLGEFNQKGTVRTKYGTRSQLESAIHALKNNGVQVYGDVVMNHKGGADATENVLAVEVNPNNRNQEISGDYTIEAWTKFDFPGRGNTYSDFKWRWYHFDGVDWDQSRQFQNRIYKFRGDGKAWDWEVDSENGNYDYLMYADVDMDHPEVVNELRRWGEWYTNTLNLDGFRIDAVKHIKYSFTRDWLTHVTNATGKEMFAVAEFWKNDLGALENYLNKTNWNHSVFDVPLHYNLYNASNSGGNYDMAKLLNGTVVQKHPMHAVTFVDNHDSQPGESLESFVQEWFKPLAYALILTREQGYPSVFYGDYYGIPTHSVPAMKAKIDPILEARQNFAYGTQHDYFDHHNIIGWTREGNTTHPNSGLATIMSDGPGGEKWMYVGQNKAGQVWHDITGNKPGTVTINADGWANFSVNGGSVSIWVKR

SEQ ID NO: 16864 - protein, 485 aa, Unidentified
HHNGTNGTMMQYFEWHLPNDGNHWNRLRDDASNLRNRGITAIWIPPAWKGTSQNDVGYGAYDLYDLGEFNQKGTVRTKYGTRSQLESAIHALKNNGVQVYGDVVMNHKGGADATENVLAVEVNPNNRNQEISGDYTIEAWTKFDFPGRGNTYSDFKWRWYHFDGVDWDQSRQFQNRIYKFRGDGKAWDWEVDSENGNYDYLMYADVDMDHPEVVNELRRWGEWYTNTLNLDGFRIDAVKHIKYSFTRDWLTHVRNATGKEMFAVAEFWKNDLGALENYLNKTNWNHSVFDVPLHYNLYNASNSGGNYDMAKLLNGTVVQKHPRHAVTFVDNHDSQPGESLESFVQEWFKPLAYALILTREQGYPSVFYGDYYGIPTHSVPAMKAKIDPILEARQNFAYGTQHDYFDHHNIIGWTREGNTTHPNSGLATIMSDGPGGEKWMYVGQNKAGQVWHDITGNKPGTVTINADGWANFSVNGGSVSIWVKR

SEQ ID NO: 16865 - protein, 485 aa, Unidentified
HHNGTNGTMMQYFEWHLPNDGNHWNRLRDDASNLRNRGITAIWIPPAWKGTSQNDVGYGAYDLYDLGEFNQKGTVRTKYGTRSQLESAIHALKNNGVQVYGDVVMNHKGGADATENVLAVEVNPNNRNQEISGDYTIEAWTKFDFPGRGNTYSDFKWRWYHFDGVDWDQSRQFQNRIYKFRGDGKAWDWEVDSENGNYDYLMYADVDMDHPEVVNELRRWGEWYTNTLNLDGFRIDAVKHIKYSFTRDWLTHVRNATGKEMFAVAEFWKNDLGALENYLNKTNWNHSVFDVPLHYNLYNASNLGGNYDMAKLLNGTVVQKHPMHAVTFVDNHDSQPGESLESFVQEWFKPLAYALILTREQGYPSVFYGDYYGIPTHSVPAMKAKIDPILEARQNFAYGTQHDYFDHHNIIGWTREGNTTHPNSGLATIMSDGPGGEKWMYVGQNKAGQVWHDITGNKPGTVTINADGWANFSVNGGSVSIWVKR

SEQ ID NO: 16866 - protein, 485 aa, Unidentified
HHVGTNGTMMQYFEWHLPNDGNHWNRLRDDASNLRNRGITAIWIPPAWKGTSQNDVGYGAYDLYDLGEFNQKGTVRTKYGTRSQLESAIHALKNNGVQVYGDVVMNHKGGADATENVLAVEVNPNNRNQEISGDYTIEAWTKFDFPGRGNTYSDFKWRWYHFDGVDWDQSRQFQNRIYKFRGDGKAWDWEVDSENGNYDYLMYADVDMDHPEVVNELRRWGEWYTNTLNLDGFRIDAVKHIKYSFTRDWLTHVRNATGKEMFAVAEFWKNDLGALENYLNKTNWNHSVFDVPLHYNLYNASNSGGNYDMAKLLNGTVVQKHPMHAVTFVDNHDSQPGESLESFVQEWFKPLAYALILTREQGYPSVFYGDYYGIPTHSVPAMKAKIDPILEARQNFAYGTQHDYFDHHNIIGWTREGNTTHPNSGLATIMSDGPGGEKWMYVGQNKAGQVWHDITGNKPGTVTINADGWANFSVNGGSVSIWVKR

SEQ ID NO: 16867 - protein, 485 aa, Unidentified
HHNGTNGTMMQYFEWHLPNDGNHWNRLRDDASNLRNRGITAIWIPPAWKGTSQNDVGYGAYDLYDLGEFNQKGTVRTKYGTRSQLESAIHALKNNGVQVYGDVVMNHKGGADATENVLAVEVNPNNRNQEISGDYTIEAWTKFDFPGRGNTYSDFKWRWYHFDGVDWDQSRQFQNRIYKFRGDGKAWDWEVDSENGNYDYLMYADVDMDHPEVVNELRRWGEWYTNTLNLDGFRIDAVKHIKYSFTRDWLTHVRNATGKEMSAVAEFWKNDLGALENYLNKTNWNHSVFDVPLHYNLYNASNSGGNYDMAKLLNGTVVQKHPMHAVTFVDNHDSQPGESLESFVQEWFKPLAYALILTREQGYPSVFYGDYYGIPTHSVPAMKAKIDPILEARQNFAYGTQHDYFDHHNIIGWTREGNTTHPNSGLATIMSDGPGGEKWMYVGQNKAGQVWHDITGNKPGTVTINADGWANFSVNGGSVSIWVKR

SEQ ID NO: 16868 - protein, 485 aa, Unidentified
HHNGTNGTMMQYFEWHLPNDGNHWNRLRDDASNLRNRGITAIWIPPAWKGTSQNDVGYGAYDLYDLGEFNQKGTVRTKYGTRSQLESAIHALKNNGVQVYGDVVMNHKGGADATENVLAVEVNPNNRNQEISGDYTIEASTKFDFPGRGNTYSDFKWRWYHFDGVDWDQSRQFQNRIYKFRGDGKAWDWEVDSENGNYDYLMYADVDMDHPEVVNELRRWGEWYTNTLNLDGFRIDAVKHIKYSFTRDWLTHVRNATGKEMFAVAEFWKNDLGALENYLNKTNWNHSVFDVPLHYNLYNASNSGGNYDMAKLLNGTVVQKHPMHAVTFVDNHDSQPGESLESFVQEWFKPLAYALILTREQGYPSVFYGDYYGIPTHSVPAMKAKIDPILEARQNFAYGTQHDYFDHHNIIGWTREGNTTHPNSGLATIMSDGPGGEKWMYVGQNKAGQVWHDITGNKPGTVTINADGWANFSVNGGSVSIWVKR

SEQ ID NO: 16869 - protein, 485 aa, Unidentified
HHNGTNGTMMQYFEWHLPNDGNHWNRLRDDASNLRNRGITAIWIPPAWKGTSQNDVGYGAYDLYDLGEFNQKWTVRTKYGTRSQLESAIHALKNNGVQVYGDVVMNHKGGADATENVLAVEVNPNNRNQEISGDYTIEAWTKFDFPGRGNTYSDFKWRWYHFDGVDWDQSRQFQNRIYKFRGDGKAWDWEVDSENGNYDYLMYADVDMDHPEVVNELRRWGEWYTNTLNLDGFRIDAVKHIKYSFTRDWLTHVRNATGKEMFAVAEFWKNDLGALENYLNKTNWNHSVFDVPLHYNLYNASNSGGNYDMAKLLNGTVVQKHPMHAVTFVDNHDSQPGESLESFVQEWFKPLAYALILTREQGYPSVFYGDYYGIPTHSVPAMKAKIDPILEARQNFAYGTQHDYFDHHNIIGWTREGNTTHPNSGLATIMSDGPGGEKWMYVGQNKAGQVWHDITGNKPGTVTINADGWANFSVNGGSVSIWVKR

SEQ ID NO: 16870 - protein, 485 aa, Unidentified
HHNGTNGTMMQYFEWHLPNDGNHWNRLRDDASNLRNRGITAIWIPPAWKGTSQNDVGYGAYDLYDLGEFNQKGTVRTKYGTRSQLESAIHALKNNGVQVYGDVVMNHKGGADATENVLAVEVNPNNRNQEISGDYTIEAWTKFDFPGRGNTYSDFKWRWYHFDGVDWDQSRQFQNRIYKFRGDGKAWDWEVDSENGNYDYLMYADVDMDHPEVVNELRRWGEWYTNTLNLDGFRIDAVKHIKYSFTRDWLTHVRNATGKEMFAVAEFWKNDLGALENYLNKTNWNHSVFDVPLHYNLYNASNSGGNYDMAKLLNGTVVQKHPMHAVTFVDNHDSQPGESLESFVQEWFKPLAYALILTREQGYPSVFYGDYYGIPTHSVPAMKAKIDPILEARQNFAYGTQHEYFDHHNIIGWTREGNTTHPNSGLATIMSDGPGGEKWMYVGQNKAGQVWHDITGNKPGTVTINADGWANFSVNGGSVSIWVKR

SEQ ID NO: 16871 - protein, 485 aa, Unidentified
HHNGTNGTMMQYFEWHLPNDGNHWNRLRDDASNLRNRGITAIWIPPAWKGTSQNDVGYGAYDLYDLGEFNQKGTVRTKYGTRSQLESAIHALKNNGVQVYGDVVMNHKGGADATENVLAVEVNPNNRNQEIIGDYTIEAWTKFDFPGRGNTYSDFKWRWYHFDGVDWDQSRQFQNRIYKFRGDGKAWDWEVDSENGNYDYLMYADVDMDHPEVVNELRRWGEWYTNTLNLDGFRIDAVKHIKYSFTRDWLTHVRNATGKEMFAVAEFWKNDLGALENYLNKTNWNHSVFDVPLHYNLYNASNSGGNYDMAKLLNGTVVQKHPMHAVTFVDNHDSQPGESLESFVQEWFKPLAYALILTREQGYPSVFYGDYYGIPTHSVPAMKAKIDPILEARQNFAYGTQHDYFDHHNIIGWTREGNTTHPNSGLATIMSDGPGGEKWMYVGQNKAGQVWHDITGNKPGTVTINADGWANFSVNGGSVSIWVKR

SEQ ID NO: 16872 - protein, 485 aa, Unidentified
HHNGTNGTMMQYFEWHLPNDGNHWNRLRDDASNLRNRGITAIWIPPAWKGTSQNDVGYGAYDLYDLGEFNQKGTVRTKYGTRSQLESAIHALKNNGVQVYGDVVMNHKGGADATENVLAVEVNPNNRNQEISGDYTIEAWTKFDFPGRGNTYSDFKWRWYHFDGVDWDQSRQFQNRIYKFRGDGKAWDWEVDSENGNYDYLMYADVDMDHPEVVNELRRWGEWYTNTLNLDGFRIDAVKHIKYSFTRDWLTHVRNATGKEMFAVAEFWKNDLGALENYINKTNWNHSVFDVPLHYNLYNASNSGGNYDMAKLLNGTVVQKHPMHAVTFVDNHDSQPGESLESFVQEWFKPLAYALILTREQGYPSVFYGDYYGIPTHSVPAMKAKIDPILEARQNFAYGTQHDYFDHHNIIGWTREGNTTHPNSGLATIMSDGPGGEKWMYVGQNKAGQVWHDITGNKPGTVTINADGWANFSVNGGSVSIWVKR

SEQ ID NO: 16873 - protein, 485 aa, Unidentified
HHNGTNGTMMQYFEWHLPNDGNHWNRLRDDASNLRNRGITAIWIPPAWKGTSQNDVGYGAYDLYDLGEFNQKGTVRTKYGTRSQLESAIHALKNNGVQVYGDVVMNHKGGADATENVLAVEVNPNNRNQEISGDYTIEAWTKFDFPGRGNTYSDFKWRWYHFDGVDWDQSRQFQNRIYKFRGDGKAWDWEVDSENGNYDYLMYADVDMDHPEVVNELRRWGEWYTNTLNLDGFRIDAVKHIKYSFTRDWLTHVRNATGKEMFAVAEFWKNDLGALENYLNKTNWNHSVFDVPLHYNLYNASNSGGNYDMAKLLNGTVVQKHPMHAVTFVDNHDSQPGESLESFVQEWFKPLAYALILTREQGYPSVFYGDYYGIQTHSVPAMKAKIDPILEARQNFAYGTQHDYFDHHNIIGWTREGNTTHPNSGLATIMSDGPGGEKWMYVGQNKAGQVWHDITGNKPGTVTINADGWANFSVNGGSVSIWVKR

SEQ ID NO: 16874 - protein, 485 aa, Unidentified
HHNGTNGTMMQYFEWHLPNDGNHWNRLRDDASNLRNRGITAIWIPPAWKGTSQNDVGYGAYDLYDLGEFNQKGTVRTKYGTRSQLESAIHALKNNGVQVYGDVVMNHKGGADATENVLAVEVNPNNRNQEISGDYTIEAWTKFDFPGRGNTYSDFKWRWYHFDGVDWDQSRQFQNRIYKFRGDGKAWDWEVDSENGNYDYLMYADVDMDHPEVVNELRRWGEWYTNTLNLDGFRIDAVKHIKYSFTRDWLTHVRNATGKEMFAVAEFWKNDLGALENYLNKTNWNHSVFDVPLHYNLYNASNSGGNYDMAKLLNGTVVQKHPPHAVTFVDNHDSQPGESLESFVQEWFKPLAYALILTREQGYPSVFYGDYYGIPTHSVPAMKAKIDPILEARQNFAYGTQHDYFDHHNIIGWTREGNTTHPNSGLATIMSDGPGGEKWMYVGQNKAGQVWHDITGNKPGTVTINADGWANFSVNGGSVSIWVKR

SEQ ID NO: 16875 - protein, 485 aa, Unidentified
HHNGTNGTMMQYFEWHLPNDGNHWNRLRDDASNLRNRGITAIWIPPAWKGTSQNDVGYGAYDLYDLGEFNQKGTVRTKYGTRSQLESAIHALKNNGVQVYGDVVMNHKGGADATENVLAVEVNPNNRNQEISGDYTDEAWTKFDFPGRGNTYSDFKWRWYHFDGVDWDQSRQFQNRIYKFRGDGKAWDWEVDSENGNYDYLMYADVDMDHPEVVNELRRWGEWYTNTLNLDGFRIDAVKHIKYSFTRDWLTHVRNATGKEMFAVAEFWKNDLGALENYLNKTNWNHSVFDVPLHYNLYNASNSGGNYDMAKLLNGTVVQKHPMHAVTFVDNHDSQPGESLESFVQEWFKPLAYALILTREQGYPSVFYGDYYGIPTHSVPAMKAKIDPILEARQNFAYGTQHDYFDHHNIIGWTREGNTTHPNSGLATIMSDGPGGEKWMYVGQNKAGQVWHDITGNKPGTVTINADGWANFSVNGGSVSIWVKR

SEQ ID NO: 16876 - protein, 485 aa, Bacillus sp.
HHNGTNGTMMQYFEWHLPNDGNHWNRLRDDASNLRNRGITAIWIPPAWKGTSQNDVGYGAYDLYDLGEFNQKGTVRTKYGTRSQLESAIHALKNNGVQVYGDVVMNHKGGADATENVLAVEVNPNNRNQEISGDYTIEAWTKFDFPGRGNTYSDFKWRWYHFDGVDWDQSRQFQNRIYKFRGDGKAWDWEVDSENGNYDVLMYADVDMDHPEVVNELRRWGEWYTNTLNLDGFRIDAVKHIKYSFTRDWLTHVRNATGKEMFAVAEFWKNDLGALENYLNKTNWNHSVFDVPLHYNLYNASNSGGNYDMAKLLNGTVVQKHPMHAVTFVDNHDSQPGESLESFVQEWFKPLAYALILTREQGYPSVFYGDYYGIPTHSVPAMKAKIDPILEARQNFAYGTQHDYFDHHNIIGWTREGNTTHPNSGLATIMSDGPGGEKWMYVGQNKAGQVWHDITGNKPGTVTINADGWANFSVNGGSVSIWVKR

SEQ ID NO: 16877 - protein, 485 aa, Unidentified
HHNGTNGTMMQYFEWHLPNDGNHWNRLRDDASNLRNRGITAIWIPPAWKGTSQNDVGYGAYDLYDLGEFNQKGTVRTKYGTRSQLESAIHALKNNGVQVYGDVVMNHKGGADATENVLAVEVNPNNRNQEISGDYTIEAWTKFDFPGRGNTYSDFKWRWYHFDGVDWDQSRQFQNRIYKFRGDGKAWDWEVDSENGNYDYLMYADVDMDHPEVVNELRRWGEWYTNTLNLDGFRIDAVKHIKYSFTRDWLTHVRNATGKEMCAVAEFWKNDLGALENYLNKTNWNHSVFDVPLHYNLYNASNSGGNYDMAKLLNGTVVQKHPMHAVTFVDNHDSQPGESLESFVQEWFKPLAYALILTREQGYPSVFYGDYYGIPTHSVPAMKAKIDPILEARQNFAYGTQHDYFDHHNIIGWTREGNTTHPNSGLATIMSDGPGGEKWMYVGQNKAGQVWHDITGNKPGTVTINADGWANFSVNGGSVSIWVKR

SEQ ID NO: 16878 - protein, 485 aa, Unidentified
HHNGTNGTMMQYFEWHLPNDGNHWNRLRDDASNLRNRGITAIWIPPAWKGTSQNDVGYGAYDLYDLGEFNQKGTVRTKYGTRSQLESAIHALKNNGVQVYGDVVMNHKGGQDATENVLAVEVNPNNRNQEISGDYTIEAWTKFDFPGRGNTYSDFKWRWYHFDGVDWDQSRQFQNRIYKFRGDGKAWDWEVDSENGNYDYLMYADVDMDHPEVVNELRRWGEWYTNTLNLDGFRIDAVKHIKYSFTRDWLTHVRNATGKEMFAVAEFWKNDLGALENYLNKTNWNHSVFDVPLHYNLYNASNSGGNYDMAKLLNGTVVQKHPMHAVTFVDNHDSQPGESLESFVQEWFKPLAYALILTREQGYPSVFYGDYYGIPTHSVPAMKAKIDPILEARQNFAYGTQHDYFDHHNIIGWTREGNTTHPNSGLATIMSDGPGGEKWMYVGQNKAGQVWHDITGNKPGTVTINADGWANFSVNGGSVSIWVKR

SEQ ID NO: 16879 - protein, 483 aa, Bacillus sp.
HHNGTNGTMMQYFEWHLPNDGNHWNRLRDDASNLRNRGITAIWIPPAWKGTSQNDVGYGAYDLYDLGEFNQKGTVRTKYGTRSQLESAIHALKNNGVQVYGDVVMNHKGGADATENVLAVEVNPNNRNQEISGDYTIEAWTKFDFPGRGNTYSDFKWRWYHFDGVDWDQSRQFQNRIYKFRGKAWDWEVDSETGNYDYLMYADVDMDHPEVVNELRRWGEWYTNTLNLDGFRIDAVKHIKYSFTRDWLTHVRNATGKEMFAVAEFWKNDLGALENYLNKTNWNHSVFDVPLHYNLYNASNSGGNYDMAKLLNGTVVQKHPMHAVTFVDNHDSQPGESLESFVQEWFKPLAYALILTREQGYPSVFYGDYYGIPTHSVPAMKAKIDPILEARQNFAYGTQHDYFDHHNIIGWTREGNTTHPNSGLATIMSDGPGGEKWMYVGQNKAGQVWHDITGNKPGTVTINADGWANFSVNGGSVSIWVKR

SEQ ID NO: 16880 - protein, 485 aa, Bacillus sp.
HHNGTNGTMMQYFEWHLPNDGNHWNRLRDDASNLRNRGITAIWIPPAWKGTSQNDVGYGAYDLYDLGEFNQKGTVRTKYGTRSQLESAIHALKNNGVQVYGDVVMNHKGGADATENVLAVEVNPNNRNQEISGDYTIEAWTKFDFPGRGNTYSDFKWRWYHFDGVDWDQSRQFQNRIYKFRGDGKAWDWEVDSENGNYDYLMYADVDMDHPEVVNELRRWGEWYTNTLNLDGFRIDAVKHIKVSFTRDWLTHVRNATGKEMFAVAEFWKNDLGALENYLNKTNWNHSVFDVPLHYNLYNASNSGGNYDMAKLLNGTVVQKHPMHAVTFVDNHDSQPGESLESFVQEWFKPLAYALILTREQGYPSVFYGDYYGIPTHSVPAMKAKIDPILEARQNFAYGTQHDYFDHHNIIGWTREGNTTHPNSGLATIMSDGPGGEKWMYVGQNKAGQVWHDITGNKPGTVTINADGWANFSVNGGSVSIWVKR

SEQ ID NO: 16881 - protein, 485 aa, Unidentified
HHNGTNGTMMQYFEWHLPNDGNHWNRLRDDASNLRNRGITAIWIPPAWKGTSQNDVGYGAYDLYDLGEFNQKGTVRTKYGTRSQLESAIHALKNNGVQVYGDVVMNHKGGADATENVLAVEVNPNNRNQEISGDYTIEAWTKFDFPGRGNTYSDFKWRWYHFDGVDWDQSRQFQNRIYKFRGDGKAWDWEVDSENGNYDYLMYADVDMDHPEVVNELRRWGEWYTNTLNLDGFRIDAVKHIKYSFTRDWLTHVRNATGKEMFAVAEFWKNDLGALENYLNKTNWNHSVFDVPLHYNLYNASNSGGNYDMAKLLNGTVVQKHPMHAVTFVDNHDSQPGESLESFVQEWFKPLAYALILTCEQGYPSVFYGDYYGIPTHSVPAMKAKIDPILEARQNFAYGTQHDYFDHHNIIGWTREGNTTHPNSGLATIMSDGPGGEKWMYVGQNKAGQVWHDITGNKPGTVTINADGWANFSVNGGSVSIWVKR

SEQ ID NO: 16882 - protein, 485 aa, Unidentified
HHNGTNGTMMQYFEWHLPNDGNHWNRLRDDASNLRNRGITAIWIPPAWKGTSQNDVGYGAYDLYDLGEFNQKGTVRTKYGTRSQLESAIHALKNNGVQVYGDVVMNHKGGADATENVLAVEVNPNNRNQEISGDYTIEAWTKFDFPGRGNTYSDFKWRWYHFDGVDWDQSRQFQNRIYKFRGDGKAWDWEVDSENGNYDYLMYADVDMDHPEVVNELRRWGEWYTNTLNLDGFRIDAVKHIKYSFTRDWLTHVRNATGKEMFAVAEFWKNDLGALENYLNKTNWNHSVFDVPLHYNLYNASNSGGNYDMAKLLNGTVVQKHPMHAVTFVDNHDSQPGESLESFVQEWFKPLAYALILTREQGYPSVFYGDYYGIPTHSVPAMKAKIDPILEARQNFAYGTQHDYFDHHNIIGWTREGNTTHPNSGLATIMSDGPGGEKWMYVGQNKAGQVWHDITGNKPGTVTINADGWANFSVNFGSVSIWVKR

SEQ ID NO: 16883 - protein, 485 aa, Unidentified
HHNGTNGTMMQYFEWHLPNDGNHWNRLRDDASNLRNRGITAIWIPPAWKGTSQNDVGYGAYDLYDLGEFNQKGTVRTKYGTRSQLESAIHALKNNGVQVYGDVVMNHKGGADATENVLAVEVNPNNRNQEISGDYTIEAWTKFDFPGRGNTYSDFKWRWYHFDGVDWDQSRQFQNRIYKFRGDGKAWDWEVDSENGNYDYLMYADVDMDHPEVVNELRRWGEWYTNTLNLDGFRIDAVKHIKYSFTRDWLTHVRNATGKEMTAVAEFWKNDLGALENYLNKTNWNHSVFDVPLHYNLYNASNSGGNYDMAKLLNGTVVQKHPMHAVTFVDNHDSQPGESLESFVQEWFKPLAYALILTREQGYPSVFYGDYYGIPTHSVPAMKAKIDPILEARQNFAYGTQHDYFDHHNIIGWTREGNTTHPNSGLATIMSDGPGGEKWMYVGQNKAGQVWHDITGNKPGTVTINADGWANFSVNGGSVSIWVKR

SEQ ID NO: 16884 - protein, 485 aa, Unidentified
HHNGTNGTMMQYFEWHLPNDGNHWNRLRDDASNLRNRGITAIWIPPAWKGTSQNDVGYGAYDLYDLGEFNQKGTVRTKYGTRSQLESAIHALKNNGVQVYGDVVMNHKGGADATENVLAVEVNPNNRNQEISGDYTIEAWTKFDFPGRGNTYSDFKWRWYHFDGVDWDQSRQFQNRIYKFRGDGKAWDWEVDSENGNYDYLMYADVDMDHPEVVNELRRWGEWYTNTLNLDGFRIDAVKHIKYSFTRDWLTHVRNATGKEMFAVAEFWKNDLGALENYLNKTNWNHSVFDVPLHYNLYNASNSGGNYDMAKLLNGTVVQKHPMHAVTFVDNHDSQPGESLESFVQEWFKPLAYALILTREQGYPSVFYGDYYGIPTHSVPAMKAKIDPILEARQNFAYGTQHDYFDHHNIIGWTREGNTTHPNSGLATIMSDGPGGEKWMYVGQNKAGQVWHDIMGNKPGTVTINADGWANFSVNGGSVSIWVKR

SEQ ID NO: 16885 - protein, 485 aa, Unidentified
HHNGTNGTMMQYFEWHLPNDGNHWNRLRDDASNLRNRGITAIWIPPAWKGTSQNDVGYGAYDLYDLGEFNQKGTVRTKYGTRSQLESAIHALKNNGVQVYGDVVMNHKGGADATENVLAVEVNPNNRNQEISGDYTIVAWTKFDFPGRGNTYSDFKWRWYHFDGVDWDQSRQFQNRIYKFRGDGKAWDWEVDSENGNYDYLMYADVDMDHPEVVNELRRWGEWYTNTLNLDGFRIDAVKHIKYSFTRDWLTHVRNATGKEMFAVAEFWKNDLGALENYLNKTNWNHSVFDVPLHYNLYNASNSGGNYDMAKLLNGTVVQKHPMHAVTFVDNHDSQPGESLESFVQEWFKPLAYALILTREQGYPSVFYGDYYGIPTHSVPAMKAKIDPILEARQNFAYGTQHDYFDHHNIIGWTREGNTTHPNSGLATIMSDGPGGEKWMYVGQNKAGQVWHDITGNKPGTVTINADGWANFSVNGGSVSIWVKR

SEQ ID NO: 16886 - protein, 485 aa, Unidentified
HHNGTNGTMMQYFEWHLPNDGNHWNRLRDDASNLRNRGITAIWIPPAWKGTSQNDVGYGAYDLYDLGEFNQKGTVRTKYGTRSQLESAIHALKNNGVQVYGDVVMNHKGGADATENVLAVEVNPNNRNQEISGDYTIEAWTKFDFPGRGNTYSDFKWRWYHFDGVDWDQSRQFQNRIYKFRGDGKAWDWEVDSENGNYDYLMYADVDMDHPEVVNELRRWGEWYTNTLNLDGFRIDAVKHIKYSFTRDWLTHVRNATGKEMFAVAEFWKNDLGALENYLNKTNWNHSVFDVPLHYNLYNASNSGGNYDMAKLLNGTVVQKHPMHAVTFVDNHDSQPGESLESFVQEWFKPLAYALILTREIGYPSVFYGDYYGIPTHSVPAMKAKIDPILEARQNFAYGTQHDYFDHHNIIGWTREGNTTHPNSGLATIMSDGPGGEKWMYVGQNKAGQVWHDITGNKPGTVTINADGWANFSVNGGSVSIWVKR

SEQ ID NO: 16887 - protein, 485 aa, Unidentified
HHNGTNGTMMQYFEWHLPNDGNHWNRLRDDASNLRNRGITAIWIPPAWKGTSQNDVGYGAYDLYDLGEFNQKGTVRTKYGTRSQLESAIHALKNNGVQVYGDVVMNHKGGADATENVLAVEVNPNNRNQEISGDYTIEAWTKFDFPGRGNTYSDFKWRWYHFDGVDWDQSRQFQNRIYKFRGDGKAWDWEVDSENGNYDYLMYADVDMDHPEVVNELRRWGEWYTNTLNLDGFRIDAVKHIKYSFTRDWLTHVRNATGKEMFAVAEFWKNDLGALENYLNKTNWNHSVFDVPLHYNLYNASNSGGNYDMAKLLNGTVVQKHPMHAVTFVDNHDSQPGESLESFVQEWFKPLAYALILTREQGYPSVFYGDYYGIPTHSVPAMKAKIDPILEARQNFAYGTQHDYTDHHNIIGWTREGNTTHPNSGLATIMSDGPGGEKWMYVGQNKAGQVWHDITGNKPGTVTINADGWANFSVNGGSVSIWVKR

SEQ ID NO: 16888 - protein, 485 aa, Unidentified
HHNGTNGTMMQYFEWHLPNDGNHWNRLRDDASNLRNRGITAIWIPPAWKGTSQNDVGYGAYDLYDLGEFNQKGTVRTKYGTRSQLESAIHALKNNGVQVYGDVVMNHKGGADATENVLAVEVNPNNRNQEISGDYTIEAWTKFDFPGRGNTYSDFKWRWYHFDGVDWDQSRQFQNRIYKFRGDGKAWDWEVDSENGNYDYLMYADVDMDHPEVVNELRRWGEWYTNTLNLDGFRIDAVKHIKYSFTRDWLTHVRNATGKEMFAVAEFWKNDLGALENYLNKTNWNHSVFDVPLHYNLYNASNSGGNYDMAKLLNGTVVQSHPMHAVTFVDNHDSQPGESLESFVQEWFKPLAYALILTREQGYPSVFYGDYYGIPTHSVPAMKAKIDPILEARQNFAYGTQHDYFDHHNIIGWTREGNTTHPNSGLATIMSDGPGGEKWMYVGQNKAGQVWHDITGNKPGTVTINADGWANFSVNGGSVSIWVKR

SEQ ID NO: 16889 - protein, 485 aa, Unidentified
HHNGTNGTMMQYFEWHLPNDGNHWNRLRDDASNLRNRGITAIWIPPAWKGTSQNDVGYGAYDLYDLGEFNQKGTVRTKYGTRSQLESAIHALKNNGVQVYGDVVMNHKGGADATENVLAVEVNPNNRNQEISGDYTIEAWTKFDFPGRGNTYSDFKWRWYHFDGVDWDQSRQFQNRIYKFRGDGKAWDWEVDSENGNYDYLMYADVDMDHPEVVNELRRWGEWYTNTLNLDGFRIDAVKHIKYSFTRDWLTHVRNATGKEMFAVAEFWKNDLGALENYLNKTNWNHSVFDVLLHYNLYNASNSGGNYDMAKLLNGTVVQKHPMHAVTFVDNHDSQPGESLESFVQEWFKPLAYALILTREQGYPSVFYGDYYGIPTHSVPAMKAKIDPILEARQNFAYGTQHDYFDHHNIIGWTREGNTTHPNSGLATIMSDGPGGEKWMYVGQNKAGQVWHDITGNKPGTVTINADGWANFSVNGGSVSIWVKR

SEQ ID NO: 16890 - protein, 485 aa, Unidentified
HHNGTNGTMMQYFEWHLPNDGNHWNRLRDDASNLRNRGITAIWIPPAWKGTSQNDVGYGAYDLYDLGEFNQKGTVRTKYGTRSQLESAIHALKNNGVQVYGDVVMNHKGGADATENVLAVEVNPNNRNQEISGDYTIEAWTKFDFPGRGNTYSDFKWRWYHFDGVDWDQSRQFQNQIYKFRGDGKAWDWEVDSENGNYDYLMYADVDMDHPEVVNELRRWGEWYTNTLNLDGFRIDAVKHIKYSFTRDWLTHVRNATGKEMFAVAEFWKNDLGALENYLNKTNWNHSVFDVPLHYNLYNASNSGGNYDMAKLLNGTVVQKHPMHAVTFVDNHDSQPGESLESFVQEWFKPLAYALILTREQGYPSVFYGDYYGIPTHSVPAMKAKIDPILEARQNFAYGTQHDYFDHHNIIGWTREGNTTHPNSGLATIMSDGPGGEKWMYVGQNKAGQVWHDITGNKPGTVTINADGWANFSVNGGSVSIWVKR

SEQ ID NO: 16891 - protein, 485 aa, Unidentified
HHNGTNGTMMQYFEWHLPNDGNHWNRLRDDASNLRNRGITAIWIPPAWKGTSQNDVGYGAYDLYDLGEFNQKGTVRTKYGTRSQLESAIHALKNNGVQVYGDVVMNHKGGADATENVLAVEVNPNNRNQEISGDYTIEAWTKFDFPGRGNTYSDFKWRWYHFDGVDWDQSRQFQNRIYKFRGDGKAWDWEVDSENGNYDYLMYADVDMDHPEVVNELRRWGEWYNNTLNLDGFRIDAVKHIKYSFTRDWLTHVRNATGKEMFAVAEFWKNDLGALENYLNKTNWNHSVFDVPLHYNLYNASNSGGNYDMAKLLNGTVVQKHPMHAVTFVDNHDSQPGESLESFVQEWFKPLAYALILTREQGYPSVFYGDYYGIPTHSVPAMKAKIDPILEARQNFAYGTQHDYFDHHNIIGWTREGNTTHPNSGLATIMSDGPGGEKWMYVGQNKAGQVWHDITGNKPGTVTINADGWANFSVNGGSVSIWVKR

SEQ ID NO: 16892 - protein, 485 aa, Bacillus sp.
HHNGTNGTMMQYFEWHLPNDGNHWNRLRDDASNLRNRGITAIWIPPAWKGTSQNDVGYGAYDLYDLGEFNQKGTVRTKYGTRSQLESAIHALKNNGVQVYGDVVMNHKGGADATENVLAVEVNPNNRNQEISGDYTIEAWTKFDFPGRGNTYSDFKWRWYHFDGVDWDQSRQFQNRIYKFRGDGKAWDWEVDSENGNQDYLMYADVDMDHPEVVNELRRWGEWYTNTLNLDGFRIDAVKHIKYSFTRDWLTHVRNATGKEMFAVAEFWKNDLGALENYLNKTNWNHSVFDVPLHYNLYNASNSGGNYDMAKLLNGTVVQKHPMHAVTFVDNHDSQPGESLESFVQEWFKPLAYALILTREQGYPSVFYGDYYGIPTHSVPAMKAKIDPILEARQNFAYGTQHDYFDHHNIIGWTREGNTTHPNSGLATIMSDGPGGEKWMYVGQNKAGQVWHDITGNKPGTVTINADGWANFSVNGGSVSIWVKR

SEQ ID NO: 16893 - protein, 485 aa, Unidentified
HHNGTNGTMMQYFEWHLPNDGNHWNRLRDDASNLRNRGITAIWIPPAWKGTSQNDVGYGAYDLYDLGEFNQKGTVRTKYGTRSQLESAIHALKNNGVQVYGDVVMNHKGGADATENVLAVEVNPNNRNQEISGDYTIEAWTKFDFPGRGNTYSDFKWRWYHFDGVDWDQSRQFQNRIYKFRGDGKAWDWEVDSENGNYDYLMYADVDMDHPEVVNELRRWGEWYTNTLNLDGFRIDAVKHIKYSFTRDWLTHVRNATGKEMFAVAEFWKNDLGALENYLNKTNWNHSVFDVPLHYNLYNASNSGGNYDMAKLLNGTVVQKHPMHAVTFVDNHDSQPGESLESFVQEWFKPLAYALILTREQGYPSVFYGDYYGIPTHSVPAMKAKIDPILEARQNFAYGTQHDYFDHHNIIGWTREGNTTQPNSGLATIMSDGPGGEKWMYVGQNKAGQVWHDITGNKPGTVTINADGWANFSVNGGSVSIWVKR

SEQ ID NO: 16894 - protein, 485 aa, Unidentified
HHNGTNGTMMQYFEWHLPNDGNHWNRLRDDASNLRNRGITAIWIPPAWKGTSQNDVGYGAYDLYDLGEFNQKGTVRTKYGTRSQLESAIHALKNNGVQVYGDVVMNHKGGADATENVLAVEVNPNNRNQEISGDYTIEAWTKFDFPGRGNTYSDFKWRWYHFDGVDWDQSRQFQNRIYKFRGDGKAWDWEVDSENGNYDYLMYADVDMDHPEVVNELRRWGEWYTNTLNLDGFRIDAVKHIKYSFTRDWLTHVRNATGKEMFAVAEFWKNDLGALENYLNKTNWNHSVFDVPLHYNLYNASNSGGNYDMAKLLNGTVVQKHPMHAVTFVDNHDSQPGESLESFVQEWFKPLAYALILTREQGYPSVFYGDYYGIPTHSVPAMKAKIDPILEARQNFAYGTHHDYFDHHNIIGWTREGNTTHPNSGLATIMSDGPGGEKWMYVGQNKAGQVWHDITGNKPGTVTINADGWANFSVNGGSVSIWVKR

SEQ ID NO: 16895 - protein, 485 aa, Unidentified
HHNGTNGTMMQYFEWHLPNDGNHWNRLRDDASNLRNRGITAIWIPPAWKGTSQNDVGYGAYDLYDLGEFNQKGTVRTKYGTRSQLESAIHALKNNGVQVYGDCVMNHKGGADATENVLAVEVNPNNRNQEISGDYTIEAWTKFDFPGRGNTYSDFKWRWYHFDGVDWDQSRQFQNRIYKFRGDGKAWDWEVDSENGNYDYLMYADVDMDHPEVVNELRRWGEWYTNTLNLDGFRIDAVKHIKYSFTRDWLTHVRNATGKEMFAVAEFWKNDLGALENYLNKTNWNHSVFDVPLHYNLYNASNSGGNYDMAKLLNGTVVQKHPMHAVTFVDNHDSQPGESLESFVQEWFKPLAYALILTREQGYPSVFYGDYYGIPTHSVPAMKAKIDPILEARQNFAYGTQHDYFDHHNIIGWTREGNTTHPNSGLATIMSDGPGGEKWMYVGQNKAGQVWHDITGNKPGTVTINADGWANFSVNGGSVSIWVKR

SEQ ID NO: 16896 - protein, 485 aa, Unidentified
HHNGTNGTMMQYFEWHLPNDGNHWNRLRDDASNLRNRGITAIWIPPAWKMTSQNDVGYGAYDLYDLGEFNQKGTVRTKYGTRSQLESAIHALKNNGVQVYGDVVMNHKGGADATENVLAVEVNPNNRNQEISGDYTIEAWTKFDFPGRGNTYSDFKWRWYHFDGVDWDQSRQFQNRIYKFRGDGKAWDWEVDSENGNYDYLMYADVDMDHPEVVNELRRWGEWYTNTLNLDGFRIDAVKHIKYSFTRDWLTHVRNATGKEMFAVAEFWKNDLGALENYLNKTNWNHSVFDVPLHYNLYNASNSGGNYDMAKLLNGTVVQKHPMHAVTFVDNHDSQPGESLESFVQEWFKPLAYALILTREQGYPSVFYGDYYGIPTHSVPAMKAKIDPILEARQNFAYGTQHDYFDHHNIIGWTREGNTTHPNSGLATIMSDGPGGEKWMYVGQNKAGQVWHDITGNKPGTVTINADGWANFSVNGGSVSIWVKR

SEQ ID NO: 16897 - protein, 485 aa, Unidentified
HHNGTNGTMMQYFEWHLPNDGNHWNRLRDDASNLRNRGITAIWIPPAWKGTSQNDVGYGAYDLYDLGEFNQKGTVRTKYGTRSQLESAIHALKNNGVQVYGDVVMNHKGGADATENVLAVEVNPNNRNQEISGDYTIEAWTKFDFPGRGNTYSDFKWRWYHFDGVDWDQSRQFQNRIYKFRGDGKAWDWEVDSENGNYDYLMYADVDMDHPEVVNELRRWGEWYTNTLNLDGFRIDAVKHIKYSFTRDWLTHVRNATGKEMFAVAEFWKNDLGALENYLNKTNWNHSVFDVPLHYNLYNASNSGGNYDMAKLLNGTVVQKHPMAAVTFVDNHDSQPGESLESFVQEWFKPLAYALILTREQGYPSVFYGDYYGIPTHSVPAMKAKIDPILEARQNFAYGTQHDYFDHHNIIGWTREGNTTHPNSGLATIMSDGPGGEKWMYVGQNKAGQVWHDITGNKPGTVTINADGWANFSVNGGSVSIWVKR

SEQ ID NO: 16898 - protein, 485 aa, Unidentified
HHNGTNFTMMQYFEWHLPNDGNHWNRLRDDASNLRNRGITAIWIPPAWKGTSQNDVGYGAYDLYDLGEFNQKGTVRTKYGTRSQLESAIHALKNNGVQVYGDVVMNHKGGADATENVLAVEVNPNNRNQEISGDYTIEAWTKFDFPGRGNTYSDFKWRWYHFDGVDWDQSRQFQNRIYKFRGDGKAWDWEVDSENGNYDYLMYADVDMDHPEVVNELRRWGEWYTNTLNLDGFRIDAVKHIKYSFTRDWLTHVRNATGKEMFAVAEFWKNDLGALENYLNKTNWNHSVFDVPLHYNLYNASNSGGNYDMAKLLNGTVVQKHPMHAVTFVDNHDSQPGESLESFVQEWFKPLAYALILTREQGYPSVFYGDYYGIPTHSVPAMKAKIDPILEARQNFAYGTQHDYFDHHNIIGWTREGNTTHPNSGLATIMSDGPGGEKWMYVGQNKAGQVWHDITGNKPGTVTINADGWANFSVNGGSVSIWVKR

SEQ ID NO: 16899 - protein, 483 aa, Bacillus sp.
HHNGTNGTMMQYFEWHLPNDGNHWNRLRDDASNLRNRGITAIWIPPAWKGTSQNDVGYGAYDLYDLGEFNQKGTVRTKYGTRSQLESAIHALKNNGVQVYGDVVMNHKGGADATENVLAVEVNPNNRNQEISGDYTIEAWTKFDFPGRGNTYSDFKWRWYHFDGVDWDQSRQFQNRIYKFRGKAWDWEVDSENGYYDYLMYADVDMDHPEVVNELRRWGEWYTNTLNLDGFRIDAVKHIKYSFTRDWLTHVRNATGKEMFAVAEFWKNDLGALENYLNKTNWNHSVFDVPLHYNLYNASNSGGNYDMAKLLNGTVVQKHPMHAVTFVDNHDSQPGESLESFVQEWFKPLAYALILTREQGYPSVFYGDYYGIPTHSVPAMKAKIDPILEARQNFAYGTQHDYFDHHNIIGWTREGNTTHPNSGLATIMSDGPGGEKWMYVGQNKAGQVWHDITGNKPGTVTINADGWANFSVNGGSVSIWVKR

SEQ ID NO: 16900 - protein, 485 aa, Unidentified
HHNGTNGTMMQYFEWHLPNDGNHWNRLRDDASNLRNRGITAIWIPPAWKGTSQNDVGYGAYDLYDLGEFNQKGTVRTKYGTRSQLESAIHALKNNGVQVYGDVVMNHKGGADATENVLAVEVNPNNRNQEISGDYTIEAWTKFDFPGRGNTYSDFKWRWYHFDGVDWDQSRQFQNRIYKFRGDGKAWDWEVDSENGNYDYLMYADVDMDHPEVVNELRRWGEWYTNTLNLDGFRIDAVKHIKYSFTRDWLTHVRNATGKEMFAVAEFWKNDLGALENYLNKTNWNHSVFDVPLHYNLYNASNSGGNYDMAKLLNGTVVQKHPMHAVTFVDNHDSQPGESLESFVQEWFKPLAYALILTREQGYPSVFYGDYYGIPTHSVPAMKAKIDPILEARQNFAYGTQHDYFDHHNIIGWTREGNTTHPNSGLATIMSDGPGGEKWMYVGQNKAGQVWHDITGNKPGVVTINADGWANFSVNGGSVSIWVKR

SEQ ID NO: 16901 - protein, 485 aa, Unidentified
HHNGTNGTMMQYFEWHLPNDGNHWNRLRDDASNLRNRGITAIWIPPAWKGTSQNDVGYGAYDLYDLGEFNQKGTVRTKYGTRSQLESAIHALKNNGVQVYGDVVMNHKGGADATENVLAVEVNPNNRNQEIVGDYTIEAWTKFDFPGRGNTYSDFKWRWYHFDGVDWDQSRQFQNRIYKFRGDGKAWDWEVDSENGNYDYLMYADVDMDHPEVVNELRRWGEWYTNTLNLDGFRIDAVKHIKYSFTRDWLTHVRNATGKEMFAVAEFWKNDLGALENYLNKTNWNHSVFDVPLHYNLYNASNSGGNYDMAKLLNGTVVQKHPMHAVTFVDNHDSQPGESLESFVQEWFKPLAYALILTREQGYPSVFYGDYYGIPTHSVPAMKAKIDPILEARQNFAYGTQHDYFDHHNIIGWTREGNTTHPNSGLATIMSDGPGGEKWMYVGQNKAGQVWHDITGNKPGTVTINADGWANFSVNGGSVSIWVKR

SEQ ID NO: 16902 - protein, 485 aa, Unidentified
HHNGTNGTMMQYFEWHLPNDGNHWNRLRDDASNLRNRGITAIWIPPAWKGTSQNDVGYGAYDLYDLGEFNQKGTVRTKYGTRSQLESAIHALKNNGVQVYGDVVMNHKGGADATENVLAVEVNPNNRNQEISGDYTIEAWTKFDFPGRGNTYSDFKWRWYHFDGVDWDQSRQFQNRIYKFRGDGKAWDWEVDSENGNYDYLMYADVDMDHPEVVNELRRWGEWYTNTLNLDGFRIDAVKHIKYSFTRDWLTHVWNATGKEMFAVAEFWKNDLGALENYLNKTNWNHSVFDVPLHYNLYNASNSGGNYDMAKLLNGTVVQKHPMHAVTFVDNHDSQPGESLESFVQEWFKPLAYALILTREQGYPSVFYGDYYGIPTHSVPAMKAKIDPILEARQNFAYGTQHDYFDHHNIIGWTREGNTTHPNSGLATIMSDGPGGEKWMYVGQNKAGQVWHDITGNKPGTVTINADGWANFSVNGGSVSIWVKR

SEQ ID NO: 16903 - protein, 485 aa, Unidentified
HHNGTNGTMMQYFEWHLPNDGNHWNRLRDDASNLRNRGITAIWIPPAWKGTSQNDVGYGAYDLYDLGEFNQKGTVRTKYGTRSQLESAIHALKNNGVQVYGDVVMNHKGGADATENVLAVEVNPNNRNQEISGDYTIEAWTKFDFPGRGNTYSDFKWRWYHFDGVDWDQSRQFQNEIYKFRGDGKAWDWEVDSENGNYDYLMYADVDMDHPEVVNELRRWGEWYTNTLNLDGFRIDAVKHIKYSFTRDWLTHVRNATGKEMFAVAEFWKNDLGALENYLNKTNWNHSVFDVPLHYNLYNASNSGGNYDMAKLLNGTVVQKHPMHAVTFVDNHDSQPGESLESFVQEWFKPLAYALILTREQGYPSVFYGDYYGIPTHSVPAMKAKIDPILEARQNFAYGTQHDYFDHHNIIGWTREGNTTHPNSGLATIMSDGPGGEKWMYVGQNKAGQVWHDITGNKPGTVTINADGWANFSVNGGSVSIWVKR

SEQ ID NO: 16904 - protein, 483 aa, Bacillus sp.
HHNGTNGTMMQYFEWHLPNDGNHWNRLRDDASNLRNRGITAIWIPPAWKGTSQNDVGYGAYDLYDLGEFNQKGTVRTKYGTRSQLESAIHALKNNGVQVYGDVVMNHKGGADATENVLAVEVNPNNRNQEISGDYTIEAWTKFDFPGRGNTYSDFKWRWYHFDGVDWDQSRQFQNRIYKFRGKAWDWEVDSENGNYDYLMYADVDMDHPYVVNELRRWGEWYTNTLNLDGFRIDAVKHIKYSFTRDWLTHVRNATGKEMFAVAEFWKNDLGALENYLNKTNWNHSVFDVPLHYNLYNASNSGGNYDMAKLLNGTVVQKHPMHAVTFVDNHDSQPGESLESFVQEWFKPLAYALILTREQGYPSVFYGDYYGIPTHSVPAMKAKIDPILEARQNFAYGTQHDYFDHHNIIGWTREGNTTHPNSGLATIMSDGPGGEKWMYVGQNKAGQVWHDITGNKPGTVTINADGWANFSVNGGSVSIWVKR

SEQ ID NO: 16905 - protein, 485 aa, Unidentified
HHNGTNGTMMQYFEWHLPNDGNHWNRLRDDASNLRNRGITAIWIPPAWKGTSQNDVGYGAYDLYDLGEFNQKGTVRTKYGTRSQLESAIHALKNNGVQVYGDVVMNHKGGADATENVLAVEVNPNNRNQEISGDYTIEAWTKFDFPGRGNTYSDFKWRWYHFDGVDWDQSRQFQNVIYKFRGDGKAWDWEVDSENGNYDYLMYADVDMDHPEVVNELRRWGEWYTNTLNLDGFRIDAVKHIKYSFTRDWLTHVRNATGKEMFAVAEFWKNDLGALENYLNKTNWNHSVFDVPLHYNLYNASNSGGNYDMAKLLNGTVVQKHPMHAVTFVDNHDSQPGESLESFVQEWFKPLAYALILTREQGYPSVFYGDYYGIPTHSVPAMKAKIDPILEARQNFAYGTQHDYFDHHNIIGWTREGNTTHPNSGLATIMSDGPGGEKWMYVGQNKAGQVWHDITGNKPGTVTINADGWANFSVNGGSVSIWVKR

SEQ ID NO: 16906 - protein, 485 aa, Unidentified
HHNGTNGTMMQYFEWHLPNDGNHWNRLRDDASNLRNRGITAIWIPPAWKGTSQNDVGYGAYDLYDLGEFNQKGTVRTKYGTRSQLESAIHALKNNGVQVYGDVVMNHKGGADATENVLAVEVNPNNRNQEISGDYTIEAWTKFDFPGRGNTYSDFKWRWYHFDGVDWDQSRQFQNRIYKFRGDGKAWDWEVDSENGNYDYLMYADVDMDHPEVVNELRRWGEWYTNTLNLDGFRIDAVKHIKYSFTRDWLTHVRNATGKEMFAVAEFWKNDLGALENYLNKTNWNHSVFDVPLHYNLYNASNSGGNYDMAKLLNGTVVQKHPSHAVTFVDNHDSQPGESLESFVQEWFKPLAYALILTREQGYPSVFYGDYYGIPTHSVPAMKAKIDPILEARQNFAYGTQHDYFDHHNIIGWTREGNTTHPNSGLATIMSDGPGGEKWMYVGQNKAGQVWHDITGNKPGTVTINADGWANFSVNGGSVSIWVKR

SEQ ID NO: 16907 - protein, 485 aa, Bacillus sp.
HHNGTNGTMMQYFEWHLPNDGNHWNRLRDDASNLRNRGITAIWIPPAWKGTSQNDVGYGAYDLYDLGEFNQKGTVRTKYGTRSQLESAIHALKNNGVQVYGDVVMNHKGGADATENVLAVEVNPNNRNQEISGDYTIEAWTKFDFPGRGNTYSDFKWRWYHFDGVDWDQSRQFQNRIYKFRGXXKAWDWEVDSELGNYDYLMYADVDMDHPEVVNELRRWGEWYTNTLNLDGFRIDAVKHIKYSFTRDWLTHVRNATGKEMFAVAEFWKNDLGALENYLNKTNWNHSVFDVPLHYNLYNASNSGGNYDMAKLLNGTVVQKHPMHAVTFVDNHDSQPGESLESFVQEWFKPLAYALILTREQGYPSVFYGDYYGIPTHSVPAMKAKIDPILEARQNFAYGTQHDYFDHHNIIGWTREGNTTHPNSGLATIMSDGPGGEKWMYVGQNKAGQVWHDITGNKPGTVTINADGWANFSVNGGSVSIWVKR

SEQ ID NO: 16908 - protein, 485 aa, Unidentified
HHNGTNGTMMQYFEWHLPNDGNHWNRLRDDASNLRNRGITAIWIPPAWKGTSQNDVGYGAYDLYDLGEFNQKGTVRTKYGTRSQLESAIHALKNNGVQVYGDVVMNHKGGADATENVLAVEVNPNNRNQEISGDETIEAWTKFDFPGRGNTYSDFKWRWYHFDGVDWDQSRQFQNRIYKFRGDGKAWDWEVDSENGNYDYLMYADVDMDHPEVVNELRRWGEWYTNTLNLDGFRIDAVKHIKYSFTRDWLTHVRNATGKEMFAVAEFWKNDLGALENYLNKTNWNHSVFDVPLHYNLYNASNSGGNYDMAKLLNGTVVQKHPMHAVTFVDNHDSQPGESLESFVQEWFKPLAYALILTREQGYPSVFYGDYYGIPTHSVPAMKAKIDPILEARQNFAYGTQHDYFDHHNIIGWTREGNTTHPNSGLATIMSDGPGGEKWMYVGQNKAGQVWHDITGNKPGTVTINADGWANFSVNGGSVSIWVKR

SEQ ID NO: 16909 - protein, 485 aa, Unidentified
HHNGTNGTMMQYFEWHLPNDGNHWNRLRDDASNLRNRGITAIWIPPAWKGTSQNDVGYGAYDLYDLGEFNQKGTVRTKYGTRSQLESAIHALKNNGVQVYGDVVMNHKGGADATENVLAVEVNPNNRNQEISGDYTIEAWTKFDFPGRGNTYSDFKWRWYHFDGVDWDQSRQFQNRIYKFRGDGKAWDWEVDSENGNYDYLMYADVDMDHPEVVNELRRWGEWYTNTLNLDGFRIDAVKHIKYSFTRDWLTHVRNATGKEMFAVAEFWKNDLGALENYLNKTNWNHSVFDVPLHYNLYNASNSGGNYDMAKLLNGTVVQKHPMWAVTFVDNHDSQPGESLESFVQEWFKPLAYALILTREQGYPSVFYGDYYGIPTHSVPAMKAKIDPILEARQNFAYGTQHDYFDHHNIIGWTREGNTTHPNSGLATIMSDGPGGEKWMYVGQNKAGQVWHDITGNKPGTVTINADGWANFSVNGGSVSIWVKR

SEQ ID NO: 16910 - protein, 485 aa, Unidentified
HHNGTNGTMMQYFEWHLPNDGNHWNRLRDDASNLRNRGITAIWIPPAWKGTSQNDVGYGAYDLYDLGEFNQKGTVRTKYGTRSQLESAIHALKNNGVQVYGDVVMNHKGGADATENVLAVEVNPNNRNQEISGDYTIEAWTKFDFPGRGNTYSDFKWRWYHFDGVDWDQSRQFQNRIYKFRGDGKAWDWEVDSENGNYDYLMYADVDMDHPEVVNELRRWGEWYTNTLNLDGFRIDAVKHIKYSFTRDWLTHVRNATGKEMFAVAEFWKNDLGALENYLNKTNWNHSVFDVPLHYNLYNASNSGGNYDMAKLLNGTVVQKHPMHAVTFVDNHDSQPGESLESFVQEWFKPLAYALILTREQGYPSVFYGDYYGIPTHSVPAMKAKIDPILEARQNFAYGTQHDYSDHHNIIGWTREGNTTHPNSGLATIMSDGPGGEKWMYVGQNKAGQVWHDITGNKPGTVTINADGWANFSVNGGSVSIWVKR

SEQ ID NO: 16911 - protein, 485 aa, Bacillus sp.
HHNGTNGTMMQYFEWHLPNDGNHWNRLRDDASNLRNRGITAIWIPPAWKGTSQNDVGYGAYDLYDLGEFNQKGTVRTKYGTRSQLESAIHALKNNGVQVYGDVVMNHKGGADATENVLAVEVNPNNRNQEISGDYTIEAWTKFDFPGRGNTYSDFKWRWYHFDGVDWDQSRQFQNRIYKFRGDGKAWDWEVDSENGFYDYLMYADVDMDHPEVVNELRRWGEWYTNTLNLDGFRIDAVKHIKYSFTRDWLTHVRNATGKEMFAVAEFWKNDLGALENYLNKTNWNHSVFDVPLHYNLYNASNSGGNYDMAKLLNGTVVQKHPMHAVTFVDNHDSQPGESLESFVQEWFKPLAYALILTREQGYPSVFYGDYYGIPTHSVPAMKAKIDPILEARQNFAYGTQHDYFDHHNIIGWTREGNTTHPNSGLATIMSDGPGGEKWMYVGQNKAGQVWHDITGNKPGTVTINADGWANFSVNGGSVSIWVKR

SEQ ID NO: 16912 - protein, 485 aa, Unidentified
HHLGTNGTMMQYFEWHLPNDGNHWNRLRDDASNLRNRGITAIWIPPAWKGTSQNDVGYGAYDLYDLGEFNQKGTVRTKYGTRSQLESAIHALKNNGVQVYGDVVMNHKGGADATENVLAVEVNPNNRNQEISGDYTIEAWTKFDFPGRGNTYSDFKWRWYHFDGVDWDQSRQFQNRIYKFRGDGKAWDWEVDSENGNYDYLMYADVDMDHPEVVNELRRWGEWYTNTLNLDGFRIDAVKHIKYSFTRDWLTHVRNATGKEMFAVAEFWKNDLGALENYLNKTNWNHSVFDVPLHYNLYNASNSGGNYDMAKLLNGTVVQKHPMHAVTFVDNHDSQPGESLESFVQEWFKPLAYALILTREQGYPSVFYGDYYGIPTHSVPAMKAKIDPILEARQNFAYGTQHDYFDHHNIIGWTREGNTTHPNSGLATIMSDGPGGEKWMYVGQNKAGQVWHDITGNKPGTVTINADGWANFSVNGGSVSIWVKR

SEQ ID NO: 16913 - protein, 485 aa, Bacillus sp.
HHNGTNGTMMQYFEWHLPNDGNHWNRLRDDASNLRNRGITAIWIPPAWKGTSQNDVGYGAYDLYDLGEFNQKGTVRTKYGTRSQLESAIHALKNNGVQVYGDVVMNHKGGADATENVLAVEVNPNNRNQEISGDYTIEAWTKFDFPGRGNTYSDFKWRWYHFDGVDWDQSRQFQNRIYKFRGDGKAWDWEVDSENGNYDYLMYADVDMDLPEVVNELRRWGEWYTNTLNLDGFRIDAVKHIKYSFTRDWLTHVRNATGKEMFAVAEFWKNDLGALENYLNKTNWNHSVFDVPLHYNLYNASNSGGNYDMAKLLNGTVVQKHPMHAVTFVDNHDSQPGESLESFVQEWFKPLAYALILTREQGYPSVFYGDYYGIPTHSVPAMKAKIDPILEARQNFAYGTQHDYFDHHNIIGWTREGNTTHPNSGLATIMSDGPGGEKWMYVGQNKAGQVWHDITGNKPGTVTINADGWANFSVNGGSVSIWVKR

SEQ ID NO: 16914 - protein, 485 aa, Unidentified
HHNGTNGTMMQYFEWHLPNDGNHWNRLRDDASNLRNRGITAIWIPPAWKGTSQNDVGYGAYDLYDLGEFNQKGTVRTKYGTRSQLESAIHALKNNGVQVYGDVVMNHKGGADATENVLAVEVNPNNRNQEISGDYTIEAWTKFDFPGRGNTYSDFKWRWYWFDGVDWDQSRQFQNRIYKFRGDGKAWDWEVDSENGNYDYLMYADVDMDHPEVVNELRRWGEWYTNTLNLDGFRIDAVKHIKYSFTRDWLTHVRNATGKEMFAVAEFWKNDLGALENYLNKTNWNHSVFDVPLHYNLYNASNSGGNYDMAKLLNGTVVQKHPMHAVTFVDNHDSQPGESLESFVQEWFKPLAYALILTREQGYPSVFYGDYYGIPTHSVPAMKAKIDPILEARQNFAYGTQHDYFDHHNIIGWTREGNTTHPNSGLATIMSDGPGGEKWMYVGQNKAGQVWHDITGNKPGTVTINADGWANFSVNGGSVSIWVKR

SEQ ID NO: 16915 - protein, 485 aa, Unidentified
HHNGTNGTMMQYFEWHLPNDGNHWNRLRDDASNLRNRGITAIWIPPAWKGTSQNDVGYGAYDLYDLGEFNQKGTVRTKYGTRSQLESAIHALKNNGVQVYGDVVMNHKGGADATENVLAVEVNPNNRNQEISGDYTIEAWTKFDFPGRGNTYSDFKWRWYHFDGVDWDQSRQFQNRIYKFRGDGKAWDWEVDSENGNYDYLMYADVDMDHPEVVNELRRWGEWYTNTLNLDGFRIDAVKHIKYSFTRDWLTHVRNATGKEMFAVAEFWKNDLGALENYLNKTNWNHPVFDVPLHYNLYNASNSGGNYDMAKLLNGTVVQKHPMHAVTFVDNHDSQPGESLESFVQEWFKPLAYALILTREQGYPSVFYGDYYGIPTHSVPAMKAKIDPILEARQNFAYGTQHDYFDHHNIIGWTREGNTTHPNSGLATIMSDGPGGEKWMYVGQNKAGQVWHDITGNKPGTVTINADGWANFSVNGGSVSIWVKR

SEQ ID NO: 16916 - protein, 485 aa, Unidentified
HHNGTNGTMMQYFEWHLPNDGNHWNRLRDDASNLRNRGIVAIWIPPAWKGTSQNDVGYGAYDLYDLGEFNQKGTVRTKYGTRSQLESAIHALKNNGVQVYGDVVMNHKGGADATENVLAVEVNPNNRNQEISGDYTIEAWTKFDFPGRGNTYSDFKWRWYHFDGVDWDQSRQFQNRIYKFRGDGKAWDWEVDSENGNYDYLMYADVDMDHPEVVNELRRWGEWYTNTLNLDGFRIDAVKHIKYSFTRDWLTHVRNATGKEMFAVAEFWKNDLGALENYLNKTNWNHSVFDVPLHYNLYNASNSGGNYDMAKLLNGTVVQKHPMHAVTFVDNHDSQPGESLESFVQEWFKPLAYALILTREQGYPSVFYGDYYGIPTHSVPAMKAKIDPILEARQNFAYGTQHDYFDHHNIIGWTREGNTTHPNSGLATIMSDGPGGEKWMYVGQNKAGQVWHDITGNKPGTVTINADGWANFSVNGGSVSIWVKR

SEQ ID NO: 16917 - protein, 485 aa, Bacillus sp.
HHNGTNGTMMQYFEWHLPNDGNHWNRLRDDASNLRNRGITAIWIPPAWKGTSQNDVGYGAYDLYDLGEFNQKGTVRTKYGTRSQLESAIHALKNNGVQVYGDVVMNHKGGADATENVLAVEVNPNNRNQEISGDYTIEAWTKFDFPGRGNTYSDFKWRWYHFDGVDWDQSRQFQNRIYKFRGDGKAWDWEVDSENGNYDYLMYADVDMDHPEVVNELRRWGEWYTNTLNLDGFRIDAVKHIKYSFTRDWLTHVRNATGKEMFAVAEFWKNDLGALENYLNKTNWNHSVFDVPLHYNLYNASNSGGNYDMAKLLNGTVVQKHPMHAVTFVDNHDSQPGESLESFVQEWFKPLAYALILTREQGYPSVFYGDYYGIPTHSVPAMKAKIDPILEARQNFAYGTQHDYFDHHNIIGWTREQNTTHPNSGLATIMSDGPGGEKWMYVGQNKAGQVWHDITGNKPGTVTINADGWANFSVNGGSVSIWVKR

SEQ ID NO: 16918 - protein, 485 aa, Unidentified
HHNGTNGTMMQYFEWHLPNDGNHWNRLRDDASNLRNRGITAIWIPPAWKGTSQNDVGYGAYDLYDLGEFNQKGTVRTKYGTRSQLESAIHALKNNGVQVYGDVVMNHKGGADATENVLAVEVNPNNRNQEIDGDYTIEAWTKFDFPGRGNTYSDFKWRWYHFDGVDWDQSRQFQNRIYKFRGDGKAWDWEVDSENGNYDYLMYADVDMDHPEVVNELRRWGEWYTNTLNLDGFRIDAVKHIKYSFTRDWLTHVRNATGKEMFAVAEFWKNDLGALENYLNKTNWNHSVFDVPLHYNLYNASNSGGNYDMAKLLNGTVVQKHPMHAVTFVDNHDSQPGESLESFVQEWFKPLAYALILTREQGYPSVFYGDYYGIPTHSVPAMKAKIDPILEARQNFAYGTQHDYFDHHNIIGWTREGNTTHPNSGLATIMSDGPGGEKWMYVGQNKAGQVWHDITGNKPGTVTINADGWANFSVNGGSVSIWVKR

SEQ ID NO: 16919 - protein, 485 aa, Unidentified
HHNGTNGTMMQYFEWHLPNDGNHWNRLRDDASNLRNRGITAIWIPPAWKGTSQNDVGYGAYDLYDLGEFNQKGTVRTKYGTRSQLESAIHALKNNGVQVYGDVVMNHKGGADATENVLAVEVNPNNRNQEISGDYTIEAWTKFDFPGRGNTYSDFKWRWYHFDGVDWDQSRQFQNRIYKFRGDGKAWDWEVDSENGNYDYLMYADVDMDHPEVVNELRRWGEWYTNTLNLDGFRIDAVKHIKYSFTRDWLTHVRNATGKEMFAVAEFWKNDLGALENYLNKTNWNHSVFDVPLHYNLYNASNSGGNYDMAKLLNGTVVQKHPMHAVTFVDNHDSQPGESLESFVQEWFKPLAYALILTREQGFPSVFYGDYYGIPTHSVPAMKAKIDPILEARQNFAYGTQHDYFDHHNIIGWTREGNTTHPNSGLATIMSDGPGGEKWMYVGQNKAGQVWHDITGNKPGTVTINADGWANFSVNGGSVSIWVKR

SEQ ID NO: 16920 - protein, 485 aa, Unidentified
HHNGTNGTMMQYFEWHLPNDGNHWNRLRDDASNLRNRGITAIWIPPAWKGTSQNDVGYGAYDLYDLGEFNQKGTVRTKYGTRSQLESAIHALKNNGVQVYGDVVMNHKGGADATENVLAVEVNPNNRNQEISGDYTIEAWTKFDFPGRGNTYSDFKWRWYHFDGVDWDQSRQFQNRIYKFRGDGKAWDWEVDSENGNYDYLMYADVDMDHPEVVNELRRWGEWYTNTLNLDGFRIDAVKHIKYSFTRDWLTHVRNATGKEMFAVAEFWKNDLGALENYLNKTNWNHSVFDVPLHYNLYNASNSGGNYDMAKLLNGTVVQKHPMHAVTFVDNHDSQPGESLESFVQEWFKPLAYALILTREQGYPSVFYGDYYGIPTHSVPAMKAKIDPILEARQNFAYGTQHDYFDHHNIIGWTREGNTTHPLSGLATIMSDGPGGEKWMYVGQNKAGQVWHDITGNKPGTVTINADGWANFSVNGGSVSIWVKR

SEQ ID NO: 16921 - protein, 485 aa, Unidentified
HHNGTNGTMMQYFEWHLPNDGNHWNRLRDDASNLRNRGICAIWIPPAWKGTSQNDVGYGAYDLYDLGEFNQKGTVRTKYGTRSQLESAIHALKNNGVQVYGDVVMNHKGGADATENVLAVEVNPNNRNQEISGDYTIEAWTKFDFPGRGNTYSDFKWRWYHFDGVDWDQSRQFQNRIYKFRGDGKAWDWEVDSENGNYDYLMYADVDMDHPEVVNELRRWGEWYTNTLNLDGFRIDAVKHIKYSFTRDWLTHVRNATGKEMFAVAEFWKNDLGALENYLNKTNWNHSVFDVPLHYNLYNASNSGGNYDMAKLLNGTVVQKHPMHAVTFVDNHDSQPGESLESFVQEWFKPLAYALILTREQGYPSVFYGDYYGIPTHSVPAMKAKIDPILEARQNFAYGTQHDYFDHHNIIGWTREGNTTHPNSGLATIMSDGPGGEKWMYVGQNKAGQVWHDITGNKPGTVTINADGWANFSVNGGSVSIWVKR

SEQ ID NO: 16922 - protein, 485 aa, Unidentified
HHNGTNGTMMQYFEWHLPNDGNHWNRLRDDASNLRNRGITAIWIPPAWKGTSQNDVGYGAYDLYDLGEFNQKGTVRTKYGTRSQLESAIHALKNNGVQVYGDVVMNHKGGADATENVLAVEVNPNNRNQEISGDYTIEAWTKFDFPGRGNTYSDFKWRWYHFDGVDWDQSRQFQNYIYKFRGDGKAWDWEVDSENGNYDYLMYADVDMDHPEVVNELRRWGEWYTNTLNLDGFRIDAVKHIKYSFTRDWLTHVRNATGKEMFAVAEFWKNDLGALENYLNKTNWNHSVFDVPLHYNLYNASNSGGNYDMAKLLNGTVVQKHPMHAVTFVDNHDSQPGESLESFVQEWFKPLAYALILTREQGYPSVFYGDYYGIPTHSVPAMKAKIDPILEARQNFAYGTQHDYFDHHNIIGWTREGNTTHPNSGLATIMSDGPGGEKWMYVGQNKAGQVWHDITGNKPGTVTINADGWANFSVNGGSVSIWVKR

SEQ ID NO: 16923 - protein, 485 aa, Unidentified
HHNGTNGTMMQYFEWHLPNDGNHWNRLRDDASNLRNRGITAIWIPPAWKGTSQNDVGYGAYDLYDLGEFNQKGTVRTKYGTRSQLESAIHALKNNGVQVYGDVVMNHKGGADATENVLAVEVNPNNRNQEISGDYTIEAWTKFDFPGRGNTYSDFKWRWYHFDGVDWDQSRQFQNRIYKFRGDGKAWDWEVDSENGNYDYLMYADVDMDHPEVVNELRRWGEWYTNTLNLVGFRIDAVKHIKYSFTRDWLTHVRNATGKEMFAVAEFWKNDLGALENYLNKTNWNHSVFDVPLHYNLYNASNSGGNYDMAKLLNGTVVQKHPMHAVTFVDNHDSQPGESLESFVQEWFKPLAYALILTREQGYPSVFYGDYYGIPTHSVPAMKAKIDPILEARQNFAYGTQHDYFDHHNIIGWTREGNTTHPNSGLATIMSDGPGGEKWMYVGQNKAGQVWHDITGNKPGTVTINADGWANFSVNGGSVSIWVKR

SEQ ID NO: 16924 - protein, 485 aa, Unidentified
HHNGTNKTMMQYFEWHLPNDGNHWNRLRDDASNLRNRGITAIWIPPAWKGTSQNDVGYGAYDLYDLGEFNQKGTVRTKYGTRSQLESAIHALKNNGVQVYGDVVMNHKGGADATENVLAVEVNPNNRNQEISGDYTIEAWTKFDFPGRGNTYSDFKWRWYHFDGVDWDQSRQFQNRIYKFRGDGKAWDWEVDSENGNYDYLMYADVDMDHPEVVNELRRWGEWYTNTLNLDGFRIDAVKHIKYSFTRDWLTHVRNATGKEMFAVAEFWKNDLGALENYLNKTNWNHSVFDVPLHYNLYNASNSGGNYDMAKLLNGTVVQKHPMHAVTFVDNHDSQPGESLESFVQEWFKPLAYALILTREQGYPSVFYGDYYGIPTHSVPAMKAKIDPILEARQNFAYGTQHDYFDHHNIIGWTREGNTTHPNSGLATIMSDGPGGEKWMYVGQNKAGQVWHDITGNKPGTVTINADGWANFSVNGGSVSIWVKR

SEQ ID NO: 16925 - protein, 485 aa, Unidentified
HHNGTNGTMMQYFEWHLPNDGNHWNRLRDDASNLRNRGITAIWIPPAWKGTSQNDVGYGAYDLYDLGEFNQKGTVRTKYGTRSQLESAIHALKNNGVQVYGDVVMNHKGGADATENVLAVEVNPNNRNQEISGDYTIEAWTKFDFPGRGNTYSDFKWRWYHFDGVDWDQSRQFQNRIYKFRGDGKAWDWEVDSENGNYDYLMYADVDMDHPEVVNELRRWGEWYTNTLNLDGFRIDAVKHIKYSFTRDWLTHVRNATGKEMFAVAEFWKNDLGALENYLNKTNWNHSVFDVPLHYNLYNASNSGGNYDMAKLLNGTVVQKHPMHAVTFVDNHDSQPGESLESFVQEWFKPLAYALILTFEQGYPSVFYGDYYGIPTHSVPAMKAKIDPILEARQNFAYGTQHDYFDHHNIIGWTREGNTTHPNSGLATIMSDGPGGEKWMYVGQNKAGQVWHDITGNKPGTVTINADGWANFSVNGGSVSIWVKR

SEQ ID NO: 16926 - protein, 485 aa, Unidentified
HHNGTNGTMMQYFEWHLPNDGNHWNRLRDDASNLRNRGIWAIWIPPAWKGTSQNDVGYGAYDLYDLGEFNQKGTVRTKYGTRSQLESAIHALKNNGVQVYGDVVMNHKGGADATENVLAVEVNPNNRNQEISGDYTIEAWTKFDFPGRGNTYSDFKWRWYHFDGVDWDQSRQFQNRIYKFRGDGKAWDWEVDSENGNYDYLMYADVDMDHPEVVNELRRWGEWYTNTLNLDGFRIDAVKHIKYSFTRDWLTHVRNATGKEMFAVAEFWKNDLGALENYLNKTNWNHSVFDVPLHYNLYNASNSGGNYDMAKLLNGTVVQKHPMHAVTFVDNHDSQPGESLESFVQEWFKPLAYALILTREQGYPSVFYGDYYGIPTHSVPAMKAKIDPILEARQNFAYGTQHDYFDHHNIIGWTREGNTTHPNSGLATIMSDGPGGEKWMYVGQNKAGQVWHDITGNKPGTVTINADGWANFSVNGGSVSIWVKR

SEQ ID NO: 16927 - protein, 485 aa, Unidentified
HHNGTNGTMMQYFEWHLPNDGNHWNRLRDDASNLRNRGITAIWIPPAWKGTSQNDVGYGAYDLYDLGEFNQKGTVRTKYGTRSQLESAIHALKNNGVQVYGDVVMNHKGGADATENVLAVEVNPNNRNQEISGDYTIEAWTKFDFPGRGNTYSDFKWRWYHFDGVDWDQSRQFQNRIYKFRGDGKAWDWEVDSENGNYDYLMYADVDMDHPEVVNELRRWGEWYTNTLNLDGFRIDAVKHIKYSFTRDWLTHVRNATGKEMFAVAEFWKNDLGALENYLNKTNWNHSVFDVPLHYNLYNASNSGGNYDMAKLLNGTVVQKHPMHAVTFVDNHDSQPGESLESFVQEWFKPLAYALILTREQGYPSVFYGDYYGIPTHSVPAMKAKIDPILEARQNFAYGTQHDYFDHHNIIGWTREGNTTHPNSGLATIMSDGPGGEKWMYVGQNKAGQVWHDITGEKPGTVTINADGWANFSVNGGSVSIWVKR

SEQ ID NO: 16928 - protein, 485 aa, Unidentified
HHNGTNGTMMQYFEWHLPNDGNHWNRLRDDASNLRNRGITAIWIPPAWKGTSQNDVGYGAYDLYDLGEFNQKGTVRTKYGTRSQLESAIHALVNNGVQVYGDVVMNHKGGADATENVLAVEVNPNNRNQEISGDYTIEAWTKFDFPGRGNTYSDFKWRWYHFDGVDWDQSRQFQNRIYKFRGDGKAWDWEVDSENGNYDYLMYADVDMDHPEVVNELRRWGEWYTNTLNLDGFRIDAVKHIKYSFTRDWLTHVRNATGKEMFAVAEFWKNDLGALENYLNKTNWNHSVFDVPLHYNLYNASNSGGNYDMAKLLNGTVVQKHPMHAVTFVDNHDSQPGESLESFVQEWFKPLAYALILTREQGYPSVFYGDYYGIPTHSVPAMKAKIDPILEARQNFAYGTQHDYFDHHNIIGWTREGNTTHPNSGLATIMSDGPGGEKWMYVGQNKAGQVWHDITGNKPGTVTINADGWANFSVNGGSVSIWVKR

SEQ ID NO: 16929 - protein, 485 aa, Unidentified
HHNGTNGTMMQYFEWHLPNDGNHWNRLRDDASNLRNRGITAIWIPPAWKGTSQNDVGYGAYDLYDLGEFNQKGTVRTKYGTRSQLESAIHALKNNGVQVYGDVVMNHKGGADATENVLAVEVNPNNRNQEISGDYTIEAWTKFDFPGRGNTYSDFKWRWYHFDGVDWDQSRQFQNRIYKFRGDGKAWDWEVDSENGNYDYLMYADVDMDHPEVVNELRRWGEWYTNTLNLDGFRIDAVKHIKYSFTRDWLTHVRNATGKEMFAVAEFWKNDLGALENYLNKTNWNHSVFDVPLHYNLYNASNSGGNYDMAKLLNGTVVQKHPMHAVTFVDNHDSQPGESLESFVQEWFKPLAYALILTREQGYPSVFYGDYYGIPTHSVPAMKDKIDPILEARQNFAYGTQHDYFDHHNIIGWTREGNTTHPNSGLATIMSDGPGGEKWMYVGQNKAGQVWHDITGNKPGTVTINADGWANFSVNGGSVSIWVKR

SEQ ID NO: 16930 - protein, 485 aa, Unidentified
HHNGTNGTMMQYFEWHLPNDGNHWNRLRNDASNLRNRGITAIWIPPAWKGTSQNDVGYGAYDLYDLGEFNQKGTVRTKYGTRSQLESAIHALKNNGVQVYGDVVMNHKGGADATENVLAVEVNPNNRNQEISGDYTIEAWTKFDFPGRGNTYSDFKWRWYHFDGVDWDQSRQFQNRIYKFRGDGKAWDWEVDSENGNYDYLMYADVDMDHPEVVNELRRWGEWYTNTLNLDGFRIDAVKHIKYSFTRDWLTHVRNATGKEMFAVAEFWKNDLGALENYLNKTNWNHSVFDVPLHYNLYNASNSGGNYDMAKLLNGTVVQKHPMHAVTFVDNHDSQPGESLESFVQEWFKPLAYALILTREQGYPSVFYGDYYGIPTHSVPAMKAKIDPILEARQNFAYGTQHDYFDHHNIIGWTREGNTTHPNSGLATIMSDGPGGEKWMYVGQNKAGQVWHDITGNKPGTVTINADGWANFSVNGGSVSIWVKR

SEQ ID NO: 16931 - protein, 485 aa, Unidentified
HHDGTNGTMMQYFEWHLPNDGNHWNRLRDDASNLRNRGITAIWIPPAWKGTSQNDVGYGAYDLYDLGEFNQKGTVRTKYGTRSQLESAIHALKNNGVQVYGDVVMNHKGGADATENVLAVEVNPNNRNQEISGDYTIEAWTKFDFPGRGNTYSDFKWRWYHFDGVDWDQSRQFQNRIYKFRGDGKAWDWEVDSENGNYDYLMYADVDMDHPEVVNELRRWGEWYTNTLNLDGFRIDAVKHIKYSFTRDWLTHVRNATGKEMFAVAEFWKNDLGALENYLNKTNWNHSVFDVPLHYNLYNASNSGGNYDMAKLLNGTVVQKHPMHAVTFVDNHDSQPGESLESFVQEWFKPLAYALILTREQGYPSVFYGDYYGIPTHSVPAMKAKIDPILEARQNFAYGTQHDYFDHHNIIGWTREGNTTHPNSGLATIMSDGPGGEKWMYVGQNKAGQVWHDITGNKPGTVTINADGWANFSVNGGSVSIWVKR

SEQ ID NO: 16932 - protein, 485 aa, Bacillus sp.
HHNGTNGTMMQYFEWHLPNDGNHWNRLRDDASNLRNRGITAIWIPPAWKGTSQNDVGYGAYDLYDLGEFNQKGTVRTKYGTRSQLESAIHALKNNGVQVYGDVVMNHKGGADATENVLAVEVNPNNRNQEISGDYTIEAWTKFDFPGRGNTYSDFKWRWYHFDGVDWDQSRQFQNRIYKFRGDGKAWDWEVDSENGNYDYLMYADVDMDHPIVVNELRRWGEWYTNTLNLDGFRIDAVKHIKYSFTRDWLTHVRNATGKEMFAVAEFWKNDLGALENYLNKTNWNHSVFDVPLHYNLYNASNSGGNYDMAKLLNGTVVQKHPMHAVTFVDNHDSQPGESLESFVQEWFKPLAYALILTREQGYPSVFYGDYYGIPTHSVPAMKAKIDPILEARQNFAYGTQHDYFDHHNIIGWTREGNTTHPNSGLATIMSDGPGGEKWMYVGQNKAGQVWHDITGNKPGTVTINADGWANFSVNGGSVSIWVKR

SEQ ID NO: 16933 - protein, 485 aa, Unidentified
HHNGTNGTMMQYFEWHLLNDGNHWNRLRDDASNLRNRGITAIWIPPAWKGTSQNDVGYGAYDLYDLGEFNQKGTVRTKYGTRSQLESAIHALKNNGVQVYGDVVMNHKGGADATENVLAVEVNPNNRNQEISGDYTIEAWTKFDFPGRGNTYSDFKWRWYHFDGVDWDQSRQFQNRIYKFRGDGKAWDWEVDSENGNYDYLMYADVDMDHPEVVNELRRWGEWYTNTLNLDGFRIDAVKHIKYSFTRDWLTHVRNATGKEMFAVAEFWKNDLGALENYLNKTNWNHSVFDVPLHYNLYNASNSGGNYDMAKLLNGTVVQKHPMHAVTFVDNHDSQPGESLESFVQEWFKPLAYALILTREQGYPSVFYGDYYGIPTHSVPAMKAKIDPILEARQNFAYGTQHDYFDHHNIIGWTREGNTTHPNSGLATIMSDGPGGEKWMYVGQNKAGQVWHDITGNKPGTVTINADGWANFSVNGGSVSIWVKR

SEQ ID NO: 16934 - protein, 485 aa, Unidentified
HHNGTNGTMMQYFEWHLPNDGNHWNRLRDDASNLRNRGITAIWIPPAWKGTSQNDVGYGAYDLYDLGEFNQKGTVRTKYGTRSQLESAIHALKNNGVQVYGDVVMNHKGGADATENVLAVEVNPNNRNQEISGDYTIEAWTKFDFPGRGNTYSDFKWRWYHFDGVDWDQSRQFQNRIYKFRGDGKAWDWEVDSENGNYDYLMYADVDMDHPEVVNELRRWGEWYTNTLNLDGFRIDAVKHIKYSFTRDWLTHVRNATGKEMFAVAEFWKNDLGALENYLNKTNWNHSVFDVPLHYNLYNASNSGGNYDMAKLLNGTVVQKHTMHAVTFVDNHDSQPGESLESFVQEWFKPLAYALILTREQGYPSVFYGDYYGIPTHSVPAMKAKIDPILEARQNFAYGTQHDYFDHHNIIGWTREGNTTHPNSGLATIMSDGPGGEKWMYVGQNKAGQVWHDITGNKPGTVTINADGWANFSVNGGSVSIWVKR

SEQ ID NO: 16935 - protein, 485 aa, Unidentified
HHNGTNGTMMQYFEWHLPNDGNHWNRLRDDASNLRNRGITAIWIPPAWKGTSQNDVGYGAYDLYDLGEFNQKGTVRTKYGTRSQLESAIHALKNNGVQVYGDVVMNHKGGADATENVLAVEVNPNNRNQEISGDYTIEAWTKFDFPGRGNTYSDFKWRWYHFDGVDWDQSRQFQNRIYKFRGDGKAWDWEVDSENGNYDYLMYADVDMDHPEVVNELRRWGEWYTNTLNLDGFRIDAVKHIKYSFTRDWLTHVRNATGKEMFAVAEFWKNDLGALENYLNKTNWNHSVFDVPLHYNLYNASNSGGNYDMAKLLNGTVVQKHPMHAVTFVDNHDSQPGESLESFVQEWFKPLAYALILTREQGYPSVFYGDYYGIPTHSVPAMKAKIDPILEARQNFAYGTQHDYFDHHNIIGWTREGNTTHPNSGLATIMSDGPGGEKWMYVGQNKAGQVWHDITGNKPGTVTINADGWANFNVNGGSVSIWVKR

SEQ ID NO: 16936 - protein, 485 aa, Unidentified
HHNGTNGTMMQYFEWHLPNDGNHWNRLRDDASNLRNRGITAIWIPPAWKGTSQNDVGYGAYDLYDLGEFNQKGTVRTKYGTRSQLESAIHALKNNGVQVYGDVVMNHKGGADATENVLAVEVNPNNRNQEISGDYTIEAWTKFDFPGRGNTYSDFKWRWYHFDGVDWDQSRQFQNRIYKFRGDGKAWDWEVDSENGNYDYLMYADVDMDHPEVVNELRRWGEWYTNTLNLDGFRIDAVKHIKYSFTRDWLTHVRNATGKEMFAVAEFWKNDLGALENYLNKTNWNHSVFDVPLHYNLYNASNSGGNYDMAKLLNGTVVQKHPMHAVTFVDNHDSQPGESLESFVQEWFKPLAYALILTREQGYPSVFYGDYYGIPTHSVPAMKAKIDPILEAKQNFAYGTQHDYFDHHNIIGWTREGNTTHPNSGLATIMSDGPGGEKWMYVGQNKAGQVWHDITGNKPGTVTINADGWANFSVNGGSVSIWVKR

SEQ ID NO: 16937 - protein, 485 aa, Bacillus sp.
HHNGTNGTMMQYFEWHLPNDGNHWNRLRDDASNLRNRGITAIWIPPAWKGTSQNDVGYGAYDLYDLGEFNQKGTVRTKYGTRSQLESAIHALKNNGVQVYGDVVMNHKGGADATENVLAVEVNPNNRNQEISGDYTIEAWTKFDFPGRGNTYSDFKWRWYHFDGVDWDQSRQFQNRIYKFRGXXKAWDWEVDTENGNYDYLMYADVDMDHPEVVNELRRWGEWYTNTLNLDGFRIDAVKHIKYSFTRDWLTHVRNATGKEMFAVAEFWKNDLGALENYLNKTNWNHSVFDVPLHYNLYNASNSGGNYDMAKLLNGTVVQKHPMHAVTFVDNHDSQPGESLESFVQEWFKPLAYALILTREQGYPSVFYGDYYGIPTHSVPAMKAKIDPILEARQNFAYGTQHDYFDHHNIIGWTREGNTTHPNSGLATIMSDGPGGEKWMYVGQNKAGQVWHDITGNKPGTVTINADGWANFSVNGGSVSIWVKR

SEQ ID NO: 16938 - protein, 484 aa, Bacillus amyloliquefaciens
HHNGTNGTMMQYFEWHLPNDGNHWNRLRDDASNLRNRGITAIWIPPAWKGTSQNDVGYGAYDLYDLGEFNQKGTVRTKYGTRSQLESAIHALKNNGVQVYGDVVMNHKGGADATENVLAVEVNPNNRNQEISGDYTIEAWTKFDFPGRGNTYSDFKWRWYHFDGVDWDQSRQFQNRIYKFGDGKAWDWEVDSENGNYDYLMYADVDMDHPEVVNELRRWGEWYTNTLNLDGFRIDAVKHIKYSFTRDWLTHVRNATGKEMFAVAEFWKNDLGALENYLNKTNWNHSVFDVPLHYNLYNASNSGGNYDMAKLLNGTVVQKHPMHAVTFVDNHDSQPGESLESFVQEWFKPLAYALILTREQGYPSVFYGDYYGIPTHSVPAMKAKIDPILEARQNFAYGTQHDYFDHHNIIGWTREGNTTHPNSGLATIMSDGPGGEKWMYVGQNKAGQVWHDITGNKPGTVTINADGWANFSVNGGSVSIWVKR

SEQ ID NO: 16939 - protein, 485 aa, Unidentified
HHNGTNGTMMQYFEWHLPNDGNHWNRLRDDASNLRNRGITAIWIPPAWKGTSQNDVGYGAYDLYDLGEFNQKGTVRTKYGTRSQLESAIHWLKNNGVQVYGDVVMNHKGGADATENVLAVEVNPNNRNQEISGDYTIEAWTKFDFPGRGNTYSDFKWRWYHFDGVDWDQSRQFQNRIYKFRGDGKAWDWEVDSENGNYDYLMYADVDMDHPEVVNELRRWGEWYTNTLNLDGFRIDAVKHIKYSFTRDWLTHVRNATGKEMFAVAEFWKNDLGALENYLNKTNWNHSVFDVPLHYNLYNASNSGGNYDMAKLLNGTVVQKHPMHAVTFVDNHDSQPGESLESFVQEWFKPLAYALILTREQGYPSVFYGDYYGIPTHSVPAMKAKIDPILEARQNFAYGTQHDYFDHHNIIGWTREGNTTHPNSGLATIMSDGPGGEKWMYVGQNKAGQVWHDITGNKPGTVTINADGWANFSVNGGSVSIWVKR

SEQ ID NO: 16940 - protein, 485 aa, Unidentified
HHNGTNGTMMQYFEWHLPNDGNHWNRLRDDASNLRNRGITAIWIPPAWKGTSQNDVGYGAYDLYDLGEFNQKGTVRTKYGTRSQLESAIHALKNNGVQVYGDVVMNHKGGADATENVLAVEVNPNNRNQEISGDYTIEAWTKFDFPGRGNTYSDFKWRWYHFDGVDWDQSRQFQNRIYKFRGDGKAWDWEVDSENGNYDYLMYADVDMDHPEVVNELRRWGEWYHNTLNLDGFRIDAVKHIKYSFTRDWLTHVRNATGKEMFAVAEFWKNDLGALENYLNKTNWNHSVFDVPLHYNLYNASNSGGNYDMAKLLNGTVVQKHPMHAVTFVDNHDSQPGESLESFVQEWFKPLAYALILTREQGYPSVFYGDYYGIPTHSVPAMKAKIDPILEARQNFAYGTQHDYFDHHNIIGWTREGNTTHPNSGLATIMSDGPGGEKWMYVGQNKAGQVWHDITGNKPGTVTINADGWANFSVNGGSVSIWVKR

SEQ ID NO: 16941 - protein, 485 aa, Bacillus sp.
HHNGTNGTMMQYFEWHLPNDGNHWNRLRDDASNLRNRGITAIWIPPAWKGTSQNDVGYGAYDLYDLGEFNQKGTVRTKYGTRSQLESAIHALKNNGVQVYGDVVMNHKGGADATENVLAVEVNPNNRNQEISGDYTIEAWTKFDFPGRGNTYSDFKWRWYHFDGVDWDQSRQFQNRIYKFRGDGKAWDWEVDSENGNYDYLMYADVDMDWPEVVNELRRWGEWYTNTLNLDGFRIDAVKHIKYSFTRDWLTHVRNATGKEMFAVAEFWKNDLGALENYLNKTNWNHSVFDVPLHYNLYNASNSGGNYDMAKLLNGTVVQKHPMHAVTFVDNHDSQPGESLESFVQEWFKPLAYALILTREQGYPSVFYGDYYGIPTHSVPAMKAKIDPILEARQNFAYGTQHDYFDHHNIIGWTREGNTTHPNSGLATIMSDGPGGEKWMYVGQNKAGQVWHDITGNKPGTVTINADGWANFSVNGGSVSIWVKR

SEQ ID NO: 16942 - protein, 485 aa, Unidentified
HHNGTNGTMMQYFEWHLPNDGNHWNRLRDDASNLRNRGITAIWIPPAWKGTSQNDVGYGAYDLYDLGEFNQKHTVRTKYGTRSQLESAIHALKNNGVQVYGDVVMNHKGGADATENVLAVEVNPNNRNQEISGDYTIEAWTKFDFPGRGNTYSDFKWRWYHFDGVDWDQSRQFQNRIYKFRGDGKAWDWEVDSENGNYDYLMYADVDMDHPEVVNELRRWGEWYTNTLNLDGFRIDAVKHIKYSFTRDWLTHVRNATGKEMFAVAEFWKNDLGALENYLNKTNWNHSVFDVPLHYNLYNASNSGGNYDMAKLLNGTVVQKHPMHAVTFVDNHDSQPGESLESFVQEWFKPLAYALILTREQGYPSVFYGDYYGIPTHSVPAMKAKIDPILEARQNFAYGTQHDYFDHHNIIGWTREGNTTHPNSGLATIMSDGPGGEKWMYVGQNKAGQVWHDITGNKPGTVTINADGWANFSVNGGSVSIWVKR

SEQ ID NO: 16943 - protein, 485 aa, Unidentified
HHNGTNGTMMQYFEWHLPNDGNHWNRLRDDASNLRNRGITAIWIPPAWKQTSQNDVGYGAYDLYDLGEFNQKGTVRTKYGTRSQLESAIHALKNNGVQVYGDVVMNHKGGADATENVLAVEVNPNNRNQEISGDYTIEAWTKFDFPGRGNTYSDFKWRWYHFDGVDWDQSRQFQNRIYKFRGDGKAWDWEVDSENGNYDYLMYADVDMDHPEVVNELRRWGEWYTNTLNLDGFRIDAVKHIKYSFTRDWLTHVRNATGKEMFAVAEFWKNDLGALENYLNKTNWNHSVFDVPLHYNLYNASNSGGNYDMAKLLNGTVVQKHPMHAVTFVDNHDSQPGESLESFVQEWFKPLAYALILTREQGYPSVFYGDYYGIPTHSVPAMKAKIDPILEARQNFAYGTQHDYFDHHNIIGWTREGNTTHPNSGLATIMSDGPGGEKWMYVGQNKAGQVWHDITGNKPGTVTINADGWANFSVNGGSVSIWVKR

SEQ ID NO: 16944 - protein, 485 aa, Unidentified
HHNGTNGTMMQYFEWHLPNDGNHWNRLRDDASNLRNRGITAIWIPPAWKGTSQNDVGYGAYDLYDLGEFNQKGTVRTKYGTRSQLESAIHALKNNGVQVYGDVVMNHKGGADATENVLAVEVNPNNRNQEISGDYTIEAWTKFDFPGRGNTYSDFKWRWYHFDGVDWDQSRQFQNRIYKFRGDGKAWDWEVDSENGNYDYLMYADVDMDHPEVVNELRRWGEWYTNTLNLDGFRIDAVKHIKYSFTRDWLTHVRNATGKEMFAVAEFWKNDLGALENYLNKTNWNHSVFDVPLHYNLYNASNSGGNYDMAKLLNGTVVQKHPMHAVTFVDNHDSQPGESLESFVQEWFKPLAYALILTREQGYPSVFYGDYYGIPTHSVPAMKAKIDPILEARQNFAYGTQHDYFDHHNIIGWTREGNTTHPNSGLATIMSDGPGGEKWMYVGQNKAGQVWHDITGNKPGQVTINADGWANFSVNGGSVSIWVKR

SEQ ID NO: 16945 - protein, 485 aa, Unidentified
HHNGTNGTMMQYFEWHLPNDGNHWNRLRDDASNLRNRGIEAIWIPPAWKGTSQNDVGYGAYDLYDLGEFNQKGTVRTKYGTRSQLESAIHALKNNGVQVYGDVVMNHKGGADATENVLAVEVNPNNRNQEISGDYTIEAWTKFDFPGRGNTYSDFKWRWYHFDGVDWDQSRQFQNRIYKFRGDGKAWDWEVDSENGNYDYLMYADVDMDHPEVVNELRRWGEWYTNTLNLDGFRIDAVKHIKYSFTRDWLTHVRNATGKEMFAVAEFWKNDLGALENYLNKTNWNHSVFDVPLHYNLYNASNSGGNYDMAKLLNGTVVQKHPMHAVTFVDNHDSQPGESLESFVQEWFKPLAYALILTREQGYPSVFYGDYYGIPTHSVPAMKAKIDPILEARQNFAYGTQHDYFDHHNIIGWTREGNTTHPNSGLATIMSDGPGGEKWMYVGQNKAGQVWHDITGNKPGTVTINADGWANFSVNGGSVSIWVKR

SEQ ID NO: 16946 - protein, 485 aa, Unidentified
HHNGTNGTMMQYFEWHLPNDGNHWNRLRDDASNLRNRGITAIWIPPAWKGTSQNDVGYGAYDLYDLGEFNQKGTVRTKYGTRSQLESAIHALKNNGVQVYGDVVMNHKGGADATENVLAVEVNPNNRNQEISGDYTIEAWTKFDFPGRGNTYSDFKWRWYHFDGVDWDQSRQFQNRIYKFRGDGKAWDWEVDSENGNYDYLMYADVDMDHPEVVNELRRWGEWYTNTLNLDGFRIDAVKHIKYSFTRDWLTHVRNATGKEMEAVAEFWKNDLGALENYLNKTNWNHSVFDVPLHYNLYNASNSGGNYDMAKLLNGTVVQKHPMHAVTFVDNHDSQPGESLESFVQEWFKPLAYALILTREQGYPSVFYGDYYGIPTHSVPAMKAKIDPILEARQNFAYGTQHDYFDHHNIIGWTREGNTTHPNSGLATIMSDGPGGEKWMYVGQNKAGQVWHDITGNKPGTVTINADGWANFSVNGGSVSIWVKR

SEQ ID NO: 16947 - protein, 485 aa, Unidentified
HHNGTNGTMMQYFEWHLPNDGNHWNRLRDDASNLRNRGITAIWIPPAWKGTSQNDVGYGAYDLYDLGEFNQKGTVRTKYGTRSQLESAIHALKNNGVQVYGDVVMNHKGGADATENVLAVEVNPNNRNQEISGDYTIEAWTKFDFPGRGNTYSDFKWRWYHFDGVDWDQSRQFQNRIYKFRGDGKAWDWEVDSENGNYDYLMYADVDMDHPEVVNELRRWGEWYTNTLNLDGFRIDAVKHIKYSFTRDWLTHVRNATGKEMFAVAEFWKNDLGALENYLNKTNWNHSVFDVPLHYNLYNASNSGGNYDMAKLLNGTVVQKHPMHAVTFVDNHDSQPGESLESFVQEWFKPLAYALILTREQGYPSVFYGDYYGIPTHSVPAMKAKIDPILEARQNFAYGTQHDYFDHHNIIGWTREGNTTHPNSGLATIMSDGPGGEKWMYVGQNKAGQVWHDITGNKPGTVTIHADGWANFSVNGGSVSIWVKR

SEQ ID NO: 16948 - protein, 485 aa, Unidentified
HHNGTNGTMMQYFEWHLPNDGNHWNRLRDDASNLRNRGITAIWIPPAWKGTSQNDVGYGAYDLYDLGEFNQKGTVRTKYGTRSQLESAIHALKNNGVQVYGDVVMNHKGGADATENVLAVEVNPNNRNQEISGDYTIEAWTKFDFPGRGNTYSDFKWRWYHFDGVDWDQSRQFQNRIYKFRGDGKAWDWEVDSENGNYDYLMYADVDMDHPEVVNELRRWGEWYTNTLNLDGFRIDAVKHIKYSFTRDWLTHVRNAEGKEMFAVAEFWKNDLGALENYLNKTNWNHSVFDVPLHYNLYNASNSGGNYDMAKLLNGTVVQKHPMHAVTFVDNHDSQPGESLESFVQEWFKPLAYALILTREQGYPSVFYGDYYGIPTHSVPAMKAKIDPILEARQNFAYGTQHDYFDHHNIIGWTREGNTTHPNSGLATIMSDGPGGEKWMYVGQNKAGQVWHDITGNKPGTVTINADGWANFSVNGGSVSIWVKR

SEQ ID NO: 16949 - protein, 485 aa, Unidentified
HHNGTNGTMMQYFEWHLPNDGNHWNRLRDDASNLRNRGITAIWIPPAWKGTSQNDVGYGAYDLYDLGEFNQKGTVRTKYGTRSQLESAIHALKNNGVQVYGDVVMNHKGGADATENVLAVEVNPNNRNQEISGDYTIEAWTKFDFPGRGNTYSDFKWRWYHFDGVDWDQSRQFQNRIYKFRGDGKAWDWEVDSENGNYDYLMYADVDMDHPEVVNELRRWGEWYTNTLNLDGFRIDAVKHIKYSFTRDWLTHVRCATGKEMFAVAEFWKNDLGALENYLNKTNWNHSVFDVPLHYNLYNASNSGGNYDMAKLLNGTVVQKHPMHAVTFVDNHDSQPGESLESFVQEWFKPLAYALILTREQGYPSVFYGDYYGIPTHSVPAMKAKIDPILEARQNFAYGTQHDYFDHHNIIGWTREGNTTHPNSGLATIMSDGPGGEKWMYVGQNKAGQVWHDITGNKPGTVTINADGWANFSVNGGSVSIWVKR

SEQ ID NO: 16950 - protein, 485 aa, Bacillus sp.
HHNGTNGTMMQYFEWHLPNDGNHWNRLRDDASNLRNRGITAIWIPPAWKGTSQNDVGYGAYDLYDLGEFNQKGTVRTKYGTRSQLESAIHALKNNGVQVYGDVVMNHKGGADATENVLAVEVNPNNRNQEISGDYTIEAWTKFDFPGRGNTYSDFKWRWYHFDGVDWDQSRQFQNRIYKFRGXXKAWDWEVDSENGNYDYLMYADVDMDHPEVVNELRRWGEWYTNTLNLDGFRIDAVKHIKFSFTRDWLTHVRNATGKEMFAVAEFWKNDLGALENYLNKTNWNHSVFDVPLHYNLYNASNSGGNYDMAKLLNGTVVQKHPMHAVTFVDNHDSQPGESLESFVQEWFKPLAYALILTREQGYPSVFYGDYYGIPTHSVPAMKAKIDPILEARQNFAYGTQHDYFDHHNIIGWTREGNTTHPNSGLATIMSDGPGGEKWMYVGQNKAGQVWHDITGNKPGTVTINADGWANFSVNGGSVSIWVKR

SEQ ID NO: 16951 - protein, 485 aa, Bacillus sp.
HHNGTNGTMMQYFEWHLPNDGNHWNRLRDDASNLRNRGITAIWIPPAWKGTSQNDVGYGAYDLYDLGEFNQKGTVRTKYGTRSQLESAIHALKNNGVQVYGDVVMNHKGGADATENVLAVEVNPNNRNQEISGDYTIEAWTKFDFPGRGNTYSDFKWRWYHFDGVDWDQSRQFQNRIYKFRGDGKAWDWEVDSENGNYDYLMYADVDMDHPESVNELRRWGEWYTNTLNLDGFRIDAVKHIKYSFTRDWLTHVRNATGKEMFAVAEFWKNDLGALENYLNKTNWNHSVFDVPLHYNLYNASNSGGNYDMAKLLNGTVVQKHPMHAVTFVDNHDSQPGESLESFVQEWFKPLAYALILTREQGYPSVFYGDYYGIPTHSVPAMKAKIDPILEARQNFAYGTQHDYFDHHNIIGWTREGNTTHPNSGLATIMSDGPGGEKWMYVGQNKAGQVWHDITGNKPGTVTINADGWANFSVNGGSVSIWVKR

SEQ ID NO: 16952 - protein, 485 aa, Unidentified
HHNGTNGTMMQYFEWHLPNDGNHWNRLRDDASNLRNRGITAIWIPPAWKGTSQNDVGYGAYDLYDLGEFNQKGTVRTKYGTRSQLESAIHALKNNGVQVYGDVVMNHKGGADATENVLAVEVNPNNRNQEISGDYTIEAWTKFDFPGRGNTYSDFKWRWYHFDGVDWDQSRQFQNRIYKFRGDGKAWDWEVDSENGNYDYLMYADVDMDHPEVVNELRRWGEWYTNTLNLDGFRIDAVKHIKYSFTRDWLTHVRNATGKEMFAVAEFWKNDLGALENYLNKTNWNHSVFDVPLHYNLYNASNSGGNYDMAKLLNGTVVQKHPMHAVTFVDNHDSQPGESLESFVQEWFKPLAYALILTREVGYPSVFYGDYYGIPTHSVPAMKAKIDPILEARQNFAYGTQHDYFDHHNIIGWTREGNTTHPNSGLATIMSDGPGGEKWMYVGQNKAGQVWHDITGNKPGTVTINADGWANFSVNGGSVSIWVKR

SEQ ID NO: 16953 - protein, 485 aa, Bacillus sp.
HHNGTNGTMMQYFEWHLPNDGNHWNRLRDDASNLRNRGITAIWIPPAWKGTSQNDVGYGAYDLYDLGEFNQKGTVRTKYGTRSQLESAIHALKNNGVQVYGDVVMNHKGGADATENVLAVEVNPNNRNQEISGDYTIEAWTKFDFPGRGNTYSDFKWRWYHFDGVDWDQSRQFQNRIYKFRGDGKAWDWEVDSENGNYDYLMYADWDMDHPEVVNELRRWGEWYTNTLNLDGFRIDAVKHIKYSFTRDWLTHVRNATGKEMFAVAEFWKNDLGALENYLNKTNWNHSVFDVPLHYNLYNASNSGGNYDMAKLLNGTVVQKHPMHAVTFVDNHDSQPGESLESFVQEWFKPLAYALILTREQGYPSVFYGDYYGIPTHSVPAMKAKIDPILEARQNFAYGTQHDYFDHHNIIGWTREGNTTHPNSGLATIMSDGPGGEKWMYVGQNKAGQVWHDITGNKPGTVTINADGWANFSVNGGSVSIWVKR

SEQ ID NO: 16954 - protein, 485 aa, Unidentified
HHNGTNGTMMQYFEWHLPNDGNHWNRLRDDASNLRNRGITAIWIPPAWKGTSQNDVGYGAYDLYDLGEFNQKGTVRTKYGTRSQLESAIHALKNNGVQVYGDVVMNHKGGADATENVLAVEVNPNNRNQEISGDYTIEAWTKFDFPGRGNTYSDFKWRWYHFDGVDWDQSRQFQNRIYKFRGDGKAWDWEVDSENGNYDYLMYADVDMDHPEVVNELRRWGEWYTNTLNLDGFRIDAVKHIKYSFTRDWLTHVRNATGKEMFAVAEFWKNDLGALENYLNKTNWNHSVFDVPLHYNLYNASNSGGNYDMAKLLNGTVVQKHPMHAVTFVDNHDSQPGESLESFVQEWFKPLAYALILTREQGYPSVFYGDYYGIPTHSVPAMKAKIDPILEARQNFAYGTQHDYFDHHNIIGWTREGNTTHPNSGLATIMSDGPGGEKWMYVGQNKAGQVWHDITGNKPGTVTINADGWANFSVIGGSVSIWVKR

SEQ ID NO: 16955 - protein, 485 aa, Unidentified
HHNGTNGTMMQYFEWHLPNDGNHWNRLRDDASNLRNRGITAIWIPPAWKGTSQNDVGYGAYDLYDLGEFNQKGTVRTKYGTRSQLESAIHALKNNGVQVYGDVVMNHKGGADATENVLAVEVNPNNRNQEISGDYTIEAWTKFDFPGRGNTYSDFKWRWYHFDGVDWDQSRQFQNRIYKFRGDGKAWDWEVDSENGNYDYLMYADVDMDHPEVVNELRRWGEWYTNTLNLDGFRIDAVKHIKYSFTRDWLTHVRNATGKEMQAVAEFWKNDLGALENYLNKTNWNHSVFDVPLHYNLYNASNSGGNYDMAKLLNGTVVQKHPMHAVTFVDNHDSQPGESLESFVQEWFKPLAYALILTREQGYPSVFYGDYYGIPTHSVPAMKAKIDPILEARQNFAYGTQHDYFDHHNIIGWTREGNTTHPNSGLATIMSDGPGGEKWMYVGQNKAGQVWHDITGNKPGTVTINADGWANFSVNGGSVSIWVKR

SEQ ID NO: 16956 - protein, 485 aa, Unidentified
HHNGTNGTMMQYFEWHLPNDGNHWNRLRDDASNLRNRGITAIWIPPAWKGTSQNDVGYGAYDLYDLGEFNQKGTVRTKYGTRSQLESAIHALKNNGVQVYGDVVMNHKGGADATENVLAVEVNPNNRNQEISGDYTIEAWTKFDFPGRGNTYSDFKWRWYHFDGVDWDQSRQFQNRIYKFRGDGKAWDWEVDSENGNYDYLMYADVDMDHPEVVNELRRWGEWYTNTLNLDGFRIDAVKHIKYSFTRDWLTHVRNATGKEMFAVAEFWKNDLGALENYLNKTNWNHSVFDVPLHYNLYNASNSGGNYDMAKLLNGTVVQKHPMHAVTFVDNHDSQPGESLESFVQEWFKPLAYALILTREQGYPSVFYGDYYGIPTHSVPAMKAKIDPILEARQNFAYGTQHDYFDHHNIIGWTREGVTTHPNSGLATIMSDGPGGEKWMYVGQNKAGQVWHDITGNKPGTVTINADGWANFSVNGGSVSIWVKR

SEQ ID NO: 16957 - protein, 485 aa, Unidentified
HHNGTNGTMMQYFEWHLPNDGNHWNRLRDDASNLRNRGITAIWIPPAWKGTSQNDVGYGAYDLYDLGEFNQKGTVRTKYGTRSQLESAIHALKNNGVQVYGDVVMNHKGGADATENVLAVEVNPNNRNQEISGDYTIEAWTKFDFPGRGNTYSDFKWRWYHFDGVDWDQSRQFQNRIYKFRGDGKAWDWEVDSENGNYDYLMYADVDMDHPEVVNELRRWGEWYTNTLNLDGFRIDAVKHIKYSFTRDWLTHVRNATGKEMFAVAEFWKNDLGALENYLNKTNWNHSVFDVPLHYNLYNASNSGGNYDMAKLLNGTVVQKHPMHAVTFVDNHDSQPGESLESFVQEWFKPLAYALILTREQGYPSVFYGDYYGIPTHSVPAMKAKIDPILEARQNFAYGTQHDYFDHHNIIGWTREGNTTHPNSGLATIMSDGPGGEKWMYVGQNKAGQVWHDITGNKPGFVTINADGWANFSVNGGSVSIWVKR

SEQ ID NO: 16958 - protein, 485 aa, Unidentified
HHNGTNGTMMQYFEWHLPNDGNHWNRLRDDASNLRNRGITAIWIPPAWKGTSQNDVGYGAYDLYDLGEFNQKGTVRTKYGTRSQLESAIHALKNNGVQVYGDVVMNHKGGADATENVLAVEVNPNNRNTEISGDYTIEAWTKFDFPGRGNTYSDFKWRWYHFDGVDWDQSRQFQNRIYKFRGDGKAWDWEVDSENGNYDYLMYADVDMDHPEVVNELRRWGEWYTNTLNLDGFRIDAVKHIKYSFTRDWLTHVRNATGKEMFAVAEFWKNDLGALENYLNKTNWNHSVFDVPLHYNLYNASNSGGNYDMAKLLNGTVVQKHPMHAVTFVDNHDSQPGESLESFVQEWFKPLAYALILTREQGYPSVFYGDYYGIPTHSVPAMKAKIDPILEARQNFAYGTQHDYFDHHNIIGWTREGNTTHPNSGLATIMSDGPGGEKWMYVGQNKAGQVWHDITGNKPGTVTINADGWANFSVNGGSVSIWVKR

SEQ ID NO: 16959 - protein, 485 aa, Unidentified
HHNGTNGTMMQYFEWHLPNDGNHWNRLRDDASNLRNRGITAIWIPPAWKGTSQNDVGYGAYDLYDLGEFNQKGTVRTKYGTRSQLESAIHALKNNGVQVYGDVVMNHKGGADATENVLAVEVNPNNRNQEISGDYTIEAWTKFDFPGRGNTYSDFKWRWYHFDGVDWDQSRQFQNRIYKFRGDGKAWDWEVDSENGNYDYLMYADVDMDHPEVVNELRRWGEWYTNTLNLDGFRIDAVKHIKYSFTRDWLTHVRNATGKEMFAVAEFWKNDLGALENYLNITNWNHSVFDVPLHYNLYNASNSGGNYDMAKLLNGTVVQKHPMHAVTFVDNHDSQPGESLESFVQEWFKPLAYALILTREQGYPSVFYGDYYGIPTHSVPAMKAKIDPILEARQNFAYGTQHDYFDHHNIIGWTREGNTTHPNSGLATIMSDGPGGEKWMYVGQNKAGQVWHDITGNKPGTVTINADGWANFSVNGGSVSIWVKR

SEQ ID NO: 16960 - protein, 485 aa, Unidentified
HHNGTNGTMMQYFEWHLPNDGNHWNRLRDDASNLRNRGITAIWIPPAWKGTSQNDVGYGAYDLYDLGEFNQKGTVRTKYGTRSQLESAIHALKNNGVQVYGDVVMNHKGGADATENVLAVEVNPNNRNQEIAGDYTIEAWTKFDFPGRGNTYSDFKWRWYHFDGVDWDQSRQFQNRIYKFRGDGKAWDWEVDSENGNYDYLMYADVDMDHPEVVNELRRWGEWYTNTLNLDGFRIDAVKHIKYSFTRDWLTHVRNATGKEMFAVAEFWKNDLGALENYLNKTNWNHSVFDVPLHYNLYNASNSGGNYDMAKLLNGTVVQKHPMHAVTFVDNHDSQPGESLESFVQEWFKPLAYALILTREQGYPSVFYGDYYGIPTHSVPAMKAKIDPILEARQNFAYGTQHDYFDHHNIIGWTREGNTTHPNSGLATIMSDGPGGEKWMYVGQNKAGQVWHDITGNKPGTVTINADGWANFSVNGGSVSIWVKR

SEQ ID NO: 16961 - protein, 485 aa, Unidentified
HHNGTNGTMMQYFEWHLPNDGNHWNRLRDDASNLRNRGITAIWIPPAWKGTSQNDVGYGAYDLYDLGEFNQKGTVRTKYGTRSQLESAIHALKNNGVQVYGDVVMNHKGGADATENVLAVEVNPNNRNQEISGDYTIEAWTKFDFPGRGNTYSDFKWRWYHFDGVDWDQSRQFQNRIYKFRGDGKAWDWEVDSENGNYDYLMYADVDMDHPEVVNELRRWGEWYTNTLNLDGFRIDAVKHIKYSFTRDWLTHVRNATGKEMFAVAEFWKNDLGALENYLNKTNWNHSVFDVPLHYNLYNASNSGGNYDMAKLLNGTVVQKHPMHAVTFVDNHDSQPGESLESFVQEPFKPLAYALILTREQGYPSVFYGDYYGIPTHSVPAMKAKIDPILEARQNFAYGTQHDYFDHHNIIGWTREGNTTHPNSGLATIMSDGPGGEKWMYVGQNKAGQVWHDITGNKPGTVTINADGWANFSVNGGSVSIWVKR

SEQ ID NO: 16962 - protein, 485 aa, Unidentified
HHNGTNGTMMQYFEWHLPNDGNHWNRLRDDASNLRNRGITAIWIPPAWKGTSQNDVGYGAYDLYDLGEFNQKGTVRTKYGTRSQLESAIHALKNNGVQVYGDVVMNHKGGADATENVLAVEVNPNNRNQEISGDYTIEAWTKFDFPGRGNTYSDFKWRWYHFDGVDWDQSRQFQNRIYKFRGDGKAWDWEVDSENGNYDYLMYADVDMDHPEVVNELRRWGEWYTNTLNLDGFRIDAVKHIKYSFTRDWLTHVRNATGKEMFAVAEFWKNDLGALENYLNKTNWNHSVFDVPLHYNLYNASNSGGNYDMAKLLNGTVVQKHPMHAVTFVDNHDSQPGESLESFVQEWFKPLAYALILTREQGGPSVFYGDYYGIPTHSVPAMKAKIDPILEARQNFAYGTQHDYFDHHNIIGWTREGNTTHPNSGLATIMSDGPGGEKWMYVGQNKAGQVWHDITGNKPGTVTINADGWANFSVNGGSVSIWVKR

SEQ ID NO: 16963 - protein, 485 aa, Unidentified
HHNGTNGTMMQYFEWHLPNDGNHWNRLRDDASNLRNRGITAIWIPPAWKGTSQNDVGYGAYDLYDLGEFNQKGTVRTKYGTRSQLESAIHALKNNGVQVYGDVVMNHKGGADATENVLAVEVNPNNRNQEISGDYTIEAWTKFDFPGRGNTYSDFKWRWYHFDGVDWDQSRQFQNRIYKFRGDGKAWDWEVDSENGNYDYLMYADVDMDHPEVVNELRRWGEWYKNTLNLDGFRIDAVKHIKYSFTRDWLTHVRNATGKEMFAVAEFWKNDLGALENYLNKTNWNHSVFDVPLHYNLYNASNSGGNYDMAKLLNGTVVQKHPMHAVTFVDNHDSQPGESLESFVQEWFKPLAYALILTREQGYPSVFYGDYYGIPTHSVPAMKAKIDPILEARQNFAYGTQHDYFDHHNIIGWTREGNTTHPNSGLATIMSDGPGGEKWMYVGQNKAGQVWHDITGNKPGTVTINADGWANFSVNGGSVSIWVKR

SEQ ID NO: 16964 - protein, 485 aa, Unidentified
HHNGTNGTMMQYFEWHLPNDGNHWNRLRDDASNLRNRGITAIWIPPAWKGTSQNDVGYGAYDLYDLGEFNQKGTVRTKYGTRSQLESAIHALKNNGVQVYGDVVMNHKGGADATENVLAVEVNPNNRNQEISGDYTIEAWTKFDFPGRGNTYSDFKWRWYHFDGVDWDQSRQFQNRIYKFRGDGKAWDWEVDSENGNYDYLMYADVDMDHPEVVNELRRWGEWYTNTLNLDGFRIDAVKHIKYSFTRDWLTHVRNATGKEMFAVAEFWKNDLGALENYLNKTNWNHSVFDVPLHYNLYNASNSGGNYDMAKLLSGTVVQKHPMHAVTFVDNHDSQPGESLESFVQEWFKPLAYALILTREQGYPSVFYGDYYGIPTHSVPAMKAKIDPILEARQNFAYGTQHDYFDHHNIIGWTREGNTTHPNSGLATIMSDGPGGEKWMYVGQNKAGQVWHDITGNKPGTVTINADGWANFSVNGGSVSIWVKR

SEQ ID NO: 16965 - protein, 485 aa, Unidentified
HHNGTNGTMMQYFEWHLPNDGNHWNRLRDDASNLRNRGITAIWIPPAWKGTSQNDVGYGAYDLYDLGEFNQKGTVRTKYGTRSQLELAIHALKNNGVQVYGDVVMNHKGGADATENVLAVEVNPNNRNQEISGDYTIEAWTKFDFPGRGNTYSDFKWRWYHFDGVDWDQSRQFQNRIYKFRGDGKAWDWEVDSENGNYDYLMYADVDMDHPEVVNELRRWGEWYTNTLNLDGFRIDAVKHIKYSFTRDWLTHVRNATGKEMFAVAEFWKNDLGALENYLNKTNWNHSVFDVPLHYNLYNASNSGGNYDMAKLLNGTVVQKHPMHAVTFVDNHDSQPGESLESFVQEWFKPLAYALILTREQGYPSVFYGDYYGIPTHSVPAMKAKIDPILEARQNFAYGTQHDYFDHHNIIGWTREGNTTHPNSGLATIMSDGPGGEKWMYVGQNKAGQVWHDITGNKPGTVTINADGWANFSVNGGSVSIWVKR

SEQ ID NO: 16966 - protein, 485 aa, Unidentified
HHNGTNGTMMQYFEWHLPNDGNHWNRLRDDASNLRNRGITAIWIPPAWKGTSQNDVGYGAYDLYDLGEFNQKGTVRTKYGTRSQLESAIHALKNNGVQVYGDVVMNHKGGADATENVLAVEVNPNNRNQEISGDYTIEAWTKFDFPGRGNTYSDFKWRWYHFDGVDWDQSRQFQNRIYKFRGDGKAWDWEVDSENGNYDYLMYADVDMDHPEVVNELRRWGEWYTNTLNLDGFRIDAVKHIKYSFTRDWLTHVRNATGKEMFAVAEFWKNDLGALENYLNKTNWNHSVFDVPLHYNLYNASNSGGNYDMAKLLNGTVVQKVPMHAVTFVDNHDSQPGESLESFVQEWFKPLAYALILTREQGYPSVFYGDYYGIPTHSVPAMKAKIDPILEARQNFAYGTQHDYFDHHNIIGWTREGNTTHPNSGLATIMSDGPGGEKWMYVGQNKAGQVWHDITGNKPGTVTINADGWANFSVNGGSVSIWVKR

SEQ ID NO: 16967 - protein, 485 aa, Unidentified
HHNGTNGTMMQYFEWHLPNDGNHWNRLRDDASNLRNRGITAIWIPPAWKGTSQNDVGYGAYDLYDLGEFNQKGTVRTKYGTRSQLESAIHALKNNGVQVYGDVVMNHKGGADATENVLAVEVNPNNRNQEISGDYTIEAWTKFDFPGRGNTYSDFKWRWYHFDGVDWDQSRQFQNRIYKFRGDGKAWDWEVDSENGNYDYLMYADVDMDHPEVVNELRRWGEWYTNTLNLDGFRIDAVKHIKYSFTRDWLTHVRNATGKEMFAVAEFWKNDLGALENYLNKTNWNHSVFDVPLHYNLYNASNSGGNYDMAKLLNGTVVQKHPMHAVTFVDNHDSQPGESLESFVNEWFKPLAYALILTREQGYPSVFYGDYYGIPTHSVPAMKAKIDPILEARQNFAYGTQHDYFDHHNIIGWTREGNTTHPNSGLATIMSDGPGGEKWMYVGQNKAGQVWHDITGNKPGTVTINADGWANFSVNGGSVSIWVKR

SEQ ID NO: 16968 - protein, 485 aa, Unidentified
HHNGTNGTMMQYFEWHLPNDGNHWNRLRDDASNLRNRGITAIWIPPAWKGTSQNDVGYGAYDLYDLGEFNQKGTVRTKYGTRSQLESAIHALKNNGVQVYGDVVMNHKGGADATENVLAVEVNPNNRNQEISGDYTIEAWTKFDFPGRGNTYSDFKWRWYHFDGVDWDQSRQFQNRIYKFRGDGKAWDWEVDSENGNYDYLMYADVDMDHPEVVNELRRWGEWYTNTLNLDGFRADAVKHIKYSFTRDWLTHVRNATGKEMFAVAEFWKNDLGALENYLNKTNWNHSVFDVPLHYNLYNASNSGGNYDMAKLLNGTVVQKHPMHAVTFVDNHDSQPGESLESFVQEWFKPLAYALILTREQGYPSVFYGDYYGIPTHSVPAMKAKIDPILEARQNFAYGTQHDYFDHHNIIGWTREGNTTHPNSGLATIMSDGPGGEKWMYVGQNKAGQVWHDITGNKPGTVTINADGWANFSVNGGSVSIWVKR

SEQ ID NO: 16969 - protein, 485 aa, Unidentified
HHNGTNGTMMQYFEWHLPNDGNHWNRLRDDASNLRNRGITAIWIPPAWKGTSQNDVGYGAYDLYDLGEFNQKGTVRTKYGTRSQLESAIHALKNNGVQVYGDVVMNHKGGADATENVLAVEVNPNNRNQEISGDYTIEAWTKFDFPGRGNTYSDFKWRWYHFDGVDWDQSRQFQNRIYKFRGDGKAWDWEVDSENGNYDYLMYADVDMDHPEVVNELRRWGEWYTNTLNLDGFRIDAVKHIKYSFTRDWSTHVRNATGKEMFAVAEFWKNDLGALENYLNKTNWNHSVFDVPLHYNLYNASNSGGNYDMAKLLNGTVVQKHPMHAVTFVDNHDSQPGESLESFVQEWFKPLAYALILTREQGYPSVFYGDYYGIPTHSVPAMKAKIDPILEARQNFAYGTQHDYFDHHNIIGWTREGNTTHPNSGLATIMSDGPGGEKWMYVGQNKAGQVWHDITGNKPGTVTINADGWANFSVNGGSVSIWVKR

SEQ ID NO: 16970 - protein, 485 aa, Unidentified
HHNGTNGTMMQYFEWHLPNDGNHWNRLRDDASNLRNRGITAIWIPPAWKGTSQNDVGYGAYDLYDLGEFNQKGTVRTKYGTRSQLESAIHALKNNGVQVYGDVVMNHKGGADATENVLAVEVNPNNRNQEISGDYTIEAWTKFDFPGRGNTYSDFKWRWYHFDGVDWDQSRQFQNRIYKFRGDGKAWDWEVDSENGNYDYLMYADVDMDHPEVVNELRRWGEWYTNTLNLDGFRIDAVKHIKYSFTRDWLTHVRNATGKEMFAVAEFWKNDLGALENYLNKTNWNHSVFDVPLHYNLYNASNSGGNYDMAKLLNGTVVQKHPMHAVTFVDNHDSQPGESLESFVQEWFKPLAYALILTREQGYPSVFYGDYYGIPTHSVPAMKAKIWPILEARQNFAYGTQHDYFDHHNIIGWTREGNTTHPNSGLATIMSDGPGGEKWMYVGQNKAGQVWHDITGNKPGTVTINADGWANFSVNGGSVSIWVKR

SEQ ID NO: 16971 - protein, 485 aa, Unidentified
HHNGTNGTMMQYFEWHLPNDGNHWNRLRDDASNLRNRGITAIWIPPAWKGTSQNDVGYGAYDLYDLGEFNQKGTVRTKYGTRSQLESAIHALKNNGVQVYGDVVMNHKGGADATENVLAVEVNPNNRNQEISGDYTIEAWTKFDFPGRGNTYSDFKWRWYHFDGVDWDQSRQFQNRIYKFRGDGKAWDWEVDSENGNYDYLMYADVDMDHPEVVNELRRWGEWYTNTLNLDGFRIDAVKHIKYSFTRDWLTHVRNATGKEMFAVAEFWKNDLGALENYLNKTNWNHSVFDVPLHYNLYNASNSGGNYDMAKLLNGTVVQKHPMHAVTFVDNHDSQPGESLESFVQEWFKPLAYALILTREQGYPSVFYGDYYGIPTHSVPAMKAKIRPILEARQNFAYGTQHDYFDHHNIIGWTREGNTTHPNSGLATIMSDGPGGEKWMYVGQNKAGQVWHDITGNKPGTVTINADGWANFSVNGGSVSIWVKR

SEQ ID NO: 16972 - protein, 485 aa, Unidentified
HHNGTNGTMMQYFEWHLPNDGNHWNRLRDDASNLRNRGITAIWIPPAWKGTSQNDVGYGAYDLYDLGEFNQKGTVRTKYGTRSQLESAIHALKNNGVQVYGDVVMNHKGGADATENVLAVEVNPNNRNQEISGDYTIEAWTKFDFPGRGNTYSDFKWRWYHFDGVDWDQSRQFQNRIYKFRGDGKAWDWEVDSENGNYDYLMYADVDMDHPEVVNELRRWGEWYTNTLNLDGFRIDAVKHIKYSFTRDWLTHVRNATGKEMFAVAEFWKNDLGALENYLNKTNWNHSVFDVPLHYNLYNASNSGGNYDMAKLLNGTVVQKHPMHAVTFVDNHDSQPGESLESFVQEWFKPLAYALILTREQGYPSVFYGDYYGITTHSVPAMKAKIDPILEARQNFAYGTQHDYFDHHNIIGWTREGNTTHPNSGLATIMSDGPGGEKWMYVGQNKAGQVWHDITGNKPGTVTINADGWANFSVNGGSVSIWVKR

SEQ ID NO: 16973 - protein, 485 aa, Unidentified
HHNGTNGTMMQYFEWHLPNDGNHWNRLRDDASNLRNRGITAIWIPPAWKGTSQNDVGYGAYDLYDLGEFNQKGTVRTKYGTRSQLESAIHALKNNGVQVYGDVVMNHKGGADATENVLAVEVNPNNRNQEISGDYTIEAWTKFDFPGRGNTYSDFKWRWYHFDGVDWDQSRQFQNRIYKFRGDGKAWDWEVDSENGNYDYLMYADVDMDHPEVVNELRRWGEWYTNTLNLDGFRIDAVKHIKYSFTRDWLTHVFNATGKEMFAVAEFWKNDLGALENYLNKTNWNHSVFDVPLHYNLYNASNSGGNYDMAKLLNGTVVQKHPMHAVTFVDNHDSQPGESLESFVQEWFKPLAYALILTREQGYPSVFYGDYYGIPTHSVPAMKAKIDPILEARQNFAYGTQHDYFDHHNIIGWTREGNTTHPNSGLATIMSDGPGGEKWMYVGQNKAGQVWHDITGNKPGTVTINADGWANFSVNGGSVSIWVKR

SEQ ID NO: 16974 - protein, 485 aa, Unidentified
HHNGTNGTMMQYFEWHLPNDGNHWNRLRDDASNLRNRGITAIWIPPAWKGTSQNDVGYGAYDLYDLGEFNQKGTVRTKYGTRSQLESAIHALKNNGVQVYGDVVMNHKGGADATENVLAVEVNPNNRNQEISGDYTIEAWTKFDFPGRGNTYSDFKWRWYHFDGVDWDQSRQFQNRIYKFRGDGKAWDWEVDSENGNYDYLMYADVDMDHPEVVNELRRWGEWYTNTLNLDGFRIDAVKHIKYSFTRDWLTHVRNATGKEMFAVAEFWKNDLGALENYLNKTNWNHSVFDVPLHYNLYNASNSGGNYDMAKLLNGTVVQKHPMHAVTFVDNHDSQPGESLESFVQEWFKPLAYALILTREQGYPSVFYGDYYGIPTHSVPAMKAKIDPILEARQNFAYGTQHDYFDHHNIIGWTREGNTTHPNSGLATIMSDGPGGEKWMYVGQNKAGQVWHDITGNKPGTVTINADGWANFSVNLGSVSIWVKR

SEQ ID NO: 16975 - protein, 485 aa, Unidentified
HHNGTNGTMMQYFEWHLPNDGNHWNRLRDDASNLRNRGITAIWIPPAWKGTSQNDVGYGAYDLYDLGEFNQKGTVRTKYGTRSQLESAIHALKNNGVQVYGDVVMNHKGGADATENVLLVEVNPNNRNQEISGDYTIEAWTKFDFPGRGNTYSDFKWRWYHFDGVDWDQSRQFQNRIYKFRGDGKAWDWEVDSENGNYDYLMYADVDMDHPEVVNELRRWGEWYTNTLNLDGFRIDAVKHIKYSFTRDWLTHVRNATGKEMFAVAEFWKNDLGALENYLNKTNWNHSVFDVPLHYNLYNASNSGGNYDMAKLLNGTVVQKHPMHAVTFVDNHDSQPGESLESFVQEWFKPLAYALILTREQGYPSVFYGDYYGIPTHSVPAMKAKIDPILEARQNFAYGTQHDYFDHHNIIGWTREGNTTHPNSGLATIMSDGPGGEKWMYVGQNKAGQVWHDITGNKPGTVTINADGWANFSVNGGSVSIWVKR

SEQ ID NO: 16976 - protein, 485 aa, Unidentified
HHNGTNGTMMQYFEWHLPNDGNHWNRLRDDASNLRNRGITAIWIPPAWKGTSQNDVGYGAYDLYDLGEFNQKGTVRTKYGTRSQLESAIHALKNNGVQVYGDVVMNHKGGADATENVLAVEVNPNNRNQEISGDYTIEAWTKFDFPGRGNTYSDFKWRWYHFDGVDWDQSRQFQNRIYKFRGDGKAWDWEVDSENGNYDYLMYADVDMDHPEVVNELRRWGEWYTNTLNLDGFRIDAVKHIKYSFTRDWLTHVRNATGKEMFAVAEFWKNDLGALENYLNKTNWNHLVFDVPLHYNLYNASNSGGNYDMAKLLNGTVVQKHPMHAVTFVDNHDSQPGESLESFVQEWFKPLAYALILTREQGYPSVFYGDYYGIPTHSVPAMKAKIDPILEARQNFAYGTQHDYFDHHNIIGWTREGNTTHPNSGLATIMSDGPGGEKWMYVGQNKAGQVWHDITGNKPGTVTINADGWANFSVNGGSVSIWVKR

SEQ ID NO: 16977 - protein, 485 aa, Unidentified
HHNGTNGTMMQYFEWHLPNDGNHWNRLRDDASNLRNRGITAIWIPPAWKGTSQNDVGYGAYDLYDLGEFNQKGTVRTKYGTRSQLESAIHALKNNGVQVYGDSVMNHKGGADATENVLAVEVNPNNRNQEISGDYTIEAWTKFDFPGRGNTYSDFKWRWYHFDGVDWDQSRQFQNRIYKFRGDGKAWDWEVDSENGNYDYLMYADVDMDHPEVVNELRRWGEWYTNTLNLDGFRIDAVKHIKYSFTRDWLTHVRNATGKEMFAVAEFWKNDLGALENYLNKTNWNHSVFDVPLHYNLYNASNSGGNYDMAKLLNGTVVQKHPMHAVTFVDNHDSQPGESLESFVQEWFKPLAYALILTREQGYPSVFYGDYYGIPTHSVPAMKAKIDPILEARQNFAYGTQHDYFDHHNIIGWTREGNTTHPNSGLATIMSDGPGGEKWMYVGQNKAGQVWHDITGNKPGTVTINADGWANFSVNGGSVSIWVKR

SEQ ID NO: 16978 - protein, 485 aa, Unidentified
HHNGTNGTMMQYFEWRLPNDGNHWNRLRDDASNLRNRGITAIWIPPAWKGTSQNDVGYGAYDLYDLGEFNQKGTVRTKYGTRSQLESAIHALKNNGVQVYGDVVMNHKGGADATENVLAVEVNPNNRNQEISGDYTIEAWTKFDFPGRGNTYSDFKWRWYHFDGVDWDQSRQFQNRIYKFRGDGKAWDWEVDSENGNYDYLMYADVDMDHPEVVNELRRWGEWYTNTLNLDGFRIDAVKHIKYSFTRDWLTHVRNATGKEMFAVAEFWKNDLGALENYLNKTNWNHSVFDVPLHYNLYNASNSGGNYDMAKLLNGTVVQKHPMHAVTFVDNHDSQPGESLESFVQEWFKPLAYALILTREQGYPSVFYGDYYGIPTHSVPAMKAKIDPILEARQNFAYGTQHDYFDHHNIIGWTREGNTTHPNSGLATIMSDGPGGEKWMYVGQNKAGQVWHDITGNKPGTVTINADGWANFSVNGGSVSIWVKR

SEQ ID NO: 16979 - protein, 485 aa, Unidentified
HHNGTNGTMMQYFEWHLPNDGNHWNRLRDDASNLRNRGITAIWIPPAWKGTSQNDVGYGAYDLYDLGEFNQKGTVRTKYGTRSQLESAIHALKNNGVQVYGDVVMNHKGGADATEYVLAVEVNPNNRNQEISGDYTIEAWTKFDFPGRGNTYSDFKWRWYHFDGVDWDQSRQFQNRIYKFRGDGKAWDWEVDSENGNYDYLMYADVDMDHPEVVNELRRWGEWYTNTLNLDGFRIDAVKHIKYSFTRDWLTHVRNATGKEMFAVAEFWKNDLGALENYLNKTNWNHSVFDVPLHYNLYNASNSGGNYDMAKLLNGTVVQKHPMHAVTFVDNHDSQPGESLESFVQEWFKPLAYALILTREQGYPSVFYGDYYGIPTHSVPAMKAKIDPILEARQNFAYGTQHDYFDHHNIIGWTREGNTTHPNSGLATIMSDGPGGEKWMYVGQNKAGQVWHDITGNKPGTVTINADGWANFSVNGGSVSIWVKR

SEQ ID NO: 16980 - protein, 485 aa, Unidentified
HHNGTNGTMMQYFEWHLPNDGNHWNRLRDDASNLRNRGITAIWIPPAWKGTSQNDVGYGAYDLYDLGEFNQKGTVRTKYGTRSQLESAIHALKNNGVQVYGDVVMNHKGGADATENVLAVEVNPNNRNQEISGDYTIEAWTKFDFPGRGNTYSDFKWRWYHFDGVDWDQSRQFQNRIYKFRGDGKAWDWEVDSENGNYDYLMYADVDMDHPEVVNELRRWGEWYTNTLNLDGFRIDAVKHIKYSFTRDWLTHVRNATGKEMFAVAEFWKNDLGALENYLNKTNWNHSVFDVPLHYNLYNASNSGGNYDMAKLLNGTVVQKHPMHAVTFVDNHDSQPGESLESFVQEWFKPLAYALILTREQGYPSVFYGDYYGIPTHSVPAMKAKIDPILEARQNFAYGTQHDYFDHHNIIGWTREGNTTHPNSGLATIMSDGPVGEKWMYVGQNKAGQVWHDITGNKPGTVTINADGWANFSVNGGSVSIWVKR

SEQ ID NO: 16981 - protein, 485 aa, Unidentified
HHNGTNGTMMQYFEWHLPNDGNHWNRLRDDASNLRNRGITAIWIPPAWKGTSQNDVGYGAYDLYDLGEFNQKGTVRTKYGTRSQLESAIHALKNNGVQVYGDVVMNHKGGADATENVLAVEVNPNNRNQEISGDYTIEAWTKFDFPGRGNTYSDFKWRWYHFDGVDWDQSRQFQNRIYKFRGDGKAWDWEVDSENGNYDYLMYADVDMDHPEVVNELRRWGEWYTNTLNLDGFRIDAVKHIKYSFTRDWLTHVRNATGKEMFAVAEFWKNDLGALENYLNKTNWNHSVFDVPLHYNLYNASNSGGNYDMAALLNGTVVQKHPMHAVTFVDNHDSQPGESLESFVQEWFKPLAYALILTREQGYPSVFYGDYYGIPTHSVPAMKAKIDPILEARQNFAYGTQHDYFDHHNIIGWTREGNTTHPNSGLATIMSDGPGGEKWMYVGQNKAGQVWHDITGNKPGTVTINADGWANFSVNGGSVSIWVKR

SEQ ID NO: 16982 - protein, 485 aa, Unidentified
HHNGTNGTMMQYFEWHLPNDGNHWNRLRDDASNLRNRGITAIWIPPAWKGTSQNDVGYGAYDLYDLGEFNQKGTVRTKYGTRSQLESAIHALKNNGVQVYGDVVMNHKGGADATENVLAVEVNPNNRNQEISGDYTIEAWTKFDFPGRGNTYSDFKWRWYHFDGVDWDQSRQFQNRIYKFRGDGKAWDWEVDSENGNYDYLMYADVDMDHPEVVNELRRWGEWYTNTLNLDGFRIDAVKHIKYSFTRDWLTHVRNATGKEMFAVAEFWKNDLGALENYLNKTNWNHSVFDVPLHYNLYNASNSGGNYDMAKLLNGTVVQKHPMHAVTFVDNHDSQPGESLESFVQEWFKPLAYALILTREQGYPSVFYGDYYGIPTHSVPAMKAKIDPILEARQNFAYGTQHDYFDHHNIIGWTREGNTTHPNSGLATIMSDGPGGEKWMYVGQNKAGQVWHDITGNKPGTVTINADGWANFSVMGGSVSIWVKR

SEQ ID NO: 16983 - protein, 485 aa, Unidentified
HHNGTNGTMMQYFEWHLPNDGNHWNRLRDDASNLRNRGITAIWIPPAWKGTSQNDVGYGAYDLYDLGEFNQKGTVRTKYGTRSQLESAIHALKNNGVQVYGDVVMNHKGGADATENVLAVEVNPNNRNQEISGDYTIEAWTKFDFPGRGNTYSDFKWRWYHFDGVDWDQSRQFQNRIYKFRGDGKAWDWEVDSENGVYDYLMYADVDMDHPEVVNELRRWGEWYTNTLNLDGFRIDAVKHIKYSFTRDWLTHVRNATGKEMFAVAEFWKNDLGALENYLNKTNWNHSVFDVPLHYNLYNASNSGGNYDMAKLLNGTVVQKHPMHAVTFVDNHDSQPGESLESFVQEWFKPLAYALILTREQGYPSVFYGDYYGIPTHSVPAMKAKIDPILEARQNFAYGTQHDYFDHHNIIGWTREGNTTHPNSGLATIMSDGPGGEKWMYVGQNKAGQVWHDITGNKPGTVTINADGWANFSVNGGSVSIWVKR

SEQ ID NO: 16984 - protein, 485 aa, Unidentified
HHNGTNGTMMQYFEWHLPNDGNHWNRLRDDASNLRNRGITAIWIPPAWKGTSQNDVGYGAYDLYDLGEFNQKGTVRTKYGTRSQLESAIHALKNNGVQVYGDVVMNHKGGADATENVLAVEVNPNNRNQEISTDYTIEAWTKFDFPGRGNTYSDFKWRWYHFDGVDWDQSRQFQNRIYKFRGDGKAWDWEVDSENGNYDYLMYADVDMDHPEVVNELRRWGEWYTNTLNLDGFRIDAVKHIKYSFTRDWLTHVRNATGKEMFAVAEFWKNDLGALENYLNKTNWNHSVFDVPLHYNLYNASNSGGNYDMAKLLNGTVVQKHPMHAVTFVDNHDSQPGESLESFVQEWFKPLAYALILTREQGYPSVFYGDYYGIPTHSVPAMKAKIDPILEARQNFAYGTQHDYFDHHNIIGWTREGNTTHPNSGLATIMSDGPGGEKWMYVGQNKAGQVWHDITGNKPGTVTINADGWANFSVNGGSVSIWVKR

SEQ ID NO: 16985 - protein, 485 aa, Unidentified
HHNGTNGTMMQYFEWHLPNDGNHWNRLRDDASNLRNRGITAIWIPPAWKGTSQNDVGYGAYDLYDLGEFNQKGTVRTKYGTRSQLESAIHALKNNGVQVYGDVVMNHKGGADATENVLAVEVNPNNRNQEISGDYTIEAWTKFDFPGRGNTYSDFKWRWYHFDGVDWDQSRQFQNRIYKFRGDGKAWDWEVDSENGNYDYLMYADVDMDHPEVVNELRRWGEWYTNTLNLDGFRIDAVKHIKYSFTRDWLTHVRNATGKEMFAVAEFWKNDLGALENYLNKTNWNHSVFDVPLHYNLYNASNSGGNYDMAKLLNGTVVQKHPMHAVTFVDNHDSQPGESLESFVQEWFKPLAYALILTREQGYPSVFYGDYYGIPTHSVPAMKAKIDPILEARQNFAYGTQHDYFDHHNIIGWTREGNTTHPNSGLATIMSDGPGGEKWMYVGQNKAGQVWHDITGNKPGTVTINADGYANFSVNGGSVSIWVKR

SEQ ID NO: 16986 - protein, 485 aa, Unidentified
HHNGTNGTMMQYFEWHLPNDGNHWNRLRDDASNLRNRGITAIWIPPAWKGTSQNDVGYGAYDLYDLGEFNQKGTVRTKYGTRSQLESAIHALKNNGVQVYGDVVMNHKGGADATENVLAVEVNPNNRNQEISGDYTIEAWTKFDFPGRGNTYSDFKWRAYHFDGVDWDQSRQFQNRIYKFRGDGKAWDWEVDSENGNYDYLMYADVDMDHPEVVNELRRWGEWYTNTLNLDGFRIDAVKHIKYSFTRDWLTHVRNATGKEMFAVAEFWKNDLGALENYLNKTNWNHSVFDVPLHYNLYNASNSGGNYDMAKLLNGTVVQKHPMHAVTFVDNHDSQPGESLESFVQEWFKPLAYALILTREQGYPSVFYGDYYGIPTHSVPAMKAKIDPILEARQNFAYGTQHDYFDHHNIIGWTREGNTTHPNSGLATIMSDGPGGEKWMYVGQNKAGQVWHDITGNKPGTVTINADGWANFSVNGGSVSIWVKR

SEQ ID NO: 16987 - protein, 485 aa, Unidentified
HHNGTNGTMMQYFEWHLPNDGNHWNRLRDDASNLRNRGITAIWIPPAWKGTSQNDVGYGAYDLYDLGEFNQKGTVRTKYGTRSQLESAIHALKNNGVKVYGDVVMNHKGGADATENVLAVEVNPNNRNQEISGDYTIEAWTKFDFPGRGNTYSDFKWRWYHFDGVDWDQSRQFQNRIYKFRGDGKAWDWEVDSENGNYDYLMYADVDMDHPEVVNELRRWGEWYTNTLNLDGFRIDAVKHIKYSFTRDWLTHVRNATGKEMFAVAEFWKNDLGALENYLNKTNWNHSVFDVPLHYNLYNASNSGGNYDMAKLLNGTVVQKHPMHAVTFVDNHDSQPGESLESFVQEWFKPLAYALILTREQGYPSVFYGDYYGIPTHSVPAMKAKIDPILEARQNFAYGTQHDYFDHHNIIGWTREGNTTHPNSGLATIMSDGPGGEKWMYVGQNKAGQVWHDITGNKPGTVTINADGWANFSVNGGSVSIWVKR

SEQ ID NO: 16988 - protein, 485 aa, Unidentified
HHNGTNGTMMQYFEWHLPNDGNHWNRLRDDASNLPNRGITAIWIPPAWKGTSQNDVGYGAYDLYDLGEFNQKGTVRTKYGTRSQLESAIHALKNNGVQVYGDVVMNHKGGADATENVLAVEVNPNNRNQEISGDYTIEAWTKFDFPGRGNTYSDFKWRWYHFDGVDWDQSRQFQNRIYKFRGDGKAWDWEVDSENGNYDYLMYADVDMDHPEVVNELRRWGEWYTNTLNLDGFRIDAVKHIKYSFTRDWLTHVRNATGKEMFAVAEFWKNDLGALENYLNKTNWNHSVFDVPLHYNLYNASNSGGNYDMAKLLNGTVVQKHPMHAVTFVDNHDSQPGESLESFVQEWFKPLAYALILTREQGYPSVFYGDYYGIPTHSVPAMKAKIDPILEARQNFAYGTQHDYFDHHNIIGWTREGNTTHPNSGLATIMSDGPGGEKWMYVGQNKAGQVWHDITGNKPGTVTINADGWANFSVNGGSVSIWVKR

SEQ ID NO: 16989 - protein, 485 aa, Unidentified
HHNGTNGTMMQYFEWHLPNDGNHWNRLRDDASNLRNRGITAIWIPPAWKGTSQNDVGYGAYDLYDLGEFNQKGTVRTKYGTRSQLESAIHALKNNGVQVYGDVVMNHKGGADATENVLAVEVNPNNRNQEISGDYTIEAATKFDFPGRGNTYSDFKWRWYHFDGVDWDQSRQFQNRIYKFRGDGKAWDWEVDSENGNYDYLMYADVDMDHPEVVNELRRWGEWYTNTLNLDGFRIDAVKHIKYSFTRDWLTHVRNATGKEMFAVAEFWKNDLGALENYLNKTNWNHSVFDVPLHYNLYNASNSGGNYDMAKLLNGTVVQKHPMHAVTFVDNHDSQPGESLESFVQEWFKPLAYALILTREQGYPSVFYGDYYGIPTHSVPAMKAKIDPILEARQNFAYGTQHDYFDHHNIIGWTREGNTTHPNSGLATIMSDGPGGEKWMYVGQNKAGQVWHDITGNKPGTVTINADGWANFSVNGGSVSIWVKR

SEQ ID NO: 16990 - protein, 485 aa, Unidentified
HHNGTNGTMMQYFEWHLPNDGNHWNRLRDDASNLRNRGITAIWIPPAWKGTSQNDVGYGAYDLYDLGEFNQKGTVRTKYGTRSQLESAIHALKNNGVQVYGDVVMNHKGGADATENVLAVEVNPNNRNQEISGDYTIEAWTKFDFPGRGNTYSDFKWRWYHFDGVDWDQSRQFQNRIYKFRGDGKAWDWEVDSENGNYDYLMYADVDMDHPEVVNELRRWGEWYTNTLNLDGFRIDAVKHIKYSFTRDWLTHVRNATGKEMFAVAEFWKNDLGALENYLNKTNWNHSVFDVPLHYNLYNASNSGGNYDMAKLLNGTVVQKHPMHAVTFVDNHDSQPGESLESFVQEWFKPLAYALILTRTQGYPSVFYGDYYGIPTHSVPAMKAKIDPILEARQNFAYGTQHDYFDHHNIIGWTREGNTTHPNSGLATIMSDGPGGEKWMYVGQNKAGQVWHDITGNKPGTVTINADGWANFSVNGGSVSIWVKR

SEQ ID NO: 16991 - protein, 485 aa, Unidentified
HHNGTNGTMMQYFEWHLPNDGNHWNRLRDDASNLRNRGITAIWIPPAWKGTSQNDVGYGAYDLYDLGEFNQKGTVRTKYGTRSQLESAIHALKNNGVQVYGDVVMNHKGGADATENVLAVEVNPNNRNQEISGDYTIEAWTKFDFPGRGNTYSDFKWRWYHFDGVDWDQSRQFQNRIYKFRGDGKAWDWEVDSENGNYDYLMYADVDMDHPEVVNELRRWGEWYTNTLNLDGFRIDAVKHIKYSFTRDWLTHVRNATGKEMFAVAEFWKNDLGALENYLNKTNWNHSVFDVPLHYNLYNASNSGGNYDMAKLLNGTVVQKHPMHAVTFVDNHDSQPGESLESFVQEWFKPLAYALILTREQGYPSVFYGDYYGIPTHSVPAMKAKIDPILEARQNFAYGTQHDYFDHHNIIGWTREGNTTHPNSGLATIMSDGPGGEKWMYVGQNKAGQVWHDITGNDPGTVTINADGWANFSVNGGSVSIWVKR

SEQ ID NO: 16992 - protein, 485 aa, Unidentified
HHNGTNGTMMQYFEWHLPNDGNHWNRLRDDASNLRNRGITAIWIPPAWKGTSQNDVGYGAYDLYDLGEFNQKGTVRTKYGTRSQLESAIHALKNNGVQVYGDVVMNHKGGADATENVLAVEVNPNNRNQEISGDYTIEAWTKFDFPGRGNTYSDFKWRWYHFDGVDWDPSRQFQNRIYKFRGDGKAWDWEVDSENGNYDYLMYADVDMDHPEVVNELRRWGEWYTNTLNLDGFRIDAVKHIKYSFTRDWLTHVRNATGKEMFAVAEFWKNDLGALENYLNKTNWNHSVFDVPLHYNLYNASNSGGNYDMAKLLNGTVVQKHPMHAVTFVDNHDSQPGESLESFVQEWFKPLAYALILTREQGYPSVFYGDYYGIPTHSVPAMKAKIDPILEARQNFAYGTQHDYFDHHNIIGWTREGNTTHPNSGLATIMSDGPGGEKWMYVGQNKAGQVWHDITGNKPGTVTINADGWANFSVNGGSVSIWVKR

SEQ ID NO: 16993 - protein, 485 aa, Unidentified
HHNGTNGTMMQYFEWHLPNDGNHWNRLRDDASNLRNRGITAIWIPPAWKGTSQNDVGYGAYDLYDLGEFNQKGTVRTKYGTRSQLESAIHALKNNGVQVYGDVVMNHKGGADATENVLAVEVNPNNRNQEISGDYTIEAWTKFDFPGRGNTYSDFKWRWYHFDGVDWDQSRQFQNRIYKFRGDGKAWDWEVDSENGNYDYLMYADVDMDHPEVVNELRRWGEWYTNTLNLDGFRIDAVKHIKYSFTRDWLTHVRNATGKEMPAVAEFWKNDLGALENYLNKTNWNHSVFDVPLHYNLYNASNSGGNYDMAKLLNGTVVQKHPMHAVTFVDNHDSQPGESLESFVQEWFKPLAYALILTREQGYPSVFYGDYYGIPTHSVPAMKAKIDPILEARQNFAYGTQHDYFDHHNIIGWTREGNTTHPNSGLATIMSDGPGGEKWMYVGQNKAGQVWHDITGNKPGTVTINADGWANFSVNGGSVSIWVKR

SEQ ID NO: 16994 - protein, 485 aa, Unidentified
HHNGTNGTMMQYFEWHLPNDGNHWNRLRDDASNLRNRGITAIWIPPAWKGTSQNDVGYGAYDLYDLGEFNQKGTVRTKYGTRSQLESAIHALKNNGVQVYGDVVMNHKGGADATENVLAVEVNPNNRNQEISGDYTIEAWTKFDFPGRGNTYSDFKWRWYHFDGVDWDQSRQFQNRIYKFRGDGKAWDWEVDSENGNYDYLMYADVDMDHPEVVNELRRWGEWYTNTLNLDGFRIDAVKHIKYSFTRDWLTHVRNATGKEMFAVAEFWKNDLGALENYLNKTNWNHSVFDVPLHYNLYNASNSGGNYDMAKLLNGTVVQKHPMHAVTFVDNHDSQPGESLESFVQEWFKPLAYALILTREQGYPSVFYGDYYGIPTHSVPAMKAKIDPILEARQNFAYGTQHDYFDCHNIIGWTREGNTTHPNSGLATIMSDGPGGEKWMYVGQNKAGQVWHDITGNKPGTVTINADGWANFSVNGGSVSIWVKR

SEQ ID NO: 16995 - protein, 485 aa, Unidentified
HHNGTNGTMMQYFEWHLPNDGNHWNRLRDDASNLRNRGITAIWIPPAWKGTSQNDVGYGAYDLYDLGEFNQKGTVRTKYGTRSQLESAIHALKNNGVQVYGDVVMNHKGGADATENVLAVEVNPNNRNQEISGDYTIEAWTKFDFPGRGNTYSDFKWRWYHFDGVDWDQSRQFQNRIYKFRGDGKAWDWEVDSENGNYDYLMYADVDMDHPEVVNELRRWGEWYTNTLNLDGFRIDAVKHIKYSFTRDWLTHVRNATGKEMFAVAEFWKNDLGALENYLNKTNWNHSVFDVPLHYNLYNASNSGGNYDMAKLLNGTVVQKHPMHAVTFVDNHDSQPGESLESFVQEWFKPLAYALILTREQGYPSVFYGDYYGIPTHSVPAMKAKIDPILEARQNFAYGTQHDYFDHHNIIGWTREGNTTHPNSGLATIMSDGPGGEKWMYVGQNKAGTVWHDITGNKPGTVTINADGWANFSVNGGSVSIWVKR

SEQ ID NO: 16996 - protein, 485 aa, Unidentified
HHNGTNGTMMQYFEWHLPNDGNHWNRLRDDASNLRNRGITAIWIPPAWKGTSQNDVGYGAYDLYDLGEFNQKGTVRTKYGTRSQLESAIHALKNNGVQVYGDVVMNHKGGADATENVLAVEVNPNNRNQEISGDYTIEAWTKFDFPGRGNTYSDFKWRWYHFDGVDWDQSRQFQNRIYKFRGDGKAWDWEVDSENGNYDYLMYADVDMDHPEVVNELRRWGEWYTNTLNLDGFRIDAVKHIKYSFTRDWLTHVRNATGKEMFAVAEFWKNDLGALENYLNKTNWNHSVFDVPLHYNLYNASNSGGNYDMAKLLNGTVVQKHPMHAVTFVDNHDSQPGESLESFVQEWFKPLAYALILTREQGYPSVFYGDYYGIPTHSVPAMKAKIDPILEARQNFAYGTQHDYFDHHNIIGWTRDGNTTHPNSGLATIMSDGPGGEKWMYVGQNKAGQVWHDITGNKPGTVTINADGWANFSVNGGSVSIWVKR

SEQ ID NO: 16997 - protein, 485 aa, Unidentified
HHNGTNGTMMQYFEWHLPNDGNHWNRLRDDASNLRNRGITAIWIPPAWKGTSQNDVGYGAYDLYDLGEFNQKGTVRTKYGTRSQLESAIHALKNNGVQVYGDVVMNHKGGADATENVLAVEVNPNNRNQEISGDYTIEAWTKFDFPGRGNTYSDFKWRWYHFDGVDWDQSRQFQNRIYKFRGDGKAWDWEVDSENGNYDYLMYADVDMDHPEVVNELRRWGEWYTNTLNLDGFRIDAVKHIKYSFTRDWLTHVRNATGKEMFAVAEFWKNDLGALENYLNKTNWNHSVFDVPLHYNLYNASNSGGNYDMAKLLNGTVVQKHPMHAVTFVDNHDSQPGESLESFVQEWFKPLAYALILTRDQGYPSVFYGDYYGIPTHSVPAMKAKIDPILEARQNFAYGTQHDYFDHHNIIGWTREGNTTHPNSGLATIMSDGPGGEKWMYVGQNKAGQVWHDITGNKPGTVTINADGWANFSVNGGSVSIWVKR

SEQ ID NO: 16998 - protein, 485 aa, Unidentified
HHNGTNGTMMQYFEWHLPNDGNHWNRLRDDASNLRNRGITAIWIPPAWKGTSQNDVGYGAYDLYDLGEFNQKGTVRTKYGTRSQLESAIHALKNNGVQVYGDVVMNHKGGADATENVLAVEVNPNNRNQEISGDYTIEAWTKFDFPGRGNTYSDFKWRWYHFDGVDWDQSRQFQNRIYKFRGDGKAWDWEVDSENGNYDYLMYADVDMDHPEVVNELRRWGEWYTNTLNLDGFRIDAVKHIKYSFTRDWLTHVRNATGKEMFAVAEFWKNDLGALENYLNKTNWNHSVFDVPLHYNLYNASNSGGNYDMAKLLNGTVVQKKPMHAVTFVDNHDSQPGESLESFVQEWFKPLAYALILTREQGYPSVFYGDYYGIPTHSVPAMKAKIDPILEARQNFAYGTQHDYFDHHNIIGWTREGNTTHPNSGLATIMSDGPGGEKWMYVGQNKAGQVWHDITGNKPGTVTINADGWANFSVNGGSVSIWVKR

SEQ ID NO: 16999 - protein, 485 aa, Unidentified
HHNGTNGTMMQYFEWHLPNDGNHWNRLRDDASNLRNRGITAIWIPAAWKGTSQNDVGYGAYDLYDLGEFNQKGTVRTKYGTRSQLESAIHALKNNGVQVYGDVVMNHKGGADATENVLAVEVNPNNRNQEISGDYTIEAWTKFDFPGRGNTYSDFKWRWYHFDGVDWDQSRQFQNRIYKFRGDGKAWDWEVDSENGNYDYLMYADVDMDHPEVVNELRRWGEWYTNTLNLDGFRIDAVKHIKYSFTRDWLTHVRNATGKEMFAVAEFWKNDLGALENYLNKTNWNHSVFDVPLHYNLYNASNSGGNYDMAKLLNGTVVQKHPMHAVTFVDNHDSQPGESLESFVQEWFKPLAYALILTREQGYPSVFYGDYYGIPTHSVPAMKAKIDPILEARQNFAYGTQHDYFDHHNIIGWTREGNTTHPNSGLATIMSDGPGGEKWMYVGQNKAGQVWHDITGNKPGTVTINADGWANFSVNGGSVSIWVKR

SEQ ID NO: 17000 - protein, 485 aa, Unidentified
HHNGTNGTMMQYFEWHLPNDGNHWNRLRDDASNLRNRGITAIWIPPAWKGTSQNDVGYGAYDLYDLGEFNQKGTVRTKYGTRSQLESAIHALKNNGVQVYGDVVMNHKGGADATENVLAVEVNPNNRNQEISGDYTIEAWTKFDFAGRGNTYSDFKWRWYHFDGVDWDQSRQFQNRIYKFRGDGKAWDWEVDSENGNYDYLMYADVDMDHPEVVNELRRWGEWYTNTLNLDGFRIDAVKHIKYSFTRDWLTHVRNATGKEMFAVAEFWKNDLGALENYLNKTNWNHSVFDVPLHYNLYNASNSGGNYDMAKLLNGTVVQKHPMHAVTFVDNHDSQPGESLESFVQEWFKPLAYALILTREQGYPSVFYGDYYGIPTHSVPAMKAKIDPILEARQNFAYGTQHDYFDHHNIIGWTREGNTTHPNSGLATIMSDGPGGEKWMYVGQNKAGQVWHDITGNKPGTVTINADGWANFSVNGGSVSIWVKR

SEQ ID NO: 17001 - protein, 485 aa, Unidentified
HHNGTNGTMMQYFEWHLPNDGNHWNRLRDDASNLRNRGITRIWIPPAWKGTSQNDVGYGAYDLYDLGEFNQKGTVRTKYGTRSQLESAIHALKNNGVQVYGDVVMNHKGGADATENVLAVEVNPNNRNQEISGDYTIEAWTKFDFPGRGNTYSDFKWRWYHFDGVDWDQSRQFQNRIYKFRGDGKAWDWEVDSENGNYDYLMYADVDMDHPEVVNELRRWGEWYTNTLNLDGFRIDAVKHIKYSFTRDWLTHVRNATGKEMFAVAEFWKNDLGALENYLNKTNWNHSVFDVPLHYNLYNASNSGGNYDMAKLLNGTVVQKHPMHAVTFVDNHDSQPGESLESFVQEWFKPLAYALILTREQGYPSVFYGDYYGIPTHSVPAMKAKIDPILEARQNFAYGTQHDYFDHHNIIGWTREGNTTHPNSGLATIMSDGPGGEKWMYVGQNKAGQVWHDITGNKPGTVTINADGWANFSVNGGSVSIWVKR

SEQ ID NO: 17002 - protein, 485 aa, Unidentified
HHNGTNGTMMQYFEWHLPNDGNHWNRLRDDASNLRNRGITAIWIPPAWKGTSQNDVGYGAYDLYDLGEFNQKGTVRTKYGTRSQLESAIHALKNNGVQVYGDVVMNHKGGADATENVLAVEVNPNNRNQEISGDYTIEAWTKFDFPGRGNTYSDFKWRWYHFDGVDWDQSRQFQNRIYKFRGDGKAWDWEVDSENGNYDYLMYADVDMDHPEVVNELRRWGEWYTNTLNLDGFRIDAVKHIKYSFTRDWLTHVRNATGKEMFAVAEFWKNDLGALENYLNKTNWNHSVFDVPLHYNLYNASNCGGNYDMAKLLNGTVVQKHPMHAVTFVDNHDSQPGESLESFVQEWFKPLAYALILTREQGYPSVFYGDYYGIPTHSVPAMKAKIDPILEARQNFAYGTQHDYFDHHNIIGWTREGNTTHPNSGLATIMSDGPGGEKWMYVGQNKAGQVWHDITGNKPGTVTINADGWANFSVNGGSVSIWVKR

SEQ ID NO: 17003 - protein, 485 aa, Unidentified
HHNGTNGTMMQYFEWHLPNDGNHWNRLRDDASNLRNRGITAIWIPPAWKGTSQNDVGYGAYDLYDLGEFNQKGTVRTKYGTRSQLESAIHALKNNGVQVYGDVVMNHKGGADATENVLAVEVNPNNRNQEISGDYTIEAWTKFDFPGRGNTYSDFKWRWYHFDGVDWDQSRQFQNRIYKFRGDGKAWDWEVDSENGNYDYLMYADVDMDHPEVVNELRRWGEWYTNTLNLDGFRIDAVKHIKYSFTGDWLTHVRNATGKEMFAVAEFWKNDLGALENYLNKTNWNHSVFDVPLHYNLYNASNSGGNYDMAKLLNGTVVQKHPMHAVTFVDNHDSQPGESLESFVQEWFKPLAYALILTREQGYPSVFYGDYYGIPTHSVPAMKAKIDPILEARQNFAYGTQHDYFDHHNIIGWTREGNTTHPNSGLATIMSDGPGGEKWMYVGQNKAGQVWHDITGNKPGTVTINADGWANFSVNGGSVSIWVKR

SEQ ID NO: 17004 - protein, 485 aa, Unidentified
HHNGTNGTMMQYFEWHLPNDGNHWNRLRDDASNLRNRGITAIWIPPAWKGTSQNDVGYGAYDLYDLGEFNQKGTVRTKYGTRSQLESAIHALKNNGVQVYGDVVMNHKGGADATENVLAVEVNPNNRNQEISGDYTWEAWTKFDFPGRGNTYSDFKWRWYHFDGVDWDQSRQFQNRIYKFRGDGKAWDWEVDSENGNYDYLMYADVDMDHPEVVNELRRWGEWYTNTLNLDGFRIDAVKHIKYSFTRDWLTHVRNATGKEMFAVAEFWKNDLGALENYLNKTNWNHSVFDVPLHYNLYNASNSGGNYDMAKLLNGTVVQKHPMHAVTFVDNHDSQPGESLESFVQEWFKPLAYALILTREQGYPSVFYGDYYGIPTHSVPAMKAKIDPILEARQNFAYGTQHDYFDHHNIIGWTREGNTTHPNSGLATIMSDGPGGEKWMYVGQNKAGQVWHDITGNKPGTVTINADGWANFSVNGGSVSIWVKR

SEQ ID NO: 17005 - protein, 485 aa, Unidentified
HHNGTNGTMMQYFEWHLPNDGNHWNRLRDDASNLRNRGITAIWIPPAWKGTSQNDVGYGAYDLYDLGEFNQKGTVRTKYGTRSQLESAIHALKNNGVQVYGDVVMNHKGGADATENVLAVEVNPNNRNQEISGDYTIEAWTKFDFPGRGNTYSDFKWRWYHFDGVDWDQSRQFQNRIYKFRGDGKAWDWEVDSENGNYDYLMYADVDMDHPEVVNELRRWGEWYTNTLNLDGFRIDAVKHIKYSFTRDWLTHVRNATGKERFAVAEFWKNDLGALENYLNKTNWNHSVFDVPLHYNLYNASNSGGNYDMAKLLNGTVVQKHPMHAVTFVDNHDSQPGESLESFVQEWFKPLAYALILTREQGYPSVFYGDYYGIPTHSVPAMKAKIDPILEARQNFAYGTQHDYFDHHNIIGWTREGNTTHPNSGLATIMSDGPGGEKWMYVGQNKAGQVWHDITGNKPGTVTINADGWANFSVNGGSVSIWVKR

SEQ ID NO: 17006 - protein, 485 aa, Unidentified
HHNGTNGTMMQYFEWHLPNDGNHWNRLRDDASNLRNRGITAIWIPPAWKGTSQNDVGYGAYDLYDLGEFNQKGTVRTKYGTRSQLESAIHALKNNGVQVYGDVVMNHKGGADATENVLAVEVNPNNRNQEISGDYTIEAWTKFDFPGRGNTYSDFKWRWYHFDGVDWDQSRQFQNRIYKFRGDGKAWDWEVDSENGNYDYLMYADVDMDHPEVVNELRRWGEWYTNTLNLDGFRIDAVKHIKYSFTRDWLTHVRNATGYEMFAVAEFWKNDLGALENYLNKTNWNHSVFDVPLHYNLYNASNSGGNYDMAKLLNGTVVQKHPMHAVTFVDNHDSQPGESLESFVQEWFKPLAYALILTREQGYPSVFYGDYYGIPTHSVPAMKAKIDPILEARQNFAYGTQHDYFDHHNIIGWTREGNTTHPNSGLATIMSDGPGGEKWMYVGQNKAGQVWHDITGNKPGTVTINADGWANFSVNGGSVSIWVKR

SEQ ID NO: 17007 - protein, 485 aa, Unidentified
HHNGTNGTMMQYFEWHLPNDGNHWNRLRDDASNLRNRGITAIWIPPAWKGTSQNDVGYGAYDLYDLGEFNQKGTVRTKYGTRSQLESAIHALKNNGVQVYGDVVMNHKGGADATENVLAVEVNPNNRNQEISGDYTIEAWTKFDFPGRGNTYSDFKWRWYHFDGVDWDQSRQFQNRIYKFRGDGKAWDWEVDSENGNYDYLMYADVDMDHPEVVNELRRWGEWYTNTLNLDGFRIDAVKHIKYSFTRDWLTHVRNATGKEMFAVAEFWKNDLGALENYLNKTNWNHSVFDVPLHYNLYNASNSGGNYDMAKLLNGTVVQKHPMHAVTFVDNHDVQPGESLESFVQEWFKPLAYALILTREQGYPSVFYGDYYGIPTHSVPAMKAKIDPILEARQNFAYGTQHDYFDHHNIIGWTREGNTTHPNSGLATIMSDGPGGEKWMYVGQNKAGQVWHDITGNKPGTVTINADGWANFSVNGGSVSIWVKR

SEQ ID NO: 17008 - protein, 485 aa, Unidentified
HHNGTNGTMMQYFEWHLPNDGNHWNRLRDDASNLRNRGITAIWIPPAWKGTSQNDVGYGAYDLYDLGEFNQKGTVRTKYGTRSQLESAIHALKNNGVQVYGDVVMNHKGGADATENVLAVEVNPNNRNQEISGDYTIEAWTKFDFPGRGNTYSDFKWRWYHFDGVDWDQSRQFQNRIYKFRGDGKAWDWEVDSENGNYDYLMYADVDMDHPEVVNELRRWGEWYTNTLNLDGFRIDAVKHIKYSFTRDWLTHVRNATGKEMFAVAEFWKNDLGALENYLNKTNWNHSVFDVPLHYNLYNASNSGGNYDMAKLLNGTVVQKHPMHAVTFVDNHDSQPGESLESFVQEWFKPLAYALILTREQGYPSVFYGDYYGIPTHSVPAMKAKIDPILEARQNFAYGTQHDYFDHHNIIGWTREGNTTHPNSGLATIMSDGPGGEKTMYVGQNKAGQVWHDITGNKPGTVTINADGWANFSVNGGSVSIWVKR

SEQ ID NO: 17009 - protein, 485 aa, Unidentified
HHNGTNGTMMQYFEWHLPNDGNHWNRLRDDASNLRNRGITAIWIPPAWKGTSQNDVGYGAYDLYDLGEFNQKGTVRTKYGTRSQLESAIHALKNNGVQVYGDVVMNHKGGADATENVLAVEVNPNNRNQEISGDYTIEAWTKFDFPGRGNTYSDFKWRWYHFDGVDWDQSRQFQNRIYKFGGDGKAWDWEVDSENGNYDYLMYADVDMDHPEVVNELRRWGEWYTNTLNLDGFRIDAVKHIKYSFTRDWLTHVRNATGKEMFAVAEFWKNDLGALENYLNKTNWNHSVFDVPLHYNLYNASNSGGNYDMAKLLNGTVVQKHPMHAVTFVDNHDSQPGESLESFVQEWFKPLAYALILTREQGYPSVFYGDYYGIPTHSVPAMKAKIDPILEARQNFAYGTQHDYFDHHNIIGWTREGNTTHPNSGLATIMSDGPGGEKWMYVGQNKAGQVWHDITGNKPGTVTINADGWANFSVNGGSVSIWVKR

SEQ ID NO: 17010 - protein, 485 aa, Unidentified
HHNGTNGTMMQYFEWHLPNDGNHWNRLRDDASNLRNRGITAIWIPPAWKGTSQNDVGYGAYDLYDLGEFNQKGTVRTKYGTRSQLESAIHALKNNGVQVYGDVVMNHKGGADATENVLAVEVNPNNRNQEISGDYTIEAWTKFDFPGRGNTYSDFKWRWYHFDGVDWDQSRQFQNRIYKFRGDGKAWDWEVDSENGNYDYLMYADVDMDHPEVVNELRRWGEWYTNTLNLDGFRIDAVKHIKYSFTRDWLTHVRNATGKEMIAVAEFWKNDLGALENYLNKTNWNHSVFDVPLHYNLYNASNSGGNYDMAKLLNGTVVQKHPMHAVTFVDNHDSQPGESLESFVQEWFKPLAYALILTREQGYPSVFYGDYYGIPTHSVPAMKAKIDPILEARQNFAYGTQHDYFDHHNIIGWTREGNTTHPNSGLATIMSDGPGGEKWMYVGQNKAGQVWHDITGNKPGTVTINADGWANFSVNGGSVSIWVKR

SEQ ID NO: 17011 - protein, 485 aa, Unidentified
HHNGTNGTMMQYFEWHLPNDGNHWNRLRDDASNLRNRGITAIWIPPAWKGTSQNDVGYGAYDLYDLGEFNQKGTVRTKYGTRSQLESAIHALKNNGVQVYGDVVMNHKGGADATENVLAVEVNPNNRNQEISGDYTIEAWTKFDFPGRGNTYSDFKWRWYHFDGVDWDQSRQFQNRIYKFRGDGKAWDWEVDSENGNYDYLMYADVDMDHPEVVNELRRWGEWYTNTLNLDGFRIDAVKHIKYSFTRDWLTHVRNAGGKEMFAVAEFWKNDLGALENYLNKTNWNHSVFDVPLHYNLYNASNSGGNYDMAKLLNGTVVQKHPMHAVTFVDNHDSQPGESLESFVQEWFKPLAYALILTREQGYPSVFYGDYYGIPTHSVPAMKAKIDPILEARQNFAYGTQHDYFDHHNIIGWTREGNTTHPNSGLATIMSDGPGGEKWMYVGQNKAGQVWHDITGNKPGTVTINADGWANFSVNGGSVSIWVKR

SEQ ID NO: 17012 - protein, 485 aa, Unidentified
HHNGTNGTMMQYFEWHLPNDGNHWNRLRDDASNLRNRGITAIWIPPAWKGTSQNDVGYGAYDLYDLGEFNQKGTVRTKYGTRSQLESAIHALKNNGVQVYGDVVMNHKGGADATENVLAVEVNPNNRNQEISGDYTIEAWTKFDFPGRGNTYSDFKWRWYHFDGVDWDQSRQFQNRIYKFRGDGKAWDWEVDSENGNYDYLMYADVDMDHPEVVNELRRWGEWYTNTLNLDGFRIDAVKHIKYSFTRDWLTHVRNATGKEMFAVAEFWKNDLGALENYLNKTNWNHSVFDVPLHYNLYNASNSGGNYDMAKLLNGTVVQKHPDHAVTFVDNHDSQPGESLESFVQEWFKPLAYALILTREQGYPSVFYGDYYGIPTHSVPAMKAKIDPILEARQNFAYGTQHDYFDHHNIIGWTREGNTTHPNSGLATIMSDGPGGEKWMYVGQNKAGQVWHDITGNKPGTVTINADGWANFSVNGGSVSIWVKR

SEQ ID NO: 17013 - protein, 485 aa, Unidentified
HHNGTNGTMMQYFEWHLPNDGNHWNRLRDDASNLRNRGITAIWIPPAWKGTSQNDVGYGAYDLYDLGEFNQKGTVRTKYGTRSQLESAIHALKNNGVQVYGDVVMNHKGGADATENVLAVEVNPNNRNQEISGDYTIEAWTKFDFPGRGNTYSDFKWRWYHFDGVDWDQSRQFQNRIYKFRGDGKAWDWEVDSENGNYDYLMYADVDMDHPEVVNELRRWGEWYTNTLNLDGFRIDAVKHIKYSFTRDWLTHVRNATGKEMFAVAEFWKNDLGALENYLNKTNWNHSVFDVPLHYNLYNASNSGGNYDMAKLLNGTVVQKHPMHAVTFVDNHDSQPGESLESFVQEWFKPLAYALILTREQGYPSVFYGDYYGIPTHSVPAMKAKIDPILEARQNFAYGTQHDYFDHHNIIGWTREGNTTHPPSGLATIMSDGPGGEKWMYVGQNKAGQVWHDITGNKPGTVTINADGWANFSVNGGSVSIWVKR

SEQ ID NO: 17014 - protein, 485 aa, Unidentified
HHNGTNGTMMQYFEWHLPNDGNHWNRLRDDASNLRNRGITAIWIPPAWKGTSQNDVGYGAYDLYDLGEFNQKGTVRTKYGTRSQLESAIHALKNNGVQVYGDVVMNHKGGADATENVLAVEVNPNNRNQEISGDYTIEAWTKFDFPGRGNTYSDFKWRWYHFDGVDWDVSRQFQNRIYKFRGDGKAWDWEVDSENGNYDYLMYADVDMDHPEVVNELRRWGEWYTNTLNLDGFRIDAVKHIKYSFTRDWLTHVRNATGKEMFAVAEFWKNDLGALENYLNKTNWNHSVFDVPLHYNLYNASNSGGNYDMAKLLNGTVVQKHPMHAVTFVDNHDSQPGESLESFVQEWFKPLAYALILTREQGYPSVFYGDYYGIPTHSVPAMKAKIDPILEARQNFAYGTQHDYFDHHNIIGWTREGNTTHPNSGLATIMSDGPGGEKWMYVGQNKAGQVWHDITGNKPGTVTINADGWANFSVNGGSVSIWVKR

SEQ ID NO: 17015 - protein, 485 aa, Unidentified
HHNGTNGTMMQYFEWHLPNDGNHWNRLRDDASNLRNRGITAIWIPPAWKGTSQNDVGYGAYDLYDLGEFNQKGTVRTKYGTRSQLESAIHALKNNGVQVYGDVVMNHKGGADATENVLAVEVNPNNRNQEISGDYTIEAWTKFDFPGRGNTYSDFKWRWYHFDGVDWDQSRQFQNRIYKFRGDGKAWDWEVDSENGNYDYLMYADVDMDHPEVVNELRRWGEWYTNTLNLDGFRIDAVKHIKYSFTRDWLTHVRNATGKEMFAVAEFWKNDLGALENYLNKTNWNHSVFDVPLHYNLYNASNSGGNYDMAKLLNGTVVQKHPMHAVTFVDNHDSQPGESLESFVQEWFKPLAYALILTSEQGYPSVFYGDYYGIPTHSVPAMKAKIDPILEARQNFAYGTQHDYFDHHNIIGWTREGNTTHPNSGLATIMSDGPGGEKWMYVGQNKAGQVWHDITGNKPGTVTINADGWANFSVNGGSVSIWVKR

SEQ ID NO: 17016 - protein, 485 aa, Unidentified
HHNGENGTMMQYFEWHLPNDGNHWNRLRDDASNLRNRGITAIWIPPAWKGTSQNDVGYGAYDLYDLGEFNQKGTVRTKYGTRSQLESAIHALKNNGVQVYGDVVMNHKGGADATENVLAVEVNPNNRNQEISGDYTIEAWTKFDFPGRGNTYSDFKWRWYHFDGVDWDQSRQFQNRIYKFRGDGKAWDWEVDSENGNYDYLMYADVDMDHPEVVNELRRWGEWYTNTLNLDGFRIDAVKHIKYSFTRDWLTHVRNATGKEMFAVAEFWKNDLGALENYLNKTNWNHSVFDVPLHYNLYNASNSGGNYDMAKLLNGTVVQKHPMHAVTFVDNHDSQPGESLESFVQEWFKPLAYALILTREQGYPSVFYGDYYGIPTHSVPAMKAKIDPILEARQNFAYGTQHDYFDHHNIIGWTREGNTTHPNSGLATIMSDGPGGEKWMYVGQNKAGQVWHDITGNKPGTVTINADGWANFSVNGGSVSIWVKR

SEQ ID NO: 17017 - protein, 485 aa, Unidentified
HHNGTNGTMMQYFEWHLPNDGNHWNRLRDDASNLRNRGITAIWIPPAWKGTSQNDVGYGAYDLYDLGEFNQKGTVRTKYGTRSQLESAIHALKNNGVQVYGDVVMNHKGGADATENVLAVEVNPNNRNQEISGDYTIEAWTKFDFPGRGNTYSDFKWRWYHFDGVDWDQSRQFQNRIYKFRGDGKAWDWEVDSENGNYDYLMYFDVDMDHPEVVNELRRWGEWYTNTLNLDGFRIDAVKHIKYSFTRDWLTHVRNATGKEMFAVAEFWKNDLGALENYLNKTNWNHSVFDVPLHYNLYNASNSGGNYDMAKLLNGTVVQKHPMHAVTFVDNHDSQPGESLESFVQEWFKPLAYALILTREQGYPSVFYGDYYGIPTHSVPAMKAKIDPILEARQNFAYGTQHDYFDHHNIIGWTREGNTTHPNSGLATIMSDGPGGEKWMYVGQNKAGQVWHDITGNKPGTVTINADGWANFSVNGGSVSIWVKR

SEQ ID NO: 17018 - protein, 485 aa, Unidentified
HHNGTNGTMMQYFEWHLPNDGNHWNRLRDDASNLRNRGITAIWIPPAWKGTSQNDVGYGAYDLYDLGEFNQKGTVRTKYGTRSQLESAIHALKNNGVQVYGDVVMNHKGGADATENVLAVEVNPNNRNQEISGDYTIEAWTKFDFPGRGNTYSDFKWRWYHFDGVDWDQSRQFQNRIYKFRGDGKAWDWEVDSENGNYDYLMYADVDMDHPEVVNELRRWGEWYTNTLNLDGFRIDAVKHIKYSFTRDWLTHVRNATGKEMFAVAEFWKNDLGALENYLNKTNWNHSVFDVPLHYNLYNASNSGGNYDMAKLLNGTVVQKHPMHAVTFVDNHDSQPGESLESFVQEWFKPLAYALILTREQGYPSVFYGDYYGIPTHSVFAMKAKIDPILEARQNFAYGTQHDYFDHHNIIGWTREGNTTHPNSGLATIMSDGPGGEKWMYVGQNKAGQVWHDITGNKPGTVTINADGWANFSVNGGSVSIWVKR

SEQ ID NO: 17019 - protein, 485 aa, Unidentified
HHNGTNGTMMQYFEWHLPNDGNHWNRLRDDASNLRNRGITAIWIPPAWKGTSQNDVGYGAYDLYDLGEFNQKGTVRTKYGTRSQLESAIHALKNNGVQVYGDVVMNHKGGADATENVLAVEVNPNNRNQEISGDYTIEAWTKFDFPGRGNTYSDFKWRWYHFDGVDWDQSRQFQNRIYKFRGDGKAWDWEVDSENGNYDYLMYADVDMDHPEVVNELRRWGEWYTNTLNLDGFRIDAVKHIKYSFTRDWLTHVRNATGKEMFAVAEFWKNDLGALENYLNKTNWNHSVFDVPLHYNLYNASNSGGNYDMAKLLNGTVVQKHPMHAVTFVDNHDSQPGESLESFVQEWFKPLAYALILTREQGYPSVFYGDYTGIPTHSVPAMKAKIDPILEARQNFAYGTQHDYFDHHNIIGWTREGNTTHPNSGLATIMSDGPGGEKWMYVGQNKAGQVWHDITGNKPGTVTINADGWANFSVNGGSVSIWVKR

SEQ ID NO: 17020 - protein, 483 aa, Bacillus sp.
HHNGTNGTMMQYFEWHLPNDGNHWNRLRDDASNLRNRGITAIWIPPAWKGTSQNDVGYGAYDLYDLGEFNQKGTVRTKYGTRSQLESAIHALKNNGVQVYGDVVMNHKGGADATENVLAVEVNPNNRNQEISGYYTIEAWTKFDFPGRGNTYSDFKWRWYHFDGVDWDQSRQFQNRIYKFRGKAWDWEVDSENGNYDYLMYADVDMDHPEVVNELRRWGEWYTNTLNLDGFRIDAVKHIKYSFTRDWLTHVRNATGKEMFAVAEFWKNDLGALENYLNKTNWNHSVFDVPLHYNLYNASNSGGNYDMAKLLNGTVVQKHPMHAVTFVDNHDSQPGESLESFVQEWFKPLAYALILTREQGYPSVFYGDYYGIPTHSVPAMKAKIDPILEARQNFAYGTQHDYFDHHNIIGWTREGNTTHPNSGLATIMSDGPGGEKWMYVGQNKAGQVWHDITGNKPGTVTINADGWANFSVNGGSVSIWVKR

SEQ ID NO: 17021 - protein, 485 aa, Unidentified
HHNGTNGTMMQYFEWHLPNDGNHWNRLRDDASNLRNRGITAIWIPPAWKGTSQNDVGYGAYDLYDLGEFNQKGTVRTKYGTRSQLESAIHALKNNGVQVYGDVVMNHKGGADATENVLAVEVNPNNRNQEISGDYTIEAWTKFDGPGRGNTYSDFKWRWYHFDGVDWDQSRQFQNRIYKFRGDGKAWDWEVDSENGNYDYLMYADVDMDHPEVVNELRRWGEWYTNTLNLDGFRIDAVKHIKYSFTRDWLTHVRNATGKEMFAVAEFWKNDLGALENYLNKTNWNHSVFDVPLHYNLYNASNSGGNYDMAKLLNGTVVQKHPMHAVTFVDNHDSQPGESLESFVQEWFKPLAYALILTREQGYPSVFYGDYYGIPTHSVPAMKAKIDPILEARQNFAYGTQHDYFDHHNIIGWTREGNTTHPNSGLATIMSDGPGGEKWMYVGQNKAGQVWHDITGNKPGTVTINADGWANFSVNGGSVSIWVKR

SEQ ID NO: 17022 - protein, 485 aa, Unidentified
HHNGTNGTMMQYFEWHLPNDGNHWNRLRDDASNLRNRGITAIWIPPAWKGTSQNDVGYGAYDLYDLGEFNQKGTVRTKYGTRSQLESAIHALKNNGVQVYGDVVMNHKGGADATENVLAVEVNPNNRNQEISGDYTIEAWTKFDFPGRGNTYSDFKWRWYHFDGVDWDQSRQFQNRIYKFRGDGKAWDWEVDSENGNYDYLMYADVDMDHPEVVNELRRWGEWYTNTLNLDGFRIDAVKHIKYSFTRDWLTHVRNATGKEMFAVAEFWKNDLGALENYLNKTNWNHSVFDVPLHYNLYNASNSGGNYDMAKLLNGTVVQKHPNHAVTFVDNHDSQPGESLESFVQEWFKPLAYALILTREQGYPSVFYGDYYGIPTHSVPAMKAKIDPILEARQNFAYGTQHDYFDHHNIIGWTREGNTTHPNSGLATIMSDGPGGEKWMYVGQNKAGQVWHDITGNKPGTVTINADGWANFSVNGGSVSIWVKR

SEQ ID NO: 17023 - protein, 485 aa, Unidentified
HHNGTNGTMMQYFEWHLPNDGNHWNRLRDDASNLRNRGITAIWIPPAWKGTSQNDVGYGAYDLYDLGEFNQKGTVRTKYGTRSQLESAIHALKNNGVQVYGDVVMNHKGGADATENVLAVEVNPNNRNQEISGDYTIEAWTKFDFPGRGNTYSDFKWRWYHFDGVDWDQSRQFQNRIYKFRGDGKAWDWEVDSENGNYDYLMYADVDMDHPEVVNELRRWGEWYTNTLNLDGFRIDAVKHIKYSFTRDWLTHVRNATGKEMFAVAEFWKNDLGALENYLNKTNWNHSVFDVPLHYNLYNASNSGGNYDMAKLLNGTVVQKHPMHAVTFVDNHDSQPGESLESFVQEWFKPLAYALILTREQGYPSVFYGDYYGIPTHSVPAMLAKIDPILEARQNFAYGTQHDYFDHHNIIGWTREGNTTHPNSGLATIMSDGPGGEKWMYVGQNKAGQVWHDITGNKPGTVTINADGWANFSVNGGSVSIWVKR

SEQ ID NO: 17024 - protein, 483 aa, Bacillus sp
HHNGTNGTMMQYFEWHLPNDGNHWNRLRDDASNLRNRGITAIWIPPAWKGTSQNDVGYGAYDLYDLGEFNQKGTVRTKYGTRSQLESAIHALKNNGVQVYGDVVMNHKGGADATENVLAVEVNPNNRNQEISGDYTIEAWTKFDFPGRGNTYSDFKWRWYHFDGVDWDQSRQFQNRIYKFRGKAWDWEVDSENGNYDYLMYADVDMDHPEVVNELRRWGEWYTNTLNLDGFRIDAVKHIKYSFTRDWLTHVRNATGKEMFAVAEFWKNDLGALENYLNKTNWNHSVFDVPLHYNLYNASNSGGNYDMAKLLNGTVVQKHPMHAVTFVDNHDSQPGESLESFVQEWFKPLAYALILTREQGYPSVFYGDYYGIPTHSVPAMKAKIDPILEARQNFAYGTQHDYFDHHNIIGWTREGNTTHPNSGLATIMSDGPGGEKWMYVGQDKAGQVWHDITGNKPGTVTINADGWANFSVNGGSVSIWVKR

SEQ ID NO: 17025 - protein, 485 aa, Unidentified
HHNGTNGTMMQYFEWHLPNDGNHWNRLRDDASNLRNRGITAIWIPPAWKGTSQNDVGYGAYDLYDLGEFNQKGTVRTKYGTRSQLESAIHALKNNGVQVYGDVVMNHKGGADATENVLAVEVNPNNRNQEISGDYTIEAWTKFDFPGRGNTYSDFKWRWYHFDGVDWDQSRQFQNRIYKFRGDGKAWDWEVDSENGNYDYLMYADVDMDHPEVVNELRRWGEWYTNTLNLDGFRIDAVKHIKYSFTRDWLTHVRNATGKEMFAVAEFWKNDLGALENYLNKTNWNHSVFDVPLHYNLYNASNSGGNYDMAKLLNGTVVQKHPMHAVTFVDNHDSQPGESLESFVQEWFKPLAYALILTREQGYPSVFYGDYYGIPTHSVPAMKAKIDPILEARQNFAYGTQHDYFDHHNIIGWTREGNTTHPNSGLATIMSDNPGGEKWMYVGQNKAGQVWHDITGNKPGTVTINADGWANFSVNGGSVSIWVKR

SEQ ID NO: 17026 - protein, 485 aa, Unidentified
HHNGTNGTMMQYFEWHLPNDGNHWNRLRDDASNLRNRGITAIWIPPAWKGTSQNDVGYGAYDLYDLGEFNQKGTVRTKYGTRSQLESAIHALKNNGVQVYGDVVMNHKGGADATENVLAVEVNPNNRNQEISGDYTIEAWTKFDFPGRGNTYSDFKWRWYHFDGVDWDQSRQFQNRIYAFRGDGKAWDWEVDSENGNYDYLMYADVDMDHPEVVNELRRWGEWYTNTLNLDGFRIDAVKHIKYSFTRDWLTHVRNATGKEMFAVAEFWKNDLGALENYLNKTNWNHSVFDVPLHYNLYNASNSGGNYDMAKLLNGTVVQKHPMHAVTFVDNHDSQPGESLESFVQEWFKPLAYALILTREQGYPSVFYGDYYGIPTHSVPAMKAKIDPILEARQNFAYGTQHDYFDHHNIIGWTREGNTTHPNSGLATIMSDGPGGEKWMYVGQNKAGQVWHDITGNKPGTVTINADGWANFSVNGGSVSIWVKR

SEQ ID NO: 17027 - protein, 485 aa, Unidentified
HHNGTNGTMMQYFEWHLPNDGNHWNRLRDDASNLRNRGITAIWIPPAWKGTSQNDVGYGAYDLYDLGEFNQKGTVRTKYGTRSQLESAIHALKNNGVQVYGDVVMNHKGGADATENVLAVEVNPNNRNQEISGDYTIEAWTKFDFPGRGNTYSDFKWRWYHFDGVDWDQSRQFQNRIYKFRGDGKAWDWEVDSENGNYDYLMYADVDMDHPEVVNELRRWGEWYTNTLNLDGFRIDAVKHIKYSFTRDWLTHVRNATGKEMFAVAEFWKNDLGALENYLNKTNWNHSVFDVPLHYNLYNASNSGGNYDMAKLLNGTVVQKHPMHAVTFVDNHDSQPGESLESFVQEWFKPLAYALILTREQGYPSVFYGDYYGIPTHSVPAMKAKIDPILEARQNFAYGTQHDYFDHHNIIGWTREGNTTHPNSGLATIMSDGPGGEKWMYVGQNKAGQVWHDITGNKPGTVTINADGWANFSVDGGSVSIWVKR

SEQ ID NO: 17028 - protein, 485 aa, Unidentified
HHNGTNGTMMQYFEWHLPNDGNHWNRLRDDASNLRNRGITAIWIPPAWKGTSQNDVGYGAYDLYDLGEFNQKGTVRTKYGTRSQLESAIHALKNNGVQVYGDVVMNHKGGADATENVLAVEVNPNNRNQEISGDYTIEAWTKFDFPGRGNTYSDFKWRWYHFDGVDWDQSRQFQNRIYKFRGDGKAWDWEVDSENGNYDYLMYADVDMDHPEVVNELRRWGEWYTNTLNLDGFRIDAVKHIKYSFTRDWLTHVRNATGKEMFAVAEFWKNDLGALENYLNKTNWNHSVFDVPLHYNLYNASNSGGNYDMAKLLNGTVVQKHPMHAVTFVDNHDSQPGESLESFVQEWFKPLAYALILTREQGYPSVFYGDYYGIPTHSVPAIKAKIDPILEARQNFAYGTQHDYFDHHNIIGWTREGNTTHPNSGLATIMSDGPGGEKWMYVGQNKAGQVWHDITGNKPGTVTINADGWANFSVNGGSVSIWVKR

SEQ ID NO: 17029 - protein, 485 aa, Unidentified
HHNGTNGTMMQYFEWHLPNDGNHWNRLRDDASNLRNRGITAIWIPPAWKGTSQNDVGYGAYDLYDLGEFNQKGTVRTKYGTRSQLESAIHALKNNGVQVYGDVVMNHKGGADATENVLAVEVNPNNRNQEISGDYTIEAWTKFDFPGRGNTYSDFKWRWYHFDGVDWDQSRQFQNRIYKFRGDGKAWDWEVDSENGNYDYLMYADVDMDHPEVVNELRRWGEWYTNTLNLDGFRIDAVKHIKYSFTRDWLTHVRNATGKEMFAVAEFWKNDWGALENYLNKTNWNHSVFDVPLHYNLYNASNSGGNYDMAKLLNGTVVQKHPMHAVTFVDNHDSQPGESLESFVQEWFKPLAYALILTREQGYPSVFYGDYYGIPTHSVPAMKAKIDPILEARQNFAYGTQHDYFDHHNIIGWTREGNTTHPNSGLATIMSDGPGGEKWMYVGQNKAGQVWHDITGNKPGTVTINADGWANFSVNGGSVSIWVKR

SEQ ID NO: 17030 - protein, 483 aa, Synthetic construct
HHNGTNGTMMQYFEWHLPNDGNHWNRLRDDASNLRNRGITAIWIPPAWKGTSQNDVGYGAYDLYDLGEFNQKGTVRTKYGTRSQLESAIHALKNNGVQVYGDVVMNHKGGADATENVLAVEVNPNNRNQEISGDYTIEAWTKFDFPGRGNTYSDFKWRWYHFDGVDWDQSRQFQNRIYKFRDKAWDWEVDSENGNYDYLMYADVDMDHPEVVNELRRWGEWYTNTLNLDGFRIDAVKHIKYSFTRDWLTHVRNATGKEMFAVAEFWKNDLGALENYLNKTNWNHSVFDVPLHYNLYNASNSGGNYDMAKLLNGTVVQKHPMHAVTFVDNHDSQPGESLESFVQEWFKPLAYALILTREQGYPSVFYGDYYGIPTHSVPAMKAKIDPILEARQNFAYGTQHDYFDHHNIIGWTREGNTTHPNSGLATIMSDGPGGEKWMYVGQNKAGQVWHDITGNKPGTVTINADGWANFSVNGGSVSIWVKR

SEQ ID NO: 17031 - protein, 483 aa, Bacillus sp.
HHNGTNGTMMQYFEWHLPNDGNHWNRLRDDASNLRNRGITAIWIPPAWKGTSQNDVGYGAYDLYDLGEFNQKGTVRTKYGTRSQLESAIHALKNNGVQVYGDVVMNHKGGADATENVLAVEVNPNNRNQEISGDYTIEAWTKFDFPGRGNTYSDFKWRWYHFDGVDWDQSRQFQNRIYKFRGKAWDWEVDSEYGNYDYLMYADVDMDHPEVVNELRRWGEWYTNTLNLDGFRIDAVKHIKYSFTRDWLTHVRNATGKEMFAVAEFWKNDLGALENYLNKTNWNHSVFDVPLHYNLYNASNSGGNYDMAKLLNGTVVQKHPMHAVTFVDNHDSQPGESLESFVQEWFKPLAYALILTREQGYPSVFYGDYYGIPTHSVPAMKAKIDPILEARQNFAYGTQHDYFDHHNIIGWTREGNTTHPNSGLATIMSDGPGGEKWMYVGQNKAGQVWHDITGNKPGTVTINADGWANFSVNGGSVSIWVKR

SEQ ID NO: 17032 - protein, 485 aa, Unidentified
HHNGTNGTMMQYFEWHLPNDGNHWNRLRDDASNLRNRGITAIWIPPAWKGTSQNDVGYGAYDLYDLGEFNQKGTVRTKYGTRSYLESAIHALKNNGVQVYGDVVMNHKGGADATENVLAVEVNPNNRNQEISGDYTIEAWTKFDFPGRGNTYSDFKWRWYHFDGVDWDQSRQFQNRIYKFRGDGKAWDWEVDSENGNYDYLMYADVDMDHPEVVNELRRWGEWYTNTLNLDGFRIDAVKHIKYSFTRDWLTHVRNATGKEMFAVAEFWKNDLGALENYLNKTNWNHSVFDVPLHYNLYNASNSGGNYDMAKLLNGTVVQKHPMHAVTFVDNHDSQPGESLESFVQEWFKPLAYALILTREQGYPSVFYGDYYGIPTHSVPAMKAKIDPILEARQNFAYGTQHDYFDHHNIIGWTREGNTTHPNSGLATIMSDGPGGEKWMYVGQNKAGQVWHDITGNKPGTVTINADGWANFSVNGGSVSIWVKR

SEQ ID NO: 17033 - protein, 483 aa, Unidentified
HHNGTNGTMMQYFEWHLPNDGNHWNRLRDDASNLRNRGITAIWIPPAWKGTSQNDVGYGAYDLYDLGEFNQKGTVRTKYGTRSQLESAIHALKNNGVQVYGDVVMNHKGGADATENVLAVEVNPNNRNQEISGDYTIEAWTKFDFPGRGNTYSDFKWRWYHFDGVDWDQSRQFQNRIYKFRGKAWDWPVDSENGNYDYLMYADVDMDHPEVVNELRRWGEWYTNTLNLDGFRIDAVKHIKYSFTRDWLTHVRNATGKEMFAVAEFWKNDLGALENYLNKTNWNHSVFDVPLHYNLYNASNSGGNYDMAKLLNGTVVQKHPMHAVTFVDNHDSQPGESLESFVQEWFKPLAYALILTREQGYPSVFYGDYYGIPTHSVPAMKAKIDPILEARQNFAYGTQHDYFDHHNIIGWTREGNTTHPNSGLATIMSDGPGGEKWMYVGQNKAGQVWHDITGNKPGTVTINADGWANFSVNGGSVSIWVKR

SEQ ID NO: 17034 - protein, 483 aa, Bacillus sp.
HHNGTNGTMMQYFEWHLPNDGNHWNRLRDDASNLRNRGITAIWIPPAWKGTSQNDVGYGAYDLYDLGEFNQKGTVRTKYGTRSQLESAIHALKNNGVQVYGDVVMNHKGGADATENVLAVEVNPNNRNQEISGDYTIEAWTKFDFPGRGNTYSDFKWRWYHFDGVDWDQSRQFQNRIYKFRGKAWDWEVDSENGNYDYLMYADVDMDHPEVVNELRRWGEWYTNTLNLDGFRIDAVKHIKYSFTRDWLTHVRNATGKKMFAVAEFWKNDLGALENYLNKTNWNHSVFDVPLHYNLYNASNSGGNYDMAKLLNGTVVQKHPMHAVTFVDNHDSQPGESLESFVQEWFKPLAYALILTREQGYPSVFYGDYYGIPTHSVPAMKAKIDPILEARQNFAYGTQHDYFDHHNIIGWTREGNTTHPNSGLATIMSDGPGGEKWMYVGQNKAGQVWHDITGNKPGTVTINADGWANFSVNGGSVSIWVKR

SEQ ID NO: 17035 - protein, 483 aa, Bacillus sp.
HHNGTNGTMMQYFEWHLPNDGNHWNRLRDDASNLRNRGITAIWIPPAWKGTSQNDVGYGAYDLYDLGEFNQKGTVRTKYGTRSQLESAIHALKNNGVQVYGDVVMNHKGGADATENVLAVEVNPNNRNQEISGDYTIEAWTKFDFPGRGNTYSDFKWRWYHFDGVDWDQSRQFQNRIYKFRGKAWDWEVDSENGNYDYLMYADVDFDHPEVVNELRRWGEWYTNTLNLDGFRIDAVKHIKYSFTRDWLTHVRNATGKEMFAVAEFWKNDLGALENYLNKTNWNHSVFDVPLHYNLYNASNSGGNYDMAKLLNGTVVQKHPMHAVTFVDNHDSQPGESLESFVQEWFKPLAYALILTREQGYPSVFYGDYYGIPTHSVPAMKAKIDPILEARQNFAYGTQHDYFDHHNIIGWTREGNTTHPNSGLATIMSDGPGGEKWMYVGQNKAGQVWHDITGNKPGTVTINADGWANFSVNGGSVSIWVKR

SEQ ID NO: 17036 - protein, 485 aa, Unidentified
HHNGTNGTMMQYFEWHLPNDGNHWNRLRDDASNLRNRGITAIWIPPAWKGTSQNDVGYGAYDLYDLGEFNQKGTVRTKYGTRSQLESAIHALKNNGVQVYGDVVMNHKGGADATENVLAVEVNPNNRNQEISGDYTIEAWTKFDFPGRGNTYSDFKWRWYHFDGVDWDQSRQFQNRIYKFRGDGKAWDWEVDSENGNYDYLMYADVDMDHPEVVNELRRWGEWYTNTLNLDGFRIDAVKHIKYSFTRDWLTHVRNATGKEMFAVAEFWKNDLGALENYLNKTNWNHSVFDVPLHYNLYNASNSGGNYDMAKLLNGTVVQKHPMHAVTFVDNHDSQPGESLESFVQEWFKPLAYALILTREQGWPSVFYGDYYGIPTHSVPAMKAKIDPILEARQNFAYGTQHDYFDHHNIIGWTREGNTTHPNSGLATIMSDGPGGEKWMYVGQNKAGQVWHDITGNKPGTVTINADGWANFSVNGGSVSIWVKR

SEQ ID NO: 17037 - protein, 485 aa, Unidentified
HHNGTNGTMMQYFEWHLPNDGNHWNRLRDDASNLRNRGITAIWIPPAWKGTSQNDVGYGAYDLYDLGEFNQKGTVRTKYGTRSQLESAIHALKNNGVQVYGDVVMNHKGGADATENVLAVEVNPNNRNQEISGDYTIEAWTKFDFPGRGNTYSDFKWRWYHFDGVDWDQSRQFQNRIYKFRGDGKAWDWEVDSENGNYDYLMYADVDMDHPEVVNELRRWGEWYTNTLNLDGFRIDAVKHIKYSFTRDWLTHVRNATGKEMFAVAEFWKNDLGALENYLNKTNWNHTVFDVPLHYNLYNASNSGGNYDMAKLLNGTVVQKHPMHAVTFVDNHDSQPGESLESFVQEWFKPLAYALILTREQGYPSVFYGDYYGIPTHSVPAMKAKIDPILEARQNFAYGTQHDYFDHHNIIGWTREGNTTHPNSGLATIMSDGPGGEKWMYVGQNKAGQVWHDITGNKPGTVTINADGWANFSVNGGSVSIWVKR

SEQ ID NO: 17038 - protein, 485 aa, Unidentified
HHNGTNGTMMQYFEWHLPNDGNHWNRLRDDASNLRNRGITAIWIPPAWKGTSQNDVGYGAYDLYDLGEFNQKGTVRTKYGTRSQLESAIHALKNNGVQVYGDVVMNHKGGADATENVLAVEVNPNNRNQEISGDYTIEAWTKFDFPGRGNTYSDFKWRWYHFDGVDWDQSRQFQNRIYKFRGDGKAWDWEVDSENGNYDYLMYADVDMDHPEVVNELRRWGEWYTNTLNLDGFRIDAVKHIKYSFTRDWLTHVRNACGKEMFAVAEFWKNDLGALENYLNKTNWNHSVFDVPLHYNLYNASNSGGNYDMAKLLNGTVVQKHPMHAVTFVDNHDSQPGESLESFVQEWFKPLAYALILTREQGYPSVFYGDYYGIPTHSVPAMKAKIDPILEARQNFAYGTQHDYFDHHNIIGWTREGNTTHPNSGLATIMSDGPGGEKWMYVGQNKAGQVWHDITGNKPGTVTINADGWANFSVNGGSVSIWVKR

SEQ ID NO: 17039 - protein, 485 aa, Bacillus sp.
HHNGTNGTMMQYFEWHLPNDGNHWNRLRDDASNLRNRGITAIWIPPAWKGTSQNDVGYGAYDLYDLGEFNQKGTVRTKYGTRSQLESAIHALKNNGVQVYGDVVMNHKGGADATENVLAVEVNPNNRNQEISGDYTIEAWTKFDFPGRGNTYSDFKWRWYHFDGVDWDQSRQFQNRIYKFRGDGKAWDWEVDSENGNYDYLMYADMDMDHPEVVNELRRWGEWYTNTLNLDGFRIDAVKHIKYSFTRDWLTHVRNATGKEMFAVAEFWKNDLGALENYLNKTNWNHSVFDVPLHYNLYNASNSGGNYDMAKLLNGTVVQKHPMHAVTFVDNHDSQPGESLESFVQEWFKPLAYALILTREQGYPSVFYGDYYGIPTHSVPAMKAKIDPILEARQNFAYGTQHDYFDHHNIIGWTREGNTTHPNSGLATIMSDGPGGEKWMYVGQNKAGQVWHDITGNKPGTVTINADGWANFSVNGGSVSIWVKR

SEQ ID NO: 17040 - protein, 485 aa, Unidentified
HHNGTNGTMMQYFEWHLPNDGNHWNRLRDDASNLRNRGITAIWIPPAWKGTSQNDVGYGAYDLYDLGEFNQKGTVRTKYGTRSQLESAIHALKNNGVQVYGDVVMNHKGGADATENVLAVEVNPNNRNQEISGDYTIEAWTKHDFPGRGNTYSDFKWRWYHFDGVDWDQSRQFQNRIYKFRGDGKAWDWEVDSENGNYDYLMYADVDMDHPEVVNELRRWGEWYTNTLNLDGFRIDAVKHIKYSFTRDWLTHVRNATGKEMFAVAEFWKNDLGALENYLNKTNWNHSVFDVPLHYNLYNASNSGGNYDMAKLLNGTVVQKHPMHAVTFVDNHDSQPGESLESFVQEWFKPLAYALILTREQGYPSVFYGDYYGIPTHSVPAMKAKIDPILEARQNFAYGTQHDYFDHHNIIGWTREGNTTHPNSGLATIMSDGPGGEKWMYVGQNKAGQVWHDITGNKPGTVTINADGWANFSVNGGSVSIWVKR

SEQ ID NO: 17041 - protein, 485 aa, Bacillus sp.
HHNGTNGTMMQYFEWHLPNDGNHWNRLRDDASNLRNRGITAIWIPPAWKGTSQNDVGYGAYDLYDLGEFNQKGTVRTKYGTRSQLESAIHALKNNGVQVYGDVVMNHKGGADATENVLAVEVNPNNRNQEISGDYTIEAWTKFDFPGRGNTYSDFKWRWYHFDGVDWDQSRQFQNRIYKFRGDGKAWDWEVDSENGNYDYLMYADVDMDFPEVVNELRRWGEWYTNTLNLDGFRIDAVKHIKYSFTRDWLTHVRNATGKEMFAVAEFWKNDLGALENYLNKTNWNHSVFDVPLHYNLYNASNSGGNYDMAKLLNGTVVQKHPMHAVTFVDNHDSQPGESLESFVQEWFKPLAYALILTREQGYPSVFYGDYYGIPTHSVPAMKAKIDPILEARQNFAYGTQHDYFDHHNIIGWTREGNTTHPNSGLATIMSDGPGGEKWMYVGQNKAGQVWHDITGNKPGTVTINADGWANFSVNGGSVSIWVKR

SEQ ID NO: 17042 - protein, 485 aa, Unidentified
HHNGTNGTMMQYFEWHLPNDGNHWNRLRDDASNLRNRGITAIWIPPAWKGTSQNDVGYGAYDLYDLGEFNQKGTVRTKYGTRSQLESAIHALKNNGVQVYGDVVMNHKGGADATENVLAVEVNPNNRNQEISGDYTIEAWTKFDFPGRGNTYSDFKWRWYHFDGVDWDQSRQFQNRIYKFRGDGKAWDWEVDSENGNYDYLMYADVDMDHPEVVNELRRWGEWYTNTLNLDGFRIDAVKHIKYSFTRDWLTHVRNATGKEMFAVAEFWKNDLGALENYLNKTNWNHSVFDVPLHYNLYNASNSGGNYDMAKLLNGTVVQKHPMHAVTFVDNHDSQPGESLESFVQEWFKPLAYALILTREQGYPSVFYGDYYGIPTHSVPAMKAKIDPILEARQVFAYGTQHDYFDHHNIIGWTREGNTTHPNSGLATIMSDGPGGEKWMYVGQNKAGQVWHDITGNKPGTVTINADGWANFSVNGGSVSIWVKR

SEQ ID NO: 17043 - protein, 485 aa, Unidentified
HHNGTNGTMMQYFEWHLNNDGNHWNRLRDDASNLRNRGITAIWIPPAWKGTSQNDVGYGAYDLYDLGEFNQKGTVRTKYGTRSQLESAIHALKNNGVQVYGDVVMNHKGGADATENVLAVEVNPNNRNQEISGDYTIEAWTKFDFPGRGNTYSDFKWRWYHFDGVDWDQSRQFQNRIYKFRGDGKAWDWEVDSENGNYDYLMYADVDMDHPEVVNELRRWGEWYTNTLNLDGFRIDAVKHIKYSFTRDWLTHVRNATGKEMFAVAEFWKNDLGALENYLNKTNWNHSVFDVPLHYNLYNASNSGGNYDMAKLLNGTVVQKHPMHAVTFVDNHDSQPGESLESFVQEWFKPLAYALILTREQGYPSVFYGDYYGIPTHSVPAMKAKIDPILEARQNFAYGTQHDYFDHHNIIGWTREGNTTHPNSGLATIMSDGPGGEKWMYVGQNKAGQVWHDITGNKPGTVTINADGWANFSVNGGSVSIWVKR

SEQ ID NO: 17044 - protein, 485 aa, Unidentified
HHNGTNGTMMQYFEWHLPNDGNHWNRLRDDASNLRNRGITAIWIPPAWKGTSQNDVGYGAYDLYDLGEFNQKGTVRTKYGTRSQLESAIHALKNNGVQVYGDVVMNHKGGADATENVLAVEVNPNNRNQEISGDYTIEAWTKFDFPGRGNTYSDFKWRWYHFDGVDWDQSRQFQNRIYKFRGDGKAWDWEVDSENGNYDYLMYADVDMDHPEVVNELRRWGEWYTNTLNLDGFRIDAVKHIKYSFTRDWLTHVRNATGKEMFAVAEFWKNDLGALENYLNKTNNNHSVFDVPLHYNLYNASNSGGNYDMAKLLNGTVVQKHPMHAVTFVDNHDSQPGESLESFVQEWFKPLAYALILTREQGYPSVFYGDYYGIPTHSVPAMKAKIDPILEARQNFAYGTQHDYFDHHNIIGWTREGNTTHPNSGLATIMSDGPGGEKWMYVGQNKAGQVWHDITGNKPGTVTINADGWANFSVNGGSVSIWVKR

SEQ ID NO: 17045 - protein, 485 aa, Unidentified
HHNGTNGTMMQYFEWHLPNDGNHWNRLRDDASNLRNRGITAIWIPPAWKGTSQNDVGYGAYDLYDLGEFNQKGTVRTKYGTRSQLESAIHALKNNGVQVYGDVVMNHKGGADATENVLAVEVNPNNRNQEISGDYTIEAWTKFDFPGRGNTYSDFKWRWYHFDGVDWDQSRQFQNRIYKFRGDGKAWDWEVDSENGNYDYLMYADVDMDHPEVVNELRRWGEWYTNTLNLDGFRIDAVKHIKYSFTRDWLTHVRNATGKEMFAVAEFWKNDLGALENYLNKTNWNHSVFDVPLHYNLYNASNSGGNYDMAKLLNGTVVQKHPMHAVTFVDNHDSQPGESLESFVQEWFKPLAYALILTREQGYPSVFYGDYYGIPTHSVPAMKAKIDPILEARQNFAYGTQHDYFDHHNIIGWTREGNTTHPNSGLATIMSDGPGGEKVMYVGQNKAGQVWHDITGNKPGTVTINADGWANFSVNGGSVSIWVKR

SEQ ID NO: 17046 - protein, 485 aa, Unidentified
HHNGTNGTMMQYFEWHLPNDGNHWNRLRDDASNLRNRGITAIWIPPAWKGTSQNDVGYGAYDLYDLGEFNQKGTVRTKYGTRSQLESAIHALKNNGVQVYGDVVMNHKGGADATENVLAVEVNPNNRNQEISGDYTIEAWTKFDFPGRGNTYSDFKWRWYHFDGVDWDQSRQFQNRIYKFRGDGKAWDWEVDSENGNYDYLMYADVDMDHPEVVNELRRWGEWYTNTLNLDGFRIDAVKHIKMSFTRDWLTHVRNATGKEMFAVAEFWKNDLGALENYLNKTNWNHSVFDVPLHYNLYNASNSGGNYDMAKLLNGTVVQKHPMHAVTFVDNHDSQPGESLESFVQEWFKPLAYALILTREQGYPSVFYGDYYGIPTHSVPAMKAKIDPILEARQNFAYGTQHDYFDHHNIIGWTREGNTTHPNSGLATIMSDGPGGEKWMYVGQNKAGQVWHDITGNKPGTVTINADGWANFSVNGGSVSIWVKR

SEQ ID NO: 17047 - protein, 485 aa, Unidentified
HHNGTNGTMMQYFEWHLPNDGNHWNRLRDDASNLRNRGITAIWIPPAWKGTSQNDVGYGAYDLYDLGEFNQKGTVRTKYGTRSQLESAIHALKNNGVQVYGDVVMNHKGGADATENVLAVEVNPNNRNQEISGDYTIEAWTKFDFPGRGNTYSDFKWRWYHFDGVDWDQSRQFQNRIYKFRGDGKAWDWEVDSENGNYDYLMYADVDMDHPEVVNELRRWGEWYTNTLNLDGFRIDAVKHIKYSFTSDWLTHVRNATGKEMFAVAEFWKNDLGALENYLNKTNWNHSVFDVPLHYNLYNASNSGGNYDMAKLLNGTVVQKHPMHAVTFVDNHDSQPGESLESFVQEWFKPLAYALILTREQGYPSVFYGDYYGIPTHSVPAMKAKIDPILEARQNFAYGTQHDYFDHHNIIGWTREGNTTHPNSGLATIMSDGPGGEKWMYVGQNKAGQVWHDITGNKPGTVTINADGWANFSVNGGSVSIWVKR

SEQ ID NO: 17048 - protein, 485 aa, Unidentified
HHNGTNGTMMQYFEWHLPNDGNHWNRLRDDASNLRNRGITAIWIPPAWKGTSQNDVGYGAYDLYDLGEFNQKGTVRTKYGTRSQLESAIHALKNNGVQVYGDVVMNHKGGADATENVLAVEVNPNNRNQEISGDYTIEAWTKFDFPGRGNTYSDFKWRWYHFDGPDWDQSRQFQNRIYKFRGDGKAWDWEVDSENGNYDYLMYADVDMDHPEVVNELRRWGEWYTNTLNLDGFRIDAVKHIKYSFTRDWLTHVRNATGKEMFAVAEFWKNDLGALENYLNKTNWNHSVFDVPLHYNLYNASNSGGNYDMAKLLNGTVVQKHPMHAVTFVDNHDSQPGESLESFVQEWFKPLAYALILTREQGYPSVFYGDYYGIPTHSVPAMKAKIDPILEARQNFAYGTQHDYFDHHNIIGWTREGNTTHPNSGLATIMSDGPGGEKWMYVGQNKAGQVWHDITGNKPGTVTINADGWANFSVNGGSVSIWVKR

SEQ ID NO: 17049 - protein, 485 aa, Unidentified
HHNGTNGTMMQYFEWHLPNDGNHWNRLRDDASNLRNRGITAIWIPPAWKGTSQNDVGYGAYDLYDLGEFNQKGTVRTKYGTRSQLESAIHALKNNGVQVYGDVVMNHKGGADATENVLAVEVNPNNRNQEISGDYTIEAWTKFDFPGRGNTYSDFKWRWYHFDGVDWDQSRQFQNRIYKFRGDGKAWDWEVDSENGNYDYLMYADVDMDHPEVVNELRRWGEWYTNTLNLDGFRIDAVKHIKYSFTRDWLTHVRNATGKEMFAVAEFWKNDLGALENYLNKTNWNHSVFDVPLHYNLYNASNSGGNYDMAKLLNGTVVQKHPMHAVTFVDNHDSQPGESLESFVQEWFKPLAYALILTREQGIPSVFYGDYYGIPTHSVPAMKAKIDPILEARQNFAYGTQHDYFDHHNIIGWTREGNTTHPNSGLATIMSDGPGGEKWMYVGQNKAGQVWHDITGNKPGTVTINADGWANFSVNGGSVSIWVKR

SEQ ID NO: 17050 - protein, 483 aa, Unidentified
HHNGTNGTMMQYFEWHLPNDGNHWNRLRDDASNLRNRGITAIWIPPAWKGTSQNDVGYGAYDLYDLGEFNQKGTVRTKYGTRSQLESAIHALKNNGVQVYGDVVMNHKGGADATENVLAVEVNPNNRNQEISGDYTIEAWTKFDFPGRGNTYSDFKWRWYHFDGVDWDQSRQFQNRIYKFRGKAWDWEVDSELGNYDYLMYADVDMDHPEVVNELRRWGEWYTNTLNLDGFRIDAVKHIKYSFTRDWLTHVRNATGKEMFAVAEFWKNDLGALENYLNKTNWNHSVFDVPLHYNLYNASNSGGNYDMAKLLNGTVVQKHPMHAVTFVDNHDSQPGESLESFVQEWFKPLAYALILTREQGYPSVFYGDYYGIPTHSVPAMKAKIDPILEARQNFAYGTQHDYFDHHNIIGWTREGNTTHPNSGLATIMSDGPGGEKWMYVGQNKAGQVWHDITGNKPGTVTINADGWANFSVNGGSVSIWVKR

SEQ ID NO: 17051 - protein, 485 aa, Unidentified
HHNGTNGTMMQYFEWHLPNDGNHWNRLRDDASNLRNRGITAIWIPPAWKGTSQNDVGYGAYDLYDLGEFNQKGTVRTKYGTRSQLESAIHALKNNGVQVYGDVVMNHKGGADATENVLAVEVNPNNRNQEISGDYTIEAWTKFDHPGRGNTYSDFKWRWYHFDGVDWDQSRQFQNRIYKFRGDGKAWDWEVDSENGNYDYLMYADVDMDHPEVVNELRRWGEWYTNTLNLDGFRIDAVKHIKYSFTRDWLTHVRNATGKEMFAVAEFWKNDLGALENYLNKTNWNHSVFDVPLHYNLYNASNSGGNYDMAKLLNGTVVQKHPMHAVTFVDNHDSQPGESLESFVQEWFKPLAYALILTREQGYPSVFYGDYYGIPTHSVPAMKAKIDPILEARQNFAYGTQHDYFDHHNIIGWTREGNTTHPNSGLATIMSDGPGGEKWMYVGQNKAGQVWHDITGNKPGTVTINADGWANFSVNGGSVSIWVKR

SEQ ID NO: 17052 - protein, 485 aa, Unidentified
HHNGTNGTMMQYFEWHLPNDGNHWNRLRDDASNLRNRGITAIWIPPAWKGTSQNDVGYGAYDLYDLGEFNQKGTVRTKYGTRSQLESAIHALKNNGVYVYGDVVMNHKGGADATENVLAVEVNPNNRNQEISGDYTIEAWTKFDFPGRGNTYSDFKWRWYHFDGVDWDQSRQFQNRIYKFRGDGKAWDWEVDSENGNYDYLMYADVDMDHPEVVNELRRWGEWYTNTLNLDGFRIDAVKHIKYSFTRDWLTHVRNATGKEMFAVAEFWKNDLGALENYLNKTNWNHSVFDVPLHYNLYNASNSGGNYDMAKLLNGTVVQKHPMHAVTFVDNHDSQPGESLESFVQEWFKPLAYALILTREQGYPSVFYGDYYGIPTHSVPAMKAKIDPILEARQNFAYGTQHDYFDHHNIIGWTREGNTTHPNSGLATIMSDGPGGEKWMYVGQNKAGQVWHDITGNKPGTVTINADGWANFSVNGGSVSIWVKR

SEQ ID NO: 17053 - protein, 485 aa, Unidentified
HHNGTNGTMMQYFEWHLPNDGNHWNRLRDDASNLRNRGITAIWIPPAWKGTSQNDVGYGAYDLYDLGEFNQKGTVRTKYGTRSQLESAIHALKNNGVQVYGDVVMNHKGGADATENVLAVEVNPNNRNQEISGDYTIEAWTKFDFPGRGNTYSDFKWRWYHFDGVDWDQSRQFQNRIYKFRGDGKAWDWEVDSENGNYDYLMYADVDMDHPEVVNELRRWGEWYTNTLNLDGFRIDAVKHIKYSFTRDWLTHVRNATGKEMFAVAEFWKNDLGALENYLNKTNWNHSVFDVPLHYNLYNASNSGGNYDMAKLLNGTVVQKHPMHAVTFVDNHDSQPGESLESFVQEWFKPLAYALILTREDGYPSVFYGDYYGIPTHSVPAMKAKIDPILEARQNFAYGTQHDYFDHHNIIGWTREGNTTHPNSGLATIMSDGPGGEKWMYVGQNKAGQVWHDITGNKPGTVTINADGWANFSVNGGSVSIWVKR

SEQ ID NO: 17054 - protein, 485 aa, Bacillus sp.
HHNGTNGTMMQYFEWHLPNDGNHWNRLRDDASNLRNRGITAIWIPPAWKGTSQNDVGYGAYDLYDLGEFNQKGTVRTKYGTRSQLESAIHALKNNGVQVYGDVVMNHKGGADATENVLAVEVNPNNRNQEISGDYTIEAWTKFDFPGRGNTYSDFKWRWYHFDGVDWDQSRQFQNRIYKFRGDGKAWDWEVDSENGNYDYLMYADVDMDHPFVVNELRRWGEWYTNTLNLDGFRIDAVKHIKYSFTRDWLTHVRNATGKEMFAVAEFWKNDLGALENYLNKTNWNHSVFDVPLHYNLYNASNSGGNYDMAKLLNGTVVQKHPMHAVTFVDNHDSQPGESLESFVQEWFKPLAYALILTREQGYPSVFYGDYYGIPTHSVPAMKAKIDPILEARQNFAYGTQHDYFDHHNIIGWTREGNTTHPNSGLATIMSDGPGGEKWMYVGQNKAGQVWHDITGNKPGTVTINADGWANFSVNGGSVSIWVKR

SEQ ID NO: 17055 - protein, 485 aa, Unidentified
HHNGTNGTMMQYFEWHLPNDGNHWNRLRDDASNLRNRGITAIWIPPAWKGTSQNDVGYGAYDLYDLGEFNQKGTVRTKYGTRSQLESAIHALKNNGVQVYGDVVMNHKGGADATENVLAVEVNPNNRNQEISGDYTIEAWTKFDFPGRGNTYSDFKWRWYHFDGVDWDQSRQFQNRIYKFRGDGKAWDWEVDSENGNYDYLMYADVDMDHPEVVNELRRWGEWYTNTLNLDGFRIDAVKHIKYSFTRDWLTHVRNATGKEMFAVAEFWKNDLGALENYLNKTNINHSVFDVPLHYNLYNASNSGGNYDMAKLLNGTVVQKHPMHAVTFVDNHDSQPGESLESFVQEWFKPLAYALILTREQGYPSVFYGDYYGIPTHSVPAMKAKIDPILEARQNFAYGTQHDYFDHHNIIGWTREGNTTHPNSGLATIMSDGPGGEKWMYVGQNKAGQVWHDITGNKPGTVTINADGWANFSVNGGSVSIWVKR

SEQ ID NO: 17056 - protein, 485 aa, Unidentified
HHNGTNGTMMQYFEWHLPNDGNHWNRLRDDASNLRNRGITAIWIPPAWKGTSQNDVGYGAYDLYDLGEFNQKGTVRTKYGTRSQLESAIHALKNNGVQVYGDVVMNHKGGADATENVLAVEVNPNNRNQEISGDYTIEAWTKFDFPGRGNTYSDFKWRWYHFDGVDWDQSRQFQNRIYKFRGDGKAWDWEVDSENGNYDYLMYADVDMDHPEVVNELRRWGEWYTNTLNLDGFRIDAVKHIKYSFTRDWLTHVRNATGKEMFAVAEFWKNDLGALENYLSKTNWNHSVFDVPLHYNLYNASNSGGNYDMAKLLNGTVVQKHPMHAVTFVDNHDSQPGESLESFVQEWFKPLAYALILTREQGYPSVFYGDYYGIPTHSVPAMKAKIDPILEARQNFAYGTQHDYFDHHNIIGWTREGNTTHPNSGLATIMSDGPGGEKWMYVGQNKAGQVWHDITGNKPGTVTINADGWANFSVNGGSVSIWVKR

SEQ ID NO: 17057 - protein, 485 aa, Unidentified
HHNGTNGTMMQYFEWHLPNDGNHWNRLRDDASNLRNRGITAIWIPPAWKGTSQNDVGYGAYDLYDLGEFNQKGTVRTKYGTRSQLESAIHALKNNGVQVYGDVVMNHKGGADATENVLAVEVNPNNRNQEISGDYTIEAWTKFDFPGRGNTYSDFKWRWYHFDGVDWDQSRQFQNRIYKFRGDGKAWDWEVDSENGNYDYLMYADVDMDHPEVVNELRRWGEWYTNTLNLDGFRIDAVKHIKYSFTRDWLTHVRNATGKEMFAVAEFWKNDLGALENYLNKTNWNHSVFDVPLHYNLYNASNSGGNYDMAKLLNGTVVQKHPMHAVTFVDNHDSQPGESLESFVQEWFKPLAYALILTREQGYPSVFYGDYYGIPTHSVPAMKAKIDPILEARQNTAYGTQHDYFDHHNIIGWTREGNTTHPNSGLATIMSDGPGGEKWMYVGQNKAGQVWHDITGNKPGTVTINADGWANFSVNGGSVSIWVKR

SEQ ID NO: 17058 - protein, 485 aa, Unidentified
HHNGTNGTMMQYFEWHLPNDGNHWNRLRDDASNLRNRGITAIWIPPAWKGTSQNDVGYGAYDLYDLGEFNQKGTVRTKYGTRSQLESAIHALKNNGVQVYGDVVMNHKGGADATENVLAVEVNPNNRNQEISGDYTIEAWTKFDFPGRGNTYSDFKWRWYHFDGVDWDQSRQFQNRIYKFRGDGKAWDWEVDSENGNYDYLMYADVDMDHPEVVNELRRWGEWYTNTLNLDGFRIDAVKHIKYSFTRDWLTHVRNATGKEMFAVAEFWKNDLGALENYLNKTNWNHIVFDVPLHYNLYNASNSGGNYDMAKLLNGTVVQKHPMHAVTFVDNHDSQPGESLESFVQEWFKPLAYALILTREQGYPSVFYGDYYGIPTHSVPAMKAKIDPILEARQNFAYGTQHDYFDHHNIIGWTREGNTTHPNSGLATIMSDGPGGEKWMYVGQNKAGQVWHDITGNKPGTVTINADGWANFSVNGGSVSIWVKR

SEQ ID NO: 17059 - protein, 485 aa, Unidentified
HHNGTNGTMMQYFEWHLPNDGNHWNRLRDDASNLRNRGITAIWIPPAWKGTSQNDVGYGAYDLYDLGEFNQKGTVRTKYGTRSQLESAIHALKNNGVQVYGDVVMNHKGGADATENVLAVEVNPNNRNQEISGDYTIEAWTKFDFPGRGNTYSDFKWRWYHFDGVDWDQSRQFQNRIYKFRGDGKAWDWEVDSENGNYDYLMYADVDMDHPEVVNELRRWGEWYTNTLNLDGFRIDAVKHIKYSFTRDWLTHVRNATGKEMFAVAEFWKNDLGALENYLNKTNWNHSVFDVPLHYNLYNASNSGGNYDMDKLLNGTVVQKHPMHAVTFVDNHDSQPGESLESFVQEWFKPLAYALILTREQGYPSVFYGDYYGIPTHSVPAMKAKIDPILEARQNFAYGTQHDYFDHHNIIGWTREGNTTHPNSGLATIMSDGPGGEKWMYVGQNKAGQVWHDITGNKPGTVTINADGWANFSVNGGSVSIWVKR

SEQ ID NO: 17060 - protein, 485 aa, Unidentified
HHNGTNGTMMQYFEWHLPNDGNHWNRLRDDASNLRNRGITAIWIPPAWKGTSQNDVGYGAYDLYDLGEFNQKGTVRTKYGTRSQLESAIHALKNNGVQVYGDVVMNHKGGADATENVLAVEVNPNNRNQEYSGDYTIEAWTKFDFPGRGNTYSDFKWRWYHFDGVDWDQSRQFQNRIYKFRGDGKAWDWEVDSENGNYDYLMYADVDMDHPEVVNELRRWGEWYTNTLNLDGFRIDAVKHIKYSFTRDWLTHVRNATGKEMFAVAEFWKNDLGALENYLNKTNWNHSVFDVPLHYNLYNASNSGGNYDMAKLLNGTVVQKHPMHAVTFVDNHDSQPGESLESFVQEWFKPLAYALILTREQGYPSVFYGDYYGIPTHSVPAMKAKIDPILEARQNFAYGTQHDYFDHHNIIGWTREGNTTHPNSGLATIMSDGPGGEKWMYVGQNKAGQVWHDITGNKPGTVTINADGWANFSVNGGSVSIWVKR

SEQ ID NO: 17061 - protein, 485 aa, Unidentified
HHNGTNGTMMQYFEWHLPNDGNHWNRLRDDASNLRNRGITAIWIPPAWKGTSQNDVGYGAYDLYDLGEFNQKGTVRTKYGTRSQLESAIHALKNNGVRVYGDVVMNHKGGADATENVLAVEVNPNNRNQEISGDYTIEAWTKFDFPGRGNTYSDFKWRWYHFDGVDWDQSRQFQNRIYKFRGDGKAWDWEVDSENGNYDYLMYADVDMDHPEVVNELRRWGEWYTNTLNLDGFRIDAVKHIKYSFTRDWLTHVRNATGKEMFAVAEFWKNDLGALENYLNKTNWNHSVFDVPLHYNLYNASNSGGNYDMAKLLNGTVVQKHPMHAVTFVDNHDSQPGESLESFVQEWFKPLAYALILTREQGYPSVFYGDYYGIPTHSVPAMKAKIDPILEARQNFAYGTQHDYFDHHNIIGWTREGNTTHPNSGLATIMSDGPGGEKWMYVGQNKAGQVWHDITGNKPGTVTINADGWANFSVNGGSVSIWVKR

SEQ ID NO: 17062 - protein, 485 aa, Unidentified
HHNGTNGTMMQYFEWHLPNDGNHWNRLRDDASNLRNRGITAIWIPPAWKGTSQNDVGYGAYDLYDLGEFNQKGTVRTKYGTRSQLESAIHALKNNGVQVYGDVVMNHKGGADATENVLAVEVNPNNRNQEISGDYTIEAWTKFDFPGRGNTYSDFKWRWYHFDGVDWDQSRQFQNRIYKFRGDGKAWDWEVDSENGNYDYLMYADVDMDHPEVVNELRRWGEWYTNTLNLDGFRIDAVKHIKYSFTRDWLTHVRNATGKEMFAVAEFWKNDLGALENYLNKTNWNHSVFDVPLHYNLYNASNSGGNYDMAKLLNGTVVQKFPMHAVTFVDNHDSQPGESLESFVQEWFKPLAYALILTREQGYPSVFYGDYYGIPTHSVPAMKAKIDPILEARQNFAYGTQHDYFDHHNIIGWTREGNTTHPNSGLATIMSDGPGGEKWMYVGQNKAGQVWHDITGNKPGTVTINADGWANFSVNGGSVSIWVKR

SEQ ID NO: 17063 - protein, 485 aa, Unidentified
HHNGTNGTMMQYFEWHLPNDGNHWNRLRDDASNLRNRGITAIWIPPAWKGTSQNDVGYGAYDLYDLGEFNQKGTVRTKYGTRSQLESAIHALKNNGVQVYGDVVMNHKAGADATENVLAVEVNPNNRNQEISGDYTIEAWTKFDFPGRGNTYSDFKWRWYHFDGVDWDQSRQFQNRIYKFRGDGKAWDWEVDSENGNYDYLMYADVDMDHPEVVNELRRWGEWYTNTLNLDGFRIDAVKHIKYSFTRDWLTHVRNATGKEMFAVAEFWKNDLGALENYLNKTNWNHSVFDVPLHYNLYNASNSGGNYDMAKLLNGTVVQKHPMHAVTFVDNHDSQPGESLESFVQEWFKPLAYALILTREQGYPSVFYGDYYGIPTHSVPAMKAKIDPILEARQNFAYGTQHDYFDHHNIIGWTREGNTTHPNSGLATIMSDGPGGEKWMYVGQNKAGQVWHDITGNKPGTVTINADGWANFSVNGGSVSIWVKR

SEQ ID NO: 17064 - protein, 485 aa, Unidentified
HHNGTNGTMMQYFEWHLPNDGNHWNRLRDDASNLRNRGITAIWIPPAWKGTSQNDVGYGAYDLYDLGEFNQKGTVRTKYGTRSQLESAIHALKNNGVQVYGDVVMNHKGGADATENVLAVEVNPNNRNQEISGDYTIEAWTKFDFPGRGNTYSDFKWRWYHFDGVDWDQSRQFQNRIYKFRGDGKAWDWEVDSENGNYDYLMYADVDMDHPEVVNELRRWGEWYTNTLNLDGFRIDAVKHIKYSFTRDWLTHSRNATGKEMFAVAEFWKNDLGALENYLNKTNWNHSVFDVPLHYNLYNASNSGGNYDMAKLLNGTVVQKHPMHAVTFVDNHDSQPGESLESFVQEWFKPLAYALILTREQGYPSVFYGDYYGIPTHSVPAMKAKIDPILEARQNFAYGTQHDYFDHHNIIGWTREGNTTHPNSGLATIMSDGPGGEKWMYVGQNKAGQVWHDITGNKPGTVTINADGWANFSVNGGSVSIWVKR

SEQ ID NO: 17065 - protein, 485 aa, Unidentified
HHNGTNGTMMQYFEWHLPNDGNHWNRLRDDASNLRNRGITAIWIPPAWKGTSQNDVGYGAYDLYDLGEFNQKGTVRTKYGTRSQLESAIHALKNNGVQVYGDVVMNHKGGADATENVLAVEVNPNNRNQEISGDYTIEAWTKFDFPGRGNTYSDFKWRWYHFDGVDWDQSRQFQNRIYKFRGDGKAWDWEVDSENGNYDYLMYADVDMDHPEVVNELRRWGEWYTNTLNLDGFRIDAVKHIKYSFTRDWLTHVRNATGKEMFAVAEFWKNDLGALENYLNKTNVNHSVFDVPLHYNLYNASNSGGNYDMAKLLNGTVVQKHPMHAVTFVDNHDSQPGESLESFVQEWFKPLAYALILTREQGYPSVFYGDYYGIPTHSVPAMKAKIDPILEARQNFAYGTQHDYFDHHNIIGWTREGNTTHPNSGLATIMSDGPGGEKWMYVGQNKAGQVWHDITGNKPGTVTINADGWANFSVNGGSVSIWVKR

SEQ ID NO: 17066 - protein, 485 aa, Unidentified
HHNGTNGTMMQYFEWHLPNDGNHWNRLRDDASNLRNRGITAIWIPPAWKGTSQNDVGYGAYDLYDLGEFNQKGTVRTKYGTRSQLESAIHALKNNGVQVYGDVVMNHKGGADATENVLAVEVNPNNRNQEISGDYTIEAWTKFDFPGRGNTYSDFKWRWYHFDGVDWDQSRQFQNRIYKFRGDGKAWDWEVDSENGNYDYLMYADVDMDHPEVVNELRRWGEWYTNTLNLDGFRIDAVKHIKYSFTRDWLTHVRNATGKEMFAVAEFWKNDLGALENYLNKTNWNHSVFDVPLHYNLYNASNSGGNYDMNKLLNGTVVQKHPMHAVTFVDNHDSQPGESLESFVQEWFKPLAYALILTREQGYPSVFYGDYYGIPTHSVPAMKAKIDPILEARQNFAYGTQHDYFDHHNIIGWTREGNTTHPNSGLATIMSDGPGGEKWMYVGQNKAGQVWHDITGNKPGTVTINADGWANFSVNGGSVSIWVKR

SEQ ID NO: 17067 - protein, 485 aa, Unidentified
HHNGTNGTMMQYFEWHLPNDGNHWNRLRDDASNLRNRGITAIWIPPAWKGTSQNDVGYGAYDLYDLGEFNQKGTVRTKYGTRSQLESAIHALKNNGVQVYGDVVMNHKGGADATENVLAVEVNPNNRNQEISGDYTIEAWTKFDFPGRGNTYSDFKWRWYHFDGVDWDQSRQFQNRIYKFRGDGKAWDWEVDSENGNYDYLMYADVDMDHPEVVNELRRWGEWYTNTLNLDGFRIDAVKHIKYSFTRDWLTHVRNATGKEMFAVAEFWKNDLGALENYLNKTNWNHSVFDVPLHYNLYNASNSGGNYDMAKLLNGTVVQKHPMHAVTFVDNHDSQPGESLESFVQEWFKPLAYALILTREQGYPSVFYGDYYGIPTHSVPAMKAKIDPILEARQNFAYGTQHDYFDHHNIIGWTREGNTTHPNSGLATIMSDGPGGEQWMYVGQNKAGQVWHDITGNKPGTVTINADGWANFSVNGGSVSIWVKR

SEQ ID NO: 17068 - protein, 485 aa, Unidentified
HHNGTNGTMMQYFEWHLPNDGNHWNRLRDDASNLRNRGITNIWIPPAWKGTSQNDVGYGAYDLYDLGEFNQKGTVRTKYGTRSQLESAIHALKNNGVQVYGDVVMNHKGGADATENVLAVEVNPNNRNQEISGDYTIEAWTKFDFPGRGNTYSDFKWRWYHFDGVDWDQSRQFQNRIYKFRGDGKAWDWEVDSENGNYDYLMYADVDMDHPEVVNELRRWGEWYTNTLNLDGFRIDAVKHIKYSFTRDWLTHVRNATGKEMFAVAEFWKNDLGALENYLNKTNWNHSVFDVPLHYNLYNASNSGGNYDMAKLLNGTVVQKHPMHAVTFVDNHDSQPGESLESFVQEWFKPLAYALILTREQGYPSVFYGDYYGIPTHSVPAMKAKIDPILEARQNFAYGTQHDYFDHHNIIGWTREGNTTHPNSGLATIMSDGPGGEKWMYVGQNKAGQVWHDITGNKPGTVTINADGWANFSVNGGSVSIWVKR

SEQ ID NO: 17069 - protein, 485 aa, Unidentified
HHNGTNGTMMQYFEWHLPNDGNHWNRLRDDASNLRNRGITAIWIPPAWKGTSQNDVGYGAYDLYDLGEFNQKGTVRTKYGTRSQLESAIHALKNNGVQVYGDVVMNHKGGADATENVLAVEVNPNNRNQEISGDYTIEAWTKFDFPGRGNTYSDFKWRWYHFDGVDWDQSRQFQNRIYKFRGDGKAWDWEVDSENGNYDYLMYADVDMDHPEVVNELRRWGEWYTNTLNLDGFRIDAVKHIKYSFTRDWLTHVRNATGKEMFAVAEFWKNDLGALENYLNKTNWNHSVFDVPLHYNLYNASNSGGNYDMAKLLNGTVVQKHPMHAVTFVDNHDSQPGESLESFVQEWFKPLAYALILTREQGYPSVFTGDYYGIPTHSVPAMKAKIDPILEARQNFAYGTQHDYFDHHNIIGWTREGNTTHPNSGLATIMSDGPGGEKWMYVGQNKAGQVWHDITGNKPGTVTINADGWANFSVNGGSVSIWVKR

SEQ ID NO: 17070 - protein, 485 aa, Unidentified
HHNGTNGTMMQYFEWHLPNDGNHWNRLRDDASNLRNRGITAIWIPPAWKGTSQNDVGYGAYDLYDLGEFNQKGTVRTKYGTRSQLESAIHALKNNGVQVYGDVVMNHKGGADATENVLAVEVNPNNRNQEISGDYTIEAWTKFDFPGRGNTYSDFKWRWYHFDGVDWDQSRQFQNRIYKFRGDGKAWDWEVDSENGNYDYLMYADVDMDHPEVVNELRRWGEWYTNTLNLDGFRIDAVKHIKYSFTRDWLTHVRNATGKEMFAVAEFWKNDLGALENYLNKTNWNHSVFDVPLHYNLYNASNSGGNYDMAKLLNGTVVQKHPMHAVTFVDNHDSQPGESLESFVQEWFKPLAYALILTREQGYPSVFYGDYYGIPTHSVPAMKAKIDPILEARQNFAYGTQHDYFDHHNIIGWTREGNTTHPNSGLATIMSDGPGGEKWMYVGQNKAGQVWHDITGNKPGTVTIPADGWANFSVNGGSVSIWVKR

SEQ ID NO: 17071 - protein, 485 aa, Unidentified
HHNGTNLTMMQYFEWHLPNDGNHWNRLRDDASNLRNRGITAIWIPPAWKGTSQNDVGYGAYDLYDLGEFNQKGTVRTKYGTRSQLESAIHALKNNGVQVYGDVVMNHKGGADATENVLAVEVNPNNRNQEISGDYTIEAWTKFDFPGRGNTYSDFKWRWYHFDGVDWDQSRQFQNRIYKFRGDGKAWDWEVDSENGNYDYLMYADVDMDHPEVVNELRRWGEWYTNTLNLDGFRIDAVKHIKYSFTRDWLTHVRNATGKEMFAVAEFWKNDLGALENYLNKTNWNHSVFDVPLHYNLYNASNSGGNYDMAKLLNGTVVQKHPMHAVTFVDNHDSQPGESLESFVQEWFKPLAYALILTREQGYPSVFYGDYYGIPTHSVPAMKAKIDPILEARQNFAYGTQHDYFDHHNIIGWTREGNTTHPNSGLATIMSDGPGGEKWMYVGQNKAGQVWHDITGNKPGTVTINADGWANFSVNGGSVSIWVKR

SEQ ID NO: 17072 - protein, 485 aa, Unidentified
HHNGTNGTMMQYFEWHLPNDGNHWNRLRDDASNLRNRGITAIWIPPAWKGTSQNDVGYGAYDLYDLGEFNQKGTVRTKYGTRSQLESAIHALKNNGVQVYGDVVMNHKGGADATENVLAVEVNPNNRNQEISGDYTIEAWTKFDFPGRGNTYSDFKWRWYHFDGVDWDQSRQFQNRIYKFRGDGKAWDWEVDSENGNYDYLMYADVDMDHPEVVNELRRWGEWYTNTLNLDGFRIDAVKHIKYSFTRDWLTHVRNATGKEMFAVAEFWKNDLGALENYLNKTNWNHSVFDVPLHYNLYNASNSGGNYDMAKLLNGTVVQKHPMHAVTFVDNHDSQPGESLESFVQEWFKPLAYALILTREQGYPSVFYGDYYGIPTHSVPAMKAKIDPILEARQNFAYGTQHDYFDHHNIIGWTLEGNTTHPNSGLATIMSDGPGGEKWMYVGQNKAGQVWHDITGNKPGTVTINADGWANFSVNGGSVSIWVKR

SEQ ID NO: 17073 - protein, 485 aa, Unidentified
HHNGTNGTMMQYFEWHLPNDGNHWNRLRDDASNLRNRGITAIWIPPAWKGTSQNDVGYGAYDLYDLGEFNQKGTVRTKYGTRSQLESAIHALKNNGVQVYGDVVMNHKGGADATENVLAVEVNPNNRNQEISGDYTIEAWTKFDFPGRGNTYSDFKWRWYHFDGVDWDQSRQFQNRIYKFRGDGKAWDWEVDSENGNYDYLMYADVDMDHPEVVNELRRWGEWYTNTLNLDGFRIDAVKHIKYSFTRDWLTHVRNATGKEMFAVAEFWKNDLGALENYLNKTNWNHSVFDVPLHYNLYNASNSGGNYDMAKLLNGTVVQKHPMHAVTFVDNHDSQPGESLESFVQEWFKPLAYALILTREQGYPSVFYGDYYGIPTHSVPAMKAKIDPILEARQNFAYGTQHDYFDHHNIIGWTREGNTTHPNSGLATIMSDGPGGEIWMYVGQNKAGQVWHDITGNKPGTVTINADGWANFSVNGGSVSIWVKR

SEQ ID NO: 17074 - protein, 485 aa, Unidentified
HHNGTNGTMMQYFEWHLPNDGNHWNRLRDDASNLRNRGITAIWIPPAWKGTSQNDVGYGAYDLYDLGEFNQKGTVRTKYGTRSQLESAIHALKNNGVQVYGDVVMNHKGGADATENVLAVEVNPNNRNQEISGDYTIEAWTKFDFPGRGNTYSDFKWRWYHFDGVDWDQSRQFQNRIYKFRGDGKAWDWEVDSENGNYDYLMYADVDMDHPEVVNELRRWGEWYTNTLNLDGFRIDAVKHIKYSFTRDWLTHVRNATGKEMFAVAEFWKNDLGALENYLNKTNWNHSVFDVPLHYNLYNASNSGGNYDMAKLLNGTVVQKHPMHAVTFVDNHDSQPGESLESFVQEWFKPLAYALILTREQGYPSVFYGDYYGIPTHSVPAMKAKIDPILEARQNFAYGTQHDYFDHHNIIGWTREGNTTHPNSGLATIMSDGPGGEKWMYVGQNKAGQVWHDITGNKPGTVTINADGWANFSVAGGSVSIWVKR

SEQ ID NO: 17075 - protein, 485 aa, Bacillus sp.
HHNGTNGTMMQYFEWHLPNDGNHWNRLRDDASNLRNRGITAIWIPPAWKGTSQNDVGYGAYDLYDLGEFNQKGTVRTKYGTRSQLESAIHALKNNGVQVYGDVVMNHKGGADATENVLAVEVNPNNRNQEISGDYTIEAWTKFDFPGRGNTYSDFKWRWYHFDGVDWDQSRQFQNRIYKFRGDGKAWDWEVDSENGNYDYLMYADEDMDHPEVVNELRRWGEWYTNTLNLDGFRIDAVKHIKYSFTRDWLTHVRNATGKEMFAVAEFWKNDLGALENYLNKTNWNHSVFDVPLHYNLYNASNSGGNYDMAKLLNGTVVQKHPMHAVTFVDNHDSQPGESLESFVQEWFKPLAYALILTREQGYPSVFYGDYYGIPTHSVPAMKAKIDPILEARQNFAYGTQHDYFDHHNIIGWTREGNTTHPNSGLATIMSDGPGGEKWMYVGQNKAGQVWHDITGNKPGTVTINADGWANFSVNGGSVSIWVKR

SEQ ID NO: 17076 - protein, 485 aa, Unidentified
HHNGTNGTMMQYFEWHLPNDGNHWNRLRDDASNLRNRGITAIWIPPAWKGTSQNDVGYGAYDLYDLGEFNQKGTVRTKYGTRSQLESAIHALKNNGVQVYGDVVMNHKGGADATENVLAVEVNPNNRNQEISGDYTIEAWTKFDFPGRGNTYSDFKWRWYHFDGVDWDQSRQFQNRIYKFRGDGKAWDWEVDSENGNYDYLMYADVDMDHPEVVNELRRWGEWYTNTLNLDGFRIDAVKHIKYSFTRDWLTHVRNATGKEMFAVAEFWKNDLGALENYLNKTNWNHSVFDVPLHYNLYNASNSGGNYDMAKLLNGTVVQKHPMHAVTFVDNHDSQPGESLESFVQEWFKPLAYALILTRENGYPSVFYGDYYGIPTHSVPAMKAKIDPILEARQNFAYGTQHDYFDHHNIIGWTREGNTTHPNSGLATIMSDGPGGEKWMYVGQNKAGQVWHDITGNKPGTVTINADGWANFSVNGGSVSIWVKR

SEQ ID NO: 17077 - protein, 485 aa, Unidentified
HHNGTNGTMMQYFEWHLPNDGNHWNRLRDDASNLRNRGITAIWIPPAWKGTSQNDVGYGAYDLYDLGEFNFKGTVRTKYGTRSQLESAIHALKNNGVQVYGDVVMNHKGGADATENVLAVEVNPNNRNQEISGDYTIEAWTKFDFPGRGNTYSDFKWRWYHFDGVDWDQSRQFQNRIYKFRGDGKAWDWEVDSENGNYDYLMYADVDMDHPEVVNELRRWGEWYTNTLNLDGFRIDAVKHIKYSFTRDWLTHVRNATGKEMFAVAEFWKNDLGALENYLNKTNWNHSVFDVPLHYNLYNASNSGGNYDMAKLLNGTVVQKHPMHAVTFVDNHDSQPGESLESFVQEWFKPLAYALILTREQGYPSVFYGDYYGIPTHSVPAMKAKIDPILEARQNFAYGTQHDYFDHHNIIGWTREGNTTHPNSGLATIMSDGPGGEKWMYVGQNKAGQVWHDITGNKPGTVTINADGWANFSVNGGSVSIWVKR

SEQ ID NO: 17078 - protein, 485 aa, Unidentified
HHNGTNGTMMQYFEWHLPNDGNHWNRLRDDASNLRNRGITAIWIPPAWKGTSQNDVGYGAYDLYDLGEFNQKGTVRTKYGTRSQLESAIHALKNNGVQVYGDVVMNHKGGADATENVLAVEVNPNNRNQEISGDYTIEAWTKFDFPGRGNTYSDFKWRWYHFDGVDWDQSRQFQNRIYKFRGDGKAWDWEVDSENGNYDYLMYADVDMDHPEVVNELRRWGEWYTNTLNLDGFRIDAVKHIKYSFTRDWLTHVRNATGKEMFAVAEFWKNDLGALENYLPKTNWNHSVFDVPLHYNLYNASNSGGNYDMAKLLNGTVVQKHPMHAVTFVDNHDSQPGESLESFVQEWFKPLAYALILTREQGYPSVFYGDYYGIPTHSVPAMKAKIDPILEARQNFAYGTQHDYFDHHNIIGWTREGNTTHPNSGLATIMSDGPGGEKWMYVGQNKAGQVWHDITGNKPGTVTINADGWANFSVNGGSVSIWVKR

SEQ ID NO: 17079 - protein, 485 aa, Unidentified
HHNGTNGTMMQYFEWHLPNDGNHWNRLRDDASNLRNRGITAIEIPPAWKGTSQNDVGYGAYDLYDLGEFNQKGTVRTKYGTRSQLESAIHALKNNGVQVYGDVVMNHKGGADATENVLAVEVNPNNRNQEISGDYTIEAWTKFDFPGRGNTYSDFKWRWYHFDGVDWDQSRQFQNRIYKFRGDGKAWDWEVDSENGNYDYLMYADVDMDHPEVVNELRRWGEWYTNTLNLDGFRIDAVKHIKYSFTRDWLTHVRNATGKEMFAVAEFWKNDLGALENYLNKTNWNHSVFDVPLHYNLYNASNSGGNYDMAKLLNGTVVQKHPMHAVTFVDNHDSQPGESLESFVQEWFKPLAYALILTREQGYPSVFYGDYYGIPTHSVPAMKAKIDPILEARQNFAYGTQHDYFDHHNIIGWTREGNTTHPNSGLATIMSDGPGGEKWMYVGQNKAGQVWHDITGNKPGTVTINADGWANFSVNGGSVSIWVKR

SEQ ID NO: 17080 - protein, 485 aa, Unidentified
HHNGTNWTMMQYFEWHLPNDGNHWNRLRDDASNLRNRGITAIWIPPAWKGTSQNDVGYGAYDLYDLGEFNQKGTVRTKYGTRSQLESAIHALKNNGVQVYGDVVMNHKGGADATENVLAVEVNPNNRNQEISGDYTIEAWTKFDFPGRGNTYSDFKWRWYHFDGVDWDQSRQFQNRIYKFRGDGKAWDWEVDSENGNYDYLMYADVDMDHPEVVNELRRWGEWYTNTLNLDGFRIDAVKHIKYSFTRDWLTHVRNATGKEMFAVAEFWKNDLGALENYLNKTNWNHSVFDVPLHYNLYNASNSGGNYDMAKLLNGTVVQKHPMHAVTFVDNHDSQPGESLESFVQEWFKPLAYALILTREQGYPSVFYGDYYGIPTHSVPAMKAKIDPILEARQNFAYGTQHDYFDHHNIIGWTREGNTTHPNSGLATIMSDGPGGEKWMYVGQNKAGQVWHDITGNKPGTVTINADGWANFSVNGGSVSIWVKR

SEQ ID NO: 17081 - protein, 485 aa, Unidentified
HHNGTNGTMMQYFEWHLPNDGNHWNRLRDDASNLRNRGITAIWIPPAWKGTSQNDVGYGAYDLYDLGEFNQKGTVRTKYGTRSQLESAIHALKNNGVQVYGDVVMNHKGGADATENVLAVEVNPNNRNQEISGDYTIEAWTKFDFPGRGNTYSDFKWRWYHFDGVDWDQSRQFQNRIYKFRGDGKAWDWEVDSENGNYDYLMYADVDMDHPEVVNELRRWGEWYTNTLNLDGFRIDAVKHIKYSFTRDWLTHVRNATGKEMFAVAEFWKNDLGALENYLNKTNWNHSVFDVPLHYNLYNASNSGGNYDMAKLLNGTVVQKHPMHAVTFVDNHDSQPGESLESFVQEWFKPLAYALILTREQGYPSVFYGDYYGIPTHSVPAMKAKIDPILEARQNFAYGTQHDYFDHHNIIGWTREGNTTHPNSGLATIMSDSPGGEKWMYVGQNKAGQVWHDITGNKPGTVTINADGWANFSVNGGSVSIWVKR

SEQ ID NO: 17082 - protein, 485 aa, Unidentified
HHNGTNGTMMQYFEWHLPNDGNHWNRLRDDASNLRNRGITAIWIPPAWKGTSQNDVGYGAYDLYDLGEFNQKGTVRTKYGTRSQLESAIHALKNNGVQVYGDVVMNHKGGADATENVLAVEVNPNNRNQEISGDYTIEAWTKFDFPGRGNTYSDFKWRWYHFDGVDWDQSRQFQNRIYKFRGDGKAWDWEVDSENGNYDYLMYADVDMDHPEVVNELRRWGEWYTNTLNLDGFRIDAVKHIKYSFTRDWLTHVRNATGKEMFAVAEFWKNDLGALENYLNKTNWNHSVFDVPLHYNLYNASNSGGNYDMAKLLNGTVVQKHPCHAVTFVDNHDSQPGESLESFVQEWFKPLAYALILTREQGYPSVFYGDYYGIPTHSVPAMKAKIDPILEARQNFAYGTQHDYFDHHNIIGWTREGNTTHPNSGLATIMSDGPGGEKWMYVGQNKAGQVWHDITGNKPGTVTINADGWANFSVNGGSVSIWVKR

SEQ ID NO: 17083 - protein, 485 aa, Unidentified
HHNGTNGTMMQYFEWHLPNDGNHWNRLRDDASNLRNRGITAIWIPPAWKGTSQNDVGYGAYDLYDLGEFNQKGTVRTKYGTRSQLESAIHALKNNGVQVYGDVVMNHKGGADATENVLAVEVNPNNRNQEISGDYTIEAWTKFDFPGRGNTYSDFKWRWYHFDGVDWDQSRQFQNRIYKFRGDGKAWDWEVDSENGNYDYLMYADVDMDHPEVVNELRRWGEWYTNTLNLDGFRIDAVKHIKYSFTRDWLTHVRNATGKEMFAVAEFWKNDLGALENYLNKTNWNHSVFDVPLHYNLYNASNSGGNYDMAKLLNGTVVQKHPMHAVTFVDNHDSQPGESLESFVQEWFKPLAYALILTREQGYPSVFYGDYYGIPTHSVPAMKAKIDPILEARQNFAYGTQHDYFDHHNIIGWTREGNTTHPNSGLATIMSDGPGGEKWMYVGQNKAGQVWHDITGNKPGTVTINADGWANFSVNGASVSIWVKR

SEQ ID NO: 17084 - protein, 485 aa, Unidentified
HHNGTNGTMMQYFEWHLPNDGNHWNRLRDDASNLRNRGITAIWIPPAWKGTSQNDVGYGAYDLYDLGEFNQKGTVRTKYGTRSQLESAIHALKNNGVQVYGDVVMNHKGGADATENVLAVEVNPNNRNQEISGDYTIEAWTKFDFPGRGNTYSDFKWRWYHFDGVDWDQSRQFQNRIYKFRGDGKAWDWEVDSENGNYDYLMYADVDMDHPEVVNELRRWGEWYTNTLNLDGFRIDAVKHIKYSFTRDWLTHVRNATGKEMFAVAEFWKNDLGALENYLNKTNWNHSVFDVPLHYNLYNASNSGGNYDMAKLLNGTVVQKHPTHAVTFVDNHDSQPGESLESFVQEWFKPLAYALILTREQGYPSVFYGDYYGIPTHSVPAMKAKIDPILEARQNFAYGTQHDYFDHHNIIGWTREGNTTHPNSGLATIMSDGPGGEKWMYVGQNKAGQVWHDITGNKPGTVTINADGWANFSVNGGSVSIWVKR

SEQ ID NO: 17085 - protein, 485 aa, Unidentified
HHNGTNGTMMQYFEWHLPNDGNHWNRLRDDASNLRNRGITAIWIPPAWKGTSQNDVGYGAYDLYDLGEFNQKGTVRTKYGTRSQLESAIHALKNNGVQVYGDVVMNHKGGADATENVLAVEVNPNNRNQEISGDYTIEAWTKFDFPGRGNTYSDFKWRWYHFDGVDWDQSRQFQNRIYKFRGDGKAWDWEVDSENGNYDYLMYADVDMDHPEVVNELRRWGEWYTNTLNLDGFRIDAVKHIKYSFTRDWLTHVRNATGKEMFAVAEFWKNDLGALENYLNKTNWNHSVFDVPLHYNLYNASNSGGNYDMAKLLNGTVVQKHPMHAVTFVDNHDSQPGESLESFVQEWFKPLAYALILTRESGYPSVFYGDYYGIPTHSVPAMKAKIDPILEARQNFAYGTQHDYFDHHNIIGWTREGNTTHPNSGLATIMSDGPGGEKWMYVGQNKAGQVWHDITGNKPGTVTINADGWANFSVNGGSVSIWVKR

SEQ ID NO: 17086 - protein, 485 aa, Unidentified
HHNGTNGTMMQYFEWHLPNDGNHWNRLRDDASNLRNRGITKIWIPPAWKGTSQNDVGYGAYDLYDLGEFNQKGTVRTKYGTRSQLESAIHALKNNGVQVYGDVVMNHKGGADATENVLAVEVNPNNRNQEISGDYTIEAWTKFDFPGRGNTYSDFKWRWYHFDGVDWDQSRQFQNRIYKFRGDGKAWDWEVDSENGNYDYLMYADVDMDHPEVVNELRRWGEWYTNTLNLDGFRIDAVKHIKYSFTRDWLTHVRNATGKEMFAVAEFWKNDLGALENYLNKTNWNHSVFDVPLHYNLYNASNSGGNYDMAKLLNGTVVQKHPMHAVTFVDNHDSQPGESLESFVQEWFKPLAYALILTREQGYPSVFYGDYYGIPTHSVPAMKAKIDPILEARQNFAYGTQHDYFDHHNIIGWTREGNTTHPNSGLATIMSDGPGGEKWMYVGQNKAGQVWHDITGNKPGTVTINADGWANFSVNGGSVSIWVKR

SEQ ID NO: 17087 - protein, 485 aa, Unidentified
HHNGTNGTMMQYFEWHLPNDGNHWNRLRDDASNLRNRGITAIWIPPAWKGTSQNDVGYGAYDLYDLGEFNQKGTVRTKYGTRSQLESAIHALKNNGVQVYGDVVMNHKGGADATENVLAVEVNPNNRNQEISGDYTIEAWTKFDFPGRGNTYSDFKWRWYHFDGVDWDQSRQFQNRIYMFRGDGKAWDWEVDSENGNYDYLMYADVDMDHPEVVNELRRWGEWYTNTLNLDGFRIDAVKHIKYSFTRDWLTHVRNATGKEMFAVAEFWKNDLGALENYLNKTNWNHSVFDVPLHYNLYNASNSGGNYDMAKLLNGTVVQKHPMHAVTFVDNHDSQPGESLESFVQEWFKPLAYALILTREQGYPSVFYGDYYGIPTHSVPAMKAKIDPILEARQNFAYGTQHDYFDHHNIIGWTREGNTTHPNSGLATIMSDGPGGEKWMYVGQNKAGQVWHDITGNKPGTVTINADGWANFSVNGGSVSIWVKR

SEQ ID NO: 17088 - protein, 485 aa, Unidentified
HHNGTNGTMMQYFEWHLPNDGNHWNRLRDDASNLRNRGITAIWIPPAWKGTSQNDVGYGAYDLYDLGEFNQKGTVRTKYGTRSQLESAIHALKNNGVQVYGDVVMNHKGGADATENVLAVEVNPNNRNQEISGDYTIEAWTKFDFPGRGNTYSDFKWRWYHFDGVDWDQSRQFQNRIYKFRGDGKAWDWEVDSENGNYDYLMYADVDMDHPEVVNELRRWGEWYTNTLNLDGFRIDAVKHIKYSFTRDWLTHVRNATGKEMFAVAEFWKNDLGALENYLNKTNWNHSVFDVPLHYNLYNASNSGGNYDMAKLLNGTVVQKHPMHAVTFVDNHDSQPGESLESFVQEWFKPLAYALILTREQGYPSVFYGDYYGIPTHSVPAMKAKIDPILEARQNFAYGTQHDYFDHHNIIGWTREGNTTHPWSGLATIMSDGPGGEKWMYVGQNKAGQVWHDITGNKPGTVTINADGWANFSVNGGSVSIWVKR

SEQ ID NO: 17089 - protein, 485 aa, Unidentified
HHNGTNGTMMQYFEWHLPNDGNHWNRLRDDASNLRNRGITAIWIPPAWKGTSQNDVGYGAYDLYDLGEFNQKGTVRTKYGTRSQLESAIHALKNNGVQVYGDVVMNHKGGADATENVLAVEVNPNNRNQEISGDYTIEAWTKFDFPGRGNTYSDFKWRWYHFDGVDWDQSRQFQNRIYKFRGDGKAWDWEVDSENGNYDYLMYADVDMDHPEVVNELRRWGEWYTNTVNLDGFRIDAVKHIKYSFTRDWLTHVRNATGKEMFAVAEFWKNDLGALENYLNKTNWNHSVFDVPLHYNLYNASNSGGNYDMAKLLNGTVVQKHPMHAVTFVDNHDSQPGESLESFVQEWFKPLAYALILTREQGYPSVFYGDYYGIPTHSVPAMKAKIDPILEARQNFAYGTQHDYFDHHNIIGWTREGNTTHPNSGLATIMSDGPGGEKWMYVGQNKAGQVWHDITGNKPGTVTINADGWANFSVNGGSVSIWVKR

SEQ ID NO: 17090 - protein, 485 aa, Unidentified
HHNGTNGTMMQYFEWHLPNDGNHWNRLRDDASNLRNRGITAIWIPPAWKGTSQNDVGYGAYDLYDLGEFNQKGTVRTKYGTRSQLESAIHALKNNGVQVYGDVVMNHKGGADATENVLAVEVNPNNRNQEISGDYTIEAWTKFDFPGRGNTYSDFKWRWYHFDGVDWDQSRQFQNRIYKFRGDGKAWDWEVDSENGNYDYLMYADVDMDHPEVVNELRRWGEWYTNTLNLDGFRIDAVKHIKYSFTRDWLTHVRNATGKEMFAVAEFWKNDLGALENYLNKTNWNHSVFDVPLHYNLYNASNSGGNYDMAKLLNGTVVQKHPMHAVTFVDNHDSQPGESLESFVQEWFKPLAYALILTREQGYPSVFYGDYYGIPTHSVPAMKAKIDPILEARQNFAYGTQHDYFDHHNIIGWTREGNTTHPISGLATIMSDGPGGEKWMYVGQNKAGQVWHDITGNKPGTVTINADGWANFSVNGGSVSIWVKR

SEQ ID NO: 17091 - protein, 485 aa, Unidentified
HHNGTNGTMMQYFEWHLPNDGNHWNRLRDDASNLRNRGITAIWIPPAWKGTSQNDVGYGAYDLYDLGEFNQKGTVRTKYGTRSQLESAIHALKNNGVQVYGDVVMNHKGGADATENVLAVEVNPNNRNQEISGDYTIEAWTKFDFPGRKNTYSDFKWRWYHFDGVDWDQSRQFQNRIYKFRGDGKAWDWEVDSENGNYDYLMYADVDMDHPEVVNELRRWGEWYTNTLNLDGFRIDAVKHIKYSFTRDWLTHVRNATGKEMFAVAEFWKNDLGALENYLNKTNWNHSVFDVPLHYNLYNASNSGGNYDMAKLLNGTVVQKHPMHAVTFVDNHDSQPGESLESFVQEWFKPLAYALILTREQGYPSVFYGDYYGIPTHSVPAMKAKIDPILEARQNFAYGTQHDYFDHHNIIGWTREGNTTHPNSGLATIMSDGPGGEKWMYVGQNKAGQVWHDITGNKPGTVTINADGWANFSVNGGSVSIWVKR

SEQ ID NO: 17092 - protein, 485 aa, Unidentified
HHNGTNGTMMQYFEWHLPNDGNHWNRLRDDASNLRNRGITAIWIPPAWKGTSQNDVGYGAYDLYDLGEFNQKGTVRTKYGTRSQLESAIHALKNNGVQVYGDVVMNHKGGADATENVLAVEVNPNNRNQEISGDYTIEAWTKFDFPGRGNTYSDFKWRWYHFDGVDWDQSRQFQNRIYKFRGDGKAWDWEVDSENGNYDYLMYADVDMDHPEVVNELRRWGEWYTNTLNLDGFRIDAVKHIKYSFTRDWLTHVRNATGKEMFAVAEFWKNDLGALENYLNKTNWNHSVFDVPLHYNLYNASNSGGNYDMAKLLNETVVQKHPMHAVTFVDNHDSQPGESLESFVQEWFKPLAYALILTREQGYPSVFYGDYYGIPTHSVPAMKAKIDPILEARQNFAYGTQHDYFDHHNIIGWTREGNTTHPNSGLATIMSDGPGGEKWMYVGQNKAGQVWHDITGNKPGTVTINADGWANFSVNGGSVSIWVKR

SEQ ID NO: 17093 - protein, 485 aa, Unidentified
HHNGTNGTMMQYFEWHLPNDGNHWNRLRDDASNLRNRGITAIWIPPAWKGTSQNDVGYGAYDLYDLGEFNQKGTVRTKYGTRSQLESAIHALKNNGVQVYGDVVMNHKGGADATENVLAVEVNPNNRNQEISGDYTIEAWTKFDFPGRGNTYSDFKWRWYHFDGVDWDQSRQFQNRIYKFRGDGKAWDWEVDSENGNYDYLMYADVDMDHPEVVNELRRWGEWYTNTLNLDGFRIDAVKHIKYSFTRDWLTHVRNATGKEMFAVAEFWKNDLGALENYLNKTNWNHSVFDVPLHYNLYNASNHGGNYDMAKLLNGTVVQKHPMHAVTFVDNHDSQPGESLESFVQEWFKPLAYALILTREQGYPSVFYGDYYGIPTHSVPAMKAKIDPILEARQNFAYGTQHDYFDHHNIIGWTREGNTTHPNSGLATIMSDGPGGEKWMYVGQNKAGQVWHDITGNKPGTVTINADGWANFSVNGGSVSIWVKR

SEQ ID NO: 17094 - protein, 485 aa, Unidentified
HHNGTNGTMMQYFEWHLPNDGNHWNRLRDDASNLRNRGITAIWIPPAWKGTSQNDVGYGAYDLYDLGEFNQKGTVRTKYGTRSQLESAIHALKNNGVQVYGDVVMNHKGGADATENVLAVEVNPNNRNQEISGDYTIEAWTKFDFPGRGNTYSDFKWRWYHFDGVDWDQSRQFQNRIYKFRGDGKAWDWEVDSENGNYDYLMYADVDMDHPEVVNELRRWGEWYTNTLNLDGFRIDAVKHIKYSFTRDWLTHVRNATGKEMFAVAEFWKNDLGALENYLNKTNWNHSVFDVPLHYNLYNASNSGGNYDMAKLLNGTVVQKHPMHAVTFVDNHDSQPGESLESFVQEWFKPLAYALILTREQGYPSVFYGDYYGIPTHSVPAMKAKIDPILEARQNFAYGTQHDYFDHHNIIGWTREGNTTHPNSGLATIMSDGPGGEKWMYVGQNKDGQVWHDITGNKPGTVTINADGWANFSVNGGSVSIWVKR

SEQ ID NO: 17095 - protein, 485 aa, Unidentified
HHNGTNGTMMQYFEWHLPNDGNHWNRLRDDASNLRNRGITAIWIPPAWKGTSQNDVGYGAYDLYDLGEFNQKGTVRTKYGTRSQLESAIHALKNNGVQVYGDVVMNHKGGADATENVLAVEVNPNNRNQEISGDYTIEAWTKFDFPGRGNTYSDFKWRWYHFDGVDWDQSRQFQNRIYKFRGDGKAWDWEVDSENGNYDYLMYADVDMDHPEVVNELRRWGEWYTNTLNLDGFRIDAVKHIKYSFTRDWLTHVRNATGKEMFAVAEFWKNDLGALENYLNKTNWNHSVFDVPLHYNLYNASNSGGNYDMAKLLNGTVVQKHPMHAVTFVDNHDSQPGESLESFVQEWFKPLAYALILTREQGYPSVFYGDYYGIPTHSVPAMKAKIDPILEAMQNFAYGTQHDYFDHHNIIGWTREGNTTHPNSGLATIMSDGPGGEKWMYVGQNKAGQVWHDITGNKPGTVTINADGWANFSVNGGSVSIWVKR

SEQ ID NO: 17096 - protein, 485 aa, Unidentified
HHNGTNGTMMQYFEWHLPNDGNHWNRLRDDASNLRNRGITAIWIPPAWKGTSQNDVGYGAYDLYDLGEFNQKGTVRTKYGTRSQLESAIHALKNNGVQVYGDVVMNHKGGADATENVLAVEVNPNNRNQEISGDYTIEAWTKFDFPGRGNTYSDFKWRWYHFDGVDWDQSRQFQNRIYKFRGDGKAWDWEVDSENGNYDYLMYADVDMDHPEVVNELRRWGEWYTNTLNFDGFRIDAVKHIKYSFTRDWLTHVRNATGKEMFAVAEFWKNDLGALENYLNKTNWNHSVFDVPLHYNLYNASNSGGNYDMAKLLNGTVVQKHPMHAVTFVDNHDSQPGESLESFVQEWFKPLAYALILTREQGYPSVFYGDYYGIPTHSVPAMKAKIDPILEARQNFAYGTQHDYFDHHNIIGWTREGNTTHPNSGLATIMSDGPGGEKWMYVGQNKAGQVWHDITGNKPGTVTINADGWANFSVNGGSVSIWVKR

SEQ ID NO: 17097 - protein, 485 aa, Bacillus sp.
HHNGTNGTMMQYFEWHLPNDGNHWNRLRDDASNLRNRGITAIWIPPAWKGTSQNDVGYGAYDLYDLGEFNQKGTVRTKYGTRSQLESAIHALKNNGVQVYGDVVMNHKGGADATENVLAVEVNPNNRNQEISGDYTIEAWTKFDFPGRGNTYSDFKWRWYHFDGVDWDQSRQFQNRIYKFRGDGKAWDWEVDSENGLYDYLMYADVDMDHPEVVNELRRWGEWYTNTLNLDGFRIDAVKHIKYSFTRDWLTHVRNATGKEMFAVAEFWKNDLGALENYLNKTNWNHSVFDVPLHYNLYNASNSGGNYDMAKLLNGTVVQKHPMHAVTFVDNHDSQPGESLESFVQEWFKPLAYALILTREQGYPSVFYGDYYGIPTHSVPAMKAKIDPILEARQNFAYGTQHDYFDHHNIIGWTREGNTTHPNSGLATIMSDGPGGEKWMYVGQNKAGQVWHDITGNKPGTVTINADGWANFSVNGGSVSIWVKR

SEQ ID NO: 17098 - protein, 485 aa, Unidentified
HHNGTNGTMMQYFEWHLPNDGNHWNRLRDDASNLRNRGITAIWIPPAWKGTSQNDVGYGAYDLYDLGEFNQKGTVRTKYGTRSQLESAIHALKNNGVQVYGDVVMNHKGGADATENVLAVEVNPNNRNQEISGDYTIEAWTKFDFPGRGNTYSDFKWRWYHFDGVDWDQSRQFQNRIYKFRGDGKAWDWEVDSENGNYDYLMYADVDMDHPEVVNELRRWGEWYTNTLNLDGFRIDAVKHIKYSFTRDWLTHVRNATGKEMFAVAEFWKNDLGALENYLNKTNWNHSVFDVPLHYNLYNASNSGGNYDMAKLQNGTVVQKHPMHAVTFVDNHDSQPGESLESFVQEWFKPLAYALILTREQGYPSVFYGDYYGIPTHSVPAMKAKIDPILEARQNFAYGTQHDYFDHHNIIGWTREGNTTHPNSGLATIMSDGPGGEKWMYVGQNKAGQVWHDITGNKPGTVTINADGWANFSVNGGSVSIWVKR

SEQ ID NO: 17099 - protein, 485 aa, Unidentified
HHNGTNGTMMQYFEWHLPNDGNHWNRLRDDASNLRNRGITAIWIPPAWKGTSQNDVGYGAYDLYDLGEFNQKGTVRTKYGMRSQLESAIHALKNNGVQVYGDVVMNHKGGADATENVLAVEVNPNNRNQEISGDYTIEAWTKFDFPGRGNTYSDFKWRWYHFDGVDWDQSRQFQNRIYKFRGDGKAWDWEVDSENGNYDYLMYADVDMDHPEVVNELRRWGEWYTNTLNLDGFRIDAVKHIKYSFTRDWLTHVRNATGKEMFAVAEFWKNDLGALENYLNKTNWNHSVFDVPLHYNLYNASNSGGNYDMAKLLNGTVVQKHPMHAVTFVDNHDSQPGESLESFVQEWFKPLAYALILTREQGYPSVFYGDYYGIPTHSVPAMKAKIDPILEARQNFAYGTQHDYFDHHNIIGWTREGNTTHPNSGLATIMSDGPGGEKWMYVGQNKAGQVWHDITGNKPGTVTINADGWANFSVNGGSVSIWVKR

SEQ ID NO: 17100 - protein, 485 aa, Unidentified
HHNGTNGTMMQYFEWHLPNDGNHWNRLRDDASNLRNRGITAIWIPPAWKGTSQNDVGYGAYDLYDLGEFNQKGTVRTKYGTRSQLESAIHALKNNGVQVYGDVVMNHKGGADATENVLAVEVNPNNRNQEISGDYTIEAWTKFDFPGRGNTYSDFKWRWYHFDGVDWDQSRQFQNRIYKFRGDGKAWDWEVDSENGNYDYLMYADVDMDHPEVVNELRRWGEWYTNTLNLDGFRIDAVKHIKYSFTRDWLTHVRNATGKEMFAVAEFWKNDLGALENYLNKTNWNHSVFDVPLHYNLYNASNSGGNYDMAKLLNGTVVQKHPMHAVTFVDNHDSQPGESLESFVQEWFKPLAYALILTREQGYPSVFYGDYYGIPTHSVPAMKAKIDPILEARQNFAYGTQHTYFDHHNIIGWTREGNTTHPNSGLATIMSDGPGGEKWMYVGQNKAGQVWHDITGNKPGTVTINADGWANFSVNGGSVSIWVKR

SEQ ID NO: 17101 - protein, 485 aa, Unidentified
HHNGTNGTMMQYFEWHLPNDGNHWNRLRDDASNLRNRGITAIWIPPAWKGTSQNDVGYGAYDLYDLGEFNQKGTVRTKYGTRSQLESAIHALKNNGVQVYGDVVMNHKGGADATENVLAVEVNPNNRNQEISGDYTIEAWTKFDFPGRGNTYSDFKWRWYHFDGVDWDQSRQFQNRIYKFRGDGKAWDWEVDSENGNYDYLMYADVDMDHPEVVNELRRWGEWYTNTLNLDGFRIDAVKHIKYSFTRDWLTHVRNATGKEMFAVAEFWKNDLGALENYLNKTNWNHSVFDVPLHYNLYNASNSGGNYDMAKLLNGTVVQKHPMHAVTFVDNHDSQPGESLESFVQEWFKPLAYALILTREQGYPSVFYGDYYGIPTHSVPAMKNKIDPILEARQNFAYGTQHDYFDHHNIIGWTREGNTTHPNSGLATIMSDGPGGEKWMYVGQNKAGQVWHDITGNKPGTVTINADGWANFSVNGGSVSIWVKR

SEQ ID NO: 17102 - protein, 485 aa, Unidentified
HHNGTNGTMMQYFEWHLPNDGNHWNRLRDDASNLRNRGITAIWIPPAWKGTSQNDVGYGAYDLYDLGEFNQKGTVRTKYGTRSQLESAIHALKNNGVQVYGDVVMNHKGGADATENVLAVEVNPNNRNQEISGDYTIEAWTKFDFPGRGNTYSDFKWRWYHFDGVDWDQSRQFQNRIYKFRGDGKAWDWEVDSENGNYDYLMYADVDMDHPEVVNELRRWGEWYTNTLNLDGFRIDAVKHIKYSFTRDWLTHVRNATGKEMFAVAEFWKNDLGALENYLNKTNWNHSVFDVPLHYNLYNASNSGGNYDMAKLLNGTVVQKHPMHAVTFVDNHDSQPGESLESFVQEWFKPLAYALILTREQGYPSVFYGDYYGIPTHSVPAMKAKIDPILEARQNFAYGTQHDYFDHHNIIGWTREGNTTHPQSGLATIMSDGPGGEKWMYVGQNKAGQVWHDITGNKPGTVTINADGWANFSVNGGSVSIWVKR

SEQ ID NO: 17103 - protein, 485 aa, Unidentified
HHNGTNGTMMQYFEWHLPNDGNHWNRLRDDASNLRNRGITAIWIPPAWKGTSQNDVGYGAYDLYDLGEFNQKGTVRTKYGTRSQLESAIHALKNNGVQVYGDVVMNHKGGADATENVLAVEVNPNNRNQEISGDYTIEAWTKFDFPGRGNTYSDFKWRWYHFDGVDWDQSRQFQNRIYKFRGDGKAWDWEVDSENGNYDYLMYADVDMDHPEVVNELRRWGEWYTNTLNLDGFRIDAVKHIKYSFTRDWLTHVRNATGKEMFAVAEFWKNDLGALENYLNKTNWNHSVFDVPLHYNLYNASNSGGNYDMAKLLNGTVVQKHPWHAVTFVDNHDSQPGESLESFVQEWFKPLAYALILTREQGYPSVFYGDYYGIPTHSVPAMKAKIDPILEARQNFAYGTQHDYFDHHNIIGWTREGNTTHPNSGLATIMSDGPGGEKWMYVGQNKAGQVWHDITGNKPGTVTINADGWANFSVNGGSVSIWVKR

SEQ ID NO: 17104 - protein, 485 aa, Unidentified
HHNGTNGTMMQYFEWHLPNDGNHWNRLRDDASNLRNRGITAIWIPPAWKGTSQNDVGYGAYDLYDLGEFNQKGTVRTKYGTRSQLESAIHALKNNGVQVYGDVVMNHKGGADATENVLAVEVNPNNRNQEISGDYTIEAWTKFDFPGRGNTYSDFKWRWYHFDGVDWDQSRQFQNRIYKFRGDGKAWDWEVDSENGYYDYLMYADVDMDHPEVVNELRRWGEWYTNTLNLDGFRIDAVKHIKYSFTRDWLTHVRNATGKEMFAVAEFWKNDLGALENYLNKTNWNHSVFDVPLHYNLYNASNSGGNYDMAKLLNGTVVQKHPMHAVTFVDNHDSQPGESLESFVQEWFKPLAYALILTREQGYPSVFYGDYYGIPTHSVPAMKAKIDPILEARQNFAYGTQHDYFDHHNIIGWTREGNTTHPNSGLATIMSDGPGGEKWMYVGQNKAGQVWHDITGNKPGTVTINADGWANFSVNGGSVSIWVKR

SEQ ID NO: 17105 - protein, 485 aa, Unidentified
HHNGTNGTMMQYFEWHLPNDGNHWNRLRDDASNLRNRGITAIWIPPAWKGTSQNDVGYGAYDLYDLGEFNQKGTVRTKYGTRSQLESAIHALKNNGVQVYGDVVMNHKGGADATENVLAVEVNPNNRNQEISGDYTIEAWTKFDFPGRGNTYSDFKWRWYHFDGVDWDQSRQFQNRIYKFRGDGKAWDWEVDSENGNYDYLMYADVDMDHPEVVNELRRWGEWYTNTLNLDGFRIDAVKHIKYSFTRDWLTHVRNATGKEMFAVAEFWKNDLGALENYLNKTNWNHSVFDVPLHYNLYNASNSGGNYDMAKLLNGTVVQKHPMHAVTFVDNHDSQPGESLESFVQEWFKPLAYALILTREQGYPSVFYGDYYGIPTHSVPAMKAKIDPILEARQNFAYGTQHDYFDHHNIIGWTREGNTTHPNSGLATIMSDGPGGEKWMYVGQNKAGQVWHDITGNLPGTVTINADGWANFSVNGGSVSIWVKR

SEQ ID NO: 17106 - protein, 485 aa, Unidentified
HHNGTNGTMMQYFEWHLPNDGNHWNRLRDDASNLRNRGITAIWIPPAWKGTSQNDVGYGAYDLYDLGEFNQKGTVRTKYGTRSQLESAIHALKNNGVQVYGDVVMNHKGGADATENVLAVEVNPNNRNQEISGDYTIEAWTKFDFPGRGNTYSDFKWRWYHFDGVDWDQSRQFQNRIYKFRGDGKAWDWEVDSENGNYDYLMYADVDMDHPEVVNELRRWGEWYTNTLNLDGFRIDAVKHIKYSFTRDWLTHVRNATGKEMFAVAEFWKNDLGALENYLNKTNWNHSVFDVPLHYNLYNASNSGGNYDMAKLLNGTVVQKHPMHAVTFVDNHDSQPGESLESFVQEWFKPLAYALILTREQGYPSVFYGDYYGIPTHSVPAMKAKIDPILEARQNFAYGTQHDYFDHHNIIGWTREGNTTHPNSGLATIMSDGPGGEKWMYVGQNKAGQVWHDITGNKPGTCTINADGWANFSVNGGSVSIWVKR

SEQ ID NO: 17107 - protein, 485 aa, Unidentified
HHNGTNGTMMQYFEWHLPNDGNHWNRLRDDASNLRNRGITAIWIPPAWKGTSQNDVGYGAYDLYDLGEFNQKGTVRTKYGTRSQLESAIHALKNNGVQVYGDVVMNHKGGADATENVLAVEVNPNNRNQEISGDYTIEAWTKFDFPGRGNTYSDFKWRWYHFDGVDWDQSRQFQNRIYKFRGDGKAWDWEVDSENGNYDYLMYADVDMDHPEVVNELRRWGEWYTNTLNLDGFRIDAVKHIKYSFTRDWLTHVRNATGKEMFAVAEFWKNDLGALENYLNKTNWNHSVFDVPLHYNLYNASNSGGNYDMAKLLNGTVVQKHPMHAVTFVDNHDSQPGESLESFVQEWFKPLAYALILTREQGYPSVFYGDYYGIPTHSVPAMKAKIDPILEARQNFAYGTQHDYFDHHNIIGWTREGNTTHPHSGLATIMSDGPGGEKWMYVGQNKAGQVWHDITGNKPGTVTINADGWANFSVNGGSVSIWVKR

SEQ ID NO: 17108 - protein, 485 aa, Unidentified
HHNGTNGTMMQYFEWHLPNDGNHWNRLRDDASNLRNRGITAIWIPPAWKGTSQNDVGYGAYDLYDLGEFNQKGTVRTKYGTRSQLESAIHALKNNGVFVYGDVVMNHKGGADATENVLAVEVNPNNRNQEISGDYTIEAWTKFDFPGRGNTYSDFKWRWYHFDGVDWDQSRQFQNRIYKFRGDGKAWDWEVDSENGNYDYLMYADVDMDHPEVVNELRRWGEWYTNTLNLDGFRIDAVKHIKYSFTRDWLTHVRNATGKEMFAVAEFWKNDLGALENYLNKTNWNHSVFDVPLHYNLYNASNSGGNYDMAKLLNGTVVQKHPMHAVTFVDNHDSQPGESLESFVQEWFKPLAYALILTREQGYPSVFYGDYYGIPTHSVPAMKAKIDPILEARQNFAYGTQHDYFDHHNIIGWTREGNTTHPNSGLATIMSDGPGGEKWMYVGQNKAGQVWHDITGNKPGTVTINADGWANFSVNGGSVSIWVKR

SEQ ID NO: 17109 - protein, 485 aa, Unidentified
HHNGTNGTMMQYFEWHLPNDGNHWNRLRDDASNLRNRGITAIWIPPAWKGTSQNDVGYGAYDLYDLGEFNQKGTVRTKYGTRSQLESAIHALKNNGVQVYGDVVMNHKGGADATENVLAVEVNPNNRNQEISGDYTIEAWTKFDFPGRGNTYSDFKWRWYHFDGVDWDQSRQFQNRIYKFRGDGKAWDWEVDSEYGNYDYLMYADVDMDHPEVVNELRRWGEWYTNTLNLDGFRIDAVKHIKYSFTRDWLTHVRNATGKEMFAVAEFWKNDLGALENYLNKTNWNHSVFDVPLHYNLYNASNSGGNYDMAKLLNGTVVQKHPMHAVTFVDNHDSQPGESLESFVQEWFKPLAYALILTREQGYPSVFYGDYYGIPTHSVPAMKAKIDPILEARQNFAYGTQHDYFDHHNIIGWTREGNTTHPNSGLATIMSDGPGGEKWMYVGQNKAGQVWHDITGNKPGTVTINADGWANFSVNGGSVSIWVKR

SEQ ID NO: 17110 - protein, 485 aa, Unidentified
HHNGTNGTMMQYFEWHLPNDGNHWNRLRDDASNLRNRGITAIWIPPAWKGTSQNDVGYGAYDLYDLGEFNQKGTVRTKYGTRSQLESAIHALKNNGVQVYGDVVMNHKGGADATENVLAVEVNPNNRNQEISGDYTIEAWTKFDFPGRGNTYSDFKWRWYHFDGVDWDQSRQFQNRIYKFRGDGKAWDWEVDSENGNYDYLMYADVDMDHPEVVNELRRWGEWYTNTLNLDGFRIDAVKHIKYSFTRDWLTHVRNATGKEMFAVAEFWKNDLGALENYLNKTNWNHSVFDVPLHYNLYNASNSGGNYDMAKLLNGTVVQKHPMHAVTFVDNHDSQPGESLESFVQEWFKPLAYALILTREQGEPSVFYGDYYGIPTHSVPAMKAKIDPILEARQNFAYGTQHDYFDHHNIIGWTREGNTTHPNSGLATIMSDGPGGEKWMYVGQNKAGQVWHDITGNKPGTVTINADGWANFSVNGGSVSIWVKR

SEQ ID NO: 17111 - protein, 485 aa, Bacillus sp.
HHNGTNGTMMQYFEWHLPNDGNHWNRLRDDASNLRNRGITAIWIPPAWKGTSQNDVGYGAYDLYDLGEFNQKGTVRTKYGTRSQLESAIHALKNNGVQVYGDVVMNHKGGADATENVLAVEVNPNNRNQEISGDYTIEAWTKFDFPGRGNTYSDFKWRWYHFDGVDWDQSRQFQNRIYKFRGDGKAWDWEVDSENGNYDYLMYADVDMDVPEVVNELRRWGEWYTNTLNLDGFRIDAVKHIKYSFTRDWLTHVRNATGKEMFAVAEFWKNDLGALENYLNKTNWNHSVFDVPLHYNLYNASNSGGNYDMAKLLNGTVVQKHPMHAVTFVDNHDSQPGESLESFVQEWFKPLAYALILTREQGYPSVFYGDYYGIPTHSVPAMKAKIDPILEARQNFAYGTQHDYFDHHNIIGWTREGNTTHPNSGLATIMSDGPGGEKWMYVGQNKAGQVWHDITGNKPGTVTINADGWANFSVNGGSVSIWVKR

SEQ ID NO: 17112 - protein, 485 aa, Unidentified
HHNGTNGTMMQYFEWHLPNDGNHWNRLRDDASNLRNRGITAIWIPPAWKGTSQNDVGYGAYDLYDLGEFNQKGTVRTKYGTRSQLESAIHALKNNGVQVYGDVVMNHKGGADATENVLAVEVNPNNRNQEISGDYTIEAWTKFDFPDRGNTYSDFKWRWYHFDGVDWDQSRQFQNRIYKFRGDGKAWDWEVDSENGNYDYLMYADVDMDHPEVVNELRRWGEWYTNTLNLDGFRIDAVKHIKYSFTRDWLTHVRNATGKEMFAVAEFWKNDLGALENYLNKTNWNHSVFDVPLHYNLYNASNSGGNYDMAKLLNGTVVQKHPMHAVTFVDNHDSQPGESLESFVQEWFKPLAYALILTREQGYPSVFYGDYYGIPTHSVPAMKAKIDPILEARQNFAYGTQHDYFDHHNIIGWTREGNTTHPNSGLATIMSDGPGGEKWMYVGQNKAGQVWHDITGNKPGTVTINADGWANFSVNGGSVSIWVKR

SEQ ID NO: 17113 - protein, 485 aa, Unidentified
HHNGTNATMMQYFEWHLPNDGNHWNRLRDDASNLRNRGITAIWIPPAWKGTSQNDVGYGAYDLYDLGEFNQKGTVRTKYGTRSQLESAIHALKNNGVQVYGDVVMNHKGGADATENVLAVEVNPNNRNQEISGDYTIEAWTKFDFPGRGNTYSDFKWRWYHFDGVDWDQSRQFQNRIYKFRGDGKAWDWEVDSENGNYDYLMYADVDMDHPEVVNELRRWGEWYTNTLNLDGFRIDAVKHIKYSFTRDWLTHVRNATGKEMFAVAEFWKNDLGALENYLNKTNWNHSVFDVPLHYNLYNASNSGGNYDMAKLLNGTVVQKHPMHAVTFVDNHDSQPGESLESFVQEWFKPLAYALILTREQGYPSVFYGDYYGIPTHSVPAMKAKIDPILEARQNFAYGTQHDYFDHHNIIGWTREGNTTHPNSGLATIMSDGPGGEKWMYVGQNKAGQVWHDITGNKPGTVTINADGWANFSVNGGSVSIWVKR

SEQ ID NO: 17114 - protein, 485 aa, Unidentified
HHNGTNGTMMQYFEWHLPNDGNHWNRLRDDASNLRNRGITAIWIPPAWKGTSQNDVGYGAYDLYDLGEFNQKGTVRTKYGTRSQLESAIHALKNNGVQVYGDVVMNHKGGADATENVLAVEVNPNNRNQEISGDYTIEAWTKFDFPGRGNTYSDFKWRWYHFDGVDWDQSRQFQNRIYKFRGDGKAWDWEVDSENGNYDYLMYADVDMDHPEVVNELRRWGEWYTNTLNLDGFRIDAVKHIKYSFTRDWLTHVRNATGKEMWAVAEFWKNDLGALENYLNKTNWNHSVFDVPLHYNLYNASNSGGNYDMAKLLNGTVVQKHPMHAVTFVDNHDSQPGESLESFVQEWFKPLAYALILTREQGYPSVFYGDYYGIPTHSVPAMKAKIDPILEARQNFAYGTQHDYFDHHNIIGWTREGNTTHPNSGLATIMSDGPGGEKWMYVGQNKAGQVWHDITGNKPGTVTINADGWANFSVNGGSVSIWVKR

SEQ ID NO: 17115 - protein, 485 aa, Unidentified
HHNGTNGTMMQYFEWHLPNDGNHWNRLRDDASNLRNRGITAIWIPPAWKGTSQNDVGYGAYDLYDLGEFNQKGTVRTKYGTRSQLESAIHALKNNGVQVYGDVVMNHKGGADATENVLAVEVNPNNRNQEISGDCTIEAWTKFDFPGRGNTYSDFKWRWYHFDGVDWDQSRQFQNRIYKFRGDGKAWDWEVDSENGNYDYLMYADVDMDHPEVVNELRRWGEWYTNTLNLDGFRIDAVKHIKYSFTRDWLTHVRNATGKEMFAVAEFWKNDLGALENYLNKTNWNHSVFDVPLHYNLYNASNSGGNYDMAKLLNGTVVQKHPMHAVTFVDNHDSQPGESLESFVQEWFKPLAYALILTREQGYPSVFYGDYYGIPTHSVPAMKAKIDPILEARQNFAYGTQHDYFDHHNIIGWTREGNTTHPNSGLATIMSDGPGGEKWMYVGQNKAGQVWHDITGNKPGTVTINADGWANFSVNGGSVSIWVKR

SEQ ID NO: 17116 - protein, 485 aa, Unidentified
HHNGTNGTMMQYFEWHLPNDGNHWNRLRDDASNLRNRGITAIWIPPAWKGTSQNDVGYGAYDLYDLGEFNQKGTVRTKYGTRSQLESAIHALKNNGVQVYGDVVMNHKGGADATENVLAVEVNPNNRNQEISGDYTIEAVTKFDFPGRGNTYSDFKWRWYHFDGVDWDQSRQFQNRIYKFRGDGKAWDWEVDSENGNYDYLMYADVDMDHPEVVNELRRWGEWYTNTLNLDGFRIDAVKHIKYSFTRDWLTHVRNATGKEMFAVAEFWKNDLGALENYLNKTNWNHSVFDVPLHYNLYNASNSGGNYDMAKLLNGTVVQKHPMHAVTFVDNHDSQPGESLESFVQEWFKPLAYALILTREQGYPSVFYGDYYGIPTHSVPAMKAKIDPILEARQNFAYGTQHDYFDHHNIIGWTREGNTTHPNSGLATIMSDGPGGEKWMYVGQNKAGQVWHDITGNKPGTVTINADGWANFSVNGGSVSIWVKR

SEQ ID NO: 17117 - protein, 485 aa, Unidentified
HHQGTNGTMMQYFEWHLPNDGNHWNRLRDDASNLRNRGITAIWIPPAWKGTSQNDVGYGAYDLYDLGEFNQKGTVRTKYGTRSQLESAIHALKNNGVQVYGDVVMNHKGGADATENVLAVEVNPNNRNQEISGDYTIEAWTKFDFPGRGNTYSDFKWRWYHFDGVDWDQSRQFQNRIYKFRGDGKAWDWEVDSENGNYDYLMYADVDMDHPEVVNELRRWGEWYTNTLNLDGFRIDAVKHIKYSFTRDWLTHVRNATGKEMFAVAEFWKNDLGALENYLNKTNWNHSVFDVPLHYNLYNASNSGGNYDMAKLLNGTVVQKHPMHAVTFVDNHDSQPGESLESFVQEWFKPLAYALILTREQGYPSVFYGDYYGIPTHSVPAMKAKIDPILEARQNFAYGTQHDYFDHHNIIGWTREGNTTHPNSGLATIMSDGPGGEKWMYVGQNKAGQVWHDITGNKPGTVTINADGWANFSVNGGSVSIWVKR

SEQ ID NO: 17118 - protein, 485 aa, Unidentified
HHNGTNGTMMQYFEWHLPNDGNHWNRLRDDASNLRNRGITAIWIPPAWKGTSQNDVGYGAYDLYDLGEFNQKGTVRTKYGTRSQLESAIHALKNNGVQVYGDVVMNHKGGADATENVLAVEVNPNNRNQEISGDYTIEAWTKFDFPGRGNTYSDFKWRWYHFDGVDWDQSRQFQNRIYKFRGDGKAWDWEVDSENGNYDYLMYADVDMDHPEVVNELRRWGEWYTNTLNLDGFRIDAVKHIKYSFTRDWLTHVRNATGKEMFAVAEFWKNDLGALENYLNKTNWNHSVFDVPLHYNLYNASNSGGNYDMAKLLNGTVVQKHPMHAVTFVDNHDSQPGESLESFVQEWFKPLAYALILTREHGYPSVFYGDYYGIPTHSVPAMKAKIDPILEARQNFAYGTQHDYFDHHNIIGWTREGNTTHPNSGLATIMSDGPGGEKWMYVGQNKAGQVWHDITGNKPGTVTINADGWANFSVNGGSVSIWVKR

SEQ ID NO: 17119 - protein, 485 aa, Unidentified
HHNGTNGTMMQYFEWHLPNDGNHWNRLRDDASNLRNRGITAIWIPPAWKGTSQNDVGYGAYDLYDLGEFNQKGTVRTKYGTRSQLESAIHALKNNGVQVYGDVVMNHKGGADATENVLAVEVNPNNRNQEISGDYTIEAWTKFDFPGRGNTYSDFKWRWYHFDGVDWDQSRQFQNRIYKFRGDGKAWDWEVDSENGNYDYLMYADVDMDHPEVVNELRRWGEWYTNTLNLDGFRIDAVKHIKYSFTRDWLTHVRNATGKEMFAVAEFWKNDLGALENYLNKTNWNHSVFDVPLHYNLYNASNSGGNYDMAKLLNGTVVQKHPMHAVTFVDNHDSQPGESLESFVQEFFKPLAYALILTREQGYPSVFYGDYYGIPTHSVPAMKAKIDPILEARQNFAYGTQHDYFDHHNIIGWTREGNTTHPNSGLATIMSDGPGGEKWMYVGQNKAGQVWHDITGNKPGTVTINADGWANFSVNGGSVSIWVKR

SEQ ID NO: 17120 - protein, 485 aa, Unidentified
HHNGTNGTMMQYFEWHLPNDGNHWNRLRDDASNLRNRGITAIWIPPAWKGTSQNDVGYGAYDLYDLGEFNQKGTVRTKYGTRSQLESAIHALKNNGVQVYGDVVMNHKGGADATENVLAVEVNPNNRNQEISGDYTIEAWTKFDFPGRGNTYSDFKWRWYHFDGVDWDQSRQFQNRIYKFRGDGKAWDWEVDSENGNYDYLMYADVDMDHPEVVNELRRWGEWYTNTLNLDGFRIDAVKHIKYSFTRDWLTHVRNATGKEMFAVAEFWKNDLGALENYLNKTNMNHSVFDVPLHYNLYNASNSGGNYDMAKLLNGTVVQKHPMHAVTFVDNHDSQPGESLESFVQEWFKPLAYALILTREQGYPSVFYGDYYGIPTHSVPAMKAKIDPILEARQNFAYGTQHDYFDHHNIIGWTREGNTTHPNSGLATIMSDGPGGEKWMYVGQNKAGQVWHDITGNKPGTVTINADGWANFSVNGGSVSIWVKR

SEQ ID NO: 17121 - protein, 485 aa, Unidentified
HHNGTNGTMMQYFEWHLPNDGNHWNRLRDDASNLRNRGITAIWIPPAWKGTSQNDVGYGAYDLYDLGEFNQKGTVRTKYGTRSQLESAIHALKNNGVQVYGDVVMNHKGGADATENVLAVEVNPNNRNQEISGDYTIEAWTKFDFPGRGNTYSDFKWRWYHFDGVDWDQSRQFQNRIYKFRGDGKAWDWEVDSENGNYDYLMYADVDMDHPEVVNELRRWGEWYTNTLNLDGFRIDAVKHIKYSFTRDWLTHVRNATGKEMFAVAEFWKNDLGALENYLNKTNPNHSVFDVPLHYNLYNASNSGGNYDMAKLLNGTVVQKHPMHAVTFVDNHDSQPGESLESFVQEWFKPLAYALILTREQGYPSVFYGDYYGIPTHSVPAMKAKIDPILEARQNFAYGTQHDYFDHHNIIGWTREGNTTHPNSGLATIMSDGPGGEKWMYVGQNKAGQVWHDITGNKPGTVTINADGWANFSVNGGSVSIWVKR

SEQ ID NO: 17122 - protein, 485 aa, Unidentified
HHNGTNGTMMQYFEWHLPNDGNHWNRLRDDASNLRNRGITAIWIPPAWKGTSQNDVGYGAYDLYDLGEFNQKGTVRTKYGTRSQLESAIHALKNNGVQVYGDVVMNHKGGADATENVLAVEVNPNNRNQEISGDYTIEAWTKFDFPGRGNTYSDFKWRWYHFDGVDWDQSRQFQNRIYKFRGDGKAWDWEVDSENGNYDYLMYADVDMDHPEVVNELRRWGEWYTNTLNLDGFRIDAVKHIKYSFTRDWLTHVRNATGKEMFAVAEFWKNDLGALENYLNKTNWNHKVFDVPLHYNLYNASNSGGNYDMAKLLNGTVVQKHPMHAVTFVDNHDSQPGESLESFVQEWFKPLAYALILTREQGYPSVFYGDYYGIPTHSVPAMKAKIDPILEARQNFAYGTQHDYFDHHNIIGWTREGNTTHPNSGLATIMSDGPGGEKWMYVGQNKAGQVWHDITGNKPGTVTINADGWANFSVNGGSVSIWVKR

SEQ ID NO: 17123 - protein, 485 aa, Unidentified
HHNGTNGTMMQYFEWHLPNDGNHWNRLRDDASNLRNRGITAIWIPPAWKGTSQNDVGYGAYDLYDLGEFNQKGTVRTKYGTRSQLESAIHALKNNGVQVYGDVVMNHKGGADATENVLAVEVNPNNRNQEISGDYTIEAWTKFDFPGRGNTYSDFKWRWYHFDGVDWDQSRQFQNRIYKFRGDGKAWDWEVDSENGNYDYLMYADVDMDHPEVVNELRRWGEWYTNTLNLDGFRIDAVKHIKYSFTRDWLTHVRNATGKEMFAVAEFWKNDLGALENYLNKTNWNHSVFDVPLHYNLYNASNNGGNYDMAKLLNGTVVQKHPMHAVTFVDNHDSQPGESLESFVQEWFKPLAYALILTREQGYPSVFYGDYYGIPTHSVPAMKAKIDPILEARQNFAYGTQHDYFDHHNIIGWTREGNTTHPNSGLATIMSDGPGGEKWMYVGQNKAGQVWHDITGNKPGTVTINADGWANFSVNGGSVSIWVKR

SEQ ID NO: 17124 - protein, 485 aa, Unidentified
HHNGTNGTMMQYFEWHLPNDGNHWNRLRDDASNLRNRGITAIWIPPAWKGTSQNDVGYGAYDLYDLGEFNQKGTVRTKYGTRSQLESAIHALKNNGVQVYGDVVMNHKGGADATENVLAVEVNPNNRNQEISGDYTIEANTKFDFPGRGNTYSDFKWRWYHFDGVDWDQSRQFQNRIYKFRGDGKAWDWEVDSENGNYDYLMYADVDMDHPEVVNELRRWGEWYTNTLNLDGFRIDAVKHIKYSFTRDWLTHVRNATGKEMFAVAEFWKNDLGALENYLNKTNWNHSVFDVPLHYNLYNASNSGGNYDMAKLLNGTVVQKHPMHAVTFVDNHDSQPGESLESFVQEWFKPLAYALILTREQGYPSVFYGDYYGIPTHSVPAMKAKIDPILEARQNFAYGTQHDYFDHHNIIGWTREGNTTHPNSGLATIMSDGPGGEKWMYVGQNKAGQVWHDITGNKPGTVTINADGWANFSVNGGSVSIWVKR

SEQ ID NO: 17125 - protein, 485 aa, Unidentified
HHNGTNGTMMQYFEWHLPNDGNHWNRLRDDASNLRNRGITAIWIPPAWKGTSQNDVGYGAYDLYDLGEFNQKGTVRTKYGTRSQLESAIHALKNNGVQVYGDVVMNHKGGADATENVLAVEVNPNNRNQEISGDYTIEAWTKFDFPGRGNTYSDFKWRWYHFDGVDWDQSRQFQNRIYKFRGDGKAWDWEVDSENGNYDYLMYADVDMDHPEVVNELRRWGEWYTNTLNLDGFRIDAVKHIKYSFTRDWLTHVRNATGPEMFAVAEFWKNDLGALENYLNKTNWNHSVFDVPLHYNLYNASNSGGNYDMAKLLNGTVVQKHPMHAVTFVDNHDSQPGESLESFVQEWFKPLAYALILTREQGYPSVFYGDYYGIPTHSVPAMKAKIDPILEARQNFAYGTQHDYFDHHNIIGWTREGNTTHPNSGLATIMSDGPGGEKWMYVGQNKAGQVWHDITGNKPGTVTINADGWANFSVNGGSVSIWVKR

SEQ ID NO: 17126 - protein, 485 aa, Unidentified
HHNGTNNTMMQYFEWHLPNDGNHWNRLRDDASNLRNRGITAIWIPPAWKGTSQNDVGYGAYDLYDLGEFNQKGTVRTKYGTRSQLESAIHALKNNGVQVYGDVVMNHKGGADATENVLAVEVNPNNRNQEISGDYTIEAWTKFDFPGRGNTYSDFKWRWYHFDGVDWDQSRQFQNRIYKFRGDGKAWDWEVDSENGNYDYLMYADVDMDHPEVVNELRRWGEWYTNTLNLDGFRIDAVKHIKYSFTRDWLTHVRNATGKEMFAVAEFWKNDLGALENYLNKTNWNHSVFDVPLHYNLYNASNSGGNYDMAKLLNGTVVQKHPMHAVTFVDNHDSQPGESLESFVQEWFKPLAYALILTREQGYPSVFYGDYYGIPTHSVPAMKAKIDPILEARQNFAYGTQHDYFDHHNIIGWTREGNTTHPNSGLATIMSDGPGGEKWMYVGQNKAGQVWHDITGNKPGTVTINADGWANFSVNGGSVSIWVKR

SEQ ID NO: 17127 - protein, 485 aa, Unidentified
HHNGTNGTMMQYFEWHLPNDGNHWNRLRDFASNLRNRGITAIWIPPAWKGTSQNDVGYGAYDLYDLGEFNQKGTVRTKYGTRSQLESAIHALKNNGVQVYGDVVMNHKGGADATENVLAVEVNPNNRNQEISGDYTIEAWTKFDFPGRGNTYSDFKWRWYHFDGVDWDQSRQFQNRIYKFRGDGKAWDWEVDSENGNYDYLMYADVDMDHPEVVNELRRWGEWYTNTLNLDGFRIDAVKHIKYSFTRDWLTHVRNATGKEMFAVAEFWKNDLGALENYLNKTNWNHSVFDVPLHYNLYNASNSGGNYDMAKLLNGTVVQKHPMHAVTFVDNHDSQPGESLESFVQEWFKPLAYALILTREQGYPSVFYGDYYGIPTHSVPAMKAKIDPILEARQNFAYGTQHDYFDHHNIIGWTREGNTTHPNSGLATIMSDGPGGEKWMYVGQNKAGQVWHDITGNKPGTVTINADGWANFSVNGGSVSIWVKR

SEQ ID NO: 17128 - protein, 485 aa, Bacillus sp.
HHNGTNGTMMQYFEWHLPNDGNHWNRLRDDASNLRNRGITAIWIPPAWKGTSQNDVGYGAYDLYDLGEFNQKGTVRTKYGTRSQLESAIHALKNNGVQVYGDVVMNHKGGADATENVLAVEVNPNNRNQEISGDYTIEAWTKFDFPGRGNTYSDFKWRWYHFDGVDWDQSRQFQNRIYKFRGXXKAWDWEVDSEFGNYDYLMYADVDMDHPEVVNELRRWGEWYTNTLNLDGFRIDAVKHIKYSFTRDWLTHVRNATGKEMFAVAEFWKNDLGALENYLNKTNWNHSVFDVPLHYNLYNASNSGGNYDMAKLLNGTVVQKHPMHAVTFVDNHDSQPGESLESFVQEWFKPLAYALILTREQGYPSVFYGDYYGIPTHSVPAMKAKIDPILEARQNFAYGTQHDYFDHHNIIGWTREGNTTHPNSGLATIMSDGPGGEKWMYVGQNKAGQVWHDITGNKPGTVTINADGWANFSVNGGSVSIWVKR

SEQ ID NO: 17129 - protein, 485 aa, Unidentified
HHNGTNGTMMQYFEWHLPNDGNHWNRLRDDASNLRNRGITAIWIPPAWKGTSQNDVGYGAYDLYDLGEFNQKGTVRTKYGTRSQLESAIHALKNNGVQVYGDVVMNHKGGADATENVLAVEVNPNNRNQEISGDYTIEAWTKFDFPGRGNTYSDFKWRWYHFDGVDWDQSRQFQNRIYKFRGDGKAWDWEVDSENGNYDYLMYADVDMDHPEVVNELRRWGEWYTNTLNLDGFRIDAVKHIKYSFTRDWLTHVRNATGKEMFAVAEFWKNDLGALENYLNKTNWNHSVFDVPLHYNLYNASNSGGNYDMAKLLNGTVVQKHPGHAVTFVDNHDSQPGESLESFVQEWFKPLAYALILTREQGYPSVFYGDYYGIPTHSVPAMKAKIDPILEARQNFAYGTQHDYFDHHNIIGWTREGNTTHPNSGLATIMSDGPGGEKWMYVGQNKAGQVWHDITGNKPGTVTINADGWANFSVNGGSVSIWVKR

SEQ ID NO: 17130 - protein, 485 aa, Unidentified
HHNGTNGTMMQYFEWHLPNDGNHWNRLRDDASNLRNRGITAIWIPPAWKGTSQNDVGYGAYDLYDLGEFNQKGTVRTKYGTRSQLESAIPALKNNGVQVYGDVVMNHKGGADATENVLAVEVNPNNRNQEISGDYTIEAWTKFDFPGRGNTYSDFKWRWYHFDGVDWDQSRQFQNRIYKFRGDGKAWDWEVDSENGNYDYLMYADVDMDHPEVVNELRRWGEWYTNTLNLDGFRIDAVKHIKYSFTRDWLTHVRNATGKEMFAVAEFWKNDLGALENYLNKTNWNHSVFDVPLHYNLYNASNSGGNYDMAKLLNGTVVQKHPMHAVTFVDNHDSQPGESLESFVQEWFKPLAYALILTREQGYPSVFYGDYYGIPTHSVPAMKAKIDPILEARQNFAYGTQHDYFDHHNIIGWTREGNTTHPNSGLATIMSDGPGGEKWMYVGQNKAGQVWHDITGNKPGTVTINADGWANFSVNGGSVSIWVKR

SEQ ID NO: 17131 - protein, 485 aa, Unidentified
HHNGTNGTMMQYFEWHLPNDGNHWNRLRDDASNLRNRGITAIWIPPAWKGTSQNDVGYGAYDLYDLGEFNQKGTVRTKYGTRSQLESAIHALKNNGVQVYGDVVMNHKGGADATENVLAVEVNPNNRNQEISGDYTIEAWTKFDFPGRGNTYSDFKWRWYHFDGVDWDQSRQFQNRIYKFRGDGKAWDWEVDSENGNYDYLMYADVDMDHPEVVNELRRWGEWYTNTLNLDGFRIDAVKHIKYSFTRDWLTHVRNATGKEMFAVAEFWKNDLGALENYLNKTNWNHSVFDVMLHYNLYNASNSGGNYDMAKLLNGTVVQKHPMHAVTFVDNHDSQPGESLESFVQEWFKPLAYALILTREQGYPSVFYGDYYGIPTHSVPAMKAKIDPILEARQNFAYGTQHDYFDHHNIIGWTREGNTTHPNSGLATIMSDGPGGEKWMYVGQNKAGQVWHDITGNKPGTVTINADGWANFSVNGGSVSIWVKR

SEQ ID NO: 17132 - protein, 485 aa, Unidentified
HHNGTNGTMMQYFEWHLPNDGNHWNRLRDDASNLRNRGITAIWIPPAWKGTSQNDVGYGAYDLYDLGEFNQKGTVRTKYGTRSQLESAIHALKNNGVQVYGDVVMNHKGGADATENVLAVEVNPNNRNQEISGDYTIEAWTKFDFHGRGNTYSDFKWRWYHFDGVDWDQSRQFQNRIYKFRGDGKAWDWEVDSENGNYDYLMYADVDMDHPEVVNELRRWGEWYTNTLNLDGFRIDAVKHIKYSFTRDWLTHVRNATGKEMFAVAEFWKNDLGALENYLNKTNWNHSVFDVPLHYNLYNASNSGGNYDMAKLLNGTVVQKHPMHAVTFVDNHDSQPGESLESFVQEWFKPLAYALILTREQGYPSVFYGDYYGIPTHSVPAMKAKIDPILEARQNFAYGTQHDYFDHHNIIGWTREGNTTHPNSGLATIMSDGPGGEKWMYVGQNKAGQVWHDITGNKPGTVTINADGWANFSVNGGSVSIWVKR

SEQ ID NO: 17133 - protein, 485 aa, Bacillus sp.
HHNGTNGTMMQYFEWHLPNDGNHWNRLRDDASNLRNRGITAIWIPPAWKGTSQNDVGYGAYDLYDLGEFNQKGTVRTKYGTRSQLESAIHALKNNGVQVYGDVVMNHKGGADATENVLAVEVNPNNRNQEISGDYTIEAWTKFDFPGRGNTYSDFKWRWYHFDGVDWDQSRQFQNRIYKFRGDGKAWDWEVDSENGNYDYLMYADCDMDHPEVVNELRRWGEWYTNTLNLDGFRIDAVKHIKYSFTRDWLTHVRNATGKEMFAVAEFWKNDLGALENYLNKTNWNHSVFDVPLHYNLYNASNSGGNYDMAKLLNGTVVQKHPMHAVTFVDNHDSQPGESLESFVQEWFKPLAYALILTREQGYPSVFYGDYYGIPTHSVPAMKAKIDPILEARQNFAYGTQHDYFDHHNIIGWTREGNTTHPNSGLATIMSDGPGGEKWMYVGQNKAGQVWHDITGNKPGTVTINADGWANFSVNGGSVSIWVKR

SEQ ID NO: 17134 - protein, 485 aa, Unidentified
HHNGTNGTMMQYFEWHLPNDGNHWNRLRDDASNLRNRGITAIWIPPAWKGTSQNDVGYGAYDLYDLGEFNQKGTVRTKYGTRSQLESAIHALKNNGVQVYGDVVMNHKGGADATENVLAVEVNPNNRNQEISGDYTIEAWTKFDFPGRGNTYSDFKWRWYHFDGVDWDQSRQFQNRIYKFRGDGKAWDWEVDSENGNYDYLMYADVDMDHPEVVNELRRWGEWYTNTLNLDGFRIDAVKHIKYSFTRDWLTHVRNATGKEMFAVAEFWKNDLGALENYLNKTNWNHSVFDVPLHYNLYNASNSGGNYDMAKLLNGTVVQKHPMHAVTFVDNHDSQPGESLESFVQEWFKPLAYALILTREQGYPSVFYGDYYGIPTHSVPAMKAKIDPILEARQNFAYGTQHDYFDHHNIIGWTREGNTTHPNSGLATIMSDGPGGEKWMYVGQNKYGQVWHDITGNKPGTVTINADGWANFSVNGGSVSIWVKR

SEQ ID NO: 17135 - protein, 485 aa, Unidentified
HHNGTNGTMMQYFEWHLPNDGNHWNRLRDDASNLRNRGITAIWIPPAWKGTSQNDVGYGAYDLYDLGEFNQKGTVRTKYGTRSQLESAIHALKNNGVQVYGDVVMNHKGGADATENVLAVEVNPNNRNQEISGDYTIEAWTKFDFPGRGNTYSDFKWRWYHFDGVDWDQSRQFQNRIYKFRGDGKAWDWEVDSENGNYDYLMYADVDMDHPEVVNELRRWGEWYTNTLNLDGFRIDAVKHIKYSFTRDWLTHVRNATGKEMFAVAEFWKNDLGALENYLNKTNWNHSVFDVPLHYNLYNASNSGGNYDMAKLLNGTVVQKHPMHAVTFVDNHDSQPGESLESFVQEWFKPLAYALILTREQGYPSVFYGDYYGIPTHSVPAMKAKIDPILEARQNFAYGTQHDYFDHHNIIGWTREGNTTHPNSGLATIMSDGPGGEKWMYVGQNKAGQVWHDITGNKPGTVTINADGWANFSVNGQSVSIWVKR

SEQ ID NO: 17136 - protein, 485 aa, Unidentified
HHAGTNGTMMQYFEWHLPNDGNHWNRLRDDASNLRNRGITAIWIPPAWKGTSQNDVGYGAYDLYDLGEFNQKGTVRTKYGTRSQLESAIHALKNNGVQVYGDVVMNHKGGADATENVLAVEVNPNNRNQEISGDYTIEAWTKFDFPGRGNTYSDFKWRWYHFDGVDWDQSRQFQNRIYKFRGDGKAWDWEVDSENGNYDYLMYADVDMDHPEVVNELRRWGEWYTNTLNLDGFRIDAVKHIKYSFTRDWLTHVRNATGKEMFAVAEFWKNDLGALENYLNKTNWNHSVFDVPLHYNLYNASNSGGNYDMAKLLNGTVVQKHPMHAVTFVDNHDSQPGESLESFVQEWFKPLAYALILTREQGYPSVFYGDYYGIPTHSVPAMKAKIDPILEARQNFAYGTQHDYFDHHNIIGWTREGNTTHPNSGLATIMSDGPGGEKWMYVGQNKAGQVWHDITGNKPGTVTINADGWANFSVNGGSVSIWVKR

SEQ ID NO: 17137 - protein, 485 aa, Unidentified
HHNGTNVTMMQYFEWHLPNDGNHWNRLRDDASNLRNRGITAIWIPPAWKGTSQNDVGYGAYDLYDLGEFNQKGTVRTKYGTRSQLESAIHALKNNGVQVYGDVVMNHKGGADATENVLAVEVNPNNRNQEISGDYTIEAWTKFDFPGRGNTYSDFKWRWYHFDGVDWDQSRQFQNRIYKFRGDGKAWDWEVDSENGNYDYLMYADVDMDHPEVVNELRRWGEWYTNTLNLDGFRIDAVKHIKYSFTRDWLTHVRNATGKEMFAVAEFWKNDLGALENYLNKTNWNHSVFDVPLHYNLYNASNSGGNYDMAKLLNGTVVQKHPMHAVTFVDNHDSQPGESLESFVQEWFKPLAYALILTREQGYPSVFYGDYYGIPTHSVPAMKAKIDPILEARQNFAYGTQHDYFDHHNIIGWTREGNTTHPNSGLATIMSDGPGGEKWMYVGQNKAGQVWHDITGNKPGTVTINADGWANFSVNGGSVSIWVKR

SEQ ID NO: 17138 - protein, 485 aa, Bacillus sp.
HHNGTNGTMMQYFEWHLPNDGNHWNRLRDDASNLRNRGITAIWIPPAWKGTSQNDVGYGAYDLYDLGEFNQKGTVRTKYGTRSQLESAIHALKNNGVQVYGDVVMNHKGGADATENVLAVEVNPNNRNQEISGDYTIEAWTKFDFPGRGNTYSDFKWRWYHFDGVDWDQSRQFQNRIYKFRGDGKAWDWEVDSENGNYDYLMYADVDMDHPEVVNELRRWGEWYTNTLNLDGFRIDAVKHIKYSFTRDWLTHVRNATGKEMFAVAEFWKNDLGALENYLNKTNWNHSVFDVPLHYNLYNASNSGGNYDMAKLLNGTVVQKHPMHAVTFVDNHDSQPGESLESFVQEWFKPLAYALILTREQGYPSVFYGDYYGIPKHSVPAMKAKIDPILEARQNFAYGTQHDYFDHHNIIGWTREGNTTHPNSGLATIMSDGPGGEKWMYVGQNKAGQVWHDITGNKPGTVTINADGWANFSVNGGSVSIWVKR

SEQ ID NO: 17139 - protein, 485 aa, Unidentified
HHNGTNGTMMQYFEWHLPNDGNHWNRLRDDASNLRNRGITAIWIPPAWKGTSQNDVGYGAYDLYDLGEFNQKGTVRTKYGTRSQLESAIHALKNNGVQVYGDVVMNHKGGADATENVLAVEVNPNNRNQEISGDYTIEAWTKFDFPGRGNTYSDFKWRWYHFDGVDWDQSRQFQNRIYKFRGDGKAWDWEVDSENGNYDYLMYADVDMDHPEVVNELRRWGEWYTNTLNLDGFRIDAVKHIKYSFTRDWLTHVRNATGKEMFAVAEFWKNDLGDLENYLNKTNWNHSVFDVPLHYNLYNASNSGGNYDMAKLLNGTVVQKHPMHAVTFVDNHDSQPGESLESFVQEWFKPLAYALILTREQGYPSVFYGDYYGIPTHSVPAMKAKIDPILEARQNFAYGTQHDYFDHHNIIGWTREGNTTHPNSGLATIMSDGPGGEKWMYVGQNKAGQVWHDITGNKPGTVTINADGWANFSVNGGSVSIWVKR

SEQ ID NO: 17140 - protein, 485 aa, Unidentified
HHNGTNGTMMQYFEWHLPNDGNHWNRLRDDASNLRNRGITAIWIPPAWKGTSQNDVGYGAYDLYDLGEFNQKGTVRTKYGTRSQLESAIHALKNNGVQVYGDVVMNHKGGADATENVLAVEVNPNNRNQEISGDYTIEAWTKFDFPGRGNTYSDFKWRWYHFDGVDWDQSRQFQNRIYKFRGDGKAWDWEVDSENGNYDYLMYADVDMDHPEVVNELRRWGEWYTNTLNLDGFRIDAVKHIKYSFTRDWLTHVRNATGKEMFAVAEFWKNDLGALENYLNKTNWNHSVFDVPLHYNLYNASNSGGNYDMAKLLNGTVVQKHPMHAVTFVDNHDSQPGESLESFVQEWFKPLAYALILTREQGYPSVFYGDYYGIPTHSVPAMKAKIDPILEARQNFAYGTQHDYFDHHNIIGWTREGNTTHPNSGLATIMSDGPGGEKWMYVGQNKAGQVWHDITGNKPGTVTINADGWANFSVPGGSVSIWVKR

SEQ ID NO: 17141 - protein, 485 aa, Unidentified
HHNGTNGTMMQYFEWHLPNDGNHWNRLRDDASNLRNRGITAIWIPPAWKGTSQNDVGYGVYDLYDLGEFNQKGTVRTKYGTRSQLESAIHALKNNGVQVYGDVVMNHKGGADATENVLAVEVNPNNRNQEISGDYTIEAWTKFDFPGRGNTYSDFKWRWYHFDGVDWDQSRQFQNRIYKFRGDGKAWDWEVDSENGNYDYLMYADVDMDHPEVVNELRRWGEWYTNTLNLDGFRIDAVKHIKYSFTRDWLTHVRNATGKEMFAVAEFWKNDLGALENYLNKTNWNHSVFDVPLHYNLYNASNSGGNYDMAKLLNGTVVQKHPMHAVTFVDNHDSQPGESLESFVQEWFKPLAYALILTREQGYPSVFYGDYYGIPTHSVPAMKAKIDPILEARQNFAYGTQHDYFDHHNIIGWTREGNTTHPNSGLATIMSDGPGGEKWMYVGQNKAGQVWHDITGNKPGTVTINADGWANFSVNGGSVSIWVKR

SEQ ID NO: 17142 - protein, 485 aa, Unidentified
HHNGTNGTMMQYFEWHLPNDGNHWNRLRDDASNLRNRGITAIWIPPAWKGTSQNDVGYGAYDLYDLGEFNQKGTVRTKYGTRSQLESAIHALKNNGVQVYGDVVMNHKGGADATENVLAVEVNPNNRNQEISGDYTIEAWTKFDIPGRGNTYSDFKWRWYHFDGVDWDQSRQFQNRIYKFRGDGKAWDWEVDSENGNYDYLMYADVDMDHPEVVNELRRWGEWYTNTLNLDGFRIDAVKHIKYSFTRDWLTHVRNATGKEMFAVAEFWKNDLGALENYLNKTNWNHSVFDVPLHYNLYNASNSGGNYDMAKLLNGTVVQKHPMHAVTFVDNHDSQPGESLESFVQEWFKPLAYALILTREQGYPSVFYGDYYGIPTHSVPAMKAKIDPILEARQNFAYGTQHDYFDHHNIIGWTREGNTTHPNSGLATIMSDGPGGEKWMYVGQNKAGQVWHDITGNKPGTVTINADGWANFSVNGGSVSIWVKR

SEQ ID NO: 17143 - protein, 485 aa, Unidentified
HHNGTNGTMMQYFEWHLPNDGNHWNRLRDDASNLRNRGITAIWIPPAWKGTSQNDVGYGAYDLYDLGEFNQKGTVRTKYGTRSQLESAIHALKNNGVLVYGDVVMNHKGGADATENVLAVEVNPNNRNQEISGDYTIEAWTKFDFPGRGNTYSDFKWRWYHFDGVDWDQSRQFQNRIYKFRGDGKAWDWEVDSENGNYDYLMYADVDMDHPEVVNELRRWGEWYTNTLNLDGFRIDAVKHIKYSFTRDWLTHVRNATGKEMFAVAEFWKNDLGALENYLNKTNWNHSVFDVPLHYNLYNASNSGGNYDMAKLLNGTVVQKHPMHAVTFVDNHDSQPGESLESFVQEWFKPLAYALILTREQGYPSVFYGDYYGIPTHSVPAMKAKIDPILEARQNFAYGTQHDYFDHHNIIGWTREGNTTHPNSGLATIMSDGPGGEKWMYVGQNKAGQVWHDITGNKPGTVTINADGWANFSVNGGSVSIWVKR

SEQ ID NO: 17144 - protein, 485 aa, Bacillus sp.
HHNGTNGTMMQYFEWHLPNDGNHWNRLRDDASNLRNRGITAIWIPPAWKGTSQNDVGYGAYDLYDLGEFNQKGTVRTKYGTRSQLESAIHALKNNGVQVYGDVVMNHKGGADATENVLAVEVNPNNRNQEISGDYTIEAWTKFDFPGRGNTYSDFKWRWYHFDGVDWDQSRQFQNRIYKFRGDGKAWDWEVDSENGNYDWLMYADVDMDHPEVVNELRRWGEWYTNTLNLDGFRIDAVKHIKYSFTRDWLTHVRNATGKEMFAVAEFWKNDLGALENYLNKTNWNHSVFDVPLHYNLYNASNSGGNYDMAKLLNGTVVQKHPMHAVTFVDNHDSQPGESLESFVQEWFKPLAYALILTREQGYPSVFYGDYYGIPTHSVPAMKAKIDPILEARQNFAYGTQHDYFDHHNIIGWTREGNTTHPNSGLATIMSDGPGGEKWMYVGQNKAGQVWHDITGNKPGTVTINADGWANFSVNGGSVSIWVKR

SEQ ID NO: 17145 - protein, 485 aa, Unidentified
HHNGTNGTMMQYFEWHLPNDGNHWNRLRDDASNLRNRGITAIWIPPAWKGTSQNDVSYGAYDLYDLGEFNQKGTVRTKYGTRSQLESAIHALKNNGVQVYGDVVMNHKGGADATENVLAVEVNPNNRNQEISGDYTIEAWTKFDFPGRGNTYSDFKWRWYHFDGVDWDQSRQFQNRIYKFRGDGKAWDWEVDSENGNYDYLMYADVDMDHPEVVNELRRWGEWYTNTLNLDGFRIDAVKHIKYSFTRDWLTHVRNATGKEMFAVAEFWKNDLGALENYLNKTNWNHSVFDVPLHYNLYNASNSGGNYDMAKLLNGTVVQKHPMHAVTFVDNHDSQPGESLESFVQEWFKPLAYALILTREQGYPSVFYGDYYGIPTHSVPAMKAKIDPILEARQNFAYGTQHDYFDHHNIIGWTREGNTTHPNSGLATIMSDGPGGEKWMYVGQNKAGQVWHDITGNKPGTVTINADGWANFSVNGGSVSIWVKR

SEQ ID NO: 17146 - protein, 485 aa, Unidentified
HHNGTNGTMMQYFEWHLPNDGNHWNRLRDDASNLRNRGITAIWIPPAWKGTSQNDVGYGAYDLYDLGEFNQKGTVRTKYGTRSQLESAIHALKNNGVQVYGDVVMNHKGGADATENVLAVEVNPNNRNQEISGDYTIEAWTKFDFPGRGNTYSDFKWRWYHFDGVDWDQSRQFQNRIYKFRGDGKAWDWEVDSENGNYDYLMYADVDMDHPEVVNELRRWGEWYTNTLNLDGFRIDAVKHIKYSFTRDWLTHVRNATGKEMFAVAEFWKNDLGALENYLNKTNWNHSVFDVPLHYNLYNASNSGGNYDMAKLLNGTVVQKHPMHAVTFVDNHDSQPGESLESFVQEWFKPLAYALILTREQGYPSVFYGDYYGIPTHSVPAMKAKIDPILEARQNFAYGTQHDYFDHHNIIGWTREGNTTGPNSGLATIMSDGPGGEKWMYVGQNKAGQVWHDITGNKPGTVTINADGWANFSVNGGSVSIWVKR

SEQ ID NO: 17147 - protein, 485 aa, Unidentified
HHNGTNGTMMQYFEWHLPNDGNHWNRLRDDASNLRNRGITAIWIPPAWKGTSQNDVGYGAYDLYDLGEFNQKGTVRTKYGTRSQLESAIHALKNNGVQVYGDVVMNHKGGADATENVLAVEVNPNNRNQEISGDYTIEAWTKFDFPGRGNTYSDFKWRWYHFDGVDWDQSRQFQNRIYKFRGDGKAWDWEVDSENGNYDYLMYADVDMDHPEVVNELRRWGEWYTNTLNLDGFRIDAVKHIKYSFTRDWLTHVRNATGKEMFAVAEFWKNDLGALENYLNKTNWNHSVFDVPLSYNLYNASNSGGNYDMAKLLNGTVVQKHPMHAVTFVDNHDSQPGESLESFVQEWFKPLAYALILTREQGYPSVFYGDYYGIPTHSVPAMKAKIDPILEARQNFAYGTQHDYFDHHNIIGWTREGNTTHPNSGLATIMSDGPGGEKWMYVGQNKAGQVWHDITGNKPGTVTINADGWANFSVNGGSVSIWVKR

SEQ ID NO: 17148 - protein, 485 aa, Unidentified
HHNGTNGTMMQYFEWHLPNDGNHWNRLRDDASNLRNRGITAIWIPPAWKGTSQNDVGYGAYDLYDLGEFNQKGTVRTKYGTRSQLESAIHALKNNGVQVYGDVVMNHKGGADATENVLAVEVNPNNRNQEISGDYTIEAWTKFDFPGRGNTYSDFKWRWYHFDGVDWDQSRQFQNRIYKFRGDGKAWDWEVDSENGNYDYLMYADVDMDHPEVVNELRRWGEWYTNTLNLDGFRIDAVKHIKYSFTRDWLTHVRNATGKEMFAVAEFWKNDLGALENYLNHTNWNHSVFDVPLHYNLYNASNSGGNYDMAKLLNGTVVQKHPMHAVTFVDNHDSQPGESLESFVQEWFKPLAYALILTREQGYPSVFYGDYYGIPTHSVPAMKAKIDPILEARQNFAYGTQHDYFDHHNIIGWTREGNTTHPNSGLATIMSDGPGGEKWMYVGQNKAGQVWHDITGNKPGTVTINADGWANFSVNGGSVSIWVKR

SEQ ID NO: 17149 - protein, 485 aa, Unidentified
HHNGTNGTMMQYFEWHLPNDGNHWNRLRDDASNLRNRGITAIWIPPAWKGTSQNDVGYGAYDLYDLGEFNQKGTVRTKYGTRSQLESAIHALKNNGVQVYGDVVMNHKGGADATENVLAVEVNPNNRNQEISGDYTIEAWTKFDFPGRGNTYSDFKWRWYHFDGVDWDQSRQFQNRIYKFRGDGKAWDWEVDSENGNYDYLMYADVDMDHPEVVNELRRWGEWYTNTLNLDGFRIDAVKHIKYSFTRDWLTHVRNATGKEMFAVAEFWKNDLGALENYLNKTNWNHSVFDVPLHYNLYNASNSGGNYDMAKLLNGTVVQKHPMHAVTFVDNHDSQPGESLESFVQEWFKPLAYALILTREQGYPSVFYGDYYGIPTHSVPAMKAKIDPILEARQNFAYGTQHDYFDHHNIIGWTREGNTTHPNSGLATIMSDGPGGEKWMYVGQNKAGQVWHDITGNKPGTVTIEADGWANFSVNGGSVSIWVKR

SEQ ID NO: 17150 - protein, 485 aa, Unidentified
HHNGTNGTMMQYFEWHLPNDGNHWNRLRDDASNLRNRGITAIWIPPAWKGTSQNDVGYGAYDLYDLGEFNQKGTVRTKYGTRSQLESAIHALKNNGVQVYGDVVMNHKGGADATENVLAVEVNPNNRNQEISGDYTIEAWTKFDFPGRGNTYSDFKWRWYHFDGVDWDQSRQFQNRIYKFRGDGKAWDWEVDSENGNYDYLMYADVDMDHPEVVNELRRWGEWYTNTLNLDGFRIDAVKHIKYSFTRDWLTHVRNATGKEMFAVAEFWKNDLQALENYLNKTNWNHSVFDVPLHYNLYNASNSGGNYDMAKLLNGTVVQKHPMHAVTFVDNHDSQPGESLESFVQEWFKPLAYALILTREQGYPSVFYGDYYGIPTHSVPAMKAKIDPILEARQNFAYGTQHDYFDHHNIIGWTREGNTTHPNSGLATIMSDGPGGEKWMYVGQNKAGQVWHDITGNKPGTVTINADGWANFSVNGGSVSIWVKR

SEQ ID NO: 17151 - protein, 485 aa, Unidentified
HHNGTNGTMMQYFEWHLPNDGNHWNRLRDDASNLRNRGITAIWIPPAWKGTSQNDVGYGAYDLYDLGEFNQKGTVRTKYGTRSQLESAIHALKNNGVQVYGDVVMNHKGGADATENVLAVEVNPNNRNQEISGDYTIEAWTKFDFPGRGNTYSDFKWRWYHFDGVDWDQSRQFQNRIYKFRGDGKATDWEVDSENGNYDYLMYADVDMDHPEVVNELRRWGEWYTNTLNLDGFRIDAVKHIKYSFTRDWLTHVRNATGKEMFAVAEFWKNDLGALENYLNKTNWNHSVFDVPLHYNLYNASNSGGNYDMAKLLNGTVVQKHPMHAVTFVDNHDSQPGESLESFVQEWFKPLAYALILTREQGYPSVFYGDYYGIPTHSVPAMKAKIDPILEARQNFAYGTQHDYFDHHNIIGWTREGNTTHPNSGLATIMSDGPGGEKWMYVGQNKAGQVWHDITGNKPGTVTINADGWANFSVNGGSVSIWVKR

SEQ ID NO: 17152 - protein, 485 aa, Unidentified
HHNGTNGTMMQYFEWHLPNDGNHWNRLRDDASNLRNRGITAIWIPPAWKGTSQNDVGYGAYDLYDLGEFNQKGTVRTKYGTRSQLESAIHALKNNGVQVYGDVVMNHKGGADATENVLAVEVNPNNRNQEITGDYTIEAWTKFDFPGRGNTYSDFKWRWYHFDGVDWDQSRQFQNRIYKFRGDGKAWDWEVDSENGNYDYLMYADVDMDHPEVVNELRRWGEWYTNTLNLDGFRIDAVKHIKYSFTRDWLTHVRNATGKEMFAVAEFWKNDLGALENYLNKTNWNHSVFDVPLHYNLYNASNSGGNYDMAKLLNGTVVQKHPMHAVTFVDNHDSQPGESLESFVQEWFKPLAYALILTREQGYPSVFYGDYYGIPTHSVPAMKAKIDPILEARQNFAYGTQHDYFDHHNIIGWTREGNTTHPNSGLATIMSDGPGGEKWMYVGQNKAGQVWHDITGNKPGTVTINADGWANFSVNGGSVSIWVKR

SEQ ID NO: 17153 - protein, 485 aa, Unidentified
HHNGTNGTMMQYFEWHLPNDGNHWNRLRDDASNLRNRGITAIWIPPAWKGTSQNDVGYGAYDLYDLGEFNQKGTVRTKYGTRSQLESAIHALKNNGVQVYGDVVMNHKGGADATENVLAVEVNPNNRNQEISGDYTIEAWTKFDFPGRGNTYSDFKWRWYHFDGVDWDQSRQFQNRIYKFRGDGKAWDWEVDSENGNYDYLMYADVDMDHPEVVNELRRWGEWYTNTLNLDGFRIDAVKHIKYSFTRDWLTHVRNATGKEMFAVAEFWKNDLGALENYLNKTNWNHSVFDVPLHYNLYNASNSGGNYDMAKLLNGTVVQKHPMHAVTFVDNHDSQPGESLESFVQEWFKPLAYALILTREQGYPSVFYGDYYGIPTHSVPAMKAKIDPILEARQNFAYGTQHDYFDTHNIIGWTREGNTTHPNSGLATIMSDGPGGEKWMYVGQNKAGQVWHDITGNKPGTVTINADGWANFSVNGGSVSIWVKR

SEQ ID NO: 17154 - protein, 485 aa, Unidentified
HHFGTNGTMMQYFEWHLPNDGNHWNRLRDDASNLRNRGITAIWIPPAWKGTSQNDVGYGAYDLYDLGEFNQKGTVRTKYGTRSQLESAIHALKNNGVQVYGDVVMNHKGGADATENVLAVEVNPNNRNQEISGDYTIEAWTKFDFPGRGNTYSDFKWRWYHFDGVDWDQSRQFQNRIYKFRGDGKAWDWEVDSENGNYDYLMYADVDMDHPEVVNELRRWGEWYTNTLNLDGFRIDAVKHIKYSFTRDWLTHVRNATGKEMFAVAEFWKNDLGALENYLNKTNWNHSVFDVPLHYNLYNASNSGGNYDMAKLLNGTVVQKHPMHAVTFVDNHDSQPGESLESFVQEWFKPLAYALILTREQGYPSVFYGDYYGIPTHSVPAMKAKIDPILEARQNFAYGTQHDYFDHHNIIGWTREGNTTHPNSGLATIMSDGPGGEKWMYVGQNKAGQVWHDITGNKPGTVTINADGWANFSVNGGSVSIWVKR

SEQ ID NO: 17155 - protein, 485 aa, Unidentified
HHNGTNGTMMQYFEWHLPNDGNHWNRLRDDASNLRNRGITAIWIPPAWKGTSQNDVGYGAYDLYDLGEFNQKGTVRTKYGTRSQLESAIHALKNNGVQVYGDVVMNHKGGADATENVLAVEVNPNNRNQEISGDYTIEAWTKFDFPGRGNTYSDFKWRWYHFDGVDWDQSRQFQNRIYKFRGDGKAWDWEVDSENGNYDYLMYADVDMDHPEVVNELRRWGEWYTNTLNLDGFRIDAVKHIKYSFTRDWLTHVRNATGKEMFAVAEFWKNDLGALENYLNKTNWNHSVFDVPLHYNLYNASNSGGNYDMAKLLNGTVVQKHPMHAVTFVDNHDSQPGESLESFVQEWFKPLAYALILTREQGYPSVFQGDYYGIPTHSVPAMKAKIDPILEARQNFAYGTQHDYFDHHNIIGWTREGNTTHPNSGLATIMSDGPGGEKWMYVGQNKAGQVWHDITGNKPGTVTINADGWANFSVNGGSVSIWVKR

SEQ ID NO: 17156 - protein, 485 aa, Unidentified
HHNGTNGTMMQYFEWHLPNDGNHWNRLRDDASNLRNRGITAIWIPPAWKGTSQNDVGYGAYDLYDLGEFNQKGTVRTKYGTRSQLESAIHALKNNGVQVYGDVVMNHKGGADATENVLAVEVNPNNRNQEISGDYTIEAWTKFDFPGRGNTYSDFKWRWYHFDGVDWDQSRQFQNRIYKFRGDGKAWDWEVDSENGNYDYLMYADVDMDHPEVVNELRRWGEWYTNTLNLDGFRIDAVKHIKYSFTRDWLTHVRNATGKEMFAVAEFWKNDLGALENYLNKTNWNHSVFDVPLHYNLYNASNSGGNYDMAKLLNGTVVQKHPMHAVTFVDNHDSQPGESLESFVQEWFKPLAYALILTREQGYPSVFYGDYYGIPTHSVPAMKAKIDPILEARQNFAYGTQHDYFDHHNIIGWTREGNTTHPNSGLATIMSDGPGGEKWMYVGQNKAGQVWHDITGNKPGTVTINADGQANFSVNGGSVSIWVKR

SEQ ID NO: 17157 - protein, 485 aa, Unidentified
HHNGTNGTMMQYFEWHLPNDGNHWNRLRDDASNLRNRGITAIWIPPAWKGTSQNDVGYGAYDLYDLGEFNQKGTVRTKYGTRSQLESAIHALKNNGVQVYGDVVMNHKGGADATENVLAVEVNPNNRNQEISGDYTIEAWTKFDFPGRFNTYSDFKWRWYHFDGVDWDQSRQFQNRIYKFRGDGKAWDWEVDSENGNYDYLMYADVDMDHPEVVNELRRWGEWYTNTLNLDGFRIDAVKHIKYSFTRDWLTHVRNATGKEMFAVAEFWKNDLGALENYLNKTNWNHSVFDVPLHYNLYNASNSGGNYDMAKLLNGTVVQKHPMHAVTFVDNHDSQPGESLESFVQEWFKPLAYALILTREQGYPSVFYGDYYGIPTHSVPAMKAKIDPILEARQNFAYGTQHDYFDHHNIIGWTREGNTTHPNSGLATIMSDGPGGEKWMYVGQNKAGQVWHDITGNKPGTVTINADGWANFSVNGGSVSIWVKR

SEQ ID NO: 17158 - protein, 485 aa, Unidentified
HHNGTNGTMMQYFEWHLPNDGNHWNRLRDDASNLRNRGITAIWIPPAWKGTSQNDVGYGAYDLYDLGEFNQKGTVRTKYGTRSQLESAIHALKNNGVQVYGDVVMNHKGGADATENVLAVEVNPNNRNQEISGDYTIEAWTKFDFPGRGNTYSDFKWRWYHFDGVDWDQSRQFQNRIYKFRGDGKAWDWEVDSENGNYDYLMYADVDMDHPEVVNLLRRWGEWYTNTLNLDGFRIDAVKHIKYSFTRDWLTHVRNATGKEMFAVAEFWKNDLGALENYLNKTNWNHSVFDVPLHYNLYNASNSGGNYDMAKLLNGTVVQKHPMHAVTFVDNHDSQPGESLESFVQEWFKPLAYALILTREQGYPSVFYGDYYGIPTHSVPAMKAKIDPILEARQNFAYGTQHDYFDHHNIIGWTREGNTTHPNSGLATIMSDGPGGEKWMYVGQNKAGQVWHDITGNKPGTVTINADGWANFSVNGGSVSIWVKR

SEQ ID NO: 17159 - protein, 485 aa, Unidentified
HHNGTNGTMMQYFEWHLPNDGNHWNRLRDDASNLRNRGITAIWIPPAWKGTSQNDVGYGAYDLYDLGEFNQKGTVRTKYGTRSQLESAIHALKNNGVQVYGDVVMNHKGGADATENVLAVEVNPNNRNQEISGDYTIEAWTKFDFPGRGNTYSDFKWRWYHFDGVDWDQSRQFQNRIYKFRGDGKAWDWEVDSENGNYDYLMYADVDMDHPEVVNELRRWGEWYTNTLNLDGFRIDAVKHIKYSFTRDWLTHVRNATGKEMFAVAEFWKNDLGALENYLNKTNWNHSVFDVPLHYNLYNASNSGGNYDMAKLLNGTVVQKHPMHAVTFVDNHDSQPGESLESFVQEWFKPLAYALILTREQGYPSVFYGDYYGIPTHSVPAMKAKIDPILEARQNFAYGTQHDYFDHHNIIGWTREGATTHPNSGLATIMSDGPGGEKWMYVGQNKAGQVWHDITGNKPGTVTINADGWANFSVNGGSVSIWVKR

SEQ ID NO: 17160 - protein, 485 aa, Unidentified
HHNGTNRTMMQYFEWHLPNDGNHWNRLRDDASNLRNRGITAIWIPPAWKGTSQNDVGYGAYDLYDLGEFNQKGTVRTKYGTRSQLESAIHALKNNGVQVYGDVVMNHKGGADATENVLAVEVNPNNRNQEISGDYTIEAWTKFDFPGRGNTYSDFKWRWYHFDGVDWDQSRQFQNRIYKFRGDGKAWDWEVDSENGNYDYLMYADVDMDHPEVVNELRRWGEWYTNTLNLDGFRIDAVKHIKYSFTRDWLTHVRNATGKEMFAVAEFWKNDLGALENYLNKTNWNHSVFDVPLHYNLYNASNSGGNYDMAKLLNGTVVQKHPMHAVTFVDNHDSQPGESLESFVQEWFKPLAYALILTREQGYPSVFYGDYYGIPTHSVPAMKAKIDPILEARQNFAYGTQHDYFDHHNIIGWTREGNTTHPNSGLATIMSDGPGGEKWMYVGQNKAGQVWHDITGNKPGTVTINADGWANFSVNGGSVSIWVKR

SEQ ID NO: 17161 - protein, 485 aa, Unidentified
HHNGTNGTMMQYFEWHLPNDGNHWNRLRDDASNLRNRGITEIWIPPAWKGTSQNDVGYGAYDLYDLGEFNQKGTVRTKYGTRSQLESAIHALKNNGVQVYGDVVMNHKGGADATENVLAVEVNPNNRNQEISGDYTIEAWTKFDFPGRGNTYSDFKWRWYHFDGVDWDQSRQFQNRIYKFRGDGKAWDWEVDSENGNYDYLMYADVDMDHPEVVNELRRWGEWYTNTLNLDGFRIDAVKHIKYSFTRDWLTHVRNATGKEMFAVAEFWKNDLGALENYLNKTNWNHSVFDVPLHYNLYNASNSGGNYDMAKLLNGTVVQKHPMHAVTFVDNHDSQPGESLESFVQEWFKPLAYALILTREQGYPSVFYGDYYGIPTHSVPAMKAKIDPILEARQNFAYGTQHDYFDHHNIIGWTREGNTTHPNSGLATIMSDGPGGEKWMYVGQNKAGQVWHDITGNKPGTVTINADGWANFSVNGGSVSIWVKR

SEQ ID NO: 17162 - protein, 485 aa, Unidentified
HHHGTNGTMMQYFEWHLPNDGNHWNRLRDDASNLRNRGITAIWIPPAWKGTSQNDVGYGAYDLYDLGEFNQKGTVRTKYGTRSQLESAIHALKNNGVQVYGDVVMNHKGGADATENVLAVEVNPNNRNQEISGDYTIEAWTKFDFPGRGNTYSDFKWRWYHFDGVDWDQSRQFQNRIYKFRGDGKAWDWEVDSENGNYDYLMYADVDMDHPEVVNELRRWGEWYTNTLNLDGFRIDAVKHIKYSFTRDWLTHVRNATGKEMFAVAEFWKNDLGALENYLNKTNWNHSVFDVPLHYNLYNASNSGGNYDMAKLLNGTVVQKHPMHAVTFVDNHDSQPGESLESFVQEWFKPLAYALILTREQGYPSVFYGDYYGIPTHSVPAMKAKIDPILEARQNFAYGTQHDYFDHHNIIGWTREGNTTHPNSGLATIMSDGPGGEKWMYVGQNKAGQVWHDITGNKPGTVTINADGWANFSVNGGSVSIWVKR

SEQ ID NO: 17163 - protein, 485 aa, Bacillus sp.
HHNGTNGTMMQYFEWHLPNDGNHWNRLRDDASNLRNRGITAIWIPPAWKGTSQNDVGYGAYDLYDLGEFNQKGTVRTKYGTRSQLESAIHALKNNGVQVYGDVVMNHKGGADATENVLAVEVNPNNRNQEISGDYTIEAWTKFDFPGRGNTYSDFKWRWYHFDGVDWDQSRQFQNRIYKFRGDGKAWDWEVDSENGNYDYLMLADVDMDHPEVVNELRRWGEWYTNTLNLDGFRIDAVKHIKYSFTRDWLTHVRNATGKEMFAVAEFWKNDLGALENYLNKTNWNHSVFDVPLHYNLYNASNSGGNYDMAKLLNGTVVQKHPMHAVTFVDNHDSQPGESLESFVQEWFKPLAYALILTREQGYPSVFYGDYYGIPTHSVPAMKAKIDPILEARQNFAYGTQHDYFDHHNIIGWTREGNTTHPNSGLATIMSDGPGGEKWMYVGQNKAGQVWHDITGNKPGTVTINADGWANFSVNGGSVSIWVKR

SEQ ID NO: 17164 - protein, 485 aa, Unidentified
HHNGTNGTMMQYFEWHLPNDGNHWNRLRDDASNLRNRGITIIWIPPAWKGTSQNDVGYGAYDLYDLGEFNQKGTVRTKYGTRSQLESAIHALKNNGVQVYGDVVMNHKGGADATENVLAVEVNPNNRNQEISGDYTIEAWTKFDFPGRGNTYSDFKWRWYHFDGVDWDQSRQFQNRIYKFRGDGKAWDWEVDSENGNYDYLMYADVDMDHPEVVNELRRWGEWYTNTLNLDGFRIDAVKHIKYSFTRDWLTHVRNATGKEMFAVAEFWKNDLGALENYLNKTNWNHSVFDVPLHYNLYNASNSGGNYDMAKLLNGTVVQKHPMHAVTFVDNHDSQPGESLESFVQEWFKPLAYALILTREQGYPSVFYGDYYGIPTHSVPAMKAKIDPILEARQNFAYGTQHDYFDHHNIIGWTREGNTTHPNSGLATIMSDGPGGEKWMYVGQNKAGQVWHDITGNKPGTVTINADGWANFSVNGGSVSIWVKR

SEQ ID NO: 17165 - protein, 485 aa, Unidentified
HHTGTNGTMMQYFEWHLPNDGNHWNRLRDDASNLRNRGITAIWIPPAWKGTSQNDVGYGAYDLYDLGEFNQKGTVRTKYGTRSQLESAIHALKNNGVQVYGDVVMNHKGGADATENVLAVEVNPNNRNQEISGDYTIEAWTKFDFPGRGNTYSDFKWRWYHFDGVDWDQSRQFQNRIYKFRGDGKAWDWEVDSENGNYDYLMYADVDMDHPEVVNELRRWGEWYTNTLNLDGFRIDAVKHIKYSFTRDWLTHVRNATGKEMFAVAEFWKNDLGALENYLNKTNWNHSVFDVPLHYNLYNASNSGGNYDMAKLLNGTVVQKHPMHAVTFVDNHDSQPGESLESFVQEWFKPLAYALILTREQGYPSVFYGDYYGIPTHSVPAMKAKIDPILEARQNFAYGTQHDYFDHHNIIGWTREGNTTHPNSGLATIMSDGPGGEKWMYVGQNKAGQVWHDITGNKPGTVTINADGWANFSVNGGSVSIWVKR

SEQ ID NO: 17166 - protein, 485 aa, Unidentified
HHNGTNGTMMQYFEWHLPNDGNHWNRLRDDASNLRNRGITAIWIPPAWKGTSQNDVGYGAYDLYDLGEFNQKGTVRTKYGTRSQLESAIHALKNNGVQVYGDVVMNHKGGADATENVLAVEVNPNNRNQEISGDYTIEAWTKFDFPGRGNTYSDFKWRWYHFDGVDWDQSRQFQNRIYKFRGDGKAWDWEVDSENGNYDYLMYADVDMDHPEVVNELRRWGEWYTNTLNLDGFRIDAVKHIKYSFTRDWLTHVRNATGKEMFAVAEFWKNDLGALENYLNKTNWNHSVFDVPLHYNLYNASNSGGNYDMAKLLNGTVVQKHPMHAVTFVDNHDSQPGESLESFVQEWFKPLAYALILTRELGYPSVFYGDYYGIPTHSVPAMKAKIDPILEARQNFAYGTQHDYFDHHNIIGWTREGNTTHPNSGLATIMSDGPGGEKWMYVGQNKAGQVWHDITGNKPGTVTINADGWANFSVNGGSVSIWVKR

SEQ ID NO: 17167 - protein, 485 aa, Unidentified
HHNGTNGTMMQYFEWHLPNDGNHWNRLRDDASNLRNRGITAIWIPPAWKGTSQNDVGYGAYDLYDLGEFNQKGTVRTKYGTRSQLESAIHALKNNGVQVYGDVVMNHKGGADATENVLAVEVNPNNRNQEISGDYTIEAWTKFDFPGRGNTYSDFKWRWYHFDGVDWDQSRQFQNRIYKFRGDGKAWDWEVDSENGNYDYLMYADVDMDHPEVVNELRRWGEWYTNTLNLDGFRIDAVKHIKYSFTRDWLTHVRNATGKEMFAVAEFWKNDLGALENYLNKTNWNHSVFDVPLHYNLYNASNSGGNYDMAKLLNGTVVQKHPMHAVTFVDNHDSQPGESLESFVQEWFKPLAYALILTREQGYPSVFYGDYYGIPTHSVPAMKAVIDPILEARQNFAYGTQHDYFDHHNIIGWTREGNTTHPNSGLATIMSDGPGGEKWMYVGQNKAGQVWHDITGNKPGTVTINADGWANFSVNGGSVSIWVKR

SEQ ID NO: 17168 - protein, 485 aa, Unidentified
HHNGTNGTMMQYFEWHLPNDGNHWNRLRDDASNLRNRGITAIWIPPAWKGTSQNDVGYGAYDLYDLGEFNQKGTVRTKYGTRSQLESAIHALKNNGVQVYGDVVMNHKGGADATENVLAVEVNPNNRNQEISGDYTIEAWTKFDFPGRGNTYSDFKWRWYHFDGVDWDQSRQFQNRIYKFRGDGKAWDWEVDSENGNYDYLMYADVDMDHPEVVNELRRWGEWYTNTLNLDGFRIDAVKHIKYSFTRDWLTHVRNATGKEMFAVAEFWKNDLGALENYLNKTNWNHSVFDVPLHYNLYNASNSGGNYDMAKLLNGTVVQKHPMHAVTFVDNHDSQPGESLESFVQEWFKPLAYALILTREKGYPSVFYGDYYGIPTHSVPAMKAKIDPILEARQNFAYGTQHDYFDHHNIIGWTREGNTTHPNSGLATIMSDGPGGEKWMYVGQNKAGQVWHDITGNKPGTVTINADGWANFSVNGGSVSIWVKR

SEQ ID NO: 17169 - protein, 485 aa, Unidentified
HHNGTNGTMMQYFEWHLPNDGNHWNRLRDDASNLRNRGITAIWIPPAWKGTSQNDVGYGAYDLYDLGEFNQKGTVRTKYGTRSQLESAIHALKNNGVQVYGDVVMNHKGGADATENVLAVEVNPNNRNQEISGDYTIEAWTKFDFPGRGNTYSDFKWRWYHFDGVDWDQSRQFQNRIYKFRGDGKAWDWEVDSENGNYDYLMYADVDMDHPEVVNELRRWGEWYTNTLNLDGFRIDAVKHIKYSFTRDWLTHVRNATGKEMFAVAEFWKNDLGALENYLNKTNWNHSVFDVPLHYNLYNASNSGGNYDMAKLLNGTVVEKHPMHAVTFVDNHDSQPGESLESFVQEWFKPLAYALILTREQGYPSVFYGDYYGIPTHSVPAMKAKIDPILEARQNFAYGTQHDYFDHHNIIGWTREGNTTHPNSGLATIMSDGPGGEKWMYVGQNKAGQVWHDITGNKPGTVTINADGWANFSVNGGSVSIWVKR

SEQ ID NO: 17170 - protein, 485 aa, Unidentified
HHNGTNGTMMQYFEWHLPNDGNHWNRLRDDASNLRNRGITAIWIPPAWKGTSQNDVGYGAYDLYDLGEFNQKGTVRTKYGTRSQLESAIHALKNNGVQVYGDVVMNHKGGADATENVLAVEVNPNNRNQEISGDYTIEAWTKFDFPGRGNTYSDFKWRWYHFDGVDWDQSRQFQNRIYKFRGDGKAWDWEVDSENGNYDYLMYADVDMDHPEVVNELRRWGEWYTNTLNLDGFRIDAVKHIKYSFTRDWLTHVRNATGKEMFAVAEFWKNDLGALENYLNKTNWNHSVFDVPLHYNLYNASNSGGNYDMAKLLNGTVVQKHPAHAVTFVDNHDSQPGESLESFVQEWFKPLAYALILTREQGYPSVFYGDYYGIPTHSVPAMKAKIDPILEARQNFAYGTQHDYFDHHNIIGWTREGNTTHPNSGLATIMSDGPGGEKWMYVGQNKAGQVWHDITGNKPGTVTINADGWANFSVNGGSVSIWVKR

SEQ ID NO: 17171 - protein, 485 aa, Unidentified
HHNGTNGTMMQYFEWHLPNDGNHWNRLRDDASNLRNRGITAIWIPPAWKGTSQNDVGYGAYDLYDLGEFNQKGTVRTKYGTRSQLESAIHALKNNGVQVYGDVVMNHKGGADATENVLAVEVNPNNRNQEISGDYTIEAWTKFDFPGRGNTYSDFKWRWYHFDGVDWDQSRQFQNRIYKFRGDGKAWDWEVDSENGNYDYLMYADVDMDHPEVVNELRRWGEWYTNTLNLDGFRIDAVKHIKYSFTRDWLTHVRNATGKEMFAVAEFWKNDLGALENYLNKTNDNHSVFDVPLHYNLYNASNSGGNYDMAKLLNGTVVQKHPMHAVTFVDNHDSQPGESLESFVQEWFKPLAYALILTREQGYPSVFYGDYYGIPTHSVPAMKAKIDPILEARQNFAYGTQHDYFDHHNIIGWTREGNTTHPNSGLATIMSDGPGGEKWMYVGQNKAGQVWHDITGNKPGTVTINADGWANFSVNGGSVSIWVKR

SEQ ID NO: 17172 - protein, 485 aa, Unidentified
HHNGTNGTMMQYFEWHLPNDGNHWNRLRDDASNLRNRGITAIWIPPAWKGTSQNDVGYGAYDLYDLGEFNQKGTVRTKYGTRSQLESAIHALKNNGVQVYGDVVMNHKGGADATENVLAVEVNPNNRNQEISGDYTIEAWTKFDFPGRGNTYSDFKWRWYHFDGVDWDQSRQFQNRIYKFRGDGKAWDWEVDSENGNYDYLMYADVDMDHPEVVNELRRWGEWYTNTLNLDGFRIDAVKHIKYSFTRDWLTHVRNATGKEMFAVAEFWKNDLGALENYLNKTNWNHSVFDVPLHYNLYNASNSGGNYDMAKLLNGTVVQKHPMHAVTFVDNHDSQPGESLESFVQEWFKPLAYALILTREQGYPSVFYGDYYGIPTHSVPAMKAKICPILEARQNFAYGTQHDYFDHHNIIGWTREGNTTHPNSGLATIMSDGPGGEKWMYVGQNKAGQVWHDITGNKPGTVTINADGWANFSVNGGSVSIWVKR

SEQ ID NO: 17173 - protein, 485 aa, Unidentified
HHNGTNGTMMQYFEWHLPNDGNHWNRLRDDASNLRNRGITAIWIPPAWKGTSQNDVGYGAYDLYDLGEFNQKGTVRTKYGTRSQLESAIHALKNNGVQVYGDVVMNHKGGADATENVLAVEVNPNNRNQEISGDYTIEAWTKFDFPGRGNTYSDFKWRWYHFDGVDWDQSRQFQNRIYKFRGDGKAWDWEVDSENGNYDYLMYADVDMDHPEVVNELRRWGEWYTNTLNLDGFRIDAVKHIKYSFTRDWLTHVRNATGKEMFAVAEFWKNDLGALENYLNKTNWNHSVFDVPLHYNLYNASNSGGNYDMAKLLNGTVVQKHPMHAVTFVDNHDSQPGESLESFVQERFKPLAYALILTREQGYPSVFYGDYYGIPTHSVPAMKAKIDPILEARQNFAYGTQHDYFDHHNIIGWTREGNTTHPNSGLATIMSDGPGGEKWMYVGQNKAGQVWHDITGNKPGTVTINADGWANFSVNGGSVSIWVKR

SEQ ID NO: 17174 - protein, 485 aa, Unidentified
HHNGTNGTMMQYFEWHLPNDGNHWNRLRDDASNLRNRGITAIWIPPAWKGTSQNDVGYGAYDLYDLGEFNQKGTVRTKYGTRSQLESAIHALKNNGVQVYGDVVMNHKGGADATENVLAVEVNPNNRNQEISGDYTIEATTKFDFPGRGNTYSDFKWRWYHFDGVDWDQSRQFQNRIYKFRGDGKAWDWEVDSENGNYDYLMYADVDMDHPEVVNELRRWGEWYTNTLNLDGFRIDAVKHIKYSFTRDWLTHVRNATGKEMFAVAEFWKNDLGALENYLNKTNWNHSVFDVPLHYNLYNASNSGGNYDMAKLLNGTVVQKHPMHAVTFVDNHDSQPGESLESFVQEWFKPLAYALILTREQGYPSVFYGDYYGIPTHSVPAMKAKIDPILEARQNFAYGTQHDYFDHHNIIGWTREGNTTHPNSGLATIMSDGPGGEKWMYVGQNKAGQVWHDITGNKPGTVTINADGWANFSVNGGSVSIWVKR

SEQ ID NO: 17175 - protein, 485 aa, Unidentified
HHNGTNGTMMQYFEWHLPNDGNHWNRLRDDASNLRNRGITAIWIPPAWKGTSQNDVGYGAYDLYDLGEFNQKGTVRTKYGTRSQLESAIHALKNNGVQVYGDVVMNHKGGADATENVLAVEVNPNNRNQEISGDYTIEAWTKFDFPGRGNTYSDFKWRWYHFDGVDWDQSRQFQNRIYKFRGDGKAWDWEVDSENGNYDYLMYADVDMDHPEVVNELRRWGEWYTNTLNLDGFRIDAVKHIKYSFTRDWLTHVRNAAGKEMFAVAEFWKNDLGALENYLNKTNWNHSVFDVPLHYNLYNASNSGGNYDMAKLLNGTVVQKHPMHAVTFVDNHDSQPGESLESFVQEWFKPLAYALILTREQGYPSVFYGDYYGIPTHSVPAMKAKIDPILEARQNFAYGTQHDYFDHHNIIGWTREGNTTHPNSGLATIMSDGPGGEKWMYVGQNKAGQVWHDITGNKPGTVTINADGWANFSVNGGSVSIWVKR

SEQ ID NO: 17176 - protein, 485 aa, Unidentified
HHNGTNGTMMQYFEWHLPNDGNHWNRLRDDASNLRNRGITAIWIPPAWKGTSQNDVGYGAYDLYDLGEFNQKGTVRTKYGTRSQLESAIHALKNNGVQVYGDVVMNHKGGADATENVLAVEVNPNNRNQEISGDYTIEAWTKFDFPGRGNTYSDFKWRWYHFDGVDWDQSRQFQNRIYKFRGDGKAWDWEVDSENGNYDYLMYADVDMDHPEVVNELRRWGEWYTNTLNLDGFRIDAVKHIKYSFTRDWLTHVRNATGKEMFAVAEFWKNDLGALENYLNKTNWNHSVFDVYLHYNLYNASNSGGNYDMAKLLNGTVVQKHPMHAVTFVDNHDSQPGESLESFVQEWFKPLAYALILTREQGYPSVFYGDYYGIPTHSVPAMKAKIDPILEARQNFAYGTQHDYFDHHNIIGWTREGNTTHPNSGLATIMSDGPGGEKWMYVGQNKAGQVWHDITGNKPGTVTINADGWANFSVNGGSVSIWVKR

SEQ ID NO: 17177 - protein, 485 aa, Unidentified
HHNGTNGTMMQYFEWHLPNDGNHWNRLRDDASNLRNRGITAIWIPPAWKGTSQNDVGYGAYDLYDLGEFNQKGTVRTKYGTRSQLESAIHALKNNGVQVYGDVVMNHKGGADATENVLAVEVNPNNRNQEISGDYTIEAWTKFDFPGRGNTYSDFKWRWYHFDGVDWDQSRQFQNRIYKFRGDGKAWDWEVDSENGNYDYLMYADVDMDHPEVVNELRRWGEWYTNTLNLDGFRIDAVKHIKYSFTRDWLTHVRNATGKEMFAVAEFWKNDLGALENYLNKTNWNHSVFDVPLHYNLYNASNSGGNYDMAKLLNGTVVQKHPMHAVTFVDNHDSQPGESLESFVQEWFKPLAYALILTREQGTPSVFYGDYYGIPTHSVPAMKAKIDPILEARQNFAYGTQHDYFDHHNIIGWTREGNTTHPNSGLATIMSDGPGGEKWMYVGQNKAGQVWHDITGNKPGTVTINADGWANFSVNGGSVSIWVKR

SEQ ID NO: 17178 - protein, 485 aa, Unidentified
HHNGTNGTMMQYFEWHLPNDGNHWNRLRDDASNLRNRGITAIWIPPAWKGTSQNDVGYGAYDLYDLGEFNQKGTVRTKYGTRSQLESAIHALKNNGVQVYGDVVMNHKGGADATENVLAVEVNPNNRNQEISGDYTIEAWTKFDFPGRGNTYSDFKWRWYHFDGVDWDQSRQFQNRIYKFRGDGKAWDWEVDSENGNYDYLMYADVDMDHPEVVNELRRWGEWYTNTLNLDGFRIDAVKHIKYSFTRDWLTHVRNATGKEMFAVAEFWKNDLGALENYLNKTNWNHSVFDVPLHYNLYNASNSGGNYDMAKLLNGTVVQKHPMHAVTFVDNHDSQPGESLESFVQEWFKPLAYALILTREQGYPSVFYGDYYGIPTHSVPAMKAKIDPILEARQNFAYGTQHDYFDHHNIIGWTREGNTTYPNSGLATIMSDGPGGEKWMYVGQNKAGQVWHDITGNKPGTVTINADGWANFSVNGGSVSIWVKR

SEQ ID NO: 17179 - protein, 485 aa, Unidentified
HHNGTNGTMMQYFEWHLPNDGNHWNRLRDDASNLRNRGITAIWIPPAWKGTSQNDVGYGAYDLYDLGEFNQKGTVRTKYGTRSQLESAIHALKNNGVQVYGDVVMNHKGGADATENVLAVEVNPNNRNQEISGDYTIEAWTKFDFPGRGNTYSDFKWRWYHFDGVDWDQSRQFQNRIYKFRGDGKAWDWEVDSENGNYDYLMYADVDMDHPEVVNELRRWGEWYTNTLNLDGFRIDAVKHIKYSFTRDWLTHVRNATGKEMFAVAEFWKNDLGALENYLNKTNWNHSVFDVPLHYNLYNASNSGGNYDMAKLLNGTVVQKHPMHAVTFVDNHDSQPGESLESFVQEWFKPLAYALILTREQGYPSVFYGDYYGIPTHSVPAMKAKIDPILEARQNFAYGTQHDYFDHHNIIGWTREGNTTHPNSGLATIMSDGIGGEKWMYVGQNKAGQVWHDITGNKPGTVTINADGWANFSVNGGSVSIWVKR

SEQ ID NO: 17180 - protein, 485 aa, Unidentified
HHNGTNGTMMQYFEWHLPNDGNHWNRLRDDASNLRNRGITAIWIPPAWKGTSQNDVGYGAYDLYDLGEFNQKGTVRTKYGTRSQLESAIHALKNNGVQVYGDVVMNHKGGADATENVLAVEVNPNNRNQEISGDYTIEAWTKFDFPGRGNTYSDFKWRWYHFDGVDWDQSRQFQNRIYKFRGDGKAWDWEVDSENGNYDYLMYADVDMDHPEVVNELRRWGEWYTNTLNLDGFRIDAVKHIKYSFTRDWLTHVRNATGKEMFAVAEFWKNDLGALENYLNKTNWNHSVFDVPLHYNLYNASNSGGNYDMAKLLNGTVVQKHPMHAVTFVDNHDSQPGESLESFVQEWFKPLAYALILTREQGYPSVFYGDYYGIPTHSVPAMKAKIDPILEARQNFAYGTQHDYFDHHNIIGWTREGNTTHPNSGLATIMSDGPMGEKWMYVGQNKAGQVWHDITGNKPGTVTINADGWANFSVNGGSVSIWVKR

SEQ ID NO: 17181 - protein, 485 aa, Unidentified
HHNGTNGTMMQYFEWHLPNDGNHWNRLRDDASNLRNRGITAIWIPPAWKGTSQNDVGYGAYDLYDLGEFNQKLTVRTKYGTRSQLESAIHALKNNGVQVYGDVVMNHKGGADATENVLAVEVNPNNRNQEISGDYTIEAWTKFDFPGRGNTYSDFKWRWYHFDGVDWDQSRQFQNRIYKFRGDGKAWDWEVDSENGNYDYLMYADVDMDHPEVVNELRRWGEWYTNTLNLDGFRIDAVKHIKYSFTRDWLTHVRNATGKEMFAVAEFWKNDLGALENYLNKTNWNHSVFDVPLHYNLYNASNSGGNYDMAKLLNGTVVQKHPMHAVTFVDNHDSQPGESLESFVQEWFKPLAYALILTREQGYPSVFYGDYYGIPTHSVPAMKAKIDPILEARQNFAYGTQHDYFDHHNIIGWTREGNTTHPNSGLATIMSDGPGGEKWMYVGQNKAGQVWHDITGNKPGTVTINADGWANFSVNGGSVSIWVKR

SEQ ID NO: 17182 - protein, 485 aa, Bacillus sp.
HHNGTNGTMMQYFEWHLPNDGNHWNRLRDDASNLRNRGITAIWIPPAWKGTSQNDVGYGAYDLYDLGEFNQKGTVRTKYGTRSQLESAIHALKNNGVQVYGDVVMNHKGGADATENVLAVEVNPNNRNQEISGDYTIEAWTKFDFPGRGNTYSDFKWRWYHFDGVDWDQSRQFQNRIYKFRGXXKAWDWEVDSENGFYDYLMYADVDMDHPEVVNELRRWGEWYTNTLNLDGFRIDAVKHIKYSFTRDWLTHVRNATGKEMFAVAEFWKNDLGALENYLNKTNWNHSVFDVPLHYNLYNASNSGGNYDMAKLLNGTVVQKHPMHAVTFVDNHDSQPGESLESFVQEWFKPLAYALILTREQGYPSVFYGDYYGIPTHSVPAMKAKIDPILEARQNFAYGTQHDYFDHHNIIGWTREGNTTHPNSGLATIMSDGPGGEKWMYVGQNKAGQVWHDITGNKPGTVTINADGWANFSVNGGSVSIWVKR

SEQ ID NO: 17183 - protein, 485 aa, Unidentified
HHCGTNGTMMQYFEWHLPNDGNHWNRLRDDASNLRNRGITAIWIPPAWKGTSQNDVGYGAYDLYDLGEFNQKGTVRTKYGTRSQLESAIHALKNNGVQVYGDVVMNHKGGADATENVLAVEVNPNNRNQEISGDYTIEAWTKFDFPGRGNTYSDFKWRWYHFDGVDWDQSRQFQNRIYKFRGDGKAWDWEVDSENGNYDYLMYADVDMDHPEVVNELRRWGEWYTNTLNLDGFRIDAVKHIKYSFTRDWLTHVRNATGKEMFAVAEFWKNDLGALENYLNKTNWNHSVFDVPLHYNLYNASNSGGNYDMAKLLNGTVVQKHPMHAVTFVDNHDSQPGESLESFVQEWFKPLAYALILTREQGYPSVFYGDYYGIPTHSVPAMKAKIDPILEARQNFAYGTQHDYFDHHNIIGWTREGNTTHPNSGLATIMSDGPGGEKWMYVGQNKAGQVWHDITGNKPGTVTINADGWANFSVNGGSVSIWVKR

SEQ ID NO: 17184 - protein, 485 aa, Bacillus sp.
HHNGTNGTMMQYFEWHLPNDGNHWNRLRDDASNLRNRGITAIWIPPAWKGTSQNDVGYGAYDLYDLGEFNQKGTVRTKYGTRSQLESAIHALKNNGVQVYGDVVMNHKGGADATENVLAVEVNPNNRNQEISGDYTIEAWTKFDFPGRGNTYSDFKWRWYHFDGVDWDQSRQFQNRIYKFRGDGKAWDWEVDSENGNYDYLMYADVDMDYPEVVNELRRWGEWYTNTLNLDGFRIDAVKHIKYSFTRDWLTHVRNATGKEMFAVAEFWKNDLGALENYLNKTNWNHSVFDVPLHYNLYNASNSGGNYDMAKLLNGTVVQKHPMHAVTFVDNHDSQPGESLESFVQEWFKPLAYALILTREQGYPSVFYGDYYGIPTHSVPAMKAKIDPILEARQNFAYGTQHDYFDHHNIIGWTREGNTTHPNSGLATIMSDGPGGEKWMYVGQNKAGQVWHDITGNKPGTVTINADGWANFSVNGGSVSIWVKR

SEQ ID NO: 17185 - protein, 485 aa, Unidentified
HHNGTNGTMMQYFEWHLPNDGNHWNRLRDDASNLRNRGITAIWIPPAWKGTSQNDVGYGAYDLYDLGEFNQKGTVRTKYGTRSQLESAIHALKNNGVQVYGDVVMNHKGGADATENVLAVEVNPNNRNQEISGDYTIEAWTKFDFPGRGNTYSDFKWRWYHFDGVDWDQSRQFQNRIYKFRGDGKAWDWEVDSENGNYDYLMYADVDMDHPEVVNELRRWGEWYTNTLNLDGFRIDAVKHIKYSFTRDWLTHVRNATGKEMFAVAEFWKNDLGALENYLNKTNWNHSVFDVPLHYNLYNASNSGGNYDMAKLLNGTVVQKHPMHAVTFVDNHDSQPGESLESFVQEWFKPLAYALILTREQGYPSVFYGDYYGIPTHSVPAMKAKIDPILEARQNFAYGTQHDYFDHHNIIGWTREGNTTHPNSGLATIMSDGPTGEKWMYVGQNKAGQVWHDITGNKPGTVTINADGWANFSVNGGSVSIWVKR

SEQ ID NO: 17186 - protein, 485 aa, Unidentified
HHNGTNGTMMQYFEWHLPNDGNHWNRLRDDASNLRNRGINAIWIPPAWKGTSQNDVGYGAYDLYDLGEFNQKGTVRTKYGTRSQLESAIHALKNNGVQVYGDVVMNHKGGADATENVLAVEVNPNNRNQEISGDYTIEAWTKFDFPGRGNTYSDFKWRWYHFDGVDWDQSRQFQNRIYKFRGDGKAWDWEVDSENGNYDYLMYADVDMDHPEVVNELRRWGEWYTNTLNLDGFRIDAVKHIKYSFTRDWLTHVRNATGKEMFAVAEFWKNDLGALENYLNKTNWNHSVFDVPLHYNLYNASNSGGNYDMAKLLNGTVVQKHPMHAVTFVDNHDSQPGESLESFVQEWFKPLAYALILTREQGYPSVFYGDYYGIPTHSVPAMKAKIDPILEARQNFAYGTQHDYFDHHNIIGWTREGNTTHPNSGLATIMSDGPGGEKWMYVGQNKAGQVWHDITGNKPGTVTINADGWANFSVNGGSVSIWVKR

SEQ ID NO: 17187 - protein, 485 aa, Unidentified
HHNGTNQTMMQYFEWHLPNDGNHWNRLRDDASNLRNRGITAIWIPPAWKGTSQNDVGYGAYDLYDLGEFNQKGTVRTKYGTRSQLESAIHALKNNGVQVYGDVVMNHKGGADATENVLAVEVNPNNRNQEISGDYTIEAWTKFDFPGRGNTYSDFKWRWYHFDGVDWDQSRQFQNRIYKFRGDGKAWDWEVDSENGNYDYLMYADVDMDHPEVVNELRRWGEWYTNTLNLDGFRIDAVKHIKYSFTRDWLTHVRNATGKEMFAVAEFWKNDLGALENYLNKTNWNHSVFDVPLHYNLYNASNSGGNYDMAKLLNGTVVQKHPMHAVTFVDNHDSQPGESLESFVQEWFKPLAYALILTREQGYPSVFYGDYYGIPTHSVPAMKAKIDPILEARQNFAYGTQHDYFDHHNIIGWTREGNTTHPNSGLATIMSDGPGGEKWMYVGQNKAGQVWHDITGNKPGTVTINADGWANFSVNGGSVSIWVKR

SEQ ID NO: 17188 - protein, 485 aa, Bacillus sp.
HHNGTNGTMMQYFEWHLPNDGNHWNRLRDDASNLRNRGITAIWIPPAWKGTSQNDVGYGAYDLYDLGEFNQKGTVRTKYGTRSQLESAIHALKNNGVQVYGDVVMNHKGGADATENVLAVEVNPNNRNQEISGDYTIEAWTKFDFPGRGNTYSDFKWRWYHFDGVDWDQSRQFQNRIYKFRGDGKAWDWEVDSENGNYDYLMFADVDMDHPEVVNELRRWGEWYTNTLNLDGFRIDAVKHIKYSFTRDWLTHVRNATGKEMFAVAEFWKNDLGALENYLNKTNWNHSVFDVPLHYNLYNASNSGGNYDMAKLLNGTVVQKHPMHAVTFVDNHDSQPGESLESFVQEWFKPLAYALILTREQGYPSVFYGDYYGIPTHSVPAMKAKIDPILEARQNFAYGTQHDYFDHHNIIGWTREGNTTHPNSGLATIMSDGPGGEKWMYVGQNKAGQVWHDITGNKPGTVTINADGWANFSVNGGSVSIWVKR

SEQ ID NO: 17189 - protein, 485 aa, Unidentified
HHNGTNGTMMQYFEWHLPNDGNHWNRLRDDASNLRNRGITAIWIPPAWKGTSQNDVGYGAYDLYDLGEFNQKGTVRTKYGTRSQLESAIHALKNNGVQVYGDVVMNHKGGADATENVLAVEVNPNNRNQEISGDYTIEAWTKFDFPGRGNTYSDFKWRWYHFDGVDWDQSRQFQNRIYKFRGDGKAWDWEVDSENGNYDYLMYADVDMDHPEVVNELRRWGEWYTNTLNLDGFRIDAVKHIKYSFTRDWLTHVRNATGKEMFAVAEFWKNDLGALENYLNKTNWNHSVFDVPLHYNLYNASNSGGNYDMAKLLNGTVVQKHPMHAVTFVDNHDSQPGESLESFVQEWFKPLAYALILTREQGYPSVFYGDYYGIPTHSVPAMKAKIDPILEARQNFAYGTQHDYFDHHNIIGWTREGNTTHPNSGLATIMSDGPGGEKWMYVGQNKAGQVWHDITGNKPGTVTINADGAANFSVNGGSVSIWVKR

SEQ ID NO: 17190 - protein, 485 aa, Unidentified
HHNGTNGTMMQYFEWHLPNDGNHWNRLRDDASNLRNRGITAIWIPPAWKGTSQNDVGYGAYDLYDLGEFNQKGTVRTKYGTRSQLESAIHALKNNGVQVYGDVVMNHKGGADATENVLAVEVNPNNRNQEISGDYTIEAWTKFDFPGRGNTYSDFKWRWYHFDGVDWDQSRQFQNRIYKFRGDGKAWDWEVDSENGNYDYLMYADVDMDHPEVVNELRRWGEWYTNTLNLDGFRIDAVKHIKYSFTRDWLTHVRNATGKEMFAVAEFWKNDLGALENYLNKTNWNHSVFDVPLHYNLYNASNSGGNYDMAKLLNGTVVQKHPMHAVTFVDNHDSQPGESLESFVQEWFKPLAYALILTREQGYPSVFYGDYNGIPTHSVPAMKAKIDPILEARQNFAYGTQHDYFDHHNIIGWTREGNTTHPNSGLATIMSDGPGGEKWMYVGQNKAGQVWHDITGNKPGTVTINADGWANFSVNGGSVSIWVKR

SEQ ID NO: 17191 - protein, 485 aa, Unidentified
HHNGTNGTMMQYFEWHLPNDGNHWNRLRDDASNLRNRGITAIWIPPAWKGTSQNDVGYGAYDLYDLGEFNQKGTVRTKYGTRSQLESAIHALKNNGVQVYGDVVMNHKGGADATENVLAVEVNPNNRNQEISEDYTIEAWTKFDFPGRGNTYSDFKWRWYHFDGVDWDQSRQFQNRIYKFRGDGKAWDWEVDSENGNYDYLMYADVDMDHPEVVNELRRWGEWYTNTLNLDGFRIDAVKHIKYSFTRDWLTHVRNATGKEMFAVAEFWKNDLGALENYLNKTNWNHSVFDVPLHYNLYNASNSGGNYDMAKLLNGTVVQKHPMHAVTFVDNHDSQPGESLESFVQEWFKPLAYALILTREQGYPSVFYGDYYGIPTHSVPAMKAKIDPILEARQNFAYGTQHDYFDHHNIIGWTREGNTTHPNSGLATIMSDGPGGEKWMYVGQNKAGQVWHDITGNKPGTVTINADGWANFSVNGGSVSIWVKR

SEQ ID NO: 17192 - protein, 485 aa, Unidentified
HHNGTNGTMMQYFEWHLPNDGNHWNRLRDDASNLRNRGITAIWIPPAWKGTSQNDVGYGAYDLYDLGEFNQKGTVRTKYGTRSQLESAIHALKNNGVQVYGDVVMNHKGRADATENVLAVEVNPNNRNQEISGDYTIEAWTKFDFPGRGNTYSDFKWRWYHFDGVDWDQSRQFQNRIYKFRGDGKAWDWEVDSENGNYDYLMYADVDMDHPEVVNELRRWGEWYTNTLNLDGFRIDAVKHIKYSFTRDWLTHVRNATGKEMFAVAEFWKNDLGALENYLNKTNWNHSVFDVPLHYNLYNASNSGGNYDMAKLLNGTVVQKHPMHAVTFVDNHDSQPGESLESFVQEWFKPLAYALILTREQGYPSVFYGDYYGIPTHSVPAMKAKIDPILEARQNFAYGTQHDYFDHHNIIGWTREGNTTHPNSGLATIMSDGPGGEKWMYVGQNKAGQVWHDITGNKPGTVTINADGWANFSVNGGSVSIWVKR

SEQ ID NO: 17193 - protein, 483 aa, Bacillus amyloliquefaciens
HHNGTNGTMMQYFEWHLPNDGNHWNRLRDDASNLRNRGITAIWIPPAWKGTSQNDVGYGAYDLYDLGEFNQKGTVRTKYGTRSQLESAIHALKNNGVQVYGDVVMNHKGGADATENVLAVEVNPNNRNQEISGDYTIEAWTKFDFPGRGNTYSDFKWRWYHFDGVDWDQSRQFQNRIYKFGGKAWDWEVDSENGNYDYLMYADVDMDHPEVVNELRRWGEWYTNTLNLDGFRIDAVKHIKYSFTRDWLTHVRNATGKEMFAVAEFWKNDLGALENYLNKTNWNHSVFDVPLHYNLYNASNSGGNYDMAKLLNGTVVQKHPMHAVTFVDNHDSQPGESLESFVQEWFKPLAYALILTREQGYPSVFYGDYYGIPTHSVPAMKAKIDPILEARQNFAYGTQHDYFDHHNIIGWTREGNTTHPNSGLATIMSDGPGGEKWMYVGQNKAGQVWHDITGNKPGTVTINADGWANFSVNGGSVSIWVKR

SEQ ID NO: 17194 - protein, 485 aa, Unidentified
HHNGTNGTMMQYFEWHLPNDGNHWNRLRDDASNLRNRGITAIWIPPAWKGTSQNDVGYGAYDLYDLGEFNQKGTVRTKYGTRSQLESAIHALKNNGVQVYGDVVMNHKGGADATENVLAVEVNPNNRNQEISGDYTIEAWTKFDFPGRGNTYSDFKWRWYHFDGVDWDQSRQFQNRIYKFRGDGKAWDWEVDSENGNYDYLMYADVDMDHPEVVNELRRWGEWYTNTLNLDGFRIDAVKHIKYSFTRDWLTHVRNATGKEMFAVAEFWKNDLGALENYLNKTNWNHSVFDVPLHYNLYNASNEGGNYDMAKLLNGTVVQKHPMHAVTFVDNHDSQPGESLESFVQEWFKPLAYALILTREQGYPSVFYGDYYGIPTHSVPAMKAKIDPILEARQNFAYGTQHDYFDHHNIIGWTREGNTTHPNSGLATIMSDGPGGEKWMYVGQNKAGQVWHDITGNKPGTVTINADGWANFSVNGGSVSIWVKR

SEQ ID NO: 17195 - protein, 485 aa, Unidentified
HHNGTNGTMMQYFEWHLPNDGNHWNRLRDDASNLRNRGITAIWIPPAWKGTSQNDVGYGAYDLYDLGEFNQKGTVRTKYGTRSQLESAIHALKNNGVQVYGDVVMNHKGGADATENVLAVEVNPNNRNQEISGDYTIEAWTKFDFPGRGNTYSDFKWRWYHFDGVDWDQSRQFQNRIYKFRGDGKAWDWEVDSENGNYDYLMYADVDMDHPEVVNELRRWGEWYTNTLNLDGFRIDAVKHIKYSFTRDWLTHVRNATGKEMFAVAEFWKNDLGALENYLNKTNWNHSVFDVPLHYNLYNASNGGGNYDMAKLLNGTVVQKHPMHAVTFVDNHDSQPGESLESFVQEWFKPLAYALILTREQGYPSVFYGDYYGIPTHSVPAMKAKIDPILEARQNFAYGTQHDYFDHHNIIGWTREGNTTHPNSGLATIMSDGPGGEKWMYVGQNKAGQVWHDITGNKPGTVTINADGWANFSVNGGSVSIWVKR

SEQ ID NO: 17196 - protein, 485 aa, Unidentified
HHNGTNGTMMQYFEWHLPNDGNHWNRLRDDASNLRNRGITAIWIPPAWKGTSQNDVGYGAYDLYDLGEFNQKGTVRTKYGTRSQLESAIHALKNNGVIVYGDVVMNHKGGADATENVLAVEVNPNNRNQEISGDYTIEAWTKFDFPGRGNTYSDFKWRWYHFDGVDWDQSRQFQNRIYKFRGDGKAWDWEVDSENGNYDYLMYADVDMDHPEVVNELRRWGEWYTNTLNLDGFRIDAVKHIKYSFTRDWLTHVRNATGKEMFAVAEFWKNDLGALENYLNKTNWNHSVFDVPLHYNLYNASNSGGNYDMAKLLNGTVVQKHPMHAVTFVDNHDSQPGESLESFVQEWFKPLAYALILTREQGYPSVFYGDYYGIPTHSVPAMKAKIDPILEARQNFAYGTQHDYFDHHNIIGWTREGNTTHPNSGLATIMSDGPGGEKWMYVGQNKAGQVWHDITGNKPGTVTINADGWANFSVNGGSVSIWVKR

SEQ ID NO: 17197 - protein, 485 aa, Unidentified
HHNGTNGTMMQYFEWHLPNDGNHWNRLRDDASNLRNRGITAIWIPPAWKGTSQNDVGYGAYDLYDLGEFNQKGTVRTKYGTRSQLESAIHALKNNGVQVYGDVVMNHKGGADATENVLAVEVNPNNRNQEISGDYTIEAWTKFDFPGRGNTYSDFKWRWYHFDGVDWDQSRQFQNRIYKFRGDGKAWDWEVDSENGNYDYLMYADVDMDHPEVVNELRRWGEWYTNTLNLDGFRIDAVKHIKYSFTRDWLTHVRNATGKEMFAVAEFWKNDLGALENYLNKTNWNHSVFDVPLHYNLYNASNSGGNYDMAKLLNGTVVQKHPMHAVTFVDNHDSQPGESLESFVQEWFKPLAYALILTREQGYPSVFYGDYYGIPTHSVPAMCAKIDPILEARQNFAYGTQHDYFDHHNIIGWTREGNTTHPNSGLATIMSDGPGGEKWMYVGQNKAGQVWHDITGNKPGTVTINADGWANFSVNGGSVSIWVKR

SEQ ID NO: 17198 - protein, 485 aa, Unidentified
HHNGTNGTMMQYFEWHLPNDGNHWNRLRDDASNLRNRGITAIWIPPAWKGTSQNDVGYGAYDLYDLGEFNQKGTVRTKYGTRSQLESAIHALKNNGVQVYGDVVMNHKGGADATENVLAVEVNPNNRNQEISGDYTIEAWTKFDFPGRGNTYSDFKWRWYHFDGVDWDQSRQFQNRIYKFRGDGKAWDWEVDSENGNYDYLMYADVDMDHPEVVNELRRWGEWYTNTLNLDGFRIDAVKHIKYSFTRDWLTHVRNATGKEMFAVAEFWKNDLGALENYLNKTNWNHSVFDVPLHYTLYNASNSGGNYDMAKLLNGTVVQKHPMHAVTFVDNHDSQPGESLESFVQEWFKPLAYALILTREQGYPSVFYGDYYGIPTHSVPAMKAKIDPILEARQNFAYGTQHDYFDHHNIIGWTREGNTTHPNSGLATIMSDGPGGEKWMYVGQNKAGQVWHDITGNKPGTVTINADGWANFSVNGGSVSIWVKR

SEQ ID NO: 17199 - protein, 485 aa, Unidentified
HHNGTNSTMMQYFEWHLPNDGNHWNRLRDDASNLRNRGITAIWIPPAWKGTSQNDVGYGAYDLYDLGEFNQKGTVRTKYGTRSQLESAIHALKNNGVQVYGDVVMNHKGGADATENVLAVEVNPNNRNQEISGDYTIEAWTKFDFPGRGNTYSDFKWRWYHFDGVDWDQSRQFQNRIYKFRGDGKAWDWEVDSENGNYDYLMYADVDMDHPEVVNELRRWGEWYTNTLNLDGFRIDAVKHIKYSFTRDWLTHVRNATGKEMFAVAEFWKNDLGALENYLNKTNWNHSVFDVPLHYNLYNASNSGGNYDMAKLLNGTVVQKHPMHAVTFVDNHDSQPGESLESFVQEWFKPLAYALILTREQGYPSVFYGDYYGIPTHSVPAMKAKIDPILEARQNFAYGTQHDYFDHHNIIGWTREGNTTHPNSGLATIMSDGPGGEKWMYVGQNKAGQVWHDITGNKPGTVTINADGWANFSVNGGSVSIWVKR

SEQ ID NO: 17200 - protein, 485 aa, Unidentified
HHNGTNGTMMQYFEWHLPNDGNHWNRLRDDASNLRNRGITAIWIPPAWKGTSQNDVGYGAYDLYDLGEFNQKGTVRTKYGTRSQLESAIHVLKNNGVQVYGDVVMNHKGGADATENVLAVEVNPNNRNQEISGDYTIEAWTKFDFPGRGNTYSDFKWRWYHFDGVDWDQSRQFQNRIYKFRGDGKAWDWEVDSENGNYDYLMYADVDMDHPEVVNELRRWGEWYTNTLNLDGFRIDAVKHIKYSFTRDWLTHVRNATGKEMFAVAEFWKNDLGALENYLNKTNWNHSVFDVPLHYNLYNASNSGGNYDMAKLLNGTVVQKHPMHAVTFVDNHDSQPGESLESFVQEWFKPLAYALILTREQGYPSVFYGDYYGIPTHSVPAMKAKIDPILEARQNFAYGTQHDYFDHHNIIGWTREGNTTHPNSGLATIMSDGPGGEKWMYVGQNKAGQVWHDITGNKPGTVTINADGWANFSVNGGSVSIWVKR

SEQ ID NO: 17201 - protein, 485 aa, Unidentified
HHNGTNGTMMQYFEWHLPNDGNHWNRLRDDASNLRNRGIHAIWIPPAWKGTSQNDVGYGAYDLYDLGEFNQKGTVRTKYGTRSQLESAIHALKNNGVQVYGDVVMNHKGGADATENVLAVEVNPNNRNQEISGDYTIEAWTKFDFPGRGNTYSDFKWRWYHFDGVDWDQSRQFQNRIYKFRGDGKAWDWEVDSENGNYDYLMYADVDMDHPEVVNELRRWGEWYTNTLNLDGFRIDAVKHIKYSFTRDWLTHVRNATGKEMFAVAEFWKNDLGALENYLNKTNWNHSVFDVPLHYNLYNASNSGGNYDMAKLLNGTVVQKHPMHAVTFVDNHDSQPGESLESFVQEWFKPLAYALILTREQGYPSVFYGDYYGIPTHSVPAMKAKIDPILEARQNFAYGTQHDYFDHHNIIGWTREGNTTHPNSGLATIMSDGPGGEKWMYVGQNKAGQVWHDITGNKPGTVTINADGWANFSVNGGSVSIWVKR

SEQ ID NO: 17202 - protein, 485 aa, Unidentified
HHNGTNGTMMQYFEWHLPNDGNHWNRLRDDASNLRNRGITAIWIPPAWKGTSQNDVGYGAYDLYDLGEFNQKGTVRTKYGTRSQLESAIHALKNNGVQVYGDVVMNHKGGADATENVLAVEVNPNNRNQEISGDYTIEAWTKFDFPGRGNTYSDFKWRWYHFDGVDWDQSRQFQNRIYKFRGDGKAWDWEVDSENGNYDYLMYADVDMDHPEVVNELRRWGEWYTNTLNLDGFRIDAVKHIKYSFTRDWLTHVRNATGKEMFAVAEFWKNDLGALENYLNKTNWNHSVFDVPLHYNLYNASNSGGNYDMAKLLNGTVVQKHPMHAVTFVDNHDSQPGESLESFVQEWFKPLAYALILTREQGYPSVFYGDYYGIPTHSVPAMKAKIDPILEARQNFAYGTQHDYFDHHNIIGWTREGNTTHPNSGLATIMSDGPGGEKWMYVGQNFAGQVWHDITGNKPGTVTINADGWANFSVNGGSVSIWVKR

SEQ ID NO: 17203 - protein, 483 aa, Bacillus sp.
HHNGTNGTMMQYFEWHLPNDGNHWNRLRDDASNLRNRGITAIWIPPAWKGTSQNDVGYGAYDLYDLGEFNQKGTVRTKYGTRSQLESAIHALKNNGVQVYGDVVMNHKGGADATENVLAVEVNPNNRNQEISGDYTIEAWTKFDFPGRGNTYSDFKWRWYHFDGVDWDQSRQFQNRIYKFRGKAWDWEVDSENGNYDYLMYADYDMDHPEVVNELRRWGEWYTNTLNLDGFRIDAVKHIKYSFTRDWLTHVRNATGKEMFAVAEFWKNDLGALENYLNKTNWNHSVFDVPLHYNLYNASNSGGNYDMAKLLNGTVVQKHPMHAVTFVDNHDSQPGESLESFVQEWFKPLAYALILTREQGYPSVFYGDYYGIPTHSVPAMKAKIDPILEARQNFAYGTQHDYFDHHNIIGWTREGNTTHPNSGLATIMSDGPGGEKWMYVGQNKAGQVWHDITGNKPGTVTINADGWANFSVNGGSVSIWVKR

SEQ ID NO: 17204 - protein, 485 aa, Bacillus sp.
HHNGTNGTMMQYFEWHLPNDGNHWNRLRDDASNLRNRGITAIWIPPAWKGTSQNDVGYGAYDLYDLGEFNQKGTVRTKYGTRSQLESAIHALKNNGVQVYGDVVMNHKGGADATENVLAVEVNPNNRNQEISGDYTIEAWTKFDFPGRGNTYSDFKWRWYHFDGVDWDQSRQFQNRIYKFRGDGKAWDWEVDSENGNYDYLMIADVDMDHPEVVNELRRWGEWYTNTLNLDGFRIDAVKHIKYSFTRDWLTHVRNATGKEMFAVAEFWKNDLGALENYLNKTNWNHSVFDVPLHYNLYNASNSGGNYDMAKLLNGTVVQKHPMHAVTFVDNHDSQPGESLESFVQEWFKPLAYALILTREQGYPSVFYGDYYGIPTHSVPAMKAKIDPILEARQNFAYGTQHDYFDHHNIIGWTREGNTTHPNSGLATIMSDGPGGEKWMYVGQNKAGQVWHDITGNKPGTVTINADGWANFSVNGGSVSIWVKR

SEQ ID NO: 17205 - protein, 485 aa, Unidentified
HHPGTNGTMMQYFEWHLPNDGNHWNRLRDDASNLRNRGITAIWIPPAWKGTSQNDVGYGAYDLYDLGEFNQKGTVRTKYGTRSQLESAIHALKNNGVQVYGDVVMNHKGGADATENVLAVEVNPNNRNQEISGDYTIEAWTKFDFPGRGNTYSDFKWRWYHFDGVDWDQSRQFQNRIYKFRGDGKAWDWEVDSENGNYDYLMYADVDMDHPEVVNELRRWGEWYTNTLNLDGFRIDAVKHIKYSFTRDWLTHVRNATGKEMFAVAEFWKNDLGALENYLNKTNWNHSVFDVPLHYNLYNASNSGGNYDMAKLLNGTVVQKHPMHAVTFVDNHDSQPGESLESFVQEWFKPLAYALILTREQGYPSVFYGDYYGIPTHSVPAMKAKIDPILEARQNFAYGTQHDYFDHHNIIGWTREGNTTHPNSGLATIMSDGPGGEKWMYVGQNKAGQVWHDITGNKPGTVTINADGWANFSVNGGSVSIWVKR

SEQ ID NO: 17206 - protein, 485 aa, Unidentified
HHNGTNGTMMQYFEWHLPNDGNHWNRLRDDASNLRNRGITAIWIPPAWKGTSQNDVGYGAYDLYDLGEFNQKGTVRTKYGTRSQLESAIHALKNNGVQVYGDVVMNHKGGADATENVLAVEVNPNNRNQEISGDYTIEAWTKFDFPGRGNTYSDFKWRWYHFDGVDWDQSRQFQNRIYKFRGDGKAWDWEVDSENGNYDYLMYADVDMDHPEVVNELRRWGEWYTNTLNLDGFRIDAVKHIKYSFTRDWLTHVRNAWGKEMFAVAEFWKNDLGALENYLNKTNWNHSVFDVPLHYNLYNASNSGGNYDMAKLLNGTVVQKHPMHAVTFVDNHDSQPGESLESFVQEWFKPLAYALILTREQGYPSVFYGDYYGIPTHSVPAMKAKIDPILEARQNFAYGTQHDYFDHHNIIGWTREGNTTHPNSGLATIMSDGPGGEKWMYVGQNKAGQVWHDITGNKPGTVTINADGWANFSVNGGSVSIWVKR

SEQ ID NO: 17207 - protein, 485 aa, Unidentified
HHNGTNGTMMQYFEWHLPNDGNHWNRLRDDASNLRNRGITAIWIPPAWKGTSQNDVGYGAYDLYDLGEFNQKGTVRTKYGTRSQLESAIHALKNNGVQVYGDVVMNHKGGADATENVLAVEVNPNNRNQEISGDYTIEAWTKFDFPGRGNTYSDFKWRWYHFDGVDWDQSRQFQNRIYKFRGDGKAWDWEVDSENGNYDYLMYADVDMDHPEVVNELRRWGEWYTNTLNLDGFRIDAVKHIKYSFTRDWLTHVRNATGKEMFAVAEFWKNDLGALENYLNKTNWNHSVFDVPLHYNLYNASNSGGNYDMAKLLNGTVVQKHPMHAVTFVDNHDSQPGESLESFVQEWFKPLAYALILTREQGYPSVFYGDYYGIPTHSVPAMKAKIDPILEARQNFAYGTQHDYFDHHNIIGWTREGNTTHPNSGLATIMSDGPGGEKWMYVGQNKAGQDWHDITGNKPGTVTINADGWANFSVNGGSVSIWVKR

SEQ ID NO: 17208 - protein, 485 aa, Unidentified
HHNGTNGTMMQYFEWHLPNDGNHWNRLRDDASNLRNRGITAIWIPPAWKGTSQNDVGYGAYDLYDLGEFNQKGTVRTKYGTRSQLESAIHALKNNGVQVYGDVVMNHKGGADATENVLAVEVNPNNRNQEISGDYTIEAWTKFDFPGRGNTYSDFKWRWYHFDGVDWDQSRQFQNRIYKFRGDGKAWDWEVDSENGNYDYLMYADVDMDHPEVVNELRRWGEWYTNTLNLDGFRIDAVKHIKYSFTRDWLTHVRNATGKEMFAVAEFWKNDLGALENYLNKTNWNHSVFDVPLHYNLYNASNSGGNYDMAKLLNGTVVQKHPMHAVTFVDNHDSQPGESLESFVQEWFKPLAYALILTREQGYPSVFYGDYYGIPTHSVPAMKAKIDPILEARQNFAYGTQHDYFDHHNIIGWTREGNTTHPNSGLATIMSDGPGGEKWMYVGQNKAGQVWHDITGNKPGTVTINADGRANFSVNGGSVSIWVKR

SEQ ID NO: 17209 - protein, 485 aa, Unidentified
HHNGTNGTMMQYFEWHLPNDGNHWNRLRDDASNLRNRGITAIWIPPAWKGTSQNDVGYGAYDLYDLGEFNQKGTVRTKYGTRSQLESAIHALKNNGVQVYGDVVMNHKGGADATENVLAVEVNPNNRNQEISGDYTIEAWTKFDFPGRGNTYSDFKWRWYHFDGVDWDQSRQFQNRIYKFRGDGKAWDWEVDSENGNYDYLMYADVDMDHPEVVNELRRWGEWYTNTLNLDGFRIDAVKHIKYSFTRDWLTHVRNATGKEMFAVAEFWKNDLGALENYLNKTNWNHSVFDVPLHYNLYNASNSGGNYDMAKLLNGTVVQKHPMHAVTFVDNHDSQPGESLETFVQEWFKPLAYALILTREQGYPSVFYGDYYGIPTHSVPAMKAKIDPILEARQNFAYGTQHDYFDHHNIIGWTREGNTTHPNSGLATIMSDGPGGEKWMYVGQNKAGQVWHDITGNKPGTVTINADGWANFSVNGGSVSIWVKR

SEQ ID NO: 17210 - protein, 485 aa, Unidentified
HHNGTNGTMMQYFEWHLPNDGNHWNRLRDDASNLRNRGITAIWIPPAWKGTSQNDVGYGAYDLYDLGEFNQKGTVRTKYGTRSQLESAIHALKNNGVQVYGDVVMNHKGGADATENVLAVEVNPNNRNQEISGDYTIEAWTKFDFPGRGNTYSDFKWRWYHFDGVDWDQSRQFQNRIYKFRGDGKAWDWEVDSENGNYDYLMYADVDMDHPEVVNELRRWGEWYTNTLNLDGFRIDAVKHIKYSFTRDWLTHVRNATGKEMFAVAEFWKNDLGALENYLNKTNWNHSVFDVPLHYNLYNASNSGGNYDMAKLLNGTVVQKHPMHAVTFVDNHDSQPGESLESFVQEWFKPLAYALILTREQGYPSVFYGDYYGIPTHSVPAMKAKIDPILEARQNFAYGTQHDYFDHHNIIGWTREGNTTHPNSGLATIMSDGPLGEKWMYVGQNKAGQVWHDITGNKPGTVTINADGWANFSVNGGSVSIWVKR

SEQ ID NO: 17211 - protein, 485 aa, Unidentified
HHNGTNGTMMQYFEWHLPNDGNHWNRLRDDASNLRNRGITAIWIPPAWKGTSQNDVGYGAYDLYDLGEFNQKGTVRTKYGTRSQLESAIHALKNNGVQVYGDVVMNHKGGADATENVLAVEVNPNNRNQEIKGDYTIEAWTKFDFPGRGNTYSDFKWRWYHFDGVDWDQSRQFQNRIYKFRGDGKAWDWEVDSENGNYDYLMYADVDMDHPEVVNELRRWGEWYTNTLNLDGFRIDAVKHIKYSFTRDWLTHVRNATGKEMFAVAEFWKNDLGALENYLNKTNWNHSVFDVPLHYNLYNASNSGGNYDMAKLLNGTVVQKHPMHAVTFVDNHDSQPGESLESFVQEWFKPLAYALILTREQGYPSVFYGDYYGIPTHSVPAMKAKIDPILEARQNFAYGTQHDYFDHHNIIGWTREGNTTHPNSGLATIMSDGPGGEKWMYVGQNKAGQVWHDITGNKPGTVTINADGWANFSVNGGSVSIWVKR

SEQ ID NO: 17212 - protein, 485 aa, Unidentified
HHNGTNGTMMQYFEWHLPNDGNHWNRLRDDASNLRNRGITAIWIPPAWKGTSQNDVGYGAYDLYDLGEFNQKGTVRTKYGTRSQLESAIHALKNNGVQVYGDVVMNHKGGADATENVLAVEVNPNNRNQEISGDYTIEAWTKFDFPGRGNTYSDFKWRWYHFDGVDWDQSRQFQNRIYKFRGDGKAWDWEVDSENGNYDYLMYADVDMDHPEVVNELRRWGEWYTNTLNLDGFRIDAVKHIKYSFTRDWLTHVRNATGKEMFAVAEFWKNDLGALENYLNKTNWNHSVFDVPLHYNLYNASNSGGNYDMAKLLNGTVVQKHPMHAVTFVDNHDSQPGESLESFVQEWFKCLAYALILTREQGYPSVFYGDYYGIPTHSVPAMKAKIDPILEARQNFAYGTQHDYFDHHNIIGWTREGNTTHPNSGLATIMSDGPGGEKWMYVGQNKAGQVWHDITGNKPGTVTINADGWANFSVNGGSVSIWVKR

SEQ ID NO: 17213 - protein, 485 aa, Bacillus sp.
HHNGTNGTMMQYFEWHLPNDGNHWNRLRDDASNLRNRGITAIWIPPAWKGTSQNDVGYGAYDLYDLGEFNQKGTVRTKYGTRSQLESAIHALKNNGVQVYGDVVMNHKGGADATENVLAVEVNPNNRNQEISGDYTIEAWTKFDFPGRGNTYSDFKWRWYHFDGVDWDQSRQFQNRIYKFRGDGKAWDWEVDSENGNYDILMYADVDMDHPEVVNELRRWGEWYTNTLNLDGFRIDAVKHIKYSFTRDWLTHVRNATGKEMFAVAEFWKNDLGALENYLNKTNWNHSVFDVPLHYNLYNASNSGGNYDMAKLLNGTVVQKHPMHAVTFVDNHDSQPGESLESFVQEWFKPLAYALILTREQGYPSVFYGDYYGIPTHSVPAMKAKIDPILEARQNFAYGTQHDYFDHHNIIGWTREGNTTHPNSGLATIMSDGPGGEKWMYVGQNKAGQVWHDITGNKPGTVTINADGWANFSVNGGSVSIWVKR

SEQ ID NO: 17214 - protein, 485 aa, Unidentified
HHNGTNGTMMQYFEWHLDNDGNHWNRLRDDASNLRNRGITAIWIPPAWKGTSQNDVGYGAYDLYDLGEFNQKGTVRTKYGTRSQLESAIHALKNNGVQVYGDVVMNHKGGADATENVLAVEVNPNNRNQEISGDYTIEAWTKFDFPGRGNTYSDFKWRWYHFDGVDWDQSRQFQNRIYKFRGDGKAWDWEVDSENGNYDYLMYADVDMDHPEVVNELRRWGEWYTNTLNLDGFRIDAVKHIKYSFTRDWLTHVRNATGKEMFAVAEFWKNDLGALENYLNKTNWNHSVFDVPLHYNLYNASNSGGNYDMAKLLNGTVVQKHPMHAVTFVDNHDSQPGESLESFVQEWFKPLAYALILTREQGYPSVFYGDYYGIPTHSVPAMKAKIDPILEARQNFAYGTQHDYFDHHNIIGWTREGNTTHPNSGLATIMSDGPGGEKWMYVGQNKAGQVWHDITGNKPGTVTINADGWANFSVNGGSVSIWVKR

SEQ ID NO: 17215 - protein, 485 aa, Unidentified
HHNGTNGTMMQYFEWHLPNDGNHWNRLRDDASNLRNRGITAIWIPPAWKGTSQNDVGYGAYDLYDLGEFNQKGTVRTKYGTRSQLESAIHALKNNGVQVYGDVVMNHKGGADATENVLAVIVNPNNRNQEISGDYTIEAWTKFDFPGRGNTYSDFKWRWYHFDGVDWDQSRQFQNRIYKFRGDGKAWDWEVDSENGNYDYLMYADVDMDHPEVVNELRRWGEWYTNTLNLDGFRIDAVKHIKYSFTRDWLTHVRNATGKEMFAVAEFWKNDLGALENYLNKTNWNHSVFDVPLHYNLYNASNSGGNYDMAKLLNGTVVQKHPMHAVTFVDNHDSQPGESLESFVQEWFKPLAYALILTREQGYPSVFYGDYYGIPTHSVPAMKAKIDPILEARQNFAYGTQHDYFDHHNIIGWTREGNTTHPNSGLATIMSDGPGGEKWMYVGQNKAGQVWHDITGNKPGTVTINADGWANFSVNGGSVSIWVKR

SEQ ID NO: 17216 - protein, 483 aa, Bacillus sp.
HHNGTNGTMMQYFEWHLPNDGNHWNRLRDDASNLRNRGITAIWIPPAWKGTSQNDVGYGAYDLYDLGEFNQKGTVRTKYGTRSQLESAIHALKNNGVQVYGDVVMNHKGGADATENVLAVEVNPNNRNQEISGDYTIEAWTKFDFPGRGNTYSDFKWRWYHFDGVDWDQSRQFQNRIYKFRGKAWDWEVDSENGNYDYLMYADLDMDHPEVVNELRRWGEWYTNTLNLDGFRIDAVKHIKYSFTRDWLTHVRNATGKEMFAVAEFWKNDLGALENYLNKTNWNHSVFDVPLHYNLYNASNSGGNYDMAKLLNGTVVQKHPMHAVTFVDNHDSQPGESLESFVQEWFKPLAYALILTREQGYPSVFYGDYYGIPTHSVPAMKAKIDPILEARQNFAYGTQHDYFDHHNIIGWTREGNTTHPNSGLATIMSDGPGGEKWMYVGQNKAGQVWHDITGNKPGTVTINADGWANFSVNGGSVSIWVKR

SEQ ID NO: 17217 - protein, 485 aa, Unidentified
HHNGTNGTMMQYFEWHLPNDGNHWNRLRDDASNLRNRGITAIWIPPAWKGTSQNDVGYGAYDLYDLGEFNQKGTVRTKYGTRSQLESAIHALKNNGVQVYGDVVMNHKGGADATENVLAVEVNPNNRNQEISGDYTIEAWTKFDFPGRGNTYSDFKWRWYHFDGVDWDQSRQFQNRIYKFRGDGKAWDWEVDSENGNYDYLMYADVDMDHPEVVNELRRWGEWYTNTLNLDGFRIDAVKHIKYSFTRDWLTHVRNATGKEMFAVAEFWKNDLGALENYLNKTNWNHSVFDVPLHYNLYNASNSGGNYDMAKLLNGTVVQKHPMHAVTFVDNHDSQPGESLESFVQEWFKPLAYALILTREQGYPSVFYGDYYGIPTHSVPAMKAKIDPILEARQNFAYGTQHDYFDHHNIIGWTREGNTTHPNSGLATIMSDGPGGEKWMYVGQNKAGQVWHDITGNKPGTVTINADGEANFSVNGGSVSIWVKR

SEQ ID NO: 17218 - protein, 485 aa, Unidentified
HHNGTNGTMMQYFEWHLPNDGNHWNRLRDDASNLRNRGITAIWIPPAWKGTSQNDVGYGAYDLYDLGEFNQKGTVRTKYGTRSQLESAIHALKNNGVQVYGDVVMNHKGGADATENVLAVEVNPNNRNQEISGDYTIEAWTKFDFPGRGNTYSDFKWRWYHFDGVDWDQSRQFQNRIYKFRGDGKAWDWEVDSENGNYDYLMYADVDMDHPEVVNELRRWGEWYTNTLNLDGFRIDAVKHIKYSFTRDWLTHVRNATGKEMFAVAEFWKNDLGALENYLNKTNWNHSVFDVPLHYNLYNASNSGGNYDMAKLLNGTVVQKHPMHAVTFVDNHDSQPGESLESFVQEWFKPLAYALILTREQGYPSVFYGDYYGIPTHSVPAMKAKIDPILEARQNFAYGTQHDYFDHHNIIGWTCEGNTTHPNSGLATIMSDGPGGEKWMYVGQNKAGQVWHDITGNKPGTVTINADGWANFSVNGGSVSIWVKR

SEQ ID NO: 17219 - protein, 485 aa, Unidentified
HHNGTNGTMMQYFEWHLPNDGNHWNRLRDDASNLRNRGITAIWIPPAWKGTSQNDVGYGAYDLYDLGEFNQKGTVRTKYGTRSQLESAIHALKNNGVMVYGDVVMNHKGGADATENVLAVEVNPNNRNQEISGDYTIEAWTKFDFPGRGNTYSDFKWRWYHFDGVDWDQSRQFQNRIYKFRGDGKAWDWEVDSENGNYDYLMYADVDMDHPEVVNELRRWGEWYTNTLNLDGFRIDAVKHIKYSFTRDWLTHVRNATGKEMFAVAEFWKNDLGALENYLNKTNWNHSVFDVPLHYNLYNASNSGGNYDMAKLLNGTVVQKHPMHAVTFVDNHDSQPGESLESFVQEWFKPLAYALILTREQGYPSVFYGDYYGIPTHSVPAMKAKIDPILEARQNFAYGTQHDYFDHHNIIGWTREGNTTHPNSGLATIMSDGPGGEKWMYVGQNKAGQVWHDITGNKPGTVTINADGWANFSVNGGSVSIWVKR

SEQ ID NO: 17220 - protein, 485 aa, Unidentified
HHNGTNGTMMQYFEWHLPNDGNHWNRLRDDASNLRNRGITAIWIPPAWKGTSQNDVGYGAYDLYDLGEFNQKGTVRTKYGTRSQLESAIHALKNNGVQVYGDVVMNHKGGADATENVLAVEVNPNNRNQEISGDYTIEAWTKFDFPGRGNTYSDFKWRWYHFDGVDWDQSRQFQNRIYKFRGDGKAWDWEVDSENGNYDYLMYADVDMDHPEVVNELRRWGEWYTNTLNLDGFRIDAVKHIKYSFTRDWLTHVRNATGKEMFAVAEFWKNDLGALENYLNKTNWNHSVFDVPLHYNLYNASNSGGNYDMAKLLNGTVVQKHPMHAVTFVDNHDSQPGESLESFVQEWFKPLAYALILTREQGYPSVFYGDYYGIPTHSVPAMKAKIDPILEARQNFAYGTQHDYFDHHNIIGWTREGNTTHPNSGLATIMSDGPGGEKWMYVGQNKAGQVWHDITGNKPGTVTINADGWANFSVVGGSVSIWVKR

SEQ ID NO: 17221 - protein, 485 aa, Unidentified
HHNGTNGTMMQYFEWHLPNDGNHWNRLRDDASNLRNRGITAIWIPPAWKGTSQNDVGYGAYDLYDLGEFNQKGTVRTKYGTRSQLESAIHALKNNGVQVYGDVVMNHKGGADATENVLAVEVNPNNRNQEISGDYTIEAWTKFDFPGRGNTYSDFKWRWYHFDGVDWDQSRQFQNRIYKFRGDGKAWDWEVDSENGNYDYLMYADVDMDHPEVVNELRRWGEWYTNTLNLDGFRIDAVKHIKYSFTRDWLTHVRNATGKVMFAVAEFWKNDLGALENYLNKTNWNHSVFDVPLHYNLYNASNSGGNYDMAKLLNGTVVQKHPMHAVTFVDNHDSQPGESLESFVQEWFKPLAYALILTREQGYPSVFYGDYYGIPTHSVPAMKAKIDPILEARQNFAYGTQHDYFDHHNIIGWTREGNTTHPNSGLATIMSDGPGGEKWMYVGQNKAGQVWHDITGNKPGTVTINADGWANFSVNGGSVSIWVKR

SEQ ID NO: 17222 - protein, 485 aa, Unidentified
HHNGTNGTMMQYFEWHLPNDGNHWNRLRDDASNLRNRGITAIWIPPAWKGTSQNDVGYGAYDLYDLGEFNQKGTVRTKYGTRSQLESAIHALKNNGVQVYGDVVMNHKGGADATENVLAVEVNPNNRNQEISGDYTIEAWTKFDFPGRGNTYSDFKWRWYHFDGVDWDQSRQFQNRIYKFRGDGKAWDWEVDSENGNYDYLMYADVDMDHPEVVNELRRWGEWYTNTLNLDGFRIDAVKHIKYSFTRDWLTHVRNATGKEMFAVAEFWKNDLGALENYLNKTNWNHSVFDVPLHYNLYNASNSGGNYDMAKLLNGTVVQKHPMHAVTFVDNHDSQPGESLESFVQEWFKPLAYALILTREQGYPSVFYGDYYGIPTHSVPAMKAKIDPILEARQNFAYGTQHDYFDHHNWIGWTREGNTTHPNSGLATIMSDGPGGEKWMYVGQNKAGQVWHDITGNKPGTVTINADGWANFSVNGGSVSIWVKR

SEQ ID NO: 17223 - protein, 485 aa, Unidentified
HHNGTNGTMMQYFEWHLPNDGNHWNRLRDDASNLRNRGITAIWIPPAWKGTSQNDVGYGAYDLYDLGEFNQKGTVRTKYGTRSQLESAIHALKNNGVQVYGDVVMNHKGGADATENVLAVEVNPNNRNQEISGDYTIEAWTKFDFPGRGNTYSDFKWRWYHFDGVDGDQSRQFQNRIYKFRGDGKAWDWEVDSENGNYDYLMYADVDMDHPEVVNELRRWGEWYTNTLNLDGFRIDAVKHIKYSFTRDWLTHVRNATGKEMFAVAEFWKNDLGALENYLNKTNWNHSVFDVPLHYNLYNASNSGGNYDMAKLLNGTVVQKHPMHAVTFVDNHDSQPGESLESFVQEWFKPLAYALILTREQGYPSVFYGDYYGIPTHSVPAMKAKIDPILEARQNFAYGTQHDYFDHHNIIGWTREGNTTHPNSGLATIMSDGPGGEKWMYVGQNKAGQVWHDITGNKPGTVTINADGWANFSVNGGSVSIWVKR

SEQ ID NO: 17224 - protein, 485 aa, Unidentified
HHNGTNGTMMQYFEWHLPNDGNHWNRLRDDASNLRNRGITAIWIPPAWKGTSQNDVGYGAYDLYDLGEFNQKGTVRTKYGTRSQLESAIHALKNNGVQVYGDVVMNHKGGADATENVLAVEVNPNNRNQEISGDYTIEAWTKFDFPGRGNTYSDFKWRWYHFDGVDWDQSRQFQNRIYKFRGDGKAWDWEVDSENGNYDYLMYADVDMDHPEVVNELRRWGEWYTNTLNLDGFRIDAVKHIKYSFTRDWLTHVRNATGKEMFAVAEFWKNDLGALENYLNKTNWNHSVFDVPLHYNLYNASNSGGNYDMAKLLNGTVVQKHPMHAVTFVDNHDSQPGESLESFVQEKFKPLAYALILTREQGYPSVFYGDYYGIPTHSVPAMKAKIDPILEARQNFAYGTQHDYFDHHNIIGWTREGNTTHPNSGLATIMSDGPGGEKWMYVGQNKAGQVWHDITGNKPGTVTINADGWANFSVNGGSVSIWVKR

SEQ ID NO: 17225 - protein, 485 aa, Unidentified
HHNGTNGTMMQYFEWHLPNDGNHWNRLRDDASNLRNRGITAIWIPPAWKGTSQNDVGYGAYDLYDLGEFNQKGTVRTKYGTRSQLSSAIHALKNNGVQVYGDVVMNHKGGADATENVLAVEVNPNNRNQEISGDYTIEAWTKFDFPGRGNTYSDFKWRWYHFDGVDWDQSRQFQNRIYKFRGDGKAWDWEVDSENGNYDYLMYADVDMDHPEVVNELRRWGEWYTNTLNLDGFRIDAVKHIKYSFTRDWLTHVRNATGKEMFAVAEFWKNDLGALENYLNKTNWNHSVFDVPLHYNLYNASNSGGNYDMAKLLNGTVVQKHPMHAVTFVDNHDSQPGESLESFVQEWFKPLAYALILTREQGYPSVFYGDYYGIPTHSVPAMKAKIDPILEARQNFAYGTQHDYFDHHNIIGWTREGNTTHPNSGLATIMSDGPGGEKWMYVGQNKAGQVWHDITGNKPGTVTINADGWANFSVNGGSVSIWVKR

SEQ ID NO: 17226 - protein, 485 aa, Unidentified
HHNGTNGTMMQYFEWHLPNDGNHWNRLRDDASNLRNRGITAIWIPPAWKGTSQNDVGYGAYDLYDLGEFNQKGTVRTKYGTRSQLESAIHALKNNGVQVYGDVVMNHKGGADATENVLAVEVNPNNRNQEISGDYTIEAWTKFDFPGRGNTYSDFKWRWYHFDGVDWDQSRQFQNRIYKFRGDGKAWDWEVDSENGNYDYLMYADVDMDHPEVVNELRRWGEWYTNTLNLDGFRIDAVKHIKYSFTRDWLTHVRNATGKEMFAVAEFWKNDLGALENYLNKTNWNHSVFDVPLHYNLYNASNSGGNYDMAKLLNGTVVQKHPMHAVTFVDNHDSQPGESLESFVQEWFKPLAYALILTRHQGYPSVFYGDYYGIPTHSVPAMKAKIDPILEARQNFAYGTQHDYFDHHNIIGWTREGNTTHPNSGLATIMSDGPGGEKWMYVGQNKAGQVWHDITGNKPGTVTINADGWANFSVNGGSVSIWVKR

SEQ ID NO: 17227 - protein, 485 aa, Unidentified
HHNGTNGTMMQYFEWHLPNDGNHWNRLRDDASNLRNRGITAIWIPPAWKGTSQNDVGYGAYDLYDLGEFNQKGTVRTKYGTRSQLESAIHALKNNGVQVYGDVVMNHKGGADATENVLAVEVNPNNRNQEISGDYTIEAWTKFDFPGRGNTYSDFKWRWYHFDGVDWDQSRQFQNRIYKFRGDGKAWDWEVDSENGNYDYLMYADVDMDHPEVVNELRRWGEWYTNTLNLDGFRIDAVKHIKYSFTRDWLTHVRNATGKEMFAVAEFWKNDLGALENYLNKTNWNHSVFDVPLHYNLYNASNSGGNYDMAKLLNGTVVQKHPMHAVTFVDNHDSQPGESLESFVQEWFKPLAYALILTRWQGYPSVFYGDYYGIPTHSVPAMKAKIDPILEARQNFAYGTQHDYFDHHNIIGWTREGNTTHPNSGLATIMSDGPGGEKWMYVGQNKAGQVWHDITGNKPGTVTINADGWANFSVNGGSVSIWVKR

SEQ ID NO: 17228 - protein, 485 aa, Unidentified
HHNGTNGTMMQYFEWHLPNDGNHWNRLRDDASNLRNRGITAIWIPPAWKGTSQNDVGYGAYDLYDLGEFNQKGTVRTKYGTRSQLESAIHALKNNGVQVYGDVVMNHKGGADATENVLAVEVNPNNRNQEIPGDYTIEAWTKFDFPGRGNTYSDFKWRWYHFDGVDWDQSRQFQNRIYKFRGDGKAWDWEVDSENGNYDYLMYADVDMDHPEVVNELRRWGEWYTNTLNLDGFRIDAVKHIKYSFTRDWLTHVRNATGKEMFAVAEFWKNDLGALENYLNKTNWNHSVFDVPLHYNLYNASNSGGNYDMAKLLNGTVVQKHPMHAVTFVDNHDSQPGESLESFVQEWFKPLAYALILTREQGYPSVFYGDYYGIPTHSVPAMKAKIDPILEARQNFAYGTQHDYFDHHNIIGWTREGNTTHPNSGLATIMSDGPGGEKWMYVGQNKAGQVWHDITGNKPGTVTINADGWANFSVNGGSVSIWVKR

SEQ ID NO: 17229 - protein, 485 aa, Unidentified
HHNGTNGTMMQYFEWHLPNDGNHWNRLRDDASNLRNRGITAIWIPPAWKGTSQNDVGYGAYDLYDLGEFNQKGTVRTKYGTRSQLKSAIHALKNNGVQVYGDVVMNHKGGADATENVLAVEVNPNNRNQEISGDYTIEAWTKFDFPGRGNTYSDFKWRWYHFDGVDWDQSRQFQNRIYKFRGDGKAWDWEVDSENGNYDYLMYADVDMDHPEVVNELRRWGEWYTNTLNLDGFRIDAVKHIKYSFTRDWLTHVRNATGKEMFAVAEFWKNDLGALENYLNKTNWNHSVFDVPLHYNLYNASNSGGNYDMAKLLNGTVVQKHPMHAVTFVDNHDSQPGESLESFVQEWFKPLAYALILTREQGYPSVFYGDYYGIPTHSVPAMKAKIDPILEARQNFAYGTQHDYFDHHNIIGWTREGNTTHPNSGLATIMSDGPGGEKWMYVGQNKAGQVWHDITGNKPGTVTINADGWANFSVNGGSVSIWVKR

SEQ ID NO: 17230 - protein, 485 aa, Unidentified
HHNGTNGTMMQYFEWHLPNDGNHWNRLRDDASNLRNRGITAIWIPPAWKGTSQNDVGYGAYDLYDLGEFNQKGTVRTKYGTRSQLESAIHALKNNGVQVYGDVVMNHKGGADATENVLAVEVNPNNRNQEISGDYTIEAWTKFDFPGRGNTYSDFKWRWYHFDGVDWDQSRQFQNRIYKFDGDGKAWDWEVDSENGNYDYLMYADVDMDHPEVVNELRRWGEWYTNTLNLDGFRIDAVKHIKYSFTRDWLTHVRNATGKEMFAVAEFWKNDLGALENYLNKTNWNHSVFDVPLHYNLYNASNSGGNYDMAKLLNGTVVQKHPMHAVTFVDNHDSQPGESLESFVQEWFKPLAYALILTREQGYPSVFYGDYYGIPTHSVPAMKAKIDPILEARQNFAYGTQHDYFDHHNIIGWTREGNTTHPNSGLATIMSDGPGGEKWMYVGQNKAGQVWHDITGNKPGTVTINADGWANFSVNGGSVSIWVKR

SEQ ID NO: 17231 - protein, 485 aa, Unidentified
HHNGTNGTMMQYFEWHLPNDGNHWNRLRDDASNLRNRGITAIWIPPAWKGTSQNDVGYGAYDLYDLGEFNQKGTVRTKYGTRSQLESAIHALKNNGVQVYGDVVMNHKGGADATENVLAVEVNPNNRNQEISGDYTIEAWTKFDFPGRGNTYSDFKWRWYHFDGVDWDQSRQFQNRIYKFRGDGKAWDWEVDSENGNYDYLMYADVDMDHPEVVNELRRWGEWYTNTLNLDGFRIDAVKHIKYSFTRDWLTHVRNATGKEMFAVAEFWKNDLGALENYLNKTNWNHSVFDVPLHYNLYNASNSGGNYDMAKLLNGTVVQKHPMHAVTFVDNHDSQPGESLESFVQEWFKPLAYALILTREQGYPSVFYGDYYGIPTHSVPAMKAKIDPILEARQNFAYGTQHDYFDHHNIIGWTREGNTTHPNSGLATIMSDGPGGEKWMYVGQNKAGQVWHDITGNKPGTVTINADGWAWFSVNGGSVSIWVKR

SEQ ID NO: 17232 - protein, 485 aa, Bacillus sp.
HHNGTNGTMMQYFEWHLPNDGNHWNRLRDDASNLRNRGITAIWIPPAWKGTSQNDVGYGAYDLYDLGEFNQKGTVRTKYGTRSQLESAIHALKNNGVQVYGDVVMNHKGGADATENVLAVEVNPNNRNQEISGDYTIEAWTKFDFPGRGNTYSDFKWRWYHFDGVDWDQSRQFQNRIYKFRGDGKAWDWEVDSENGNYDYLMYADVDMDHPYVVNELRRWGEWYTNTLNLDGFRIDAVKHIKYSFTRDWLTHVRNATGKEMFAVAEFWKNDLGALENYLNKTNWNHSVFDVPLHYNLYNASNSGGNYDMAKLLNGTVVQKHPMHAVTFVDNHDSQPGESLESFVQEWFKPLAYALILTREQGYPSVFYGDYYGIPTHSVPAMKAKIDPILEARQNFAYGTQHDYFDHHNIIGWTREGNTTHPNSGLATIMSDGPGGEKWMYVGQNKAGQVWHDITGNKPGTVTINADGWANFSVNGGSVSIWVKR

SEQ ID NO: 17233 - protein, 485 aa, Unidentified
HHNGTNGTMMQYFEWHLPNDGNHWNRLRDDASNLRNRGITAIWIPPAWKGTSQNDVGYGAYDLYDLGEFNQKGTVRTKYGTRSQLESAIHALKNNGVQVYGDVVMNHKGGADATENVLAVEVNPNNRNQEISGDYTIEAWTKFDFPGRGNTYSDFKWRWYHFDGVDWDQSRQFQNRIYKFRGDGKAWDWEVDSENGNYDYLMYADVDMDHPEVVNELRRWGEWYTNTLNLDGFRIDAVKHIKYSFTRDWLTHVRNATGKEMFAVAEFWKNDLGALENYLNKTNWNHSVFDVPLHYNLYNASNSGGNYDMAKLLNGTVVQKHPMHAVTFVDNHDSQPGESLESFVQEWFKPLAYALILTREQGYPSVFYGDYYGIPTHSVPAMKAKIDPILEARQNFAYGTQHDYFDHHNIIGWTREGNTTHPNSGLATIMSDGPGGEKWMYVGQNAAGQVWHDITGNKPGTVTINADGWANFSVNGGSVSIWVKR

SEQ ID NO: 17234 - protein, 485 aa, Unidentified
HHNGTNGTMMQYFEWHLPNDGNHWNRLRDDASNLRNRGITAIWIPPAWKGTSQNDVGYGAYDLYDLGEFNQKGTVRTKYGTRSQLESAIHALKNNGVQVYGDVVMNHKGGADATENVLAVEVNPNNRNQEISGDYTIEAWTKFDFPGRGNTYSDFKWRWYHFDGVDWDQSRQFQNRIYKFRGDGKAWDWEVDSENGNYDYLMYADVDMDHPEVVNELRRWGEWYFNTLNLDGFRIDAVKHIKYSFTRDWLTHVRNATGKEMFAVAEFWKNDLGALENYLNKTNWNHSVFDVPLHYNLYNASNSGGNYDMAKLLNGTVVQKHPMHAVTFVDNHDSQPGESLESFVQEWFKPLAYALILTREQGYPSVFYGDYYGIPTHSVPAMKAKIDPILEARQNFAYGTQHDYFDHHNIIGWTREGNTTHPNSGLATIMSDGPGGEKWMYVGQNKAGQVWHDITGNKPGTVTINADGWANFSVNGGSVSIWVKR

SEQ ID NO: 17235 - protein, 485 aa, Unidentified
HHNGTNGTMMQYFEWHLPNDGNHWNRLRDDASNLRNRGITAIWIPPAWKGTSQNDVGYGAYDLYDLGEFNQKGTVRTKYGTRSQLESAIHALKNNGVQVYGDVVMNHKGGADATENVLAVEVNPNNRNQEISGDYTIEAWTKFDFPGRGNTYSDFKWRWYHFDGVDWDQSRQFQNRIYKFRGDGKAWDWEVDSENGNYDYLMYADVDMDHPEVVNELRRWGEWYTNTLNLDGFRIDAVKHIKYSFTRDWLTHVRNATGKEMFAVAEFWKNDLGALENYLNKTNWNHSVFDVPLHYNLYNASNSGGNYDMAKLLNGTVVQKHPMHAVTFVDNHDSQPGESLESFVQEWFKPLAYALILTREQGYPSVFYGDYYGIPTHSVPAMKAKIDPILEARQNFAYGTQHDYFDHHNIIGWTREGNTTHPNSGLATIMSDGPGGEKWMYVGQNKAGQVWHDITGNKPGTVTITADGWANFSVNGGSVSIWVKR

SEQ ID NO: 17236 - protein, 485 aa, Unidentified
HHNGTNGTMMQYFEWHLPNDGNHWNRLRDDASNLRNRGITAIWIPPAWKGTSQNDVGYGAYDLYDLGEFNQKGTVRTKYGTRSQLESAIHALKNNGVQVYGDVVMNHKGGADATENVLAVEVNPNNRNQEISGDYTIEAWTKFDFPGRGNTYSDFKWRWYHFDGVDWDQSRQFQNRIYKFRGDGKAWDWEVDSENGNYDYLMYADVDMDHPEVVNELRRWGEWYTNTLNLDGFRIDAVKHIKYSFTRDWLTHVRNATGKEMFAVAEFWKNDLGALENYLNKTNWNHSVFDVPLHYNLYNASNSGGNYDMAKLLNGTVVQKHPMHAVTFVDNHDSQPGESLESFVQEWFKPLAYALILTREQGYPSVFYGDYYGIPTHSVPAMKAKIDPILEARQNFAYGTQHDYFDHHNIIGWTREGNTTHPNSGLATIMSDGPGGEKWMYVGQNKAGQVWHDITGNKPGTVTINADGWANFSVGGGSVSIWVKR

SEQ ID NO: 17237 - protein, 485 aa, Unidentified
HHNGTNGTMMQYFEWHLPNDGNHWNRLRDDASNLRNRGITAIWIPPAWKGTSQNDVGYGAYDLYDLGEFNQKGTVRTKYGTRSQLESAIHALKNNGVQVYGDVVMNHKGGADATENVLAVEVNPNNRNQEISGDYTIEAWTKFDFPGRGNTYSDFKWRWYHFDGVDWDQSRQFQNRIYKFRGDGKAWDWEVDSENGNYDYLMYADVDMDHPEVVNELRRWGEWYTNTLNLDGFRIDAVKHIKYSFTRDWLTHVRNATGKEMFAVAEFWKNDLGALENYLNKTNWNHSVFDVPLHYNLYNASNSGGNYDMAKLLNGTVVQKHPMHAVTFVDNHDSQPGESLESFVQEWFKPLAYALILTREQGYPSVFYGDYYGIPTHSVPAMKAKIDPILEARQNFAYGTQHDYFDHHNIIGWTREGNTTHPNSGLATIMSDGPGGEKWMYVGQNKAGQVWHDITGNKPGTVTINADGWANFSVNGSSVSIWVKR

SEQ ID NO: 17238 - protein, 485 aa, Unidentified
HHNGTNGTMMQYFEWHLPNDGNHWNRLRDDASNLRNRGITAIWIPPAWKGTSQNDVGYGAYDLYDLGEFNQKGTVRTKYGTRSQLESAIHALKNNGVQVYGDVVMNHKGGADATENVLAVEVNPNNRNQEISGDYTIEAWTKFDFPGRGNTYSDFKWRWYHFDGVDWDQSRQFQNRIYKFRGDGKAWDWEVDSENGNYDYLMYADVDMDHPEVVNELRRWGEWYTNTLNLDGFRIDAVKHIKYSFTRDWLTHVRNATGKEMFAVAEFWKNDLGALENYLNKTNWNHSVFDVPLHYNLYNASNSGGNYDMAKLLNGTVVQKHPMHAVTFVDNHDSQPGESLESFVQEWFKPLAYALILTREPGYPSVFYGDYYGIPTHSVPAMKAKIDPILEARQNFAYGTQHDYFDHHNIIGWTREGNTTHPNSGLATIMSDGPGGEKWMYVGQNKAGQVWHDITGNKPGTVTINADGWANFSVNGGSVSIWVKR

SEQ ID NO: 17239 - protein, 483 aa, Anoxybacillus flavithermus
VNGTLMQYFEWYTPNDGQHWKRLQNDAEHLSDIGITAVWIPPAYKGLSQSDNGYGPYDLYDLGEFQQKGTVRTKYGTKSELQDAIGSLHSRNVQVYGDVVLNHKAGADATEDVTAVEVNPANRNQETSEEYQIKAWTDFRFPGRGNTYSDFKWHWYHFDGADWDESRKISRIFKFRGEGKAWDWEVSSENGNYDYLMYADVDYDHPDVVAETKKWGIWYANELSLDGFRIDAAKHIKFSFLRDWVQAVRQATGKEMFTVAEYWQNNAGKLENYLNKTSFNQSVFDVPLHFNLQAASSQGGGYDMRRLLDGTVVSRHPEKAVTFVENHDTQPGQSLESTVQTWFKPLAYAFILTRESGYPQVFYGDMYGTKGTSPKEIPSLKDNIEPILKARKEYAYGPQHDYIDHPDVIGWTREGDSSAAKSGLAALITDGPGGSKRMYAGLKNAGETWYDITGNRSDTVKIGSDGWGEFHVNDGSVSIYVPK

SEQ ID NO: 17240 - protein, 483 aa, Bacillus amyloliquefaciens
VNGTLMQYFEWYTPNDGQHWKRLQNDAEHLSDIGITAVWIPPAYKGLSQSDNGYGPYDLYDLGEFQQKGTVRTKYGTKSELQDAIGSLHSRNVQVYGDVVLNHKAGADATEDVTAVEVNPANKNQETSEEYQIKAWTDFRFPGRGNTYSDFKWHWYHFDGADWDESRKISRIFKFRGEGKAWDWEVSSENGNYDYLMYADVDYDHPDVVAETKKWGIWYANELSLDGFRIDAAKHIKFSFLRDWVQAVRQATGKEMFTVAEYWQNNAGKLENYLNKTSFNQSVFDVPLHFNLQAASSQGGGYDMRRLLDGTVVSRHPEKAVTFVENHDTQPGQSLESTVQTWFKPLAYAFILTRESGYPQVFYGDMYGTKGTSPKEIPSLKDNIEPILKARKEYAYGPQHDYIDHPDVIGWTREGDSSAAKSGLAALITDGPGGSKRMYAGLKNAGETWYDITGNRSDTVKIGSDGWGEFHVNDGSVSIYVQK

SEQ ID NO: 17241 - protein, 483 aa, unidentified
VNGTLMQYFEWYTPNDGQHWKRLQNDAEHLSDIGITAVWIPPAYKGLSQSDNGYGPYDLYDLGEFQQKGTVRTKYGTKSELQDAIGSLHSRNVQVYGDVVLNHKAGADATEDVTAVEVNPANRNQETSEEYQIKAWTDFRFPGRGNTYSDFKWHWYHFDGADWDESRKISRIFKFRGEGKAWNWEVSSENGNYDYLMYADVDYDHPDVVAETKKWGIWYANELSLDGFRIDAAKHIKFSFLRDWVQAVRQATGKEMFTVAEYWQNNAGKLENYLNKTSFNQSVFDVPLHFNLQAASSQGGGYDMRRLLDGTVVSRHPEKAVTFVENHDTQPGQSLESTVQTWFKPLAYAFILTRESGYPQVFYGDMYGTKGTSPKEIPSLKDNIEPILKARKEYAYGPQHDYIDHPDVIGWTREGDSSAAKSGLAALITDGPGGSKRMYAGLKNAGETWYDITGNRSDTVKIGSDGWGEFHVNDGSVSIYVQK

SEQ ID NO: 17242 - protein, 483 aa, Bacillus amyloliquefaciens
VNGTLMQYFEWYTPNDGQHWKRLQNDAEHLSDIGITAVWIPPAYKGLSQSDNGYGPYDLYDLGEFQQKGTVRTKYGTKSELQDAIGSLHSRNVQVYGDVVLNHKAGADATEDVTAVEVNPANRNQVTSEEYQIKAWTDFRFPGRGNTYSDFKWHWYHFDGADWDESRKISRIFKFRGEGKAWDWEVSSENGNYDYLMYADVDYDHPDVVAETKKWGIWYANELSLDGFRIDAAKHIKFSFLRDWVQAVRQATGKEMFTVAEYWQNNAGKLENYLNKTSFNQSVFDVPLHFNLQAASSQGGGYDMRRLLDGTVVSRHPEKAVTFVENHDTQPGQSLESTVQTWFKPLAYAFILTRESGYPQVFYGDMYGTKGTSPKEIPSLKDNIEPILKARKEYAYGPQHDYIDHPDVIGWTREGDSSAAKSGLAALITDGPGGSKRMYAGLKNAGETWYDITGNRSDTVKIGSDGWGEFHVNDGSVSIYVQK

SEQ ID NO: 17243 - protein, 483 aa, Bacillus amyloliquefaciens
VNGTLMQYFEWYTPNDGQHWKRLQNDAEHLSDIGITAVWIPPAYKGLSQSDNGYGPYDLYDLGEFQQKGTVRTKYGTKSELQDAIGSLHSRNVQVYGDVVLNHKAGADATEDVTAVEVNPANRNQETSEEYQIKAWTDFRFPGRGNTYSDFKWHWYHFDGADWNESRKISRIFKFRGEGKAWDWEVSSENGNYDYLMYADVDYDHPDVVAETKKWGIWYANELSLDGFRIDAAKHIKFSFLRDWVQAVRQATGKEMFTVAEYWQNNAGKLENYLNKTSFNQSVFDVPLHFNLQAASSQGGGYDMRRLLDGTVVSRHPEKAVTFVENHDTQPGQSLESTVQTWFKPLAYAFILTRESGYPQVFYGDMYGTKGTSPKEIPSLKDNIEPILKARKEYAYGPQHDYIDHPDVIGWTREGDSSAAKSGLAALITDGPGGSKRMYAGLKNAGETWYDITGNRSDTVKIGSDGWGEFHVNDGSVSIYVQK

SEQ ID NO: 17244 - protein, 483 aa, Bacillus amyloliquefaciens
VNGTLMQYFEWYTPNDGQHWKRLQNDAEHLSDIGITAVWIPPAYKGLSQSDNGYGPYDLYDLGEFQQKGTVRTKYGTKSELQDAIGSLHSRNVQVYGDVVLNHKAGADATEDVTAVEVNPANRNQETSEEYQIKAWTDFRFPGRGNTYSDFKWHWYHFDGADWDESRKISRIFKFRGEGKAWDWEVSSENGNYDYLMYADVDYDHPDVVAETKKWGIWYANELSLDGFRIDAAKHIKFSFLRDWVQAVRQATGKEMFTVAEYWQNNAGKLENYLNKTSFNQSVFDVPLHFNLQAASSQGGGYDMRRLLDGTVVSRHPEKAVTFVENHDTQPGQSLESTVQTWFKPLAYAFILTRESGYPQVFYGDMYGTKGTSPKEIPSLKDNIEPILKARKEYAYGPQHDYIDHPDVIGWTREGDSSAAKSGLAALITDGPGGSKRMYAGLKNAGETWYDITGNRSDTVKIGSDGCGEFHVNDGSVSIYVQK

SEQ ID NO: 17245 - protein, 483 aa, Aspergillus niger CBS 513.88
AVALAATPADWRSQSIYFLLTDRFARTDGSTTATCNTADQKYCGGTWQGIIDKLDYIQGMGFTAIWITPVTAQLPQTTAYGDAYHGYWQQDIYSLNENYGTADDLKALSSALHERGMYLMVDVVANHMGYDGAGSSVDYSVFKPFSSQDYFHPFCFIQNYEDQTQVEDCWLGDNTVSLPDLDTTKDVVKNEWYDWVGSLVSNYSIDGLRIDTVKHVQKDFWPGYNKAAGVYCIGEVLDGDPAYTCPYQNVMDGVLNYPIYYPLLNAFKSTSGSMDDLYNMINTVKSDCPDSTLLGTFVENHDNPRFASYTNDIALAKNVAAFIILNDGIPIIYAGQEQHYAGGNDPANREATWLSGYPTDSELYKLIASANAIRNYAISKDTGFVTYKNWPIYKDDTTIAMRKGTDGSQIVTILSNKGASGDSYTLSLSGAGYTAGQQLTEVIGCTTVTVGSDGNVPVPMAGGLPRVLYPTEKLAGSKICSSS

SEQ ID NO: 17246 - protein, 482 aa, Bacillus amyloliquefaciens
VNGTLMQYFEWYTPNDGQHWKRLQNDAEHLSDIGITAVWIPPAYKGLSQSDNGYGPYDLYDLGEFQQKGTVRTKYGTKSELQDAIGSLHSRNVQVYGDVVLNHKAGADATEDVTAVEVNPANRNQETSEEYQIKAWTDFRFPGRGNTYSDFKWHWYHFDGADWDESRKISRIFKFRGEGKAWDWEVSSENGNYDYLMYADVDYDHPDVVAETKKWGIWYANELSLDGFRIDAAKHIKFSFLRDWVQAVRQATGKEMFTVAEYWQNNAGKLENYLNKTSFNQSVFDVPLHFNLQAASSQGGGYDMRRLLDGTVVSRHPEKAVTFVENHDTQPGQSLESTVQTWFKPLAYAFILTRESGYPQVFYGDMYGTKGTSPKKIPSLKDNIEPILKARKEYAYGPQHDYIDHPDVIGWTREGDSSAAKSGLAALITDGPGGSKRMYAGLKNAGETWYDITGNRSDTVKIGSDGWGEFHVNDGSVSIYVQ

SEQ ID NO: 17247 - protein, 482 aa, Bacillus amyloliquefaciens
VNGTLMQYFEWYTPNDGQHWKRLQNDAEHLSDIGITAVWIPPAYKGLSQSDNGYGPYDLYDLGEFQQKGTVRTKYGTKSELQDAIGSLHSRNVQVYGDVVLNHKAGADATEDVTAVEVNPANRNQETSEEYQIKAWTDFRFPGRGNTYSDFKWHWYHFDGADWDESRKISRIFKFRGEGKAWDWEVSSENGNYDYLMYADVDYDHPDVVAETKKWGIWYANELSLDGFRIDAAKHIKFSFLRDWVQAVRQATGKEMFTVAEYWQNNAGKLENYLNKTSFNQSVFDVPLHFNLQAASSQGGGYDMRRLLDGTVVSRHPEKAVTFVENHDTQPGQSLESTVQTWFKPLAYAFILTREAGYPQVFYGDMYGTKGTSPKEIPSLKDNIEPILKARKEYAYGPQHDYIDHPDVIGWTREGDSSAAKSGLAALITDGPGGSKRMYAGLKNAGETWYDITGNRSDTVKIGSDGWGEFHVNDGSVSIYVQ

SEQ ID NO: 17248 - protein, 482 aa, Bacillus amyloliquefaciens
VNGTLMQYFEWYTPNDGQHWKRLQNDAEHLSDIGITAVWIPPAYKGLSQSDNGYGPYDLYDLGEFQQKGTVRTKYGTKSELQDAIGSLHSRNVQVYGDVVLNHKAGADATEDVTAVEVNPANRNQETSEEYQIKAWTDFRFPGRGNTYSDFKWHWYHFDGADWDESRKISRIFKFRGEGKAWDWEVSSENGNYDYLMYADVDYDHPDVVAETKKWGIWYANELSLDGFRIDAAKHIKFSFLRDWVQAVRQATGKEMFTVAEYWQNNAGKLENYLNKTSFNQSVFDVPLHFNLQAASSQGGGYDMRRLLDGTVVSRHPEKAVTFVENHDTQPGQSLESTVQTWFKPLAYAFILTRESGFPQVFYGDMYGTKGTSPKEIPSLKDNIEPILKARKEYAYGPQHDYIDHPDVIGWTREGDSSAAKSGLAALITDGPGGSKRMYAGLKNAGETWYDITGNRSDTVKIGSDGWGEFHVNDGSVSIYVQ

SEQ ID NO: 17249 - protein, 481 aa, Bacillus amyloliquefaciens
VNGTLMQYFEWYTPNDGQHWKRLQNDAEHLSDIGITAVWIPPAYKGLSQSDNGYGPYDLYDLGEFQQKGTVRTKYGTKSELQDAIGSLHSRNVQVYGDVVLNHKAGADATEDVTAVEVNPANRNQETSEEYQIKAWTDFRFPGRGNTYSDFKWHWYHFDGADWDESRKISRIFKFRGKAWDWEVSSENGNYDYLMYADVDYDHPDVVAETKKWGIWYANELSLDGFRIDAAKHIKFSFLRDWVQAVRQATGKEMFTVAEYWQNNAGKLENYLNKTSFNQSVFDVPLHFNLQAASSQGGGYDMRRLLDGTVVSRHPEKAVTFVENHDTQPGQSLESTVQTYFKPLAYAFILTRESGYPQVFYGDMYGTKGTSPKEIPSLKDNIEPILKARKEYAYGPQHDYIDHPDVIGWTREGDSSAAKSGLAALITDGPGGSKRMYAGLKNAGETWYDITGNRSDTVKIGSDGWGEFHVNDGSVSIYVQK

SEQ ID NO: 17250 - protein, 481 aa, Bacillus amyloliquefaciens
VNGTLMQYFEWYTPNDGQHWKRLQNDAEHLSDIGITAVWIPPAYKGLSQSDNGYGPYDLYDLGEFQQKGTVRTKYGTKSELQDAIGSLHSRNVQVYGDVVLNHKAGADATEDVTAVEVNPANRNQETSEEYQIKAWTDFRFPGRGNTYSDFKWHWYHFDGADWDESRKISRIFKFRGKAWDWEVSSENGNYDYLMYADVDYDHPDVVAETKKWGIWYANELSLDGFRIDAAKHIKFSFLRDWVQAVRQATGKEMFTVAEYWQNNAGKLENYLNKTSFNQSVFDVPLHFNLQAASSQEGGYDMRRLLDGTVVSRHPEKAVTFVENHDTQPGQSLESTVQTWFKPLAYAFILTRESGYPQVFYGDMYGTKGTSPKEIPSLKDNIEPILKARKEYAYGPQHDYIDHPDVIGWTREGDSSAAKSGLAALITDGPGGSKRMYAGLKNAGETWYDITGNRSDTVKIGSDGWGEFHVNDGSVSIYVQK

SEQ ID NO: 17251 - protein, 481 aa, Bacillus amyloliquefaciens
VNGTLMQYFEWYTPNDGQHWKRLQNDAEHLSDIGITAVWIPPAYKGLSQSDNGYGPYDLYDLGEFQQKGTVRTKYGTKSELQDAIGSLHSRNVQVYGDVVLNHKAGADATEDVTAVEVNPANRNQETSEEYQIKAWTDFRFPGRGNTYSDFKWHWYHFDGADWDESRKISRIFKFRGKAWDWEVSSENGNYDYLMYADVDYDHPDVVAETKKWGIWYANELSLDGFRIDAAKHIKFSFLRDWVQAVRQATGKEMFTVAEYWQNNAGKLENYLNKTSFNQSVFDVPLHFNLQAASSQGGGYDMRRLLDGTVVSQHPEKAVTFVENHDTQPGQSLESTVQTWFKPLAYAFILTRESGYPQVFYGDMYGTKGTSPKEIPSLKDNIEPILKARKEYAYGPQHDYIDHPDVIGWTREGDSSAAKSGLAALITDGPGGSKRMYAGLKNAGETWYDITGNRSDTVKIGSDGWGEFHVNDGSVSIYVQK

SEQ ID NO: 17252 - protein, 481 aa, Bacillus amyloliquefaciens
VNGTLMQYFEWYTPNDGQHWKRLQNDAEHLSDIGINAVWIPPAYKGLSQSDNGYGPYDLYDLGEFQQKGTVRTKYGTKSELQDAIGSLHSRNVQVYGDVVLNHKAGADATEDVTAVEVNPANRNQETSEEYQIKAWTDFRFPGRGNTYSDFKWHWYHFDGADWDESRKISRIFKFRGKAWDWEVSSENGNYDYLMYADVDYDHPDVVAETKKWGIWYANELSLDGFRIDAAKHIKFSFLRDWVQAVRQATGKEMFTVAEYWQNNAGKLENYLNKTSFNQSVFDVPLHFNLQAASSQGGGYDMRRLLDGTVVSRHPEKAVTFVENHDTQPGQSLESTVQTWFKPLAYAFILTRESGYPQVFYGDMYGTKGTSPKEIPSLKDNIEPILKARKEYAYGPQHDYIDHPDVIGWTREGDSSAAKSGLAALITDGPGGSKRMYAGLKNAGETWYDITGNRSDTVKIGSDGWGEFHVNDGSVSIYVQK

SEQ ID NO: 17253 - protein, 481 aa, Bacillus amyloliquefaciens
VNGTLMQYFEWYTPNDGQHWKRLQNDAEHLSDIGITAVWIPPAYKGLSQSDNGYGPYDLYDLGEFQQKGTVRTKYGTKSELQDAIGSLHSRNVQVYGDVVLNHKAGADATEDVTAVEVNPANRNQETSEEYQIKAWTDFRFPGRGNTYSDFKWHWYHFDGADWDESRKISRIFKFRGKAWDWEVSSENGNYDYLMYADVDYDHPDVVAETKKWGIWYANELSLDGFRIDAAKHIKFSFLRDWVQAVRQATGKEMFTVAEYWQNNAGKLENYLNKTSFNQSVFDVPLHFNLQAASSQGGGYDMRRLLDGTVVSAHPEKAVTFVENHDTQPGQSLESTVQTWFKPLAYAFILTRESGYPQVFYGDMYGTKGTSPKEIPSLKDNIEPILKARKEYAYGPQHDYIDHPDVIGWTREGDSSAAKSGLAALITDGPGGSKRMYAGLKNAGETWYDITGNRSDTVKIGSDGWGEFHVNDGSVSIYVQK

SEQ ID NO: 17254 - protein, 481 aa, Bacillus amyloliquefaciens
VNGTLMQYFEWYTPNDGQHWKRLQNDAEHLSDIGITAVWIPPAYKGLSQSDNGYGPYDLYDLGEFQQKGTVRTKYGTKSELQDAIGSLHSRNVQVYGDVVLNHKAGADATEDVTAVEVNPANRNQETSEEYQIKAYTDFRFPGRGNTYSDFKWHWYHFDGADWDESRKISRIFKFRGKAWDWEVSSENGNYDYLMYADVDYDHPDVVAETKKWGIWYANELSLDGFRIDAAKHIKFSFLRDWVQAVRQATGKEMFTVAEYWQNNAGKLENYLNKTSFNQSVFDVPLHFNLQAASSQGGGYDMRRLLDGTVVSRHPEKAVTFVENHDTQPGQSLESTVQTWFKPLAYAFILTRESGYPQVFYGDMYGTKGTSPKEIPSLKDNIEPILKARKEYAYGPQHDYIDHPDVIGWTREGDSSAAKSGLAALITDGPGGSKRMYAGLKNAGETWYDITGNRSDTVKIGSDGWGEFHVNDGSVSIYVQK

SEQ ID NO: 17255 - protein, 481 aa, Bacillus amyloliquefaciens
VNGTLMQYFEWYTPNDGQHWKRLQNDAEHLSDIGITAVWIPPAYKGLSQSDNGYGPYDLYDLGEFQQKGTVRTKYGTKSELQDAIGSLHSRNVQVYGDVVLNHKAGADATEDVTAVEVNPANRNQETSEEYQIKAWTDFRFPGRGNTYSDFKWHWYHFDGADWDESRKISRIFKFRGKAWDWEVSSENGNYDYLMYADVDYDHPDVVAETKKWGIWYANELSLDGFRIDAAKHIKFSFLRDWVQAVRQATGKEMFTVAEYWQNNAGKLENYLNKTSFNQSVFDVPLHFNLQAASSQKGGYDMRRLLDGTVVSRHPEKAVTFVENHDTQPGQSLESTVQTWFKPLAYAFILTRESGYPQVFYGDMYGTKGTSPKEIPSLKDNIEPILKARKEYAYGPQHDYIDHPDVIGWTREGDSSAAKSGLAALITDGPGGSKRMYAGLKNAGETWYDITGNRSDTVKIGSDGWGEFHVNDGSVSIYVQK

SEQ ID NO: 17256 - protein, 481 aa, Bacillus amyloliquefaciens
VNGTLMQYFEWYTPNDGQHWKRLQNDAEHLSDIGITAVWIPPAYKGLSQSDNGYGPYDLYDLGEFQQKGTVRTKYGTKSELQDAIGSLHSRNVQVYGDVVLNHKAGADATEDVTAVEVNPANRNQETSEEYQIKAWTDFRFPGRGNTYSDFKWHWYHFDGADYDESRKISRIFKFRGKAWDWEVSSENGNYDYLMYADVDYDHPDVVAETKKWGIWYANELSLDGFRIDAAKHIKFSFLRDWVQAVRQATGKEMFTVAEYWQNNAGKLENYLNKTSFNQSVFDVPLHFNLQAASSQGGGYDMRRLLDGTVVSRHPEKAVTFVENHDTQPGQSLESTVQTWFKPLAYAFILTRESGYPQVFYGDMYGTKGTSPKEIPSLKDNIEPILKARKEYAYGPQHDYIDHPDVIGWTREGDSSAAKSGLAALITDGPGGSKRMYAGLKNAGETWYDITGNRSDTVKIGSDGWGEFHVNDGSVSIYVQK

SEQ ID NO: 17257 - protein, 481 aa, Bacillus amyloliquefaciens
VNGTLMQYFEWYTPNDGQHWKRLQNDAEHLSDIGITAVWIPPAYKGLSQSDNGYGPYDLYDLGEFQQKGTVRTKYGTKSELQDAIGSLHSRNVQVYGDVVLNHKAGADATEDVTAVEVNPANRNQETSEEYQIKAWTDFRFPGRGNTYSDFKWHYYHFDGADWDESRKISRIFKFRGKAWDWEVSSENGNYDYLMYADVDYDHPDVVAETKKWGIWYANELSLDGFRIDAAKHIKFSFLRDWVQAVRQATGKEMFTVAEYWQNNAGKLENYLNKTSFNQSVFDVPLHFNLQAASSQGGGYDMRRLLDGTVVSRHPEKAVTFVENHDTQPGQSLESTVQTWFKPLAYAFILTRESGYPQVFYGDMYGTKGTSPKEIPSLKDNIEPILKARKEYAYGPQHDYIDHPDVIGWTREGDSSAAKSGLAALITDGPGGSKRMYAGLKNAGETWYDITGNRSDTVKIGSDGWGEFHVNDGSVSIYVQK

SEQ ID NO: 17258 - protein, 481 aa, Bacillus amyloliquefaciens
VNGTLMQYFEWYTPNDGQHWKRLQNDAEHLSDIGITAVWIPPAYKGLSQSDNGYGPYDLYDLGEFQQKGTVRTKYGTKSELQDAIGSLHSRNVQVYGDVVLNHKAGADATEDVTAVEVNPANRNQETSEEYQIKAWTDFRFPGRGNTYSDFKWHWYHFDGADWDESRKISRIFKFRGKAWDWEVSSENGNYDYLMYADVDYDHPDVVAETKKWGIWYANELSLDGFRIDAAKHIKFSFLRDWVQAVRQATGKEMFTVAEYWQNNAGKLENYLNKTSFNQSVFDVPLHFNLQAASSQGGGYDMRRLLDGTVVSMHPEKAVTFVENHDTQPGQSLESTVQTWFKPLAYAFILTRESGYPQVFYGDMYGTKGTSPKEIPSLKDNIEPILKARKEYAYGPQHDYIDHPDVIGWTREGDSSAAKSGLAALITDGPGGSKRMYAGLKNAGETWYDITGNRSDTVKIGSDGWGEFHVNDGSVSIYVQK

SEQ ID NO: 17259 - protein, 481 aa, Bacillus amyloliquefaciens
VNGTLMQYFEWYTPNDGQHWKRLQNDAEHLSDIGITAVWIPPAYKGLSQSDNGYGPYDLYDLGEFQQKGTVRTKYGTKSELQDAIGSLHSRNVQVYGDVVLNHKAGADATEDVTAVEVNPANRNQETSEEYQIKAWTDFRFPGRGNTYSDFKWHWYHFDGADWDESRKISRIFKFRGKAWDWEVSSENGNYDYLMYADVDYDHPDVVAETKKWGIWYANELSLDGFRIDAAKHIKFSFLRDWVQAVRQATGKEMFTVAEYWQNNAGKLENYLNKTSFNQSVFDVPLHFNLQAASSQRGGYDMRRLLDGTVVSRHPEKAVTFVENHDTQPGQSLESTVQTWFKPLAYAFILTRESGYPQVFYGDMYGTKGTSPKEIPSLKDNIEPILKARKEYAYGPQHDYIDHPDVIGWTREGDSSAAKSGLAALITDGPGGSKRMYAGLKNAGETWYDITGNRSDTVKIGSDGWGEFHVNDGSVSIYVQK

SEQ ID NO: 17260 - protein, 481 aa, Bacillus amyloliquefaciens
VNGTLMQYFEWYTPNDGQHWKRLQNDAEHLSDIGITAVWIPPAYKGLSQSDNGYGPYDLYDLGEFQQKGTVRTKYGTKSELQDAIGSLHSRNVQVYGDVVLNHKAGADATEDVTAVEVNPANRNQETSEEYQIKAWTDFRFPGRGNTYSDFKWHFYHFDGADWDESRKISRIFKFRGKAWDWEVSSENGNYDYLMYADVDYDHPDVVAETKKWGIWYANELSLDGFRIDAAKHIKFSFLRDWVQAVRQATGKEMFTVAEYWQNNAGKLENYLNKTSFNQSVFDVPLHFNLQAASSQGGGYDMRRLLDGTVVSRHPEKAVTFVENHDTQPGQSLESTVQTWFKPLAYAFILTRESGYPQVFYGDMYGTKGTSPKEIPSLKDNIEPILKARKEYAYGPQHDYIDHPDVIGWTREGDSSAAKSGLAALITDGPGGSKRMYAGLKNAGETWYDITGNRSDTVKIGSDGWGEFHVNDGSVSIYVQK

SEQ ID NO: 17261 - protein, 480 aa, Bacillus amyloliquefaciens
VNGTLMQYFEWYTPNDGQHWKRLQNDAEHLSDIGITAVWIPPAYKGLSQSDNGYGPYDLYDLGEFQQKGTVRTKYGTKSELQDAIGSLHSRNVQVYGDVVLNHKAGADATEDVTAVEVNPANRNQETSEEYQIKAWTDFRFPGRGNTYSDFKWHWYHFDGADWDESRKISRIFKFRGEGKAWDWEVSSENGNYDYLMYADVDYDHPDVVAETKKWGIWYANELSLDGFRIDAAKHIKFSFLRDWVQAVRQATGKEMFTVAEYWQNNAGKLENYLNKTSFNQSVFDVPLHFNLQAASSQGGGYDMRRLLDGTVVSRHPEKAVTFVENHDTQPGQSLESTVQTWFKPLAYAFILTRESGFPQVFYGDMYGTKGTSPKEIPSLKDNIEPILKARKEYAYGPQHDYIDHPDVIGWTREGDSSAAKSGLAALITDGPGGSKRMYAGLKNAGETWYDITGNRSDTVKIGSDGWGEFHVNDGSVSIY

SEQ ID NO: 17262 - protein, 480 aa, Bacillus amyloliquefaciens
VNGTLMQYFEWYTPNDGQHWKRLQNDAEHLSDIGITAVWIPPAYKGLSQSDNGYGPYDLYDLGEFQQKGTVRTKYGTKSELQDAIGSLHSRNVQVYGDVVLNHKAGADATEDVTAVEVNPANRNQETSEEYQIKAWTDFRFPGRGNTYSDFKWHWYHFDGADWDESRKISRIFKFRGEGKAWDWEVSSENGNYDYLMYADVDYDHPDVVAETKKWGIWYANELSLDGFRIDAAKHIKFSFLRDWVQAVRQATGKEMFTVAEYWQNNAGKLENYLNKTSFNQSVFDVPLHFNLQAASSQGGGYDMRRLLDGTVVSRHPEKAVTFVENHDTQPGQSLESTVQTWFKPLAYAFILTREAGYPQVFYGDMYGTKGTSPKEIPSLKDNIEPILKARKEYAYGPQHDYIDHPDVIGWTREGDSSAAKSGLAALITDGPGGSKRMYAGLKNAGETWYDITGNRSDTVKIGSDGWGEFHVNDGSVSIY

SEQ ID NO: 17263 - protein, 480 aa, Bacillus amyloliquefaciens
VNGTLMQYFEWYTPNDGQHWKRLQNDAEHLSDIGITAVWIPPAYKGLSQSDNGYGPYDLYDLGEFQQKGTVRTKYGTKSELQDAIGSLHSRNVQVYGDVVLNHKAGADATEDVTAVEVNPANRNQETSEEYQIKAWTDFRFPGRGNTYSDFKWHWYHFDGADWDESRKISRIFKFRGEGKAWDWEVSSENGNYDYLMYADVDYDHPDVVAETKKWGIWYANELSLDGFRIDAAKHIKFSFLRDWVQAVRQATGKEMFTVAEYWQNNAGKLENYLNKTSFNQSVFDVPLHFNLQAASSQGGGYDMRRLLDGTVVSRHPEKAVTFVENHDTQPGQSLESTVQTWFKPLAYAFILTRESGYPQVFYGDMYGTKGTSPKKIPSLKDNIEPILKARKEYAYGPQHDYIDHPDVIGWTREGDSSAAKSGLAALITDGPGGSKRMYAGLKNAGETWYDITGNRSDTVKIGSDGWGEFHVNDGSVSIY

SEQ ID NO: 17264 - protein, 478 aa, Aspergillus oryzae
ATPADWRSQSIYFLLTDRFARTDGSTTATCNTADQKYCGGTWQGIIDKLDYIQGMGFTAIWITPVTAQLPQTTAYGDAYHGYWQQDIYSLNENYGTADDLKALSSALHERGMYLMVDVVANHMGYDGAGSSVDYSVFKPFSSQDYFHPFCFIQNYEDQTQVEDCWLGDNTVSLPDLDTTKDVVKNEWYDWVGSLVSNYSIDGLRIDTVKHVQKDFWPGYNKAAGVYCIGEVLDGDPAYTCPYQNVMDGVLNYPIYTPLLNAFKSTSGSMDDLYNMINTVKSDCPDSTLLGTFVENHDNPRFASYTNDIALAKNVAAFIILNDGIPIIYAGQEQHYAGGNDPANREATWLSGYPTDSELYKLIASANAIRNYAISKDTGFVTYKNWPIYKDDTTIAMRKGTDGSQIVTILSNKGASGDSYTLSLSGAGYTAGQQLTEVIGCTTVTVGSDGNVPVPMAGGLPRVLYPTEKLAGSKICSSS

SEQ ID NO: 17265 - protein, 478 aa, Aspergillus oryzae
ATPADWRSQSIYFLLTDRFARTDGSTTATCNTADQKYCGGTWQGIIDKLDYIQGMGFTAIWITPVTAQLPQTTAYGDAYHGYWQQDIYSLNENYGTADDLKALSSALHERGMYLMVDVVANHMGYDGAGSSVDYSVFKPFSSQDYFHPFCFIQNYEDQTQVEDCWFGDNTVSLPDLDTTKDVVKNEWYDWVGSLVSNYSIDGLRIDTVKHVQKDFWPGYNKAAGVYCIGEVLDGDPAYTCPYQNVMDGVLNYPIYYPLLNAFKSTSGSMDDLYNMINTVKSDCPDSTLLGTFVENHDNPRFASYTNDIALAKNVAAFIILNDGIPIIYAGQEQHYAGGNDPANREATWLSGYPTDSELYKLIASANAIRNYAISKDTGFVTYKNWPIYKDDTTIAMRKGTDGSQIVTILSNKGASGDSYTLSLSGAGYTAGQQLTEVIGCTTVTVGSDGNVPVPMAGGLPRVLYPTEKLAGSKICSSS

SEQ ID NO: 17266 - protein, 478 aa, Aspergillus oryzae
ATPADWRSQSIYFLLTDRFARTDGSTTATCNTADQKYCGGTWQGIIDKLDYIQGMGFTAIWITPVTAQLPQTTAYGDAYHGYWQQDIYSLNENYGTADDLKALSSALHERGMYLMVDVVANHMGYDGAGSSVDYSVFKPFSSQDYFHPFCFIQNYEDQTQVEDCWLGDNAVSLPDLDTTKDVVKNEWYDWVGSLVSNYSIDGLRIDTVKHVQKDFWPGYNKAAGVYCIGEVLDGDPAYTCPYQNVMDGVLNYPIYYPLLNAFKSTSGSMDDLYNMINTVKSDCPDSTLLGTFVENHDNPRFASYTNDIALAKNVAAFIILNDGIPIIYAGQEQHYAGGNDPANREATWLSGYPTDSELYKLIASANAIRNYAISKDTGFVTYKNWPIYKDDTTIAMRKGTDGSQIVTILSNKGASGDSYTLSLSGAGYTAGQQLTEVIGCTTVTVGSDGNVPVPMAGGLPRVLYPTEKLAGSKICSSS

SEQ ID NO: 17267 - protein, 478 aa, Aspergillus oryzae
ATPADWRSQSIYFLLTDRFARTDGSTTATCNTADQKYCGGTWQGIIDKLDYIQGMGFTAIWITPVTAQLPQTTAAGDAYHGYWQQDIYSLNENYGTADDLKALSSALHERGMYLMVDVVANHMGYDGAGSSVDYSVFKPFSSQDYFHPFCFIQNYEDQTQVEDCWLGDNTVSLPDLDTTKDVVKNEWYDWVGSLVSNYSIDGLRIDTVKHVQKDFWPGYNKAAGVYCIGEVLDGDPAYTCPYQNVMDGVLNYPIYYPLLNAFKSTSGSMDDLYNMINTVKSDCPDSTLLGTFVENHDNPRFASYTNDIALAKNVAAFIILNDGIPIIYAGQEQHYAGGNDPANREATWLSGYPTDSELYKLIASANAIRNYAISKDTGFVTYKNWPIYKDDTTIAMRKGTDGSQIVTILSNKGASGDSYTLSLSGAGYTAGQQLTEVIGCTTVTVGSDGNVPVPMAGGLPRVLYPTEKLAGSKICSSS

SEQ ID NO: 17268 - protein, 478 aa, Aspergillus oryzae
ATPADWRSQSIYFLLTDRFARTDGSTTATCNTADQKYCGGTWQGIIDKLDYIQGMGFTAIWITPVTAQLPQTTAYGDAYHGYWQQDIYSLNENYGTADDLKALSSALHERGMYLMVDVVANHMGYDGAGSSVDYSVFKPFSSQDYFHPFCFIQNYEDQTQVEDCWLGDNTVSLPDLDTTKDVVKNEWYDWVGSLVSNYSIDGLRIDTVKHVQKDFWPGYNKAAGVYCIGEVLDGDPAYTCPYQNVMDGVLNYPIYYPLLNAFKSTSGSMDDLYNMINTVKSDCPDSTLLGTFVENHDNPRFASYTNDIALAKNVAAFIILNDGIPIIYAGQEQHYAGGNDPANREATWLSGYPTDSELYKLIASANAIRNYAISKDTGFVTYKNWPIYKDDITIAMRKGTDGSQIVTILSNKGASGDSYTLSLSGAGYTAGQQLTEVIGCTTVTVGSDGNVPVPMAGGLPRVLYPTEKLAGSKICSSS

SEQ ID NO: 17269 - protein, 478 aa, Aspergillus oryzae
ATPADWRSQSIYFLLTDRFARTDGSTTATCNTADQKYCGGTWQGIIDKLDYIQGMGFTAIWITPVTAQLPQTTAYGDAYHGYWQQDIYSLNENYGTADDLKALSSALHERGMYLMVDVVANHMGYDGAGSSVDYSVFKPFSSQDYFHPFCFIQNYEDQTQVEDCWLGDNTVSLPDLDTTKDVVKNEWYDWVGSLVSNYSIDGLRIDTVKHVQKDFWPGYNKAAGVYCIGEVYDGDPAYTCPYQNVMDGVLNYPIYYPLLNAFKSTSGSMDDLYNMINTVKSDCPDSTLLGTFVENHDNPRFASYTNDIALAKNVAAFIILNDGIPIIYAGQEQHYAGGNDPANREATWLSGYPTDSELYKLIASANAIRNYAISKDTGFVTYKNWPIYKDDTTIAMRKGTDGSQIVTILSNKGASGDSYTLSLSGAGYTAGQQLTEVIGCTTVTVGSDGNVPVPMAGGLPRVLYPTEKLAGSKICSSS

SEQ ID NO: 17270 - protein, 478 aa, Aspergillus oryzae
ATPADWRSQSIYFLLTDRFARTDGSTTATCNTADQKYCGGTWQGIIDKLDYIQGMGFTAIWITPVTAQLPQTTAYGDAYHGYWQQDIYSLNENYGTADDLKALSSALHERGMYLMVDVVANHMGYDGAGSSVDYSVFKPFSSQDYFHPFCFIQNYEDQTQVEDCWLGDPTVSLPDLDTTKDVVKNEWYDWVGSLVSNYSIDGLRIDTVKHVQKDFWPGYNKAAGVYCIGEVLDGDPAYTCPYQNVMDGVLNYPIYYPLLNAFKSTSGSMDDLYNMINTVKSDCPDSTLLGTFVENHDNPRFASYTNDIALAKNVAAFIILNDGIPIIYAGQEQHYAGGNDPANREATWLSGYPTDSELYKLIASANAIRNYAISKDTGFVTYKNWPIYKDDTTIAMRKGTDGSQIVTILSNKGASGDSYTLSLSGAGYTAGQQLTEVIGCTTVTVGSDGNVPVPMAGGLPRVLYPTEKLAGSKICSSS

SEQ ID NO: 17271 - protein, 478 aa, Aspergillus oryzae
ATPADWRSQSIYFLLTDRFARTDGSTTATCNTADQKYCGGTWQGIIDKLDYIQGMGFTAIWITPVTAQLPQTTAFGDAYHGYWQQDIYSLNENYGTADDLKALSSALHERGMYLMVDVVANHMGYDGAGSSVDYSVFKPFSSQDYFHPFCFIQNYEDQTQVEDCWLGDNTVSLPDLDTTKDVVKNEWYDWVGSLVSNYSIDGLRIDTVKHVQKDFWPGYNKAAGVYCIGEVLDGDPAYTCPYQNVMDGVLNYPIYYPLLNAFKSTSGSMDDLYNMINTVKSDCPDSTLLGTFVENHDNPRFASYTNDIALAKNVAAFIILNDGIPIIYAGQEQHYAGGNDPANREATWLSGYPTDSELYKLIASANAIRNYAISKDTGFVTYKNWPIYKDDTTIAMRKGTDGSQIVTILSNKGASGDSYTLSLSGAGYTAGQQLTEVIGCTTVTVGSDGNVPVPMAGGLPRVLYPTEKLAGSKICSSS

SEQ ID NO: 17272 - protein, 478 aa, Aspergillus oryzae
ATPADWRSQSIYFLLTDRFARTDGSTTATCNTADQKYCGGTWQGIIDKLDYIQGMGFTAIWITPVTAQLPQTTAYGDAYHGYWQQDIYSLNENYGTADDLKALSSALHERGMYLMVDVVANHMGYDGAGSSVDYSVFKPFSSQDYFHPFCFIQNYEDQTQVEDCWLGDNTVSLPDLDTTKDVVKNEWYDWVGSLVSNYSIDGLRIDTVKHVQKDFWPGYNKAAGVYCIGEVLDDDPAYTCPYQNVMDGVLNYPIYYPLLNAFKSTSGSMDDLYNMINTVKSDCPDSTLLGTFVENHDNPRFASYTNDIALAKNVAAFIILNDGIPIIYAGQEQHYAGGNDPANREATWLSGYPTDSELYKLIASANAIRNYAISKDTGFVTYKNWPIYKDDTTIAMRKGTDGSQIVTILSNKGASGDSYTLSLSGAGYTAGQQLTEVIGCTTVTVGSDGNVPVPMAGGLPRVLYPTEKLAGSKICSSS

SEQ ID NO: 17273 - protein, 478 aa, Aspergillus oryzae
ATPADWRSQSIYFLLTDRFARTDGSTTATCNTADRKYCGGTWQGIIDKLDYIQGMGFTAIWITPVTAQLPQTTAYGDAYHGYWQQDIYSLNENYGTADDLKALSSALHERGMYLMVDVVANHMGYDGAGSSVDYSVFKPFSSQDYFHPFCFIQNYEDQTQVEDCWLGDNTVSLPDLDTTKDVVKNEWYDWVGSLVSNYSIDGLRIDTVKHVQKDFWPGYNKAAGVYCIGEVLDGDPAYTCPYQNVMDGVLNYPIYYPLLNAFKSTSGSMDDLYNMINTVKSDCPDSTLLGTFVENHDNPRFASYTNDIALAKNVAAFIILNDGIPIIYAGQEQHYAGGNDPANREATWLSGYPTDSELYKLIASANAIRNYAISKDTGFVTYKNWPIYKDDTTIAMRKGTDGSQIVTILSNKGASGDSYTLSLSGAGYTAGQQLTEVIGCTTVTVGSDGNVPVPMAGGLPRVLYPTEKLAGSKICSSS

SEQ ID NO: 17274 - protein, 478 aa, Aspergillus oryzae
ATPADWRSQSIYFLLTDRFARTDGSTTATCNTADQKYCGGTWQGIIDKLDYIQGMGFTAIWITPVTAQLPQTTAYGDAYHGYWQQDIYSLNENYGTADDLKALSSALHERGMYLMVDVVANHMGYDGAGSSVDYSVFKPFSSQDYFHPFCFIQNWEDQTQVEDCWLGDNTVSLPDLDTTKDVVKNEWYDWVGSLVSNYSIDGLRIDTVKHVQKDFWPGYNKAAGVYCIGEVLDGDPAYTCPYQNVMDGVLNYPIYYPLLNAFKSTSGSMDDLYNMINTVKSDCPDSTLLGTFVENHDNPRFASYTNDIALAKNVAAFIILNDGIPIIYAGQEQHYAGGNDPANREATWLSGYPTDSELYKLIASANAIRNYAISKDTGFVTYKNWPIYKDDTTIAMRKGTDGSQIVTILSNKGASGDSYTLSLSGAGYTAGQQLTEVIGCTTVTVGSDGNVPVPMAGGLPRVLYPTEKLAGSKICSSS

SEQ ID NO: 17275 - protein, 478 aa, Aspergillus oryzae
ATPADWRSQSIYFLLTDRFARTDGSTTATCNTADKKYCGGTWQGIIDKLDYIQGMGFTAIWITPVTAQLPQTTAYGDAYHGYWQQDIYSLNENYGTADDLKALSSALHERGMYLMVDVVANHMGYDGAGSSVDYSVFKPFSSQDYFHPFCFIQNYEDQTQVEDCWLGDNTVSLPDLDTTKDVVKNEWYDWVGSLVSNYSIDGLRIDTVKHVQKDFWPGYNKAAGVYCIGEVLDGDPAYTCPYQNVMDGVLNYPIYYPLLNAFKSTSGSMDDLYNMINTVKSDCPDSTLLGTFVENHDNPRFASYTNDIALAKNVAAFIILNDGIPIIYAGQEQHYAGGNDPANREATWLSGYPTDSELYKLIASANAIRNYAISKDTGFVTYKNWPIYKDDTTIAMRKGTDGSQIVTILSNKGASGDSYTLSLSGAGYTAGQQLTEVIGCTTVTVGSDGNVPVPMAGGLPRVLYPTEKLAGSKICSSS

SEQ ID NO: 17276 - protein, 478 aa, Aspergillus oryzae
ATPADWRSQSIYFLLTDRFARTDGSTTATCNTADQKYCGGTWQGIIDKLDYIQGMGFTAIWITPVTAQLPQTTAYGDAYHGYWQQDIYSLNENYGTADDLKALSSALHERGMYLMVDVVANHMGYDGAGSSVDYSVFKPFSSQDYFHPFCFIQNYEDQTQVEDCWLGDNTVSLPDLDTTKDVVKNEWYDWVGSLVSNYSIDGLRIDTVKHVQKDFWPGYNKAAGVYCIGEVLDGDPAYTCPYQNVMDGVLNFPIYYPLLNAFKSTSGSMDDLYNMINTVKSDCPDSTLLGTFVENHDNPRFASYTNDIALAKNVAAFIILNDGIPIIYAGQEQHYAGGNDPANREATWLSGYPTDSELYKLIASANAIRNYAISKDTGFVTYKNWPIYKDDTTIAMRKGTDGSQIVTILSNKGASGDSYTLSLSGAGYTAGQQLTEVIGCTTVTVGSDGNVPVPMAGGLPRVLYPTEKLAGSKICSSS

SEQ ID NO: 17277 - protein, 478 aa, Aspergillus oryzae
ATPADWRSQSIYFLLTDRFARTDGSTTATCNTADQKYCGGTWQGIIDKLDYIQGMGFTAIWITPVTAQLPQTTAYGDAYHGYWQQDIYSLNENYGTADDLKALSSALHERGMYLMVDVVANHMGYDGAGSSVDYSVFKPFSSQDYFHPFCFIQNYEDQTQVEDCWLTDNTVSLPDLDTTKDVVKNEWYDWVGSLVSNYSIDGLRIDTVKHVQKDFWPGYNKAAGVYCIGEVLDGDPAYTCPYQNVMDGVLNYPIYYPLLNAFKSTSGSMDDLYNMINTVKSDCPDSTLLGTFVENHDNPRFASYTNDIALAKNVAAFIILNDGIPIIYAGQEQHYAGGNDPANREATWLSGYPTDSELYKLIASANAIRNYAISKDTGFVTYKNWPIYKDDTTIAMRKGTDGSQIVTILSNKGASGDSYTLSLSGAGYTAGQQLTEVIGCTTVTVGSDGNVPVPMAGGLPRVLYPTEKLAGSKICSSS

SEQ ID NO: 17278 - protein, 478 aa, Aspergillus oryzae
ATPADWRSQSIYFLLTDRFARTDGSTTATCNTADQKYCGGTWQGIIDKLDYIQGMGFTAIWITPVTAQLPQTTAYGDAYHGYWQQDIYSLNENYGTADDLKALSSALHERGMYLMVDVVANHMGYDGAGSSVDYSVFKPFSSQDYFHPFCFIQNYEDQTQVEDCWLGDNTVSLPDLDTTKDVVKNEWYDWVGSLVSNYSIDGLRIDTVKHVQKDFWPGYNKAAGVYCIGEVLGGDPAYTCPYQNVMDGVLNYPIYYPLLNAFKSTSGSMDDLYNMINTVKSDCPDSTLLGTFVENHDNPRFASYTNDIALAKNVAAFIILNDGIPIIYAGQEQHYAGGNDPANREATWLSGYPTDSELYKLIASANAIRNYAISKDTGFVTYKNWPIYKDDTTIAMRKGTDGSQIVTILSNKGASGDSYTLSLSGAGYTAGQQLTEVIGCTTVTVGSDGNVPVPMAGGLPRVLYPTEKLAGSKICSSS

SEQ ID NO: 17279 - protein, 478 aa, Unidentified
ATPADWRSQSIYFLLTDRFARTDGSTTATCNTADQKYCGGTWQGIIDKLDYIQGMGFTAIWITPVTAQLPQTTAYGDAYHGYWQQDIYSLNENYGTADDLKALSSALHERGMYLMVDVVANHMGYDGAGSSVDYSVFKPFSSQDYFHPFCFIQNYEDQTQVEDCWLGDNTVSLPDLDTTKDVVKNEWYDWVGSLVSNYSIDGLRIDTVKHVQKDFWPGYNKAAGVYCIGEVLDVDPAYTCPYQNVMDGVLNYPIYYPLLNAFKSTSGSMDDLYNMINTVKSDCPDSTLLGTFVENHDNPRFASYTNDIALAKNVAAFIILNDGIPIIYAGQEQHYAGGNDPANREATWLSGYPTDSELYKLIASANAIRNYAISKDTGFVTYKNWPIYKDDTTIAMRKGTDGSQIVTILSNKGASGDSYTLSLSGAGYTAGQQLTEVIGCTTVTVGSDGNVPVPMAGGLPRVLYPTEKLAGSKICSSS

SEQ ID NO: 17280 - protein, 513 aa, Geobacillus stearothermophilus
AAPFNGTMMQYFEWYLPDDGTLWTKVANEANNLSSLGITALWLPPAYKGTSRSDVGYGVYDLYDLGEFNQKGTVRTKYGTKAQYLQAIQAAHAAGMQVYADVVFDHKGGADGTEWVDAVEVNPSDRNQEISGTYQIQAWTKFDFPGRGNTYSSFKWRWYHFDGVDWDESRKLSRIYKFRGKAWDWEVDTEFGNYDYLMYADLDMDHPEVVTELKNWGKWYVNTTNIDGFRLDAVKHIKFSFFPDWLSYVRSQTGKPLFTVGEYWSYDINKLHNYITKTNGTMSLFDAPLHNKFYTASKSGGAFDMRTLMTNTLMKDQPTLAVTFVDNHDTEPGQALQSWVDPWFKPLAYAFILTRQEGYPCVFYGDYYGIPQYNIPSLKSKIDPLLIARRDYAYGTQHDYLDHSDIIGWTREGVTEKPGSGLAALITDGPGGSKWMYVGKQHAGKVFYDLTGNRSDTVTINSDGWGEFKVNGGSVSVWVPRKTTVSTIARPITTRPWTGEFVRWTEPRLVAWP

SEQ ID NO: 17281 - protein, 515 aa, Geobacillus stearothermophilus
AAPFNGTMMQYFEWYLPDDGTLWTKVANEANNLSSLGITALWLPPAYKGTSRSDVGYGVYDLYDLGEFNQKGTVRTKYGTKAQYLQAIQAAHAAGMQVYADVVFDHKGGADGTEWVDAVEVNPSDRNQEISGTYQIQAWTKFDFPGRGNTYSSFKWRWYHFDGVDWDESRKLSRIYKFRGIGKAWDWEVDTEFGNYDYLMYADLDMDHPEVVTELKNWGKWYVNTTNIDGFRLDAVKHIKFSFFPDWLSYVRSQTGKPLFTVGEYWSYDINKLHNYITKTNGTMSLFDAPLHNKFYTASKSGGAFDMRTLMTNTLMKDQPTLAVTFVDNHDTEPGQALQSWVDPWFKPLAYAFILTRQEGYPCVFYGDYYGIPQYNIPSLKSKIDPLLIARRDYAYGTQHDYLDHSDIIGWTREGVTEKPGSGLAALITDGPGGSKWMYVGKQHAGKVFYDLTGNRSDTVTINSDGWGEFKVNGGSVSVWVPRKTTVSTIARPITTRPWTGEFVRWTEPRLVAWP

SEQ ID NO: 17282 - protein, 498 aa, Aspergillus niger
MVAWWSLFLYGLQVAAPALAATPADWRSQSIYFLLTDRFARTDGSTTATCNTADQKYCGGTWQGIIDKLDYIQGMGFTAIWITPVTAQLPQTTAYGDAYHGYWQQDIYSLNENYGTADDLKALSSALHERGMYLMVDVVANHMGYDGAGSSVDYSVFKPFSSQDYFHPFCFIQNYEDQTQVEDCWLGDNTVSLPDLDTTKDVVKNEWYDWVGSLVSNYSIDGLRIDTVKHVQKDFWPGYNKAAGVYCIGEVLDGDPAYTCPYQNVMDGVLNYPIYYPLLNAFKSTSGSMDDLYNMINTVKSDCPDSTLLGTFVENHDNPRFASYTNDIALAKNVAAFIILNDGIPIIYAGQEQHYAGGNDPANREATWLSGYPTDSELYKLIASRNAIRNYAISKDTGFVTYKNWPIYKDDTTIPMRKGTDGSQIVTILSNKGASGDSYTLSLSGAGYTAGQQLTEVIGCTTVTVGSDGNVPVPMAGGLPRVLYPTEKLAGSKICSSS

SEQ ID NO: 17283 - protein, 498 aa, Aspergillus oryzae
MVAWWSLFLYGLQVAAPALAATPADWRSQSIYFLLTDRFARTDGSTTATCNTADQKYCGGTWQGIIDKLDYIQGMGFTAIWITPVTAQLPQTTAYGDAYHGYWQQDIYSLNENYGTADDLKALSSALHERGMYLMVDVVANHMGYDGAGSSVDYSVFKPFSSQDYFHPFCFIQNYEDQTQVEDCWLGDNTVSLPDLDTTKDVVKNEWYDWVGSLVSNYSIDGLRIDTVKHVQKDFWPGYNKAAGVYCIGEVLDGDPAYTCPYQKVLDGVLNYPIYYPLLNAFKSTSGSMDDLYNMINTVKSDCPDSTLLGTFVENHDNPRFASYTNDIALAKNVAAFIILNDGIPIIYAGQEQHYAGGNDPANREATWLSGYPTDSELYKLIASANAIRNYAISKDTGFVTYKNWPIYKDDTTIAMRKGTDGSQIVTILSNKGASGDSYTLSLSGAGYTAGQQLTEVIGCTTVTVGSDGNVPVPMAGGLPRVLYPTEKLAGSKICSSS

SEQ ID NO: 17284 - protein, 498 aa, Aspergillus oryzae
MVAWWSLFLYGLQVAAPALAATPADWRSQSIYFLLTDRFARTDGSTTATCNTADQKYCGGTWQGIIDKLDYIQGMGFTAIWITPVTAQLPQTTAYGDAYHGYWQQDIYSLNENYGTADDLKALSSALHERGMYLMVDVVANHMGYDGAGSSVDYSVFKPFSSQDYFHPFCFIQNWDDQTQVEDCWLGDNTVSLPDLDTTKDVVKNEWYDWVGSLVSNYSIDGLRIDTVKHVQKDFWPGYNKAAGVYCIGEVLDGDPAYTCPYQNVMDGVLNYPIYYPLLNAFKSTSGSMDDLYNMINTVKSDCPDSTLLGTFVENHDNPRFASYTNDIALAKNVAAFIILNDGIPIIYAGQEQHYAGGNDPANREATWLSGYPTDSELYKLIASANAIRNYAISKDTGFVTYKNWPIYKDDTTIAMRKGTDGSQIVTILSNKGASGDSYTLSLSGAGYTAGQQLTEVIGCTTVTVGSDGNVPVPMAGGLPRVLYPTEKLAGSKICSSS

SEQ ID NO: 17285 - protein, 498 aa, unidentified
MVAWWSLFLYGLQVAAPALAATPADWRSQSIYFLLTDRFARTDGSTTATCNTADRKYCGGTWQGIIDKLDYIQGMGFTAIWITPVTAQLPQTTAYGDAYHGYWQQDIYSLNENYGTADDLKALSSALHERGMYLMVDVVANHMGYDGAGSSVDYSVFKPFSSQDYFHPFCLIQNYEDQTQVEDCWLGDNTVSLPDLDTTKDVVKNEWYDWVGSLVSNYSIDGLRIDTVKHVQKDFWPGYNKAAGVYCIGEVLDGDPAYTCPYQNVMDGVLNYPIYYPLLNAFKSTSGSMDDLYNMINTVKSDCPDSTLLGTFVENHDNPRFASYTNDIALAKNVAAFIILNDGIPIIYAGQEQHYAGGNDPANREATWLSGYPTDSELYKLIASANAIRNYAISKDTGFVTYKNWPIYKDDTTIAMRKGTDGSQIVTILSNKGASGDSYTLSLSGAGYTAGQQLTEVIGCTTVTVGSDGNVPVPMAGGLPRVLYPTEKLAGSKICSSS

SEQ ID NO: 17286 - protein, 498 aa, Aspergillus oryzae
MVAWWSLFLYGLQVAAPALAATPADWRSQSIYFLLTDRFARTDGSTTATCNTADQKYCGGTWQGIIDKLDYIQGMGFTAIWITPVTAQLPQTTAYGDAYHGYWQQDIYSLNENYGTADDLKALSSALHERGMYLMVDVVANHMGYDGAGSSVDYSVFKPFSSQDYFHPFCLIQNYEDQTQVEDCWLGDNTVSLPDLDTTKDVVKNEWYDWVGSLVSNYSIDGLRIDTVKHVQKDFWPGYNKAAGVYCIGEVLDGDPAYTCPYQNVMDGVLNYPIYYPLLNAFKSTSGSMDDLYNMINTVKSDCPDSTLLGTFVENHDNPRFASYTNDIALAKNVAAFIILNDGIPIIYAGQEQHYAGGNDPANREATWASGYPTDSELYKLIASANAIRNYAISKDTGFVTYKNWPIYKDDTTIAMRKGTDGSQIVTILSNKGASGDSYTLSLSGAGYTAGQQLTEVIGCTTVTVGSDGNVPVPMAGGLPRVLYPTEKLAGSKICSSS

SEQ ID NO: 17287 - protein, 495 aa, Aspergillus niger
MVAWWSLFLYGLQVAAPALAATPADWRSQSIYFLLTDRFARTDGSTTATCNTADQKYCGGTWQGIIDKLDYIQGMGFTAIWITPVTAQLPQTTAYGDAYHGYWQQDIYSLNENYGTADDLKALSSALHERGMYLMVDVVANHMGYDGAGSSVDYSVFKPFSSQDYFHPFCFIQNYEDQTQVEDCWLGDNTVSLPDLDTTKDVVKNEWYDWVGSLVSNYSIDGLRIDTVKHVQKDFWPGYNKAAGVYCIGEVLDGDPAYTCPYQNVMDGVLNYPIYYPLLNAFKSTSGSMDDLYNMINTVKSDCPDSTLLGTFVENHDNPRFASYTNDIALAKNVAAFIILNDGIPIIYAGQEQHYAGGNDPANREATWLSGYPTDSELYKLIASRNAIRNYAISKDTGFVTYKNWPIYKDDTTIPMRKGTDGSQIVTILSNKGASGDSYTLSLSGAGYTAGQQLTEVIGCTTVTVGSDGNVPVPMAGGLPRVLYPTEKLAGSKIC

SEQ ID NO: 17288 - protein, 489 aa, Geobacillus stearothermophilus
AAPFNGTMMQYFEWYLPDDGTLWTKVANEANNLSSLGITALWLPPAYKGTSRSDVGYGAYDLYDLGEFNQKGTVRTKYGTKAQYLQAIQAAHAAGMQVYADVVFDHKGGADGTEWVDAVEVNPSDRNQVISGTYQIQAWTKFDFPGRGNTYSSFKWRWYHFDGVDWDESRKLSRIYLFSGKQWDWPVDNEFGNYDYLMYADLDMDHPEVTTELKNWGKWYVNTTNIDGFRLDAVKHIKFYFFPDWLSYVRSSTGKPLFTVGEYWSGDINKLHNYITITNGTVSLFDAPLHYKFYNASKSGGAFDMRTLMTNTLMKDQPTLAVTFVDNHDTEPGQALQSWVDPWFKPLAYAFILTRQEGYPCVFYGDYYGIPQYNIPSLKSKIDPLLIARRDYAYGTQHDYLDHSDIIGWTREGVTEKPGSGLAALITDGPGGSKWMYVGKQHAGKVFYDLTGNRSDTVTINSDGWGEFKVNGGSVSVWVPRKTTVSTIA

SEQ ID NO: 17289 - protein, 488 aa, Geobacillus stearothermophilus
AAPFNGTMMQYFEWYLPDDGTLWTKVANEANNLSSLGITALWLPPAYKGTSRSDVGYGVYDLYDLGEFNQKGTVRTKYGTKAQYLQAIQAAHAAGMQVYADVVFDHKGGADGTEWVDAVEVNPSDRNQEISGTYQIQAWTKFDFPGRGNTYSSFKWRWYHFDGVDWDESRKLSRIYKFRGXXKAWDWEVDTEFGNYDYLMYADLDMDHPEVVTELKNWGKWYVNTTNIDGFRLDAVKHIKFSFFPDWLSYVRSQTGKPLFTVGEYWSYDINKLHNYITKTNGTMSLFDAPLHNKFYTASKSGGAFDMRTLMTNTLMKDQPTLAVTFVDNHDTEPGQALQSWVDPWFKPLAYAFILTRQEGYPCVFYGDYYGIPQYNIPSLKSKIDPLLIARRDYAYGTQHDYLDHSDIIGWTREGVTEKPGSGLAALITDGPGGSKWMYVGKQHAGKVFYDLTGNRSDTVTINSDGWGEFKVNGGSVSVWVPRKTTVS

SEQ ID NO: 17290 - protein, 486 aa, Geobacillus stearothermophilus
AAPFNGTMMQYFEWYLPDDGTLWTKVANEANNLSSLGITALWLPPAYKGTSRSDVGYGVYDLYDLGEFNQKGTVRTKYGTKAQYLQAIQAAHAAGMQVYADVVFDHKGGADGTEWVDAVEVNPSDRNQEISGTYQIQAWTKFDFPGRGNTYSSFKWRWYHFDGVDWDESRKLSRIYKFRGKAWDWEVDTEFGNYDYLMYADLDMDHPEVVTELKNWGKWYVNTTNIDGFRLDAVKHIKFQFFPDWLSYVRSQTGKPLFTVGEYWSYDINKLHNYITKTDGTMSLFDAPLHNKFYTASKSGGAFDMRTLMTNTLMKDQPTLAVTFVDNHDTEPVQALQSWVDPWFKPLAYAFILTRQEGYPCVFYGDYYGIPQYNIPSLKSKIDPLLIARRDYAYGTQHDYLDHSDIIGWTREGGTEKPGSGLAALITDGPGGSKWMYVGKQHAGKVFYDLTGNRSDTVTINSDGWGEFKVNGGSVSVWVPRKTTVS

SEQ ID NO: 17291 - protein, 488 aa, Bacillus sp.
AAPFNGTMMQYFEWYLPDDGTLWTKVANEANNLSSLGITALWLPPAYKGTSRSDVGYGVYDLYDLGEFNQKGTVRTKYGTKAQYLQAIQAAHAAGMQVYADVVFDHKGGADGTEWVDAVEVNPSDRNQEISGTYQIQAWTKFDFPGRGNTYSSFKWRWYHFDGVDWDESRKLSRIYKFRGIGKAWDWEVDTENGNYDYLMYADLDMDHPEVVTELKNWGKWYVNTTNIDGFRLDAVKHIKFSFFPDWLSYVRSQTGKPLFTVGEYWSYDINKLHNYITKTDGTMSLFDAPLHNKFYTASKSGGAFDMRTLMTNTLMKDQPTLAVTFVDNHDTEPGQALQSWVDPWFKPLAYAFILTRQEGYPCVFYGDYYGIPQYNIPSLKSKIDPLLIARRDYAYGTQHDYLDHSDIIGWTREGVTEKPGSGLAALITDGPGGSKWMYVGKQHAGKVFYDLTGNRSDTVTINSDGWGEFKVNGGSVSVWVPRKTTVS

SEQ ID NO: 17292 - protein, 488 aa, Geobacillus stearothermophilus
AAPFNGTMMQYFEWYLPDDGTLWTKVANEANNLSSLGITALWLPPAYKGTSRSDVGYGVYDLYDLGEFNQKGTVRTKYGTKAQYLQAIQAAHAAGMQVYADVVFDHKGGADGTEWVDAVEVNPSDRNQEISGTYQIQAWTKFDFPGRGNTYSSFKWRWYHFDGVDWDESRKLSRIYKFRGIGKAWDWEVDTEFGNYDYLMYADLDMDHPEVVTELKNWGKWYVNTTNIDGFRLDAVKHIKFSFFPDWLSYVRSQTGKPLFTVGEYWSYDINKLHNYITKTNGTMSLFDAPLHNKFYTASKSGGAFDMRTLMTNTLMKDQPTLAVTFVDNHDTEPGQALQSWVDPWFKPLAYAFILTRQEGYPCVFYGDYYGIPQYNIPSLKSKIDPLLIARRDYAYGTQHDYLDHSDIIGWTREGVTEKPGSGLAALITDGPGGSKWMYVGKQHAGKVFYDLTGNRSDTVTINSDGWGEFKVNGGSVSVWVPRKTTVS

SEQ ID NO: 17293 - protein, 486 aa, Geobacillus stearothermophilus
AAPFNGTMMQYFEWYLPDDGTLWTKVANEANNLSSLGITALWLPPAYKGTSRSDVGYGVYDLYDLGEFNQKGTVRTKYGTKAQYLQAIQAAHAAGMQVYADVVFDHKGGADGTEWVDAVEVNPSDRNQEISGTYQIQAWTKFDFPGRGNTYSSFKWRWYHFDGVDWDESRKLSRIYKFRGKAWDWEVDTEFGNYDYLMYADLDMDHPEVVTELKNWGKWYVNTTNIDGFRLDAVKHIKFSFFPDWLSYVRSQTGKPLFTVGEYWSYDINKLHNYITKTNGTMSLFDAPLHNKFYTASKSGGAFDMRTLMTNTLMKDQPTLAVTFVDNHDTEPGQALQSWVDPWFKPLAYAFILTRQEGYPCVFYGDYYGIPQYNIPSLKSKIDPLLIARRDYAYGTQHDYLDHSDIIGWTREGVTEKPGSGLAALITDGPGGSKWMYVGKQHAGKVFYDLTGNRSDTVTINSDGWGEFKVNGGSVSVWVPRKTTVS

SEQ ID NO: 17294 - protein, 485 aa, Geobacillus stearothermophilus
AAPFNGTMMQYFEWYLPDDGTLWTKVANEANNLSSLGITALWLPPAYKGTSRSDVGYGVYDLYDLGEFNQKGTVRTKYGTKAQYLQAIQAAHAAGMQVYADVVFDHKGGADGTEWVDAVEVNPSDRNQEISGTYQIQAWTKFDFPGRGNTYSSFKWRWYHFDGVDWDESRKLSRIYKFRGKAWDWEVDTFGNYDYLMYADLDMDHPEVVTELKNWGKWYVNTTNIDGFRLDAVKHIKFSFFPDWLSYVRSQTGKPLFTVGEYWSYDINKLHNYITKTNGTMSLFDAPLHNKFYTASKSGGAFDMRTLMTNTLMKDQPTLAVTFVDNHDTEPGQALQSWVDPWFKPLAYAFILTRQEGYPCVFYGDYYGIPQYNIPSLKSKIDPLLIARRDYAYGTQHDYLDHSDIIGWTREGVTEKPGSGLAALITDGPGGSKWMYVGKQHAGKVFYDLTGNRSDTVTINSDGWGEFKVNGGSVSVWVPRKTTVS

SEQ ID NO: 17295 - protein, 483 aa, Bacillus sp.
HHNGTNGTMMQYFEWHLPNDGNHWNRLRDDASNLRNRGITAIWIPPAWKGTSQNDVGYGAYDLYDLGEFNQKGTVRTKYGTRSQLESAIHALKNNGVQVYGDVVMNHKGGADATENVLAVEVNPNNRNQEISGDYTIEAWTKFDFPGRGNTYSDFKWRWYHFDGVDWDQSRQFQNRIYKFRGKAWDWEVDSETGNYDYLMYADVDLDHPEVVNELRRWGEWYTNTLNLDGFRIDAVKHIKYSFTRDWLTHVRNATGKEMFAVAEFWKNDLGALENYLNKTNWNHSVFDVPLHYNLYNASNSGGNYDMAKLLNGTVVQKHPMHAVTFVDNHDSQPGESLESFVQEWFKPLAYALILTREQGYPSVFYGDYYGIPTHSVPAMKAKIDPILEARQNFAYGTQHDYFDHHNIIGWTREGNTTHPNSGLATIMSDGPGGEKWMYVGQNKAGQVWHDITGNKPGTVTINADGWANFSVNGGSVSIWVKR

SEQ ID NO: 17296 - protein, 483 aa, Unidentified
HHNGTNGTMMQYFEWHLPNDGNHWNRLRDDASNLRNRGITAIWIPPAWKGTSQNDVGYGAYDLYDLGEFNQKGTVRTKYGTRSQLESAIHALKNNGVQVYGDVVMNHKGGADATENVLAVEVNPNNRNQEISGDYTIEAWTKFDFPGRGNTYSDFKWRWYHFDGVDWDQSRQFQNRIYKFRGKAWDWEVDSEFGNYDYLMYADCDMDHPEVVNELRRWGEWYTNTLNLDGFRIDAVKHIKYSFTRDWLTHVRNATGKEMFAVAEFWKNDLGALENYLNKTNWNHSVFDVPLHYNLYNASNSGGNYDMAKLLNGTVVQKHPMHAVTFVDNHDSQPGESLESFVQEWFKPLAYALILTREQGYPSVFYGDYYGIPTHSVPAMKAKIDPILEARQNFAYGTQHDYFDHHNIIGWTREGNTTHPNSGLATIMSDGPGGEKWMYVGQNKAGQVWHDITGNKPGTVTINADGWANFSVNGGSVSIWVKR

SEQ ID NO: 17297 - protein, 483 aa, Unidentified
HHNGTNGTMMQYFEWHLPNDGNHWNRLRDDASNLRNRGITAIWIPPAWKGTSQNDVGYGAYDLYDLGEFNQKGTVRTKYGTRSQLESAIHALKNNGVQVYGDVVMNHKGGADATENVLAVEVNPNNRNQEISGDYTIEAWTKFDFPGRGNTYSDFKWRWYHFDGVDWDQSRQFQNRIYKFRGKAWDWEVDSEFGNYDYLMYADNDMDHPEVVNELRRWGEWYTNTLNLDGFRIDAVKHIKYSFTRDWLTHVRNATGKEMFAVAEFWKNDLGALENYLNKTNWNHSVFDVPLHYNLYNASNSGGNYDMAKLLNGTVVQKHPMHAVTFVDNHDSQPGESLESFVQEWFKPLAYALILTREQGYPSVFYGDYYGIPTHSVPAMKAKIDPILEARQNFAYGTQHDYFDHHNIIGWTREGNTTHPNSGLATIMSDGPGGEKWMYVGQNKAGQVWHDITGNKPGTVTINADGWANFSVNGGSVSIWVKR

SEQ ID NO: 17298 - protein, 483 aa, Bacillus sp.
HHNGTNGTMMQYFEWHLPNDGNHWNRLRDDASNLRNRGITAIWIPPAWKGTSQNDVGYGAYDLYDLGEFNQKGTVRTKYGTRSQLESAIHALKNNGVQVYGDVVMNHKGGADATENVLAVEVNPNNRNQEISGDYTIEAWTKFDFPGRGNTYSDFKWRWYHFDGVDWDQSRQFQNRIYKFRGKAWDWEVDTENGNYDYLMYADVDMDHPEAVNELRRWGEWYTNTLNLDGFRIDAVKHIKYSFTRDWLTHVRNATGKEMFAVAEFWKNDLGALENYLNKTNWNHSVFDVPLHYNLYNASNSGGNYDMAKLLNGTVVQKHPMHAVTFVDNHDSQPGESLESFVQEWFKPLAYALILTREQGYPSVFYGDYYGIPTHSVPAMKAKIDPILEARQNFAYGTQHDYFDHHNIIGWTREGNTTHPNSGLATIMSDGPGGEKWMYVGQNKAGQVWHDITGNKPGTVTINADGWANFSVNGGSVSIWVKR

SEQ ID NO: 17299 - protein, 483 aa, Bacillus sp.
HHNGTNGTMMQYFEWHLPNDGNHWNRLRDDASNLRNRGITAIWIPPAWKGTSQNDVGYGAYDLYDLGEFNQKGTVRTKYGTRSQLESAIHALKNNGVQVYGDVVMNHKGGADATENVLAVEVNPNNRNQEISGDYTIEAWTKFDFPGRGNTYSDFKWRWYHFDGVDWDQSRQFQNRIYKFRGKAWDWEVDSENGNYDYLMYADLDMDHPEVVNELRRWGEWYTNTLNLDGFRIDAVKHIKFSFTRDWLTHVRNATGKEMFAVAEFWKNDLGALENYLNKTNWNHSVFDVPLHYNLYNASNSGGNYDMAKLLNGTVVQKHPMHAVTFVDNHDSQPGESLESFVQEWFKPLAYALILTREQGYPSVFYGDYYGIPTHSVPAMKAKIDPILEARQNFAYGTQHDYFDHHNIIGWTREGNTTHPNSGLATIMSDGPGGEKWMYVGQNKAGQVWHDITGNKPGTVTINADGWANFSVNGGSVSIWVKR

SEQ ID NO: 17300 - protein, 483 aa, Bacillus sp.
HHNGTNGTMMQYFEWHLPNDGNHWNRLRDDASNLRNRGITAIWIPPAWKGTSQNDVGYGAYDLYDLGEFNQKGTVRTKYGTRSQLESAIHALKNNGVQVYGDVVMNHKGGADATENVLAVEVNPNNRNQEISGDYTIEAWTKFDFPGRGNTYSDFKWRWYHFDGVDWDQSRQFQNRIYKFRGKAWDWEVDSENGFYDYLMYADVDGDHPEVVNELRRWGEWYTNTLNLDGFRIDAVKHIKYSFTRDWLTHVRNATGKEMFAVAEFWKNDLGALENYLNKTNWNHSVFDVPLHYNLYNASNSGGNYDMAKLLNGTVVQKHPMHAVTFVDNHDSQPGESLESFVQEWFKPLAYALILTREQGYPSVFYGDYYGIPTHSVPAMKAKIDPILEARQNFAYGTQHDYFDHHNIIGWTREGNTTHPNSGLATIMSDGPGGEKWMYVGQNKAGQVWHDITGNKPGTVTINADGWANFSVNGGSVSIWVKR

SEQ ID NO: 17301 - protein, 483 aa, Bacillus sp.
HHNGTNGTMMQYFEWHLPNDGNHWNRLRDDASNLRNRGITAIWIPPAWKGTSQNDVGYGAYDLYDLGEFNQKGTVRTKYGTRSQLESAIHALKNNGVQVYGDVVMNHKGGADATENVLAVEVNPNNRNQEISGDYTIEAWTKFDFPGRGNTYSDFKWRWYHFDGVDWDQSRQFQNRIYKFRGKAWDWEVDTENGNYDYLMYADLDMDHPEVVNELRRWGEWYTNTLNLDGFRIDAVKHIKYSFTRDWLTHVRNATGKEMFAVAEFWKNDLGALENYLNKTNWNHSVFDVPLHYNLYNASNSGGNYDMAKLLNGTVVQKHPMHAVTFVDNHDSQPGESLESFVQEWFKPLAYALILTREQGYPSVFYGDYYGIPTHSVPAMKAKIDPILEARQNFAYGTQHDYFDHHNIIGWTREGNTTHPNSGLATIMSDGPGGEKWMYVGQNKAGQVWHDITGNKPGTVTINADGWANFSVNGGSVSIWVKR

SEQ ID NO: 17302 - protein, 483 aa, Bacillus sp.
HHNGTNGTMMQYFEWHLPNDGNHWNRLRDDASNLRNRGITAIWIPPAWKGTSQNDVGYGAYDLYDLGEFNQKGTVRTKYGTRSQLESAIHALKNNGVQVYGDVVMNHKGGADATENVLAVEVNPNNRNQEISGDYTIEAWTKFDFPGRGNTYSDFKWRWYHFDGVDWDQSRQFQNRIYKFRGKAWTWEVDSENGFYDYLMYADVDMDHPEVVNELRRWGEWYTNTLNLDGFRIDAVKHIKYSFTRDWLTHVRNATGKEMFAVAEFWKNDLGALENYLNKTNWNHSVFDVPLHYNLYNASNSGGNYDMAKLLNGTVVQKHPMHAVTFVDNHDSQPGESLESFVQEWFKPLAYALILTREQGYPSVFYGDYYGIPTHSVPAMKAKIDPILEARQNFAYGTQHDYFDHHNIIGWTREGNTTHPNSGLATIMSDGPGGEKWMYVGQNKAGQVWHDITGNKPGTVTINADGWANFSVNGGSVSIWVKR

SEQ ID NO: 17303 - protein, 483 aa, Bacillus sp.
HHNGTNGTMMQYFEWHLPNDGNHWNRLRDDASNLRNRGITAIWIPPAWKGTSQNDVGYGAYDLYDLGEFNQKGTVRTKYGTRSQLESAIHALKNNGVQVYGDVVMNHKGGADATENVLAVEVNPNNRNQEISGDYTIEAWTKFDFPGRGNTYSDFKWRWYHFDGVDWDQSRQFRNRIYKFRGKAWDWEVDSENGNYDYLMYADVDMDHPVVVNELRRWGEWYTNTLNLDGFRIDAVKHIKYSFTRDWLTHVRNATGKEMFAVAEFWKNDLGALENYLNKTNWNHSVFDVPLHYNLYNASNSGGNYDMAKLLNGTVVQKHPMHAVTFVDNHDSQPGESLESFVQEWFKPLAYALILTREQGYPSVFYGDYYGIPTHSVPAMKAKIDPILEARQNFAYGTQHDYFDHHNIIGWTREGNTTHPNSGLATIMSDGPGGEKWMYVGQNKAGQVWHDITGNKPGTVTINADGWANFSVNGGSVSIWVKR

SEQ ID NO: 17304 - protein, 483 aa, Unidentified
HHNGTNGTMMQYFEWHLPNDGNHWNRLRDDASNLRNRGITAIWIPPAWKGTSQNDVGYGAYDLYDLGEFNQKGTVRTKYGTRSQLESAIHALKNNGVQVYGDVVMNHKGGADATENVLAVEVNPNNRNQEISGDYTIEAWTKFDFPGRGNTYSDFKWRWYHFDGVDWDQSRQFQNRIYKFRGKAWDWEVDSEFGNYDYLMYADVDMDHPEVVNELRRWGEWYTNTLNLDGFRIDAVKHIKFSFTRDWLTHVRNATGKEMFAVAEFWKNDLGALENYLNKTNWNHSVFDVPLHYNLYNASNSGGNYDMAKLLNGTVVQKHPMHAVTFVDNHDSQPGESLESFVQEWFKPLAYALILTREQGYPSVFYGDYYGIPTHSVPAMKAKIDPILEARQNFAYGTQHDYFDHHNIIGWTREGNTTHPNSGLATIMSDGPGGEKWMYVGQNKAGQVWHDITGNKPGTVTINADGWANFSVNGGSVSIWVKR

SEQ ID NO: 17305 - protein, 485 aa, Bacillus sp.
HHNGTNGTMMQYFEWHLPNDGNHWNRLRDDASNLRNRGITAIWIPPAWKGTSQNDVGYGAYDLYDLGEFNQKGTVRTKYGTRSQLESAIHALKNNGVQVYGDVVMNHKGGADATENVLAVEVNPNNRNQEISGEYTIEAWTKFDFPGRGNTYSDFKWRWYHFDGVDWDQSRQFQNRIYKFRGDGKAWDWEVDSENGNYDYLMYADVDMDHPEVVNELRRWGEWYTNTLNLDGFRIDAVKHIKYSFTRDWLTHVRNATGKEMFAVAEFWKNDLGALENYLNKTNWNHSVFDVPLHYNLYNASNSGGNYDMAKLLNGTVVQKHPMHAVTFVDNHDSQPGESLESFVQEWFKPLAYALILTREQGYPSVFYGDYYGIPTHSVPAMKAKIDPILEARQNFAYGTQHDYFDHHNIIGWTREGNTTHPNSGLATIMSDGPGGEKWMYVGQNKAGQVWHDITGNKPGTVTINADGWANFSVNEGSVSIWVKR

SEQ ID NO: 17306 - protein, 483 aa, Bacillus sp.
HHNGTNGTMMQYFEWHLPNDGNHWNRLRDDASNLRNRGITAIWIPPAWKGTSQNDVGYGAYDLYDLGEFNQKGTVRTKYGTRSQLESAIHALKNNGVQVYGDVVMNHKGGADATENVLAVEVNPNNRNQEISGDYTIEAWTKFDFPGRGNTYSDFKWRWYHFDGVDWDQSRQFQNRIYKFRGKAWDWEVDSEFGNYDYLMYADHDMDHPEVVNELRRWGEWYTNTLNLDGFRIDAVKHIKYSFTRDWLTHVRNATGKEMFAVAEFWKNDLGALENYLNKTNWNHSVFDVPLHYNLYNASNSGGNYDMAKLLNGTVVQKHPMHAVTFVDNHDSQPGESLESFVQEWFKPLAYALILTREQGYPSVFYGDYYGIPTHSVPAMKAKIDPILEARQNFAYGTQHDYFDHHNIIGWTREGNTTHPNSGLATIMSDGPGGEKWMYVGQNKAGQVWHDITGNKPGTVTINADGWANFSVNGGSVSIWVKR

SEQ ID NO: 17307 - protein, 483 aa, Bacillus sp.
HHNGTNGTMMQYFEWHLPNDGNHWNRLRDDASNLRNRGITAIWIPPAWKGTSQNDVGYGAYDLYDLGEFNQKGTVRTKYGTRSQLESAIHALKNNGVQVYGDVVMNHKGGADATENVLAVEVNPNNRNQEISGDYTIEAWTKFDFPGRGNTYSDFKWRWYHFDGVDWDQSRQFQNRIYKFRGKAWDWEVDSENGNYDYLMYADFDMDHPEVVNELRRWGEWYTNTLNLDGFRIDAVKHIKFSFTRDWLTHVRNATGKEMFAVAEFWKNDLGALENYLNKTNWNHSVFDVPLHYNLYNASNSGGNYDMAKLLNGTVVQKHPMHAVTFVDNHDSQPGESLESFVQEWFKPLAYALILTREQGYPSVFYGDYYGIPTHSVPAMKAKIDPILEARQNFAYGTQHDYFDHHNIIGWTREGNTTHPNSGLATIMSDGPGGEKWMYVGQNKAGQVWHDITGNKPGTVTINADGWANFSVNGGSVSIWVKR

SEQ ID NO: 17308 - protein, 483 aa, Unidentified
HHNGTNGTMMQYFEWHLPNDGNHWNRLRDDASNLRNRGITAIWIPPAWKGTSQNDVGYGAYDLYDLGEFNQKGTVRTKYGTRSQLESAIHALKNNGVQVYGDVVMNHKGGADATENVLAVEVNPNNRNQEISGDYTIEAWTKFDFPGRGNTYSDFKWRWYHFDGVDWDQSRQFQNRIYKFRGKAWDWEVDSENGNYDYLMYADLDMDYPEVVNELRRWGEWYTNTLNLDGFRIDAVKHIKYSFTRDWLTHVRNATGKEMFAVAEFWKNDLGALENYLNKTNWNHSVFDVPLHYNLYNASNSGGNYDMAKLLNGTVVQKHPMHAVTFVDNHDSQPGESLESFVQEWFKPLAYALILTREQGYPSVFYGDYYGIPTHSVPAMKAKIDPILEARQNFAYGTQHDYFDHHNIIGWTREGNTTHPNSGLATIMSDGPGGEKWMYVGQNKAGQVWHDITGNKPGTVTINADGWANFSVNGGSVSIWVKR

SEQ ID NO: 17309 - protein, 483 aa, Bacillus sp.
HHNGTNGTMMQYFEWHLPNDGNHWNRLRDDASNLRNRGITAIWIPPAWKGTSQNDVGYGAYDLYDLGEFNQKGTVRTKYGTRSQLESAIHALKNNGVQVYGDVVMNHKGGADATENVLAVEVNPNNRNQEISGDYTIEAWTKFDFPGRGNTYSDFKWRWYHFDGVDWDQSRQFQNRIYKFRGKAWDWEVDSEFGNYDYLMYADYDMDHPEVVNELRRWGEWYTNTLNLDGFRIDAVKHIKYSFTRDWLTHVRNATGKEMFAVAEFWKNDLGALENYLNKTNWNHSVFDVPLHYNLYNASNSGGNYDMAKLLNGTVVQKHPMHAVTFVDNHDSQPGESLESFVQEWFKPLAYALILTREQGYPSVFYGDYYGIPTHSVPAMKAKIDPILEARQNFAYGTQHDYFDHHNIIGWTREGNTTHPNSGLATIMSDGPGGEKWMYVGQNKAGQVWHDITGNKPGTVTINADGWANFSVNGGSVSIWVKR

SEQ ID NO: 17310 - protein, 483 aa, Bacillus sp.
HHNGTNGTMMQYFEWHLPNDGNHWNRLRDDASNLRNRGITAIWIPPAWKGTSQNDVGYGAYDLYDLGEFNQKGTVRTKYGTRSQLESAIHALKNNGVQVYGDVVMNHKGGADATENVLAVEVNPNNRNQEISGDYTIEAWTKFDFPGRGNTYSDFKWRWYHFDGVDWDQSRQFQNRIYKFRGKAWDWEVDSENGFYDYLMYADVDCDHPEVVNELRRWGEWYTNTLNLDGFRIDAVKHIKYSFTRDWLTHVRNATGKEMFAVAEFWKNDLGALENYLNKTNWNHSVFDVPLHYNLYNASNSGGNYDMAKLLNGTVVQKHPMHAVTFVDNHDSQPGESLESFVQEWFKPLAYALILTREQGYPSVFYGDYYGIPTHSVPAMKAKIDPILEARQNFAYGTQHDYFDHHNIIGWTREGNTTHPNSGLATIMSDGPGGEKWMYVGQNKAGQVWHDITGNKPGTVTINADGWANFSVNGGSVSIWVKR

SEQ ID NO: 17311 - protein, 483 aa, Bacillus sp.
HHNGTNGTMMQYFEWHLPNDGNHWNRLRDDASNLRNRGITAIWIPPAWKGTSQNDVGYGAYDLYDLGEFNQKGTVRTKYGTRSQLESAIHALKNNGVQVYGDVVMNHKGGADATENVLAVEVNPNNRNQEISGDYTIEAWTKFDFPGRGNTYSDFKWRWYHFDGVDWDQSRQFQNRIYKFRGKTWDWEVDSEFGNYDYLMYADVDMDHPEVVNELRRWGEWYTNTLNLDGFRIDAVKHIKYSFTRDWLTHVRNATGKEMFAVAEFWKNDLGALENYLNKTNWNHSVFDVPLHYNLYNASNSGGNYDMAKLLNGTVVQKHPMHAVTFVDNHDSQPGESLESFVQEWFKPLAYALILTREQGYPSVFYGDYYGIPTHSVPAMKAKIDPILEARQNFAYGTQHDYFDHHNIIGWTREGNTTHPNSGLATIMSDGPGGEKWMYVGQNKAGQVWHDITGNKPGTVTINADGWANFSVNGGSVSIWVKR

SEQ ID NO: 17312 - protein, 483 aa, Bacillus sp.
HHNGTNGTMMQYFEWHLPNDGNHWNRLRDDASNLRNRGITAIWIPPAWKGTSQNDVGYGAYDLYDLGEFNQKGTVRTKYGTRSQLESAIHALKNNGVQVYGDVVMNHKGGADATENVLAVEVNPNNRNQEISGDYTIEAWTKFDFPGRGNTYSDFKWRWYHFDGVDWDQSRQFQNRIYKFRGKAWDWEVDSENGFYDYLMYADVDTDHPEVVNELRRWGEWYTNTLNLDGFRIDAVKHIKYSFTRDWLTHVRNATGKEMFAVAEFWKNDLGALENYLNKTNWNHSVFDVPLHYNLYNASNSGGNYDMAKLLNGTVVQKHPMHAVTFVDNHDSQPGESLESFVQEWFKPLAYALILTREQGYPSVFYGDYYGIPTHSVPAMKAKIDPILEARQNFAYGTQHDYFDHHNIIGWTREGNTTHPNSGLATIMSDGPGGEKWMYVGQNKAGQVWHDITGNKPGTVTINADGWANFSVNGGSVSIWVKR

SEQ ID NO: 17313 - protein, 483 aa, Bacillus sp.
HHNGTNGTMMQYFEWHLPNDGNHWNRLRDDASNLRNRGITAIWIPPAWKGTSQNDVGYGAYDLYDLGEFNQKGTVRTKYGTRSQLESAIHALKNNGVQVYGDVVMNHKGGADATENVLAVEVNPNNRNQEISGDYTIEAWTKFDFPGRGNTYSDFKWRWYHFDGVDWDQSRQFQNRIYKFRGKAWDWEVDTENGNYDYLMYADVDMDHPEVVNELRRWGEWYTNTLNLDGFRIDAVKHIKFSFTRDWLTHVRNATGKEMFAVAEFWKNDLGALENYLNKTNWNHSVFDVPLHYNLYNASNSGGNYDMAKLLNGTVVQKHPMHAVTFVDNHDSQPGESLESFVQEWFKPLAYALILTREQGYPSVFYGDYYGIPTHSVPAMKAKIDPILEARQNFAYGTQHDYFDHHNIIGWTREGNTTHPNSGLATIMSDGPGGEKWMYVGQNKAGQVWHDITGNKPGTVTINADGWANFSVNGGSVSIWVKR

SEQ ID NO: 17314 - protein, 483 aa, Unidentified
HHNGTNGTMMQYFEWHLPNDGNHWNRLRDDASNLRNRGITAIWIPPAWKGTSQNDVGYGAYDLYDLGEFNQKGTVRTKYGTRSQLESAIHALKNNGVQVYGDVVMNHKGGADATENVLAVEVNPNNRNQEISGDYTIEAWTKFDFPGRGNTYSDFKWRWYHFDGVDWDQSRQFQNRIYKFRGKAWDWPVDSENGNYDYLMYADVDMDHPEVVNELRRWGEWYTNTLNLDGFRIDAVKHIKYFFTRDWLTHVRNATGKEMFAVAEFWKNDLGALENYLNKTNWNHSVFDVPLHYNLYNASNSGGNYDMAKLLNGTVVQKHPMHAVTFVDNHDSQPGESLESFVQEWFKPLAYALILTREQGYPSVFYGDYYGIPTHSVPAMKAKIDPILEARQNFAYGTQHDYFDHHNIIGWTREGNTTHPNSGLATIMSDGPGGEKWMYVGQNKAGQVWHDITGNKPGTVTINADGWANFSVNGGSVSIWVKR

SEQ ID NO: 17315 - protein, 485 aa, Bacillus sp.
HHNGTNGTMMQYFEWHLPNDGNHWNRLRDDASNLRNRGITAIWIPPAWKGTSQNDVGYGAYDLYDLGEFNQKGTVRTKYGTRSQLESAIHALKNNGVQVYGDVVMNHKGGADATENVLAVEVNPNNRNQEISGDYTIEAWTKFDFPGRGNTYSDFKWRWYHFDGVDWDQSRQFQNRIYKFRGXXKAWDWEVDSENGNYDYLMYADLDMDYPEVVNELRRWGEWYTNTLNLDGFRIDAVKHIKYSFTRDWLTHVRNATGKEMFAVAEFWKNDLGALENYLNKTNWNHSVFDVPLHYNLYNASNSGGNYDMAKLLNGTVVQKHPMHAVTFVDNHDSQPGESLESFVQEWFKPLAYALILTREQGYPSVFYGDYYGIPTHSVPAMKAKIDPILEARQNFAYGTQHDYFDHHNIIGWTREGNTTHPNSGLATIMSDGPGGEKWMYVGQNKAGQVWHDITGNKPGTVTINADGWANFSVNGGSVSIWVKR

SEQ ID NO: 17316 - protein, 483 aa, Bacillus sp.
HHNGTNGTMMQYFEWHLPNDGNHWNRLRDDASNLRNRGITAIWIPPAWKGTSQNDVGYGAYDLYDLGEFNQKGTVRTKYGTRSQLESAIHALKNNGVQVYGDVVMNHKGGADATENVLAVEVNPNNRNQEISGDYTIEAFTKFDFPGRGNTYSDFKWRWYHFDGVDWDQSRQFQNRIYKFHGKAWDWEVDSENGNYDYLMYADVDMDHPEVVNELRRWGEWYTNTLNLDGFRIDAVKHIKYSFTRDWLTHVRNATGKEMFAVAEFWKNDLGALENYLNKTNWNHSVFDVPLHYNLYNASNSGGNYDMAKLLNGTVVQKHPMHAVTFVDNHDSQPGESLESFVQEWFKPLAYALILTREQGYPSVFYGDYYGIPTHSVPAMKAKIDPILEARQNFAYGTQHDYFDHHNIIGWTREGNTTHPNSGLATIMSDGPGGEKWMYVGQNKAGQVWHDITGNKPGTVTINADGWANFSVNGGSVSIWVKR

SEQ ID NO: 17317 - protein, 483 aa, Unidentified
HHNGTNGTMMQYFEWHLPNDGNHWNRLRDDASNLRNRGITAIWIPPAWKGTSQNDVGYGAYDLYDLGEFNQKGTVRTKYGTRSQLESAIHALKNNGVQVYGDVVMNHKGGADATENVLAVEVNPNNRNQEISGDYTIEAWTKFDFPGRGNTYSDFKWRWYHFDGVDWDQSRQFQNRIYKFRGKAWDWPVDSENGNYDYLMYADVDMDHPEVVNELRRWGEWYTNTLNLDGFRIDAVKHIKYQFTRDWLTHVRNATGKEMFAVAEFWKNDLGALENYLNKTNWNHSVFDVPLHYNLYNASNSGGNYDMAKLLNGTVVQKHPMHAVTFVDNHDSQPGESLESFVQEWFKPLAYALILTREQGYPSVFYGDYYGIPTHSVPAMKAKIDPILEARQNFAYGTQHDYFDHHNIIGWTREGNTTHPNSGLATIMSDGPGGEKWMYVGQNKAGQVWHDITGNKPGTVTINADGWANFSVNGGSVSIWVKR

SEQ ID NO: 17318 - protein, 485 aa, Bacillus sp.
HHNGTNGTMMQYFEWHLPNDGNHWNRLRDDASNLRNRGITAIWIPPAWKGTSQNDVGYGAYDLYDLGEFNQKGTVRTKYGTRSQLESAIHALKNNGVQVYGDVVMNHKGGADATENVLAVEVNPNNRNQEISGDYTIEAWTKFDFPGRGNTYSDFKWRWYHFDGVDWDQSRQFQNRIYKFRGXXKAWDWEVDSEFGNYDYLMYADNDMDHPEVVNELRRWGEWYTNTLNLDGFRIDAVKHIKYSFTRDWLTHVRNATGKEMFAVAEFWKNDLGALENYLNKTNWNHSVFDVPLHYNLYNASNSGGNYDMAKLLNGTVVQKHPMHAVTFVDNHDSQPGESLESFVQEWFKPLAYALILTREQGYPSVFYGDYYGIPTHSVPAMKAKIDPILEARQNFAYGTQHDYFDHHNIIGWTREGNTTHPNSGLATIMSDGPGGEKWMYVGQNKAGQVWHDITGNKPGTVTINADGWANFSVNGGSVSIWVKR

SEQ ID NO: 17319 - protein, 485 aa, Bacillus sp.
HHNGTNGTMMQYFEWHLPNDGNHWNRLRDDASNLRNRGITAIWIPPAWKGTSQNDVGYGAYDLYDLGEFNQKGTVRTKYGTRSQLESAIHALKNNGVQVYGDVVMNHKGGADATENVLAVEVNPNNRNQEISGDYTIEAWTKFDFPGRGNTYSDFKWRWYHFDGVDWDQSRQFQNRIYKFRGXXKAWDWEVDTENGNYDYLMYADVDMDHPEAVNELRRWGEWYTNTLNLDGFRIDAVKHIKYSFTRDWLTHVRNATGKEMFAVAEFWKNDLGALENYLNKTNWNHSVFDVPLHYNLYNASNSGGNYDMAKLLNGTVVQKHPMHAVTFVDNHDSQPGESLESFVQEWFKPLAYALILTREQGYPSVFYGDYYGIPTHSVPAMKAKIDPILEARQNFAYGTQHDYFDHHNIIGWTREGNTTHPNSGLATIMSDGPGGEKWMYVGQNKAGQVWHDITGNKPGTVTINADGWANFSVNGGSVSIWVKR

SEQ ID NO: 17320 - protein, 485 aa, Bacillus sp.
HHNGTNGTMMQYFEWHLPNDGNHWNRLRDDASNLRNRGITAIWIPPAWKGTSQNDVGYGAYDLYDLGEFNQKGTVRTKYGTRSQLESAIHALKNNGVQVYGDVVMNHKGGADATENVLAVEVNPNNRNQEISGDYTIEAWTKFDFPGRGNTYSDFKWRWYHFDGVDWDQSRQFRNRIYKFRGXXKAWDWEVDSENGNYDYLMYADVDMDHPVVVNELRRWGEWYTNTLNLDGFRIDAVKHIKYSFTRDWLTHVRNATGKEMFAVAEFWKNDLGALENYLNKTNWNHSVFDVPLHYNLYNASNSGGNYDMAKLLNGTVVQKHPMHAVTFVDNHDSQPGESLESFVQEWFKPLAYALILTREQGYPSVFYGDYYGIPTHSVPAMKAKIDPILEARQNFAYGTQHDYFDHHNIIGWTREGNTTHPNSGLATIMSDGPGGEKWMYVGQNKAGQVWHDITGNKPGTVTINADGWANFSVNGGSVSIWVKR

SEQ ID NO: 17321 - protein, 485 aa, Bacillus sp.
HHNGTNGTMMQYFEWHLPNDGNHWNRLRDDASNLRNRGITAIWIPPAWKGTSQNDVGYGAYDLYDLGEFNQKGTVRTKYGTRSQLESAIHALKNNGVQVYGDVVMNHKGGADATENVLAVEVNPNNRNQEISGDYTIEAWTKFDFPGRGNTYSDFKWRWYHFDGVDWDQSRQFQNRIYKFRGDGKAWDWEVDSENGNYDYLMYADVDMDHPEEVNELRRWGEWYTNTLNLDGFRIDAVKHIKYSFTRDWLTHVRNATGKEMFAVAEFWKNDLGALENYLNKTNWNHSVFDVPLHYNLYNASNSGGNYDMAKLLNGTVVQKHPXHAVTFVDNHDSQPGESLESFVQEWFKPLAYALILTREQGYPSVFYGDYYGIPTHSVPAMKAKIDPILEARQNFAYGTQHDYFDHHNIIGWTREGNTTHPNSGLATIMSDGPGGEKWMYVGQNKAGQVWHDITGNKPGTVTINADGWANFSVNGGSVSIWVKR

SEQ ID NO: 17322 - protein, 483 aa, Bacillus sp.
HHNGTNGTMMQYFEWHLPNDGNHWNRLRDDASNLRNRGITAIWIPPAWKGTSQNDVGYGAYDLYDLGEFNQKGTVRTKYGTRSQLESAIHALKNNGVQVYGDVVMNHKGGADATENVLAVEVNPNNRNQEISGDYTIEAWTKFDFPGRGNTYSDFKWRWYHFDGVDWDQSRQFQNRIYKFRGKAWDWEVDSENGNYDYLMYADVDLDHPYVVNELRRWGEWYTNTLNLDGFRIDAVKHIKYSFTRDWLTHVRNATGKEMFAVAEFWKNDLGALENYLNKTNWNHSVFDVPLHYNLYNASNSGGNYDMAKLLNGTVVQKHPMHAVTFVDNHDSQPGESLESFVQEWFKPLAYALILTREQGYPSVFYGDYYGIPTHSVPAMKAKIDPILEARQNFAYGTQHDYFDHHNIIGWTREGNTTHPNSGLATIMSDGPGGEKWMYVGQNKAGQVWHDITGNKPGTVTINADGWANFSVNGGSVSIWVKR

SEQ ID NO: 17323 - protein, 485 aa, Bacillus sp.
HHNGTNGTMMQYFEWHLPNDGNHWNRLRDDASNLRNRGITAIWIPPAWKGTSQNDVGYGAYDLYDLGEFNQKGTVRTKYGTRSQLESAIHALKNNGVQVYGDVVMNHKGGADATENVLAVEVNPNNRNQEISGDYTIEAWTKFDFPGRGNTYSDFKWRWYHFDGVDWDQSRQFQNRIYKFRGDGKAWDWEVDSENGNYDYLMYADVDMDHPEVVNELRRWGEWYTNTLNLDGFRIDAVKHIKYSFIRDWLTHVRNATGKEMFAVAEFWKNDLGALENYLNKTNWNHSVFDVPLHYNLYNASNSGGNYDMAKLLNGTVVQKHPMHAVTFVDNHDTQPGESLESFVQEWFKPLAYALILTREQGYPSVFYGDYYGIPTHSVPAMKAKIDPILEARQNFAYGTQHDYFDHHNIIGWTREGNTTHPNSGLATIMSDGPGGEKWMYVGQNKAGQVWHDITGNKPGTVTINADGWANFSVNGGSVSIWVKR

SEQ ID NO: 17324 - protein, 483 aa, Bacillus sp.
HHNGTNGTMMQYFEWHLPNDGNHWNRLRDDASNLRNRGITAIWIPPAWKGTSQNDVGYGAYDLYDLGEFNQKGTVRTKYGTRSQLESAIHALKNNGVQVYGDVVMNHKGGADATENVLAVEVNPNNRNQEISGDYTIEAWTKFDFPGRGNTYSDFKWRWYHFDGVDWDQSRQFQNRIYKFRGKAWDWEVDSENGFYDYLMYADVDFDHPEVVNELRRWGEWYTNTLNLDGFRIDAVKHIKYSFTRDWLTHVRNATGKEMFAVAEFWKNDLGALENYLNKTNWNHSVFDVPLHYNLYNASNSGGNYDMAKLLNGTVVQKHPMHAVTFVDNHDSQPGESLESFVQEWFKPLAYALILTREQGYPSVFYGDYYGIPTHSVPAMKAKIDPILEARQNFAYGTQHDYFDHHNIIGWTREGNTTHPNSGLATIMSDGPGGEKWMYVGQNKAGQVWHDITGNKPGTVTINADGWANFSVNGGSVSIWVKR

SEQ ID NO: 17325 - protein, 483 aa, Bacillus sp.
HHNGTNGTMMQYFEWHLPNDGNHWNRLRDDASNLRNRGITAIWIPPAWKGTSQNDVGYGAYDLYDLGEFNQKGTVRTKYGTRSQLESAIHALKNNGVQVYGDVVMNHKGGADATENVLAVEVNPNNRNQEISGDYTIEAWTKFDFPGRGNTYSDFKWRWYHFDGVDWDQSRQFQNRIYKFRGKAWDWEVDSENGFYDYLMYADVDLDHPEVVNELRRWGEWYTNTLNLDGFRIDAVKHIKYSFTRDWLTHVRNATGKEMFAVAEFWKNDLGALENYLNKTNWNHSVFDVPLHYNLYNASNSGGNYDMAKLLNGTVVQKHPMHAVTFVDNHDSQPGESLESFVQEWFKPLAYALILTREQGYPSVFYGDYYGIPTHSVPAMKAKIDPILEARQNFAYGTQHDYFDHHNIIGWTREGNTTHPNSGLATIMSDGPGGEKWMYVGQNKAGQVWHDITGNKPGTVTINADGWANFSVNGGSVSIWVKR

SEQ ID NO: 17326 - protein, 483 aa, Unidentified
HHNGTNGTMMQYFEWHLPNDGNHWNRLRDDASNLRNRGITAIWIPPAWKGTSQNDVGYGAYDLYDLGEFNQKGTVRTKYGTRSQLESAIHALKNNGVQVYGDVVMNHKGGADATENVLAVEVNPNNRNQEISGDYTIEAWTKFDFPGRGNTYSDFKWRWYHFDGVDWDQSRQFQNRIYKFRGKAWDWPVDSENGNYDYLMYADVDMDHPEVVNELRRWGEWYTNTLNLDGFRIDAVKHIKYSFTRDWLTHVRNATGKEMFAVAEFWKNDLGALENYLNITNWNHSVFDVPLHYNLYNASNSGGNYDMAKLLNGTVVQKHPMHAVTFVDNHDSQPGESLESFVQEWFKPLAYALILTREQGYPSVFYGDYYGIPTHSVPAMKAKIDPILEARQNFAYGTQHDYFDHHNIIGWTREGNTTHPNSGLATIMSDGPGGEKWMYVGQNKAGQVWHDITGNKPGTVTINADGWANFSVNGGSVSIWVKR

SEQ ID NO: 17327 - protein, 483 aa, Unidentified
HHNGTNGTMMQYFEWHLPNDGNHWNRLRDDASNLRNRGITAIWIPPAWKGTSQNDVGYGAYDLYDLGEFNQKGTVRTKYGTRSQLESAIHALKNNGVQVYGDVVMNHKGGADATENVLAVEVNPNNRNQEISGDYTIEAWTKFDFPGRGNTYSDFKWRWYHFDGVDWDQSRQFQNRIYKFRGKAWDWPVDSENGNYDYLMYADVDMDHPEVVNELRRWGEWYTNTLNLDGFRIDAVKHIKYWFTRDWLTHVRNATGKEMFAVAEFWKNDLGALENYLNKTNWNHSVFDVPLHYNLYNASNSGGNYDMAKLLNGTVVQKHPMHAVTFVDNHDSQPGESLESFVQEWFKPLAYALILTREQGYPSVFYGDYYGIPTHSVPAMKAKIDPILEARQNFAYGTQHDYFDHHNIIGWTREGNTTHPNSGLATIMSDGPGGEKWMYVGQNKAGQVWHDITGNKPGTVTINADGWANFSVNGGSVSIWVKR

SEQ ID NO: 17328 - protein, 485 aa, Bacillus sp.
HHNGTNGTMMQYFEWHLPNDGNHWNRLRDDASNLRNRGITAIWIPPAWKGTSQNDVGYGAYDLYDLGEFNQKGTVRTKYGTRSQLESAIHALKNNGVQVYGDVVMNHKGGADATENVLAVEVNPNNRNQEISGDYTIEAWTKFDFPGRGNTYSDFKWRWYHFDGVDWDQSRQFQNRIYKFRGXXKAWDWEVDSEFGNYDYLMYADYDMDHPEVVNELRRWGEWYTNTLNLDGFRIDAVKHIKYSFTRDWLTHVRNATGKEMFAVAEFWKNDLGALENYLNKTNWNHSVFDVPLHYNLYNASNSGGNYDMAKLLNGTVVQKHPMHAVTFVDNHDSQPGESLESFVQEWFKPLAYALILTREQGYPSVFYGDYYGIPTHSVPAMKAKIDPILEARQNFAYGTQHDYFDHHNIIGWTREGNTTHPNSGLATIMSDGPGGEKWMYVGQNKAGQVWHDITGNKPGTVTINADGWANFSVNGGSVSIWVKR

SEQ ID NO: 17329 - protein, 485 aa, Bacillus sp.
HHNGTNGTMMQYFEWHLPNDGNHWNRLRDDASNLRNRGITAIWIPPAWKGTSQNDVGYGAYDLYDLGEFNQKGTVRTKYGTRSQLESAIHALKNNGVQVYGDVVMNHKGGADATENVLAVEVNPNNRNQEISGDYTIEAWTKFDFPGRGNTYSDFKWRWYHFDGVDWDQSRQFQNRIYKFRGXXKAWDWEVDSEFGNYDYLMYADHDMDHPEVVNELRRWGEWYTNTLNLDGFRIDAVKHIKYSFTRDWLTHVRNATGKEMFAVAEFWKNDLGALENYLNKTNWNHSVFDVPLHYNLYNASNSGGNYDMAKLLNGTVVQKHPMHAVTFVDNHDSQPGESLESFVQEWFKPLAYALILTREQGYPSVFYGDYYGIPTHSVPAMKAKIDPILEARQNFAYGTQHDYFDHHNIIGWTREGNTTHPNSGLATIMSDGPGGEKWMYVGQNKAGQVWHDITGNKPGTVTINADGWANFSVNGGSVSIWVKR

SEQ ID NO: 17330 - protein, 485 aa, Bacillus sp.
HHNGTNGTMMQYFEWHLPNDGNHWNRLRDDASNLRNRGITAIWIPPAWKGTSQNDVGYGAYDLYDLGEFNQKGTVRTKYGTRSQLESAIHALKNNGVQVYGDVVMNHKGGADATENVLAVEVNPNNRNQEISGDYTIEAWTKFDFPGRGNTYSDFKWRWYHFDGVDWDQSRQFQNRIYKFRGXXKAWDWEVDSENGNYDYLMYADFDMDHPEVVNELRRWGEWYTNTLNLDGFRIDAVKHIKFSFTRDWLTHVRNATGKEMFAVAEFWKNDLGALENYLNKTNWNHSVFDVPLHYNLYNASNSGGNYDMAKLLNGTVVQKHPMHAVTFVDNHDSQPGESLESFVQEWFKPLAYALILTREQGYPSVFYGDYYGIPTHSVPAMKAKIDPILEARQNFAYGTQHDYFDHHNIIGWTREGNTTHPNSGLATIMSDGPGGEKWMYVGQNKAGQVWHDITGNKPGTVTINADGWANFSVNGGSVSIWVKR

SEQ ID NO: 17331 - protein, 485 aa, Bacillus sp.
HHNGTNGTMMQYFEWHLPNDGNHWNRLRDDASNLRNRGITAIWIPPAWKGTSQNDVGYGAYDLYDLGEFNQKGTVRTKYGTRSQLESAIHALKNNGVQVYGDVVMNHKGGADATENVLAVEVNPNNRNQEISGDYTIEAWTKFDFPGRGNTYSDFKWRWYHFDGVDWDQSRQFQNRIYKFRGXXKTWDWEVDSEFGNYDYLMYADVDMDHPEVVNELRRWGEWYTNTLNLDGFRIDAVKHIKYSFTRDWLTHVRNATGKEMFAVAEFWKNDLGALENYLNKTNWNHSVFDVPLHYNLYNASNSGGNYDMAKLLNGTVVQKHPMHAVTFVDNHDSQPGESLESFVQEWFKPLAYALILTREQGYPSVFYGDYYGIPTHSVPAMKAKIDPILEARQNFAYGTQHDYFDHHNIIGWTREGNTTHPNSGLATIMSDGPGGEKWMYVGQNKAGQVWHDITGNKPGTVTINADGWANFSVNGGSVSIWVKR

SEQ ID NO: 17332 - protein, 485 aa, Bacillus sp.
HHNGTNGTMMQYFEWHLPNDGNHWNRLRDDASNLRNRGITAIWIPPAWKGTSQNDVGYGAYDLYDLGEFNQKGTVRTKYGTRSQLESAIHALKNNGVQVYGDVVMNHKGGADATENVLAVEVNPNNRNQEISGDYTIEAWTKFDFPGRGNTYSDFKWRWYHFDGVDWDQSRQFQNRIYKFRGDGKAWDWEVDSENGNYDYLMYADVDMDHPEVVNELRRWGEWYTNTLNLDGFRIDAVKHIKYSFLRDWLTHVRNATGKEMFAVAEFWKNDLGALENYLNKTNWNHSVFDVPLHYNLYNASNSGGNYDMAKLLNGTVVQKHPMHAVTFVDNHDTQPGESLESFVQEWFKPLAYALILTREQGYPSVFYGDYYGIPTHSVPAMKAKIDPILEARQNFAYGTQHDYFDHHNIIGWTREGNTTHPNSGLATIMSDGPGGEKWMYVGQNKAGQVWHDITGNKPGTVTINADGWANFSVNGGSVSIWVKR

SEQ ID NO: 17333 - protein, 485 aa, Bacillus sp.
HHNGTNGTMMQYFEWHLPNDGNHWNRLRDDASNLRNRGITAIWIPPAWKGTSQNDVGYGAYDLYDLGEFNQKGTVRTKYGTRSQLESAIHALKNNGVQVYGDVVMNHKGGADATENVLAVEVNPNNRNQEISGDYTIEAWTKFDFPGRGNTYSDFKWRWYHFDGVDWDQSRQFQNRIYKFRGXXKAWDWEVDSEFGNYDYLMYADLDMDHPEVVNELRRWGEWYTNTLNLDGFRIDAVKHIKYSFTRDWLTHVRNATGKEMFAVAEFWKNDLGALENYLNKTNWNHSVFDVPLHYNLYNASNSGGNYDMAKLLNGTVVQKHPMHAVTFVDNHDSQPGESLESFVQEWFKPLAYALILTREQGYPSVFYGDYYGIPTHSVPAMKAKIDPILEARQNFAYGTQHDYFDHHNIIGWTREGNTTHPNSGLATIMSDGPGGEKWMYVGQNKAGQVWHDITGNKPGTVTINADGWANFSVNGGSVSIWVKR

SEQ ID NO: 17334 - protein, 483 aa, Bacillus sp.
HHNGTNGTMMQYFEWHLPNDGNHWNRLRDDASNLRNRGITAIWIPPAWKGTSQNDVGYGAYDLYDLGEFNQKGTVRTKYGTRSQLESAIHALKNNGVQVYGDVVMNHKGGADATENVLAVEVNPNNRNQEISGDYTIEAWTKFDFPGRGNTYSDFKWRWYHFDGVDWDQSRQFQNRIYKFRGKAWDWEVDSENGFYDYLMYADVDSDHPEVVNELRRWGEWYTNTLNLDGFRIDAVKHIKYSFTRDWLTHVRNATGKEMFAVAEFWKNDLGALENYLNKTNWNHSVFDVPLHYNLYNASNSGGNYDMAKLLNGTVVQKHPMHAVTFVDNHDSQPGESLESFVQEWFKPLAYALILTREQGYPSVFYGDYYGIPTHSVPAMKAKIDPILEARQNFAYGTQHDYFDHHNIIGWTREGNTTHPNSGLATIMSDGPGGEKWMYVGQNKAGQVWHDITGNKPGTVTINADGWANFSVNGGSVSIWVKR

SEQ ID NO: 17335 - protein, 485 aa, Bacillus sp.
HHNGTNGTMMQYFEWHLPNDGNHWNRLRDDASNLRNRGITAIWIPPAWKGTSQNDVGYGAYDLYDLGEFNQKGTVRTKYGTRSQLESAIHALKNNGVQVYGDVVMNHKGGADATENVLAVEVNPNNRNQEISGDYTIEAWTKFDFPGRGNTYSDFKWRWYHFDGVDWDQSRQFQNRIYKFRGXXKAWDWEVDSEFGNYDYLMYADVDMDYPEVVNELRRWGEWYTNTLNLDGFRIDAVKHIKYSFTRDWLTHVRNATGKEMFAVAEFWKNDLGALENYLNKTNWNHSVFDVPLHYNLYNASNSGGNYDMAKLLNGTVVQKHPMHAVTFVDNHDSQPGESLESFVQEWFKPLAYALILTREQGYPSVFYGDYYGIPTHSVPAMKAKIDPILEARQNFAYGTQHDYFDHHNIIGWTREGNTTHPNSGLATIMSDGPGGEKWMYVGQNKAGQVWHDITGNKPGTVTINADGWANFSVNGGSVSIWVKR

SEQ ID NO: 17336 - protein, 483 aa, Bacillus sp.
HHNGTNGTMMQYFEWHLPNDGNHWNRLRDDASNLRNRGITAIWIPPAWKGTSQNDVGYGAYDLYDLGEFNQKGTVRTKYGTRSQLESAIHALKNNGVQVYGDVVMNHKGGADATENVLAVEVNPNNRNQEISGDYTIEAWTKFDFPGRGNTYSDFKWRWYHFDGVDWDQSRQFQNRIYKFRGKAWDWEVDSETGNYDYLMYADVDMDHPEVVAELRRWGEWYTNTLNLDGFRIDAVKHIKYSFTRDWLTHVRNATGKEMFAVAEFWKNDLGALENYLNKTNWNHSVFDVPLHYNLYNASNSGGNYDMAKLLNGTVVQKHPMHAVTFVDNHDSQPGESLESFVQEWFKPLAYALILTREQGYPSVFYGDYYGIPTHSVPAMKAKIDPILEARQNFAYGTQHDYFDHHNIIGWTREGNTTHPNSGLATIMSDGPGGEKWMYVGQNKAGQVWHDITGNKPGTVTINADGWANFSVNGGSVSIWVKR

SEQ ID NO: 17337 - protein, 485 aa, Bacillus sp.
HHNGTNGTMMQYFEWHLPNDGNHWNRLRDDASNLRNRGITAIWIPPAWKGTSQNDVGYGAYDLYDLGEFNQKGTVRTKYGTRSQLESAIHALKNNGVQVYGDVVMNHKGGADATENVLAVEVNPNNRNQEISGDYTIEAWTKFDFPGRGNTYSDFKWRWYHFDGVDWDQSRQFQNRIYKFRGDGKAWDWEVDSEFGNYDYLMYADLDMDHPEVVNELRRWGEWYTNTLNLDGFRIDAVKHIKYSFTRDWLTHVRNATGKEMFAVAEFWKNDLGALENYLNKTNWNHSVFDVPLHYNLYNASNSGGNYDMAKLLNGTVVQKHPMHAVTFVDNHDSQPGESLESFVQEWFKPLAYALILTREQGYPSVFYGDYYGIPTHSVPAMKAKIDPILEARQNFAYGTQHDYFDHHNIIGWTREGNTTHPNSGLATIMSDGPGGEKWMYVGQNKAGQVWHDITGNKPGTVTINADGWANFSVNGGSVSIWVKR

SEQ ID NO: 17338 - protein, 483 aa, Bacillus sp.
HHNGTNGTMMQYFEWHLPNDGNHWNRLRDDASNLRNRGITAIWIPPAWKGTSQNDVGYGAYDLYDLGEFNQKGTVRTKYGTRSQLESAIHALKNNGVQVYGDVVMNHKGGADATENVLAVEVNPNNRNQEISGDYTIEAWTKFDFPGRGNTYSDFKWRWYHFDGVDWDQSRQFQNRIYKFRGKAWDWEVDSENGFYDYLMYADVDIDHPEVVNELRRWGEWYTNTLNLDGFRIDAVKHIKYSFTRDWLTHVRNATGKEMFAVAEFWKNDLGALENYLNKTNWNHSVFDVPLHYNLYNASNSGGNYDMAKLLNGTVVQKHPMHAVTFVDNHDSQPGESLESFVQEWFKPLAYALILTREQGYPSVFYGDYYGIPTHSVPAMKAKIDPILEARQNFAYGTQHDYFDHHNIIGWTREGNTTHPNSGLATIMSDGPGGEKWMYVGQNKAGQVWHDITGNKPGTVTINADGWANFSVNGGSVSIWVKR

SEQ ID NO: 17339 - protein, 485 aa, Bacillus sp.
HHNGTNGTMMQYFEWHLPNDGNHWNRLRDDASNLRNRGITAIWIPPAWKGTSQNDVGYGAYDLYDLGEFNQKGTVRTKYGTRSQLESAIHALKNNGVQVYGDVVMNHKGGADATENVLAVEVNPNNRNQEISGAYTIEAWTKFDFPGRGNTYSDFKWRWYHFDGVDWDQSRQFQNRIYKFRGDGKAWDWEVDSENGNYDYLMYADVDMDHPEEVNELRRWGEWYTNTLNLDGFRIDAVKHIKYSFTRDWLTHVRNATGKEMFAVAEFWKNDLGALENYLNKTNWNHSVFDVPLHYNLYNASNSGGNYDMAKLLNGTVVQKHPMHAVTFVDNHDSQPGESLESFVQEWFKPLAYALILTREQGYPSVFYGDYYGIPTHSVPAMKAKIDPILEARQNFAYGTQHDYFDHHNIIGWTREGNTTHPNSGLATIMSDGPGGEKWMYVGQNKAGQVWHDITGNKPGTVTINADGWANFSVNGGSVSIWVKR

SEQ ID NO: 17340 - protein, 485 aa, Bacillus sp.
HHNGTNGTMMQYFEWHLPNDGNHWNRLRDDASNLRNRGITAIWIPPAWKGTSQNDVGYGAYDLYDLGEFNQKGTVRTKYGTRSQLESAIHALKNNGVQVYGDVVMNHKGGADATENVLAVEVNPNNRNQEISGDYTIEAWTKFDFPGRGNTYSDFKWRWYHFDGVDWDQSRQFQNRIYKFRGXXKAWDWEVDSEFGNYDYLMYADCDMDHPEVVNELRRWGEWYTNTLNLDGFRIDAVKHIKYSFTRDWLTHVRNATGKEMFAVAEFWKNDLGALENYLNKTNWNHSVFDVPLHYNLYNASNSGGNYDMAKLLNGTVVQKHPMHAVTFVDNHDSQPGESLESFVQEWFKPLAYALILTREQGYPSVFYGDYYGIPTHSVPAMKAKIDPILEARQNFAYGTQHDYFDHHNIIGWTREGNTTHPNSGLATIMSDGPGGEKWMYVGQNKAGQVWHDITGNKPGTVTINADGWANFSVNGGSVSIWVKR

SEQ ID NO: 17341 - protein, 483 aa, Bacillus sp.
HHNGTNGTMMQYFEWHLPNDGNHWNRLRDDASNLRNRGITAIWIPPAWKGTSQNDVGYGAYDLYDLGEFNQKGTVRTKYGTRSQLESAIHALKNNGVQVYGDVVMNHKGGADATENVLAVEVNPNNRNQEISGDYTIEAWTKFDFPGRGNTYSDFKWRWYHFDGVDWDQSRQFQNRIYKFRGKAWDWEVDSENGFYDYLMYADVDHDHPEVVNELRRWGEWYTNTLNLDGFRIDAVKHIKYSFTRDWLTHVRNATGKEMFAVAEFWKNDLGALENYLNKTNWNHSVFDVPLHYNLYNASNSGGNYDMAKLLNGTVVQKHPMHAVTFVDNHDSQPGESLESFVQEWFKPLAYALILTREQGYPSVFYGDYYGIPTHSVPAMKAKIDPILEARQNFAYGTQHDYFDHHNIIGWTREGNTTHPNSGLATIMSDGPGGEKWMYVGQNKAGQVWHDITGNKPGTVTINADGWANFSVNGGSVSIWVKR

SEQ ID NO: 17342 - protein, 483 aa, Unidentified
HHNGTNGTMMQYFEWHLPNDGNHWNRLRDDASNLRNRGITAIWIPPAWKGTSQNDVGYGAYDLYDLGEFNQKGTVRTKYGTRSQLESAIHALKNNGVQVYGDVVMNHKGGADATENVLAVEVNPNNRNQEISGDYTIEAWTKFDFPGRGNTYSDFKWRWYHFDGVDWDQSRQFQNRIYKFRGKAWDWPVDSENGNYDYLMYADVDMDHPEVVNELRRWGEWYTNTLNLDGFRIDAVKHIKYSFTRDWLTHVRNATGKEMFAVAEFWKNDLGALENYLNWTNWNHSVFDVPLHYNLYNASNSGGNYDMAKLLNGTVVQKHPMHAVTFVDNHDSQPGESLESFVQEWFKPLAYALILTREQGYPSVFYGDYYGIPTHSVPAMKAKIDPILEARQNFAYGTQHDYFDHHNIIGWTREGNTTHPNSGLATIMSDGPGGEKWMYVGQNKAGQVWHDITGNKPGTVTINADGWANFSVNGGSVSIWVKR

SEQ ID NO: 17343 - protein, 485 aa, Bacillus sp.
HHNGTNGTMMQYFEWHLPNDGNHWNRLRDDASNLRNRGITAIWIPPAWKGTSQNDVGYGAYDLYDLGEFNQKGTVRTKYGTRSQLESAIHALKNNGVQVYGDVVMNHKGGADATENVLAVEVNPNNRNQEISGDYTIEAWTKFDFPGRGNTYSDFKWRWYHFDGVDWDQSRQFQNRIYKFRGDGKAWDWEVDSENGNYDYLMYADVDMDHPEEVNELRRWGEWYTNTLNLDGFRIDAVKHIKYSFTRDWLTHVRNATGKEMFAVAEFWKNDLGALENYLNKTNWSHSVFDVPLHYNLYNASNSGGNYDMAKLLNGTVVQKHPMHAVTFVDNHDSQPGESLESFVQEWFKPLAYALILTREQGYPSVFYGDYYGIPTHSVPAMKAKIDPILEARQNFAYGTQHDYFDHHNIIGWTREGNTTHPNSGLATIMSDGPGGEKWMYVGQNKAGQVWHDITGNKPGTVTINADGWANFSVNGGSVSIWVKR

SEQ ID NO: 17344 - protein, 485 aa, Bacillus sp.
HHNGTNGTMMQYFEWHLPNDGNHWNRLRDDASNLRNRGITAIWIPPAWKGTSQNDVGYGAYDLYDLGEFNQKGTVRTKYGTRSQLESAIHALKNNGVQVYGDVVMNHKGGADATENVLAVEVNPNNRNQEISGDYTIEAWTKFDFPGRGNTYSDFKWRWYHFDGVDWDQSRQFQNRIYKFRGXXKRWDWEVDSEFGNYDYLMYADVDMDHPEVVNELRRWGEWYTNTLNLDGFRIDAVKHIKYSFTRDWLTHVRNATGKEMFAVAEFWKNDLGALENYLNKTNWNHSVFDVPLHYNLYNASNSGGNYDMAKLLNGTVVQKHPMHAVTFVDNHDSQPGESLESFVQEWFKPLAYALILTREQGYPSVFYGDYYGIPTHSVPAMKAKIDPILEARQNFAYGTQHDYFDHHNIIGWTREGNTTHPNSGLATIMSDGPGGEKWMYVGQNKAGQVWHDITGNKPGTVTINADGWANFSVNGGSVSIWVKR

SEQ ID NO: 17345 - protein, 483 aa, Unidentified
HHNGTNGTMMQYFEWHLPNDGNHWNRLRDDASNLRNRGITAIWIPPAWKGTSQNDVGYGAYDLYDLGEFNQKGTVRTKYGTRSQLESAIHALKNNGVQVYGDVVMNHKGGADATENVLAVEVNPNNRNQEISGDYTIEAWTKFDFPGRGNTYSDFKWRWYHFDGVDWDQSRQFQNRIYKFRGKAWDWEVDSEFGNYDYLMYADLDMDHPEVVNELRRWGEWYTNTLNLDGFRIDAVKHIKYSFTRDWLTHVRNATGKEMFAVAEFWKNDLGALENYLNKTNWNHSVFDVPLHYNLYNASNSGGNYDMAKLLNGTVVQKHPMHAVTFVDNHDSQPGESLESFVQEWFKPLAYALILTREQGYPSVFYGDYYGIPTHSVPAMKAKIDPILEARQNFAYGTQHDYFDHHNIIGWTREGNTTHPNSGLATIMSDGPGGEKWMYVGQNKAGQVWHDITGNKPGTVTINADGWANFSVNGGSVSIWVKR

SEQ ID NO: 17346 - protein, 483 aa, Bacillus sp.
HHNGTNGTMMQYFEWHLPNDGNHWNRLRDDASNLRNRGITAIWIPPAWKGTSQNDVGYGAYDLYDLGEFNQKGTVRTKYGTRSQLESAIHALKNNGVQVYGDVVMNHKGGADATENVLAVEVNPNNRNQEISGDYTIEAWTKFDFPGRGNTYSDFKWRWYHFDGVDWDQSRQFQNRIYKFRGKAWRWEVDSENGFYDYLMYADVDMDHPEVVNELRRWGEWYTNTLNLDGFRIDAVKHIKYSFTRDWLTHVRNATGKEMFAVAEFWKNDLGALENYLNKTNWNHSVFDVPLHYNLYNASNSGGNYDMAKLLNGTVVQKHPMHAVTFVDNHDSQPGESLESFVQEWFKPLAYALILTREQGYPSVFYGDYYGIPTHSVPAMKAKIDPILEARQNFAYGTQHDYFDHHNIIGWTREGNTTHPNSGLATIMSDGPGGEKWMYVGQNKAGQVWHDITGNKPGTVTINADGWANFSVNGGSVSIWVKR

SEQ ID NO: 17347 - protein, 485 aa, Bacillus sp.
HHNGTNGTMMQYFEWHLPNDGNHWNRLRDDASNLRNRGITAIWIPPAWKGTSQNDVGYGAYDLYDLGEFNQKGTVRTKYGTRSQLESAIHALKNNGVQVYGDVVMNHKGGADATENVLAVEVNPNNRNQEISGDYTIEAWTKFDFPGRGNTYSDFKWRWYHFDGVDWDQSRQFQNRIYKFRGXXKAWDWEVDTENGNYDYLMYADLDMDHPEVVNELRRWGEWYTNTLNLDGFRIDAVKHIKYSFTRDWLTHVRNATGKEMFAVAEFWKNDLGALENYLNKTNWNHSVFDVPLHYNLYNASNSGGNYDMAKLLNGTVVQKHPMHAVTFVDNHDSQPGESLESFVQEWFKPLAYALILTREQGYPSVFYGDYYGIPTHSVPAMKAKIDPILEARQNFAYGTQHDYFDHHNIIGWTREGNTTHPNSGLATIMSDGPGGEKWMYVGQNKAGQVWHDITGNKPGTVTINADGWANFSVNGGSVSIWVKR

SEQ ID NO: 17348 - protein, 483 aa, Unidentified
HHNGTNGTMMQYFEWHLPNDGNHWNRLRDDASNLRNRGITAIWIPPAWKGTSQNDVGYGAYDLYDLGEFNQKGTVRTKYGTRSQLESAIHALKNNGVQVYGDVVMNHKGGADATENVLAVEVNPNNRNQEISGDYTIEAWTKFDFPGRGNTYSDFKWRWYHFDGVDWDQSRQFQNRIYKFRGKAWDWPVDSENGNYDYLMYADVDMDHPEVVNELRRWGEWYTNTLNLDGFRIDAVKHIKYSFTRDWLTHVRNATGKEMFAVAEFWKNDLGALENYLNYTNWNHSVFDVPLHYNLYNASNSGGNYDMAKLLNGTVVQKHPMHAVTFVDNHDSQPGESLESFVQEWFKPLAYALILTREQGYPSVFYGDYYGIPTHSVPAMKAKIDPILEARQNFAYGTQHDYFDHHNIIGWTREGNTTHPNSGLATIMSDGPGGEKWMYVGQNKAGQVWHDITGNKPGTVTINADGWANFSVNGGSVSIWVKR

SEQ ID NO: 17349 - protein, 483 aa, Bacillus sp.
HHNGTNGTMMQYFEWHLPNDGNHWNRLRDDASNLRNRGITAIWIPPAWKGTSQNDVGYGAYDLYDLGEFNQKGTVRTKYGTRSQLESAIHALKNNGVQVYGDVVMNHKGGADATENVLAVEVNPNNRNQEISGDYTIEAWTKFDFPGRGNTYSDFKWRWYHFDGVDWDQSRQFQNRIYKFRGKAWDWEVDSEFGNYDYLMYADVDMDYPEVVNELRRWGEWYTNTLNLDGFRIDAVKHIKYSFTRDWLTHVRNATGKEMFAVAEFWKNDLGALENYLNKTNWNHSVFDVPLHYNLYNASNSGGNYDMAKLLNGTVVQKHPMHAVTFVDNHDSQPGESLESFVQEWFKPLAYALILTREQGYPSVFYGDYYGIPTHSVPAMKAKIDPILEARQNFAYGTQHDYFDHHNIIGWTREGNTTHPNSGLATIMSDGPGGEKWMYVGQNKAGQVWHDITGNKPGTVTINADGWANFSVNGGSVSIWVKR

SEQ ID NO: 17350 - protein, 483 aa, Bacillus sp.
HHNGTNGTMMQYFEWHLPNDGNHWNRLRDDASNLRNRGITAIWIPPAWKGTSQNDVGYGAYDLYDLGEFNQKGTVRTKYGTRSQLESAIHALKNNGVQVYGDVVMNHKGGADATENVLAVEVNPNNRNQEISGDYTIEAWTKFDFPGRGNTYSDFKWRWYHFDGVDWDQSRQFQNRIYKFRGKAWDWEVDSENGFYDYLMYADVDMDHPYVVNELRRWGEWYTNTLNLDGFRIDAVKHIKYSFTRDWLTHVRNATGKEMFAVAEFWKNDLGALENYLNKTNWNHSVFDVPLHYNLYNASNSGGNYDMAKLLNGTVVQKHPMHAVTFVDNHDSQPGESLESFVQEWFKPLAYALILTREQGYPSVFYGDYYGIPTHSVPAMKAKIDPILEARQNFAYGTQHDYFDHHNIIGWTREGNTTHPNSGLATIMSDGPGGEKWMYVGQNKAGQVWHDITGNKPGTVTINADGWANFSVNGGSVSIWVKR

SEQ ID NO: 17351 - protein, 483 aa, Bacillus sp.
HHNGTNGTMMQYFEWHLPNDGNHWNRLRDDASNLRNRGITAIWIPPAWKGTSQNDVGYGAYDLYDLGEFNQKGTVRTKYGTRSQLESAIHALKNNGVQVYGDVVMNHKGGADATENVLAVEVNPNNRNQEISGDYTIEAWTKFDFPGRGNTYSDFKWRWYHFDGVDWDQSRQFQNRIYKFRGKAWDWEVDSENGFYDYLMYADVDNDHPEVVNELRRWGEWYTNTLNLDGFRIDAVKHIKYSFTRDWLTHVRNATGKEMFAVAEFWKNDLGALENYLNKTNWNHSVFDVPLHYNLYNASNSGGNYDMAKLLNGTVVQKHPMHAVTFVDNHDSQPGESLESFVQEWFKPLAYALILTREQGYPSVFYGDYYGIPTHSVPAMKAKIDPILEARQNFAYGTQHDYFDHHNIIGWTREGNTTHPNSGLATIMSDGPGGEKWMYVGQNKAGQVWHDITGNKPGTVTINADGWANFSVNGGSVSIWVKR

SEQ ID NO: 17352 - protein, 485 aa, Bacillus sp.
HHNGTNGTMMQYFEWHLPNDGNHWNRLRDDASNLRNRGITAIWIPPAWKGTSQNDVGYGAYDLYDLGEFNQKGTVRTKYGTRSQLESAIHALKNNGVQVYGDVVMNHKGGADATENVLAVEVNPNNRNQEISGDYTIEAWTKFDFPGRGNTYSDFKWRWYHFDGVDWDQSRQFQNRIYKFRGXXKAWDWEVDTENGNYDYLMYADVDMDHPEVVNELRRWGEWYTNTLNLDGFRIDAVKHIKFSFTRDWLTHVRNATGKEMFAVAEFWKNDLGALENYLNKTNWNHSVFDVPLHYNLYNASNSGGNYDMAKLLNGTVVQKHPMHAVTFVDNHDSQPGESLESFVQEWFKPLAYALILTREQGYPSVFYGDYYGIPTHSVPAMKAKIDPILEARQNFAYGTQHDYFDHHNIIGWTREGNTTHPNSGLATIMSDGPGGEKWMYVGQNKAGQVWHDITGNKPGTVTINADGWANFSVNGGSVSIWVKR

SEQ ID NO: 17353 - protein, 483 aa, Bacillus sp.
HHNGTNGTMMQYFEWHLPNDGNHWNRLRDDASNLRNRGITAIWIPPAWKGTSQNDVGYGAYDLYDLGEFNQKGTVRTKYGTRSQLESAIHALKNNGVQVYGDVVMNHKGGADATENVLAVEVNPNNRNQEISGDYTIEAWTKFDFPGRGNTYSDFKWRWYHFDGVDWDQSRQFQNRIYKFRGKAWDWEVDSENGFYDYLMYADVDYDHPEVVNELRRWGEWYTNTLNLDGFRIDAVKHIKYSFTRDWLTHVRNATGKEMFAVAEFWKNDLGALENYLNKTNWNHSVFDVPLHYNLYNASNSGGNYDMAKLLNGTVVQKHPMHAVTFVDNHDSQPGESLESFVQEWFKPLAYALILTREQGYPSVFYGDYYGIPTHSVPAMKAKIDPILEARQNFAYGTQHDYFDHHNIIGWTREGNTTHPNSGLATIMSDGPGGEKWMYVGQNKAGQVWHDITGNKPGTVTINADGWANFSVNGGSVSIWVKR

SEQ ID NO: 17354 - protein, 485 aa, Bacillus sp.
HHNGTNGTMMQYFEWHLPNDGNHWNRLRDDASNLRNRGITAIWIPPAWKGTSQNDVGYGAYDLYDLGEFNQKGTVRTKYGTRSQLESAIHALKNNGVQVYGDVVMNHKGGADATENVLAVEVNPNNRNQEISGDYTIEAWTKFDFPGRGNTYSDFKWRWYHFDGVDWDQSRQFQNRIYKFRGDGKAWDWEVDSENGNYDYLMYADVDMDHPEVVNELRRWGEWYTNTLNLDGFRIDAVKHIKYSFTRDWLTHVRNATGKEMFAVAEFWKNDLGALENYLNKTNWNHSVFDVPLHYNLYNASNSGGNYDMAKLLNGTVVQKHPMHAVTFVDNHDSQPGESLESFVQEWFKPLAYALILTREQGYPSVFYGDYYGIPTHSVPAMKAKIVPILEARQRFAYGTQHDYFDHHNIIGWTREGNTTHPNSGLATIMSDGPGGEKWMYVGQNKAGQVWHDITGNKPGTVTINADGWANFSVNGGSVSIWVKR

SEQ ID NO: 17355 - protein, 485 aa, Bacillus sp.
HHNGTNGTMMQYFEWHLPNDGNHWNRLRDDASNLRNRGITAIWIPPAWKGTSQNDVGYGAYDLYDLGEFNQKGTVRTKYGTRSQLESAIHALKNNGVQVYGDVVMNHKGGADATENVLAVEVNPNNRNQEISGDYTIEAWTKFDFPGRGNTYSDFKWRWYHFDGVDWDQSRQFQNRIYKFRGXXKAWDWEVDSEFGNYDYLMYADVDMDHPEVVNELRRWGEWYTNTLNLDGFRIDAVKHIKFSFTRDWLTHVRNATGKEMFAVAEFWKNDLGALENYLNKTNWNHSVFDVPLHYNLYNASNSGGNYDMAKLLNGTVVQKHPMHAVTFVDNHDSQPGESLESFVQEWFKPLAYALILTREQGYPSVFYGDYYGIPTHSVPAMKAKIDPILEARQNFAYGTQHDYFDHHNIIGWTREGNTTHPNSGLATIMSDGPGGEKWMYVGQNKAGQVWHDITGNKPGTVTINADGWANFSVNGGSVSIWVKR

SEQ ID NO: 17356 - protein, 483 aa, Bacillus sp.
HHNGTNGTMMQYFEWHLPNDGNHWNRLRDDASNLRNRGITAIWIPPAWKGTSQNDVGYGAYDLYDLGEFNQKGTVRTKYGTRSQLESAIHALKNNGVQVYGDVVMNHKGGADATENVLAVEVNPNNRNQEISGDYTIEAWTKFDFPGRGNTYSDFKWRWYHFDGVDWDQSRQFQNRIYKFRGKRWDWEVDSEFGNYDYLMYADVDMDHPEVVNELRRWGEWYTNTLNLDGFRIDAVKHIKYSFTRDWLTHVRNATGKEMFAVAEFWKNDLGALENYLNKTNWNHSVFDVPLHYNLYNASNSGGNYDMAKLLNGTVVQKHPMHAVTFVDNHDSQPGESLESFVQEWFKPLAYALILTREQGYPSVFYGDYYGIPTHSVPAMKAKIDPILEARQNFAYGTQHDYFDHHNIIGWTREGNTTHPNSGLATIMSDGPGGEKWMYVGQNKAGQVWHDITGNKPGTVTINADGWANFSVNGGSVSIWVKR

SEQ ID NO: 17357 - protein, 483 aa, Bacillus sp.
HHNGTNGTMMQYFEWHLPNDGNHWNRLRDDASNLRNRGITAIWIPPAWKGTSQNDVGYGAYDLYDLGEFNQKGTVRTKYGTRSQLESAIHALKNNGVQVYGDVVMNHKGGADATENVLAVEVNPNNRNQEISGEYTIEAWTKFDFPGRGNTYSDFKWRWYHFDGVDWDQSRQFQNRIYKFRGKAWDWEVDSENGNYDYLMYADVDMDHPEVVNELRRWGEWYTNTLNLDGFRIDAVKHIKYSFTRDWLTHVRNATGKEMFAVAEFWKNDLGALENYLNKTNWNHSVFDVPLHYNLYNASNSGGNYDMAKLLNGTVVQKHPMHAVTFVDNHDSQPGESLESFVQEWFKPLAYALILTREQGYPSVFYGDYYGIPTHSVPAMKAKIDPILEARQNFAYGTQHDYFDHHNIIGWTREGNTTHPNSGLATIMSDGPGGEKWMYVGQNKAGQVWHDITGNKPGTVTINADGWANFSVNEGSVSIWVKR

SEQ ID NO: 17358 - protein, 485 aa, Bacillus sp.
HHNGTNGTMMQYFEWHLPNDGNHWNRLRDDASNLRNRGITAIWIPPAWKGTSQNDVGYGAYDLYDLGEFNQKGTVRTKYGTRSQLESAIHALKNNGVQVYGDVVMNHKGGADATENVLAVEVNPNNRNQEISGDYTIEAWTKFDFPGRGNTYSDFKWRWYHFDGVDWDQSRQFQNRIYKFRGDGKAWDWEVDSENGNYDYLMYADVDMDHPEVVNELRRWGEWYTNTLNLDGFRIDAVKHIKYSFVRDWLTHVRNATGKEMFAVAEFWKNDLGALENYLNKTNWNHSVFDVPLHYNLYNASNSGGNYDMAKLLNGTVVQKHPMHAVTFVDNHDTQPGESLESFVQEWFKPLAYALILTREQGYPSVFYGDYYGIPTHSVPAMKAKIDPILEARQNFAYGTQHDYFDHHNIIGWTREGNTTHPNSGLATIMSDGPGGEKWMYVGQNKAGQVWHDITGNKPGTVTINADGWANFSVNGGSVSIWVKR

SEQ ID NO: 17359 - protein, 483 aa, Bacillus amyloliquefaciens
VNGTLMQYFEWYTPNDGQHWKRLQNDAEHLSDIGITAVWIPPAYKGLSQSDNGYGPYDLYDLGEFQQKGTVRTKYGTKSELQDAIGSLHSRNVQVYGDVVLNHKAGADATEDVTAVEVNPANRNQETSEEYQIKAWTDFRFPGRGNTYSDFKWHWYHFDGVDWDESRKISRIFKFRGEGKAWDWEVSSENGNYDYLMYADVNYDHPDVVAETKKWGIWYANELSLDGFRIDAAKHIKFSFLRDWVQAVRQATGKEMFTVAEYWQNNAGKLENYLNKTSFNQSVFDVPLHFNLQAASSQGGGYDMRRLLDGTVVSRHPEKAVTFVENHDTQPGQSLESTVQTWFKPLAYAFILTRESGYPQVFYGDMYGTKGTSPKEIPSLKDNIEPILKARKEYAYGPQHDYIDHPDVIGWTREGDSSAAKSGLAALITDGPGGSKRMYAGLKNAGETWYDITGNRSDTVKIGSDGWGEFHVNDGSVSIYVQK

SEQ ID NO: 17360 - protein, 483 aa, Bacillus subtilis
VNGTLMQYFEWYTPNDGQHWKRLQNDAEHLSDIGITAVWIPPAYKGLSQSDNGYGPYDLYDLGEFQQKGTVRTKYGTKSELQDAIGSLHSRNVQVYGDVVLNHKAGADATEDVTAVEVNPANRNQETSEEYQIKAWTDFRFPGRGNTYSDFKWHWYHFDGADWDESRKISRIFKFRGEGKAWDWEVSSENGNYDYLMYADVDYDNPDVVAETKKWGNWYANELSLDGFRIDAAKHIKFSFLRDWVQAVRQATGKEMFTVAEYWQNNAGKLENYLNKTSFNQSVFDVPLHFNLQAASSQGGGYDMRRLLDGTVVSRHPEKAVTFVENHDTQPGQSLESTVQTWFKPLAYAFILTRESGYPQVFYGDMYGTKGTSPKEIPSLKDNIEPILKARKEYAYGPQHDYIDHPDVIGWTREGDSSAAKSGLAALITDGPGGSKRMYAGLKNAGETWYDITGNRSDTVKIGSDGWGEFHVNDGSVSIYVQK

SEQ ID NO: 17361 - protein, 483 aa, Bacillus amyloliquefaciens
VNGTLMQYFEWYTPNDGQHWKRLQNDAEHLSDIGITAVWIPPAYKGLSQSDNGYGPYDLYDLGEFQQKGTVRTKYGTKSELQDAIGSLHSRNVQVYGDVVLNHKAGADATEDVTAVEVNPANCNQETSEEYQIKAWTDFRFPGRGNTYSDFKWHWYHFDGADWDESRKISRIFKFRGEGKAWDWEVSSENGNYDYLMYADVDYDHPDVVAETKKWGIWYANELSLDGFRIDAAKHIKFSFLRDWVQAVRQATGKEMFTVAEYWQNNAGKLENYLNKTSFNQSVFDVPLHFNLQAASSQGGGYDMRRLLDGTVVSRHPEKAVTFVENHDTQPGQSLESTVQTWFKPLAYAFILTRESGYPQVFYGDMYGTKGTSPKEIPSLKDNIEPILKARKEYAYGPQHDYIDHPDVIGWTREGDSSAAKSGLAALITDGPGGSKRMYAGLKNAGETWYDITGNRSDTVKIGSDGCGEFHVNDGSVSIYVQK

SEQ ID NO: 17362 - protein, 483 aa, Bacillus amyloliquefaciens
VNGTLMQYFEWYTPNDGQHWKRLQNDAEHLSDIGITAVWIPPAYKGLSQSDNGYGPYDLYDLGEFQQKGTVRTKYGTKSELQDAIGSLHSRNVQVYGDVVLNHKAGADATEDVTAVEVNPANRNQETSEEYQIKAWTDFRFPGRGNTYSDFKWHWYHFDGADWDESRKISRIFKFRGEGKAWDWEVSSENGNYDYLMYADVDYDHPDVVAETKKWGIWYANELSLDGFRIDAAKHIKFSFLRDWVQAVRQATGKEMFTVAEYWQNNAGKLENYLNKTSFNQSVFDVPLHFNLQAASSQGGGYDMRRLLDGTVVSRHPEKAVTFVENHDTQPGQSLESTVQTWFKPLAYTFILTRESGYPQVSYGDMYGTKGTSPKEIPSLKDNIEPILKARKEYAYGPQHDYIDHPDVIGWTREGDSSAAKSGLAALITDGPGGSKRMYAGLKNAGETWYDITGNRSDTVKIGSDGWGEFHVNDGSVSIYVQK

SEQ ID NO: 17363 - protein, 482 aa, Bacillus sp.
HHNGTNGTMMQYFEWHLPNDGNHWNRLRDDASNLRNRGITAIWIPPAWKGTSQNDVGYGAYDLYDLGEFNQKGTVRTKYGTRSQLESAIHALKNNGVQVYGDVVMNHKGGADATENVLAVEVNPNNRNQEISGDYTIEAWTKFDFPGRGNTYSDFKWRWYHFDGVDWDQSRQFQNRIYKFRGKAWDWEVDSEFGNYDYLMYADDMDHPEVVNELRRWGEWYTNTLNLDGFRIDAVKHIKFSFTRDWLTHVRNATGKEMFAVAEFWKNDLGALENYLNKTNWNHSVFDVPLHYNLYNASNSGGNYDMAKLLNGTVVQKHPMHAVTFVDNHDSQPGESLESFVQEWFKPLAYALILTREQGYPSVFYGDYYGIPTHSVPAMKAKIDPILEARQNFAYGTQHDYFDHHNIIGWTREGNTTHPNSGLATIMSDGPGGEKWMYVGQNKAGQVWHDITGNKPGTVTINADGWANFSVNGGSVSIWVKR

SEQ ID NO: 17364 - protein, 478 aa, Aspergillus oryzae
ATPADWRSQSIYFLLTDRFARTDGSTTATCNTADQKYCGGTWQGIIDKLDYIQGMGFTAIWITPVTAQLPQTTAYGDAYHGYWQQDIYSLNENYGTADDLKALSSALHERGMYLMVDVVANHMGYDGAGSSVDYSVFKPFSSQDYFHPFCFIQNYEDQTQVEDCWLGDNTVSLPDLDTTKDVVKNEWYDWVGSLVSNYSIDGLRIDTVKHVQKDFWPGYNDAAGVYCIGEVLDGDPAYTCPYQNVMDGVLNYPIYYPLLNAFKSTSGSMDDLYNMINTVKSDCPDSTLLGTFVENHDNPRFASYTNDIALAKNVAAFIILNDGIPIIYAGQEQHYAGGNDPANREATWLSGYPTDSELYKLIASANAIRNYAISIDTGFVTYKNWPIYKDDTTIAMRKGTDGSQIVTILSNKGASGDSYTLSLSGAGYTAGQQLTEVIGCTTVTVGSDGNVPVPMAGGLPRVLYPTEKLAGSKICSSS

SEQ ID NO: 17365 - protein, 478 aa, Aspergillus oryzae
ATPADWRSQSIYFLLTDRFARTDGSTTATCNTADQKYCGGTWQGIIDKLDYIQGMGFTAIWITPVTAQLPQTTAYGDAYHGYWQQDIYSLNENYGTADDLKALSSALHERGMYLMVDVVANHMGYDGAGSSVDYSVFKPFSSQDYFHPFCFIQNYEDQTQVEDCWLGDNTVSLPDLDTTKDVVKNEWYDWVGSLVSNYSIDGLRIDTVKHVQKDFWPGYNKAAGVYCIGEVLGDDPAYTCPYQNVMDGVLNYPIYYPLLNAFKSTSGSMDDLYNMINTVKSDCPDSTLLGTFVENHDNPRFASYTNDIALAKNVAAFIILNDGIPIIYAGQEQHYAGGNDPANREATWLSGYPTDSELYKLIASANAIRNYAISKDTGFVTYKNWPIYKDDTTIAMRKGTDGSQIVTILSNKGASGDSYTLSLSGAGYTAGQQLTEVIGCTTVTVGSDGNVPVPMAGGLPRVLYPTEKLAGSKICSSS

SEQ ID NO: 17366 - protein, 478 aa, Aspergillus niger
ATPADWRSQSIYFLLTDRFARTDGSTTATCNTADQKYCGGTWQGIIDKLDYIQGMGFTAIWITPVTAQLPQTTAYGDAYHGYWQQDIYSLNENYGTADDLKALSSALHERGMYLMVDVVANHMGYDGAGSSVDYSVFKPFSSQDYFHPFCFIQNYEDQTQVEDCWLGDNTVSLPDLDTTKDVVKNEWYDWVGSLVSNYSIDGLRIDTVKHVQKDFWPGYNKAAGVYCIGEVLDGDPAYTCPYQNVMDGVLNYPIYYPLLNAFKSTSGSMDDLYNMINTVKSDCPDSTLLGTFVENHDNPRFASYTNDIALAKNVAAFIILNDGIPIIYAGQEQHYAGGNDPANREATWLSGYPTDSELYKLIASRNAIRNYAISKDTGFVTYKNWPIYKDDTTIPMRKGTDGSQIVTILSNKGASGDSYTLSLSGAGYTAGQQLTEVIGCTTVTVGSDGNVPVPMAGGLPRVLYPTEKLAGSKICSSS

SEQ ID NO: 17367 - protein, 478 aa, Aspergillus oryzae
ATPADWRSQSIYFLLTDRFARTDGSTTATCNTADRKYCGGTWQGIIDKLDYIQGMGFTAIWITPVTAQLPQTTAYGDAYHGYWQQDIYSLNENYGTADDLKALSSALHERGMYLMVDVVANHMGYDGAGSSVDYSVFKPFSSQDYFHPFCLIQNYEDQTQVEDCWLGDNTVSLPDLDTTKDVVKNEWYDWVGSLVSNYSIDGLRIDTVKHVQKDFWPGYNKAAGVYCIGEVLDGDPAYTCPYQNVMDGVLNYPIYYPLLNAFKSTSGSMDDLYNMINTVKSDCPDSTLLGTFVENHDNPRFASYTNDIALAKNVAAFIILNDGIPIIYAGQEQHYAGGNDPANREATWLSGYPTDSELYKLIASANAIRNYAISKDTGFVTYKNWPIYKDDTTIAMRKGTDGSQIVTILSNKGASGDSYTLSLSGAGYTAGQQLTEVIGCTTVTVGSDGNVPVPMAGGLPRVLYPTEKLAGSKICSSS

SEQ ID NO: 17368 - protein, 478 aa, Aspergillus oryzae
ATPADWRSQSIYFLLTDRFARTDGSTTATCNTADRKYCGGTWQGIIDKLDYIQGMGFTAIWITPVTAQLPQTTAFGDAYHGYWQQDIYSLNENYGTADDLKALSSALHERGMYLMVDVVANHMGYDGAGSSVDYSVFKPFSSQDYFHPFCFIQNYEDQTQVEDCWLGDNTVSLPDLDTTKDVVKNEWYDWVGSLVSNYSIDGLRIDTVKHVQKDFWPGYNKAAGVYCIGEVLDGDPAYTCPYQNVMDGVLNYPIYYPLLNAFKSTSGSMDDLYNMINTVKSDCPDSTLLGTFVENHDNPRFASYTNDIALAKNVAAFIILNDGIPIIYAGQEQHYAGGNDPANREATWLSGYPTDSELYKLIASANAIRNYAISKDTGFVTYKNWPIYKDDTTIAMRKGTDGSQIVTILSNKGASGDSYTLSLSGAGYTAGQQLTEVIGCTTVTVGSDGNVPVPMAGGLPRVLYPTEKLAGSKICSSS

SEQ ID NO: 17369 - protein, 478 aa, Bacillus amyloliquefaciens
MQYFEWYTPNDGQHWKRLQNDAEHLSDIGITAVWIPPAYKGLSQSDNGYGPYDLYDLGEFQQKGTVRTKYGTKSELQDAIGSLHSRNVQVYGDVVLNHKAGADATEDVTAVEVNPANRNQVTSEEYQIKAWTDFRFPGRGNTYSDFKWHWYHFDGADWDESRKISRIFKFRGEGKAWDWEVSSENGNYDYLMYADVDYDHPDVVAETKKWGIWYANELSLDGFRIDAAKHIKFSFLRDWVQAVRQATGKEMFTVAEYWQNNAGKLENYLNKTSFNQSVFDVPLHFNLQAASSQGGGYDMRRLLDGTVVSRHPEKAVTFVENHDTQPGQSLESTVQTWFKPLAYAFILTRESGYPQVFYGDMYGTKGTSPKEIPSLKDNIEPILKARKEYAYGPQHDYIDHPDVIGWTREGDSSAAKSGLAALIMDGPGGSKRMYAGLKNAGETWYDITGNRSDTVKIGSDGWGEFHVNDGSVSIYVQK

SEQ ID NO: 17370 - protein, 478 aa, Unidentified
ATPADWRSQSIYFLLTDRFARTDGSTTATCNTADQKYCGGTWQGIIDKLDYIQGMGFTAIWITPVTAQLPQTTAYGDAYHGYWQQDIYSLNENYGTADDLKALSSALHERGMYLMVDVVANHMGYDGAGSSVDYSVFKPFSSQDYFHPFCFIQNYEDQTQVEDCWLGDNTVSLPDLDTTKDVVKNEWYDWVGSLVSNYSIDGLRIDTVKHVQKDFWPGYNKAAGVYCIGEVLDVDPAYTCPYQNVMDGVLNYPIYYPLLNAFKSTSGSMDDLYNMINTVKSDCPDSTLLGTFVENHDNPRFASYTNDIALAKNVAAFIILNDGIPIIYAGQEQHYAGGNDPANREATWLSGYPTDSELYLLIASANAIRNYAISKDTGFVTYKNWPIYKDDTTIAMRKGTDGSQIVTILSNKGASGDSYTLSLSGAGYTAGQQLTEVIGCTTVTVGSDGNVPVPMAGGLPRVLYPTEKLAGSKICSSS

SEQ ID NO: 17371 - protein, 475 aa, Aspergillus niger
ATPADWRSQSIYFLLTDRFARTDGSTTATCNTADQKYCGGTWQGIIDKLDYIQGMGFTAIWITPVTAQLPQTTAYGDAYHGYWQQDIYSLNENYGTADDLKALSSALHERGMYLMVDVVANHMGYDGAGSSVDYSVFKPFSSQDYFHPFCFIQNYEDQTQVEDCWLGDNTVSLPDLDTTKDVVKNEWYDWVGSLVSNYSIDGLRIDTVKHVQKDFWPGYNKAAGVYCIGEVLDGDPAYTCPYQNVMDGVLNYPIYYPLLNAFKSTSGSMDDLYNMINTVKSDCPDSTLLGTFVENHDNPRFASYTNDIALAKNVAAFIILNDGIPIIYAGQEQHYAGGNDPANREATWLSGYPTDSELYKLIASRNAIRNYAISKDTGFVTYKNWPIYKDDTTIPMRKGTDGSQIVTILSNKGASGDSYTLSLSGAGYTAGQQLTEVIGCTTVTVGSDGNVPVPMAGGLPRVLYPTEKLAGSKIC

SEQ ID NO: 17372 - protein, 440 aa, Geobacillus stearothermophilus
AAAPFNGTMMQYFEWYLPDDGTLWTKVANEANNLSSLGITALWLPPAYKGTSRSDVGYGVYDLYDLGEFNQKGTVRTKYGTKAQYLQAIQAAHAAGMQVYADVVFDHKGGADGTEWVDAVEVNPSDRNQEISGTYQIQAWTKFDFPGRGNTYSSFKWRWYHFDGVDWDESRKLSRIYKFRGIGKAWDWEVDTENGNYDYLMYADLDMDHPEVVTELKNWGKWYVNTTNIDGFRLDAVKHIKFSFFPDWLSYVRSQTGKPLFTVGEYWSYDINKLHNYITKTDGTMSLFDAPLHNKFYTASKSGGAFDMRTLMTNTLMKDQPTLAVTFVDNHDTEPGQALQSWVDPWFKPLAYAFILTRQEGYPCVFYGDYYGIPQYNIPSLKSKIDPLLIARRDYAYGTQHDYLDHSDIIGWTREGVTEKPGSGLAALITDGPGGSKWMY

SEQ ID NO: 17373 - protein, 439 aa, Geobacillus stearothermophilus
AAPFNGTMMQYFEWYLPDDGTLWTKVANEANNLSSLGITALWLPPAYKGTSRSDVGYGVYDLYDLGEFNQKGTVRTKYGTKAQYLQAIQAAHAAGMQVYADVVFDHKGGADGTEWVDAVEVNPSDRNQEISGTYQIQAWTKFDFPGRGNTYSSFKWRWYHFDGVDWDESRKLSRIYKFRGIGKAWDWEVDTENGNYDYLMYADLDMDHPEVVTELKNWGKWYVNTTNIDGFRLDAVKHIKFSFFPDWLSYVRSQTGKPLFTVGEYWSYDINKLHNYITKTDGTMSLFDAPLHNKFYTASKSGGAFDMRTLMTNTLMKDQPTLAVTFVDNHDTEPGQALQSWVDPWFKPLAYAFILTRQEGYPCVFYGDYYGIPQYNIPSLKSKIDPLLIARRDYAYGTQHDYLDHSDIIGWTREGVTEKPGSGLAALITDGPGGSKWMY

SEQ ID NO: 17374 - protein, 513 aa, Geobacillus stearothermophilus
AAPFNGTMMQYFEWYLPDDGTLWTKVANEANNLSSLGITALWLPPAYKGTSRSDVGYGIYDLYDLGEFNQKGTVRTKYGTKAQYLQAIQAAHAAGMQVYADVVFDHKGGADGTEWVDAVEVNPSDRNQEISGTYQIQAWTKFDFPGRGNTYSSFKWRWYHFDGVDWDESRKLSRIYKFRGKAWDWEVDTEFGNYDYLMYADLDMDHPEVVTELKNWGKWYVNTTNIDGFRLDAVKHIKFSFFPDWLSYVRSQTGKPLFTVGEYWSYDINKLHNYITKTNGTMSLFDAPLHNKFYTASKSGGAFDMRTLMTNTLMKDQPTLAVTFVDNHDTEPGQALQSWVDPWFKPLAYAFILTRQEGYPCVFYGDYYGIPQYNIPSLKSKIDPLLIARRDYAYGTQHDYLDHSDIIGWTREGVTEKPGSGLAALITDGPGGSKWMYVGKQHAGKVFYDLTGNRSDTVTINSDGWGEFKVNGGSVSVWVPRKTTVSTIARPITTRPWTGEFVRWTEPRLVAWP

SEQ ID NO: 17375 - protein, 513 aa, Geobacillus stearothermophilus
AAPFNGTMMQYFEWYLPDDGTLWTKVANEANNLSSLGITALWLPPAYKGTSRSDVGYGAYDLYDLGEFNQKGTVRTKYGTKAQYLQAIQAAHAAGMQVYADVVFDHKGGADGTEWVDAVEVNPSDRNQEISGTYQIQAWTKFDFPGRGNTYSSFKWRWYHFDGVDWDESRKLSRIYKFRGKAWDWEVDTEFGNYDYLMYADLDMDHPEVVTELKNWGKWYVNTTNIDGFRLDAVKHIKFSFFPDWLSYVRSQTGKPLFTVGEYWSYDINKLHNYITKTNGTMSLFDAPLHNKFYTASKSGGAFDMRTLMTNTLMKDQPTLAVTFVDNHDTEPGQALQSWVDPWFKPLAYAFILTRQEGYPCVFYGDYYGIPQYNIPSLKSKIDPLLIARRDYAYGTQHDYLDHSDIIGWTREGVTEKPGSGLAALITDGPGGSKWMYVGKQHAGKVFYDLTGNRSDTVTINSDGWGEFKVNGGSVSVWVPRKTTVSTIARPITTRPWTGEFVRWTEPRLVAWP

SEQ ID NO: 17376 - protein, 513 aa, Geobacillus stearothermophilus
AAPFNGTMMQYFEWYLPDDGTLWTKVANEANNLSSLGITALWLPPAYKGTSRSDVGYGVYDLYDLGEFNQKGTVRTKYGTKAQYLQAIQAAHAAGMQVYADVVFDHKGGADGTEWVDAVEVNPSDRNQEISGTYQIQAWTKFDFPGRGNTYSSFKWRWYHFDGVDWDESRKLSRIYKFRGKAWDWEVDTEFGNYDYLMYADLDMDHPEVVTELKNWGKWYVNTTNIDGFRLDAVKHIKFQFFPDWLSYVRSQTGKPLFTVGEYWSYDINKLHNYITKTDGTMSLFDAPLHNKFYTASKSGGAFDMRTLMTNTLMKDQPTLAVTFVDNHDTEPVQALQSWVDPWFKPLAYAFILTRQEGYPCVFYGDYYGIPQYNIPSLKSKIDPLLIARRDYAYGTQHDYLDHSDIIGWTREGGTEKPGSGLAALITDGPGGSKWMYVGKQHAGKVFYDLTGNRSDTVTINSDGWGEFKVNGGSVSVWVPRKTTVSTIARPITTRPWTGEFVRWHEPRLVAWP

SEQ ID NO: 17377 - protein, 513 aa, Geobacillus stearothermophilus
AAPFNGTMMQYFEWYLPDDGTLWTKVANEANNLSSLGITALWLPPAYKGTSRSDVGYGEYDLYDLGEFNQKGTVRTKYGTKAQYLQAIQAAHAAGMQVYADVVFDHKGGADGTEWVDAVEVNPSDRNQEISGTYQIQAWTKFDFPGRGNTYSSFKWRWYHFDGVDWDESRKLSRIYKFRGKAWDWEVDTEFGNYDYLMYADLDMDHPEVVTELKNWGKWYVNTTNIDGFRLDAVKHIKFSFFPDWLSYVRSQTGKPLFTVGEYWSYDINKLHNYITKTNGTMSLFDAPLHNKFYTASKSGGAFDMRTLMTNTLMKDQPTLAVTFVDNHDTEPGQALQSWVDPWFKPLAYAFILTRQEGYPCVFYGDYYGIPQYNIPSLKSKIDPLLIARRDYAYGTQHDYLDHSDIIGWTREGVTEKPGSGLAALITDGPGGSKWMYVGKQHAGKVFYDLTGNRSDTVTINSDGWGEFKVNGGSVSVWVPRKTTVSTIARPITTRPWTGEFVRWTEPRLVAWP

SEQ ID NO: 17378 - protein, 513 aa, Geobacillus stearothermophilus
AAPFNGTMMQYFEWYLPDDGTLWTKVANEANNLSSLGITALWLPPAYKGTSRSDVGYGVYDLYDLGEFNQKGTVRTKYGTKAQYLQAIQAAHAAGMQVYADVVFDHKGGADGTEWVDAVEVNPSDRNQEISGTYQIQAWTKFDFPGRGNTYSSFKWRWYHFDGVDWDESRKLSRIYKFRGKAWDWEVDTENGNYDYLMYADLDMDHPEVVTELKNWGKWYVNTTNIDGFRLDAVKHIKFSFFPDWLSYVRSQTGKPLFTVGEYWSYDINKLHNYITKTNGTMSLFDAPLHNKFYTASKSGGAFDMRTLMTNTLMKDQPTLAVTFVDNHDTEPGQALQSWVDPWFKPLAYAFILTRQEGYPCVFYGDYYGIPQYNIPSLKSKIDPLLIARRDYAYGTQHDYLDHSDIIGWTREGVTEKPGSGLAALITDGPGGSKWMYVGKQHAGKVFYDLTGNRSDTVTINSDGWGEFKVNGGSVSVWVPRKTTVSTIARPITTRPWTGEFVRWTEPRLVAWP

SEQ ID NO: 17379 - protein, 513 aa, Geobacillus stearothermophilus
AAPFNGTMMQYFEWYLPDDGTLWTKVANEANNLSSLGITALWLPPAYKGTSRSDVGYGQYDLYDLGEFNQKGTVRTKYGTKAQYLQAIQAAHAAGMQVYADVVFDHKGGADGTEWVDAVEVNPSDRNQEISGTYQIQAWTKFDFPGRGNTYSSFKWRWYHFDGVDWDESRKLSRIYKFRGKAWDWEVDTEFGNYDYLMYADLDMDHPEVVTELKNWGKWYVNTTNIDGFRLDAVKHIKFSFFPDWLSYVRSQTGKPLFTVGEYWSYDINKLHNYITKTNGTMSLFDAPLHNKFYTASKSGGAFDMRTLMTNTLMKDQPTLAVTFVDNHDTEPGQALQSWVDPWFKPLAYAFILTRQEGYPCVFYGDYYGIPQYNIPSLKSKIDPLLIARRDYAYGTQHDYLDHSDIIGWTREGVTEKPGSGLAALITDGPGGSKWMYVGKQHAGKVFYDLTGNRSDTVTINSDGWGEFKVNGGSVSVWVPRKTTVSTIARPITTRPWTGEFVRWTEPRLVAWP

SEQ ID NO: 17380 - protein, 513 aa, Geobacillus stearothermophilus
AAPFNGTMMQYFEWYLPDDGTLWTKVANEANNLSSLGITALWLPPAYKGTSRSDVGYGVYDLYDLGEFNQKGTVRTKYGTKAQYLQAIQAAHAAGMQVYADVVFDHKGGADGTEWVDAVEVNPSDRNQEISGTYQIQAWTKFDFPGRGNTYSSFKWRWYHFDGVDWDESRKLSRIYKFRGKAWDWEVDTEFGNYDYLMYADLDMDHPEVVTELKNWGKWYVNTTNIDGFRLDAVKHIKFSFFPDWLSYVRSQTGKPLFTVGEYWSYDINKLHNYITKTNGTTSLFDAPLHNKFYTASKSGGAFDMRTLMTNTLMKDQPTLAVTFVDNHDTEPGQALQSWVDPWFKPLAYAFILTRQEGYPCVFYGDYYGIPQYNIPSLKSKIDPLLIARRDYAYGTQHDYLDHSDIIGWTREGVTEKPGSGLAALITDGPGGSKWMYVGKQHAGKVFYDLTGNRSDTVTINSDGWGEFKVNGGSVSVWVPRKTTVSTIARPITTRPWTGEFVRWTEPRLVAWP

SEQ ID NO: 17381 - protein, 513 aa, Geobacillus stearothermophilus
AAPFNGTMMQYFEWYLPDDGTLWTKVANEANNLSSLGITALWLPPAYKGTSRSDVGYGVYDLYDLGEFNQKGTVRTKYGTKAQYLQAIQAAHAAGMQVYADVVFDHKGGADGTEWVDAVEVNPSDRNQEISGTYQIQAWTKFDFPGRGNTYSSFKWRWYHFDGVDWDESRKLSRIYKFRGKAWDWEVDTEFGNYDYLMYADLDMDHPEVVTELKNWGKWYVNTTNIDGFRLDAVKHIKFSFFPDWLSYVRSQTGKPLFTVGEYWSYDINKLHNYITKTNGTVSLFDAPLHNKFYTASKSGGAFDMRTLMTNTLMKDQPTLAVTFVDNHDTEPGQALQSWVDPWFKPLAYAFILTRQEGYPCVFYGDYYGIPQYNIPSLKSKIDPLLIARRDYAYGTQHDYLDHSDIIGWTREGVTEKPGSGLAALITDGPGGSKWMYVGKQHAGKVFYDLTGNRSDTVTINSDGWGEFKVNGGSVSVWVPRKTTVSTIARPITTRPWTGEFVRWTEPRLVAWP

SEQ ID NO: 17382 - protein, 514 aa, Geobacillus stearothermophilus
AAPFNGTMMQYFEWYLPDDGTLWTKVANEANNLSSLGITALWLPPAYKGTSRSDVGYGVYDLYDLGEFNQKGTVRTKYGTKAQYLQAIQAAHAAGMQVYADVVFDHKGGADGTEWVDAVEVNPSDRNQEISGTYQIQAWTKFDFPGRGNTYSSFKWRWYHFDGVDWDESRKLSRIYKFRGGKAWDWEVDTENGNYDYLMYADLDMDHPEVVTELKNWGKWYVNTTNIDGFRLDAVKHIKFSFFPDWLSYVRSQTGKPLFTVGEYWSYDINKLHNYITKTNGTMSLFDAPLHNKFYTASKSGGAFDMRTLMTNTLMKDQPTLAVTFVDNHDTEPGQALQSWVDPWFKPLAYAFILTRQEGYPCVFYGDYYGIPQYNIPSLKSKIDPLLIARRDYAYGTQHDYLDHSDIIGWTREGVTEKPGSGLAALITDGPGGSKWMYVGKQHAGKVFYDLTGNRSDTVTINSDGWGEFKVNGGSVSVWVPRKTTVSTIARPITTRPWTGEFVRWTEPRLVAWP

SEQ ID NO: 17383 - protein, 514 aa, Geobacillus stearothermophilus
AAPFNGTMMQYFEWYLPDDGTLWTKVANEANNLSSLGITALWLPPAYKGTSRSDVGYGVYDLYDLGEFNQKGTVRTKYGTKAQYLQAIQAAHAAGMQVYADVVFDHKGGADGTEWVDAVEVNPSDRNQEISGTYQIQAWTKFDFPGRGNTYSSFKWRWYHFDGVDWDESRKLSRIYKFRIGKAWDWEVDTENGNYDYLMYADLDMDHPEVVTELKNWGKWYVNTTNIDGFRLDAVKHIKFSFFPDWLSYVRSQTGKPLFTVGEYWSYDINKLHNYITKTNGTMSLFDAPLHNKFYTASKSGGAFDMRTLMTNTLMKDQPTLAVTFVDNHDTEPGQALQSWVDPWFKPLAYAFILTRQEGYPCVFYGDYYGIPQYNIPSLKSKIDPLLIARRDYAYGTQHDYLDHSDIIGWTREGVTEKPGSGLAALITDGPGGSKWMYVGKQHAGKVFYDLTGNRSDTVTINSDGWGEFKVNGGSVSVWVPRKTTVSTIARPITTRPWTGEFVRWTEPRLVAWP

SEQ ID NO: 17384 - protein, 514 aa, 180
AAPFNGTMMQYFEWYLPDDGTLWTKVANEANNLSSLGITALWLPPAYKGTSRSDVGYGVYDLYDLGEFNQKGTVRTKYGTKAQYLQAIQAAHAAGMQVYADVVFDHKGGADGTEWVDAVEVNPSDRNQEISGTYQIQAWTKFDFPGRGNTYSSFKWRWYHFDGVDWDESRKLSRIYKFRGIKAWDWEVDTENGNYDYLMYADLDMDHPEVVTELKNWGKWYVNTTNIDGFRLDAVKHIKFSFFPDWLSYVRSQTGKPLFTVGEYWSYDINKLHNYITKTNGTMSLFDAPLHNKFYTASKSGGAFDMRTLMTNTLMKDQPTLAVTFVDNHDTEPGQALQSWVDPWFKPLAYAFILTRQEGYPCVFYGDYYGIPQYNIPSLKSKIDPLLIARRDYAYGTQHDYLDHSDIIGWTREGVTEKPGSGLAALITDGPGGSKWMYVGKQHAGKVFYDLTGNRSDTVTINSDGWGEFKVNGGSVSVWVPRKTTVSTIARPITTRPWTGEFVRWTEPRLVAWP

SEQ ID NO: 17385 - protein, 515 aa, Bacillus sp.
AAPFNGTMMQYFEWYLPDDGTLWTKVANEANNLSSLGITALWLPPAYKGTSRSDVGYGVYDLYDLGEFNQKGTVRTKYGTKAQYLQAIQAAHAAGMQVYADVVFDHKGGADGTEWVDAVEVNPSDRNQEISGTYQIQAWTKFDFPGRGNTYSSFKWRWYHFDGVDWDESRKLSRIYKFRGIGKAWDWEVDTENGNYDYLMYADLDMDHPEVVTELKNWGKWYVNTTNIDGFRLDAVKHIKFSFFPDWLSYVRSQTGKPLFTVGEYWSYDINKLHNYITKTDGTMSLFDAPLHNKFYTASKSGGAFDMRTLMTNTLMKDQPTLAVTFVDNHDTEPGQALQSWVDPWFKPLAYAFILTRQEGYPCVFYGDYYGIPQYNIPSLKSKIDPLLIARRDYAYGTQHDYLDHSDIIGWTREGVTEKPGSGLAALITDGPGGSKWMYVGKQHAGKVFYDLTGNRSDTVTINSDGWGEFKVNGGSVSVWVPRKTTVSTITRPITTRPWTGEFVRWTEPRLVAWP

SEQ ID NO: 17386 - protein, 515 aa, Geobacillus stearothermophilus
AAPFNGTMMQYFEWYLPDDGTLWTKVANEANNLSSLGITALWLPPAYKGTSRSDVGYGVYDLYDLGEFNQKGTVRTKYGTKAQYLQAIQAAHAAGMQVYADVVFDHKGGADGTEWVDAVEVNPSDRNQEISGTYQIQAWTKFDFPGRGNTYSSFKWRWYHFDGVDWDESRKLSRIYKFRGHGKAWDWEVDTENGNYDYLMYADLDMDHPEVVTELKNWGKWYVNTTNIDGFRLDAVKHIKFSFFPDWLSYVRSQTGKPLFTVGEYWSYDINKLHNYITKTNGTMSLFDAPLHNKFYTASKSGGAFDMRTLMTNTLMKDQPTLAVTFVDNHDTEPGQALQSWVDPWFKPLAYAFILTRQEGYPCVFYGDYYGIPQYNIPSLKSKIDPLLIARRDYAYGTQHDYLDHSDIIGWTREGVTEKPGSGLAALITDGPGGSKWMYVGKQHAGKVFYDLTGNRSDTVTINSDGWGEFKVNGGSVSVWVPRKTTVSTIARPITTRPWTGEFVRWTEPRLVAWP

SEQ ID NO: 17387 - protein, 515 aa, Geobacillus stearothermophilus
AAPFNGTMMQYFEWYLPDDGTLWTKVANEANNLSSLGITALWLPPAYKGTSRSDVGYGVYDLYDLGEFNQKGTVRTKYGTKAQYLQAIQAAHAAGMQVYADVVFDHKGGADGTEWVDAVEVNPSDRNQEISGTYQIQAWTKFDFPGRGNTYSSFKWRWYHFDGVDWDESRKLSRIYKFRGCGKAWDWEVDTENGNYDYLMYADLDMDHPEVVTELKNWGKWYVNTTNIDGFRLDAVKHIKFSFFPDWLSYVRSQTGKPLFTVGEYWSYDINKLHNYITKTNGTMSLFDAPLHNKFYTASKSGGAFDMRTLMTNTLMKDQPTLAVTFVDNHDTEPGQALQSWVDPWFKPLAYAFILTRQEGYPCVFYGDYYGIPQYNIPSLKSKIDPLLIARRDYAYGTQHDYLDHSDIIGWTREGVTEKPGSGLAALITDGPGGSKWMYVGKQHAGKVFYDLTGNRSDTVTINSDGWGEFKVNGGSVSVWVPRKTTVSTIARPITTRPWTGEFVRWTEPRLVAWP

SEQ ID NO: 17388 - protein, 515 aa, Geobacillus stearothermophilus
AAPFNGTMMQYFEWYLPDDGTLWTKVANEANNLSSLGITALWLPPAYKGTSRSDVGYGVYDLYDLGEFNQKGTVRTKYGTKAQYLQAIQAAHAAGMQVYADVVFDHKGGADGTEWVDAVEVNPSDRNQEISGTYQIQAWTKFDFPGRGNTYSSFKWRWYHFDGVDWDESRKLSRIYKFRGEGKAWDWEVDTENGNYDYLMYADLDMDHPEVVTELKNWGKWYVNTTNIDGFRLDAVKHIKFSFFPDWLSYVRSQTGKPLFTVGEYWSYDINKLHNYITKTNGTMSLFDAPLHNKFYTASKSGGAFDMRTLMTNTLMKDQPTLAVTFVDNHDTEPGQALQSWVDPWFKPLAYAFILTRQEGYPCVFYGDYYGIPQYNIPSLKSKIDPLLIARRDYAYGTQHDYLDHSDIIGWTREGVTEKPGSGLAALITDGPGGSKWMYVGKQHAGKVFYDLTGNRSDTVTINSDGWGEFKVNGGSVSVWVPRKTTVSTIARPITTRPWTGEFVRWTEPRLVAWP

SEQ ID NO: 17389 - protein, 515 aa, Synthetic construct
AAPFNGTMMQYFEWYLPDDGTLWTKVANEANNLSSLGITALWLPPAYKGTSRSDVGYGVYDLYDLGEFNQKGTVRTKYGTKAQYLQAIQAAHAAGMQVYADVVFDHKGGADGTEWVDAVEVNPSDRNQEISGTYQIQAWTKFDFPGRGNTYSSFKWRWYHFDGVDWDESRKLSRIYKFRGIGKAWDWEVDTEXGNYDYLMYADLDMDHPEVVTELKNWGKWYVNTTNIDGFRLDAVKHIKFSFFPDWLSYVRSQTGKPLFTVGEYWSYDINKLHNYITKTNGTMSLFDAPLHNKFYTASKSGGAFDMRTLMTNTLMKDQPTLAVTFVDNHDTEPGQALQSWVDPWFKPLAYAFILTRQEGYPCVFYGDYYGIPQYNIPSLKSKIDPLLIARRDYAYGTQHDYLDHSDIIGWTREGXTEKPGSGLAALITDGPGGSKWMYVGKQHAGKVFYDLTGNRSDTVTINSDGWGEFKVNGGSVSVWVPRKTTVSTIARPITTRPWTGEFVRWTEPRLVAWP

SEQ ID NO: 17390 - protein, 515 aa, Geobacillus stearothermophilus
AAPFNGTMMQYFEWYLPDDGTLWTKVANEANNLSSLGITALWLPPAYKGTSRSDVGYGVYDLYDLGEFNQKGTVRTKYGTKAQYLQAIQAAHAAGMQVYADVVFDHKGGADGTEWVDAVEVNPSDRNQEISGTYQIQAWTKFDFPGRGNTYSSFKWRWYHFDGVDWDESRKLSRIYKFRGIGKAWNWEVDTENGNYDYLMYADLDMNHPEVVTELKNWGKWYVNTTNIDGFRLDAVKHIKFSFFPDWLSYVRSQTGKPLFTVGEYWSYDINKLHNYITKTDGTMSLFDAPLHNKFYTASKSGGAFDMRTLMTNTLMKDQPTLAVTFVDNHDTEPGQALQSWVDPWFKPLAYAFILTRQEGYPCVFYGDYYGIPQYNIPSLKSKIDPLLIARRDYAYGTQHDYLDHSDIIGWTREGGTEKPGSGLAALITDGPGGSKWMYVGKQHAGKVFYDLTGNRSDTVTINSDGWGEFKVNGGSVSVWVPRKTTVSTIARPITTRPWTGEFVRWTEPRLVAWP

SEQ ID NO: 17391 - protein, 515 aa, Geobacillus stearothermophilus
AAPFNGTMMQYFEWYLPDDGTLWTKVANEANNLSSLGITALWLPPAYKGTSRSDVGYGVYDLYDLGEFNQKGTVRTKYGTKAQYLQAIQAAHAAGMQVYADVVFDHKGGADGTEWVDAVEVNPSDRNQEISGTYQIQAWTKFDFPGRGNTYSSFKWRWYHFDGVDWDESRKLSRIYKFRGAGKAWDWEVDTENGNYDYLMYADLDMDHPEVVTELKNWGKWYVNTTNIDGFRLDAVKHIKFSFFPDWLSYVRSQTGKPLFTVGEYWSYDINKLHNYITKTNGTMSLFDAPLHNKFYTASKSGGAFDMRTLMTNTLMKDQPTLAVTFVDNHDTEPGQALQSWVDPWFKPLAYAFILTRQEGYPCVFYGDYYGIPQYNIPSLKSKIDPLLIARRDYAYGTQHDYLDHSDIIGWTREGVTEKPGSGLAALITDGPGGSKWMYVGKQHAGKVFYDLTGNRSDTVTINSDGWGEFKVNGGSVSVWVPRKTTVSTIARPITTRPWTGEFVRWTEPRLVAWP

SEQ ID NO: 17392 - protein, 515 aa, Geobacillus stearothermophilus
AAPFNGTMMQYFEWYLPDDGTLWTKVANEANNLSSLGITALWLPPAYKGTSRSDVGYGVYDLYDLGEFNQKGTVRTKYGTKAQYLQAIQAAHAAGMQVYADVVFDHKGGADGTEWVDAVEVNPSDRNQEISGTYQIQAWTKFDFPGRGNTYSSFKWRWYHFDGVDWDESRKLSRIYKFRGRGKAWDWEVDTENGNYDYLMYADLDMDHPEVVTELKNWGKWYVNTTNIDGFRLDAVKHIKFSFFPDWLSYVRSQTGKPLFTVGEYWSYDINKLHNYITKTNGTMSLFDAPLHNKFYTASKSGGAFDMRTLMTNTLMKDQPTLAVTFVDNHDTEPGQALQSWVDPWFKPLAYAFILTRQEGYPCVFYGDYYGIPQYNIPSLKSKIDPLLIARRDYAYGTQHDYLDHSDIIGWTREGVTEKPGSGLAALITDGPGGSKWMYVGKQHAGKVFYDLTGNRSDTVTINSDGWGEFKVNGGSVSVWVPRKTTVSTIARPITTRPWTGEFVRWTEPRLVAWP

SEQ ID NO: 17393 - protein, 515 aa, Geobacillus stearothermophilus
AAPFNGTMMQYFEWYLPDDGTLWTKVANEANNLSSLGITALWLPPAYKGTSRSDVGYGVYDLYDLGEFNQKGTVRTKYGTKAQYLQAIQAAHAAGMQVYADVVFDHKGGADGTEWVDAVEVNPSDRNQEISGTYQIQAWTKFDFPGRGNTYSSFKWRWYHFDGVDWDESRKLSRIYKFRGPGKAWDWEVDTENGNYDYLMYADLDMDHPEVVTELKNWGKWYVNTTNIDGFRLDAVKHIKFSFFPDWLSYVRSQTGKPLFTVGEYWSYDINKLHNYITKTNGTMSLFDAPLHNKFYTASKSGGAFDMRTLMTNTLMKDQPTLAVTFVDNHDTEPGQALQSWVDPWFKPLAYAFILTRQEGYPCVFYGDYYGIPQYNIPSLKSKIDPLLIARRDYAYGTQHDYLDHSDIIGWTREGVTEKPGSGLAALITDGPGGSKWMYVGKQHAGKVFYDLTGNRSDTVTINSDGWGEFKVNGGSVSVWVPRKTTVSTIARPITTRPWTGEFVRWTEPRLVAWP

SEQ ID NO: 17394 - protein, 515 aa, Geobacillus stearothermophilus
AAPFNGTMMQYFEWYLPDDGTLWTKVANEANNLSSLGITALWLPPAYKGTSRSDVGYGVYDLYDLGEFNQKGTVRTKYGTKAQYLQAIQAAHAAGMQVYADVVFDHKGGADGTEWVDAVEVNPSDRNQEISGTYQIQAWTKFDFPGRGNTYSSFKWRWYHFDGVDWDESRKLSRIYKFRGTGKAWDWEVDTENGNYDYLMYADLDMDHPEVVTELKNWGKWYVNTTNIDGFRLDAVKHIKFSFFPDWLSYVRSQTGKPLFTVGEYWSYDINKLHNYITKTNGTMSLFDAPLHNKFYTASKSGGAFDMRTLMTNTLMKDQPTLAVTFVDNHDTEPGQALQSWVDPWFKPLAYAFILTRQEGYPCVFYGDYYGIPQYNIPSLKSKIDPLLIARRDYAYGTQHDYLDHSDIIGWTREGVTEKPGSGLAALITDGPGGSKWMYVGKQHAGKVFYDLTGNRSDTVTINSDGWGEFKVNGGSVSVWVPRKTTVSTIARPITTRPWTGEFVRWTEPRLVAWP

SEQ ID NO: 17395 - protein, 515 aa, Geobacillus stearothermophilus
AAPFNGTMMQYFEWYLPDDGTLWTKVANEANNLSSLGITALWLPPAYKGTSRSDVGYGVYDLYDLGEFNQKGTVRTKYGTKAQYLQAIQAAHAAGMQVYADVVFDHKGGADGTEWVDAVEVNPSDRNQEISGTYQIQAWTKFDFPGRGNTYSSFKWRWYHFDGVDWDESRKLSRIYKFRGSGKAWDWEVDTENGNYDYLMYADLDMDHPEVVTELKNWGKWYVNTTNIDGFRLDAVKHIKFSFFPDWLSYVRSQTGKPLFTVGEYWSYDINKLHNYITKTNGTMSLFDAPLHNKFYTASKSGGAFDMRTLMTNTLMKDQPTLAVTFVDNHDTEPGQALQSWVDPWFKPLAYAFILTRQEGYPCVFYGDYYGIPQYNIPSLKSKIDPLLIARRDYAYGTQHDYLDHSDIIGWTREGVTEKPGSGLAALITDGPGGSKWMYVGKQHAGKVFYDLTGNRSDTVTINSDGWGEFKVNGGSVSVWVPRKTTVSTIARPITTRPWTGEFVRWTEPRLVAWP

SEQ ID NO: 17396 - protein, 515 aa, Geobacillus stearothermophilus
AAPFNGTMMQYFEWYLPDDGTLWTKVANEANNLSSLGITALWLPPAYKGTSRSDVGYGVYDLYDLGEFNQKGTVRTKYGTKAQYLQAIQAAHAAGMQVYADVVFDHKGGADGTEWVDAVEVNPSDRNQEISGTYQIQAWTKFDFPGRGNTYSSFKWRWYHFDGVDWDESRKLSRIYKFRGIPKAWDWEVDTENGNYDYLMYADLDMDHPEVVTELKNWGKWYVNTTNIDGFRLDAVKHIKFSFFPDWLSYVRSQTGKPLFTVGEYWSYDINKLHNYITKTNGTMSLFDAPLHNKFYTASKSGGAFDMRTLMTNTLMKDQPTLAVTFVDNHDTEPGQALQSWVDPWFKPLAYAFILTRQEGYPCVFYGDYYGIPQYNIPSLKSKIDPLLIARRDYAYGTQHDYLDHSDIIGWTREGVTEKPGSGLAALITDGPGGSKWMYVGKQHAGKVFYDLTGNRSDTVTINSDGWGEFKVNGGSVSVWVPRKTTVSTIARPITTRPWTGEFVRWTEPRLVAWP

SEQ ID NO: 17397 - protein, 515 aa, Geobacillus stearothermophilus
AAPFNGTMMQYFEWYLPDDGTLWTKVANEANNLSSLGITALWLPPAYKGTSRSDVGYGVYDLYDLGEFNQKGTVRTKYGTKAQYLQAIQAAHAAGMQVYADVVFDHKGGADGTEWVDAVEVNPSDRNQEISGTYQIQAWTKFDFPGRGNTYSSFKWRWYHFDGVDWDESRKLSRIYKFRGIAKAWDWEVDTENGNYDYLMYADLDMDHPEVVTELKNWGKWYVNTTNIDGFRLDAVKHIKFSFFPDWLSYVRSQTGKPLFTVGEYWSYDINKLHNYITKTNGTMSLFDAPLHNKFYTASKSGGAFDMRTLMTNTLMKDQPTLAVTFVDNHDTEPGQALQSWVDPWFKPLAYAFILTRQEGYPCVFYGDYYGIPQYNIPSLKSKIDPLLIARRDYAYGTQHDYLDHSDIIGWTREGVTEKPGSGLAALITDGPGGSKWMYVGKQHAGKVFYDLTGNRSDTVTINSDGWGEFKVNGGSVSVWVPRKTTVSTIARPITTRPWTGEFVRWTEPRLVAWP

SEQ ID NO: 17398 - protein, 515 aa, Geobacillus stearothermophilus
AAPFNGTMMQYFEWYLPDDGTLWTKVANEANNLSSLGITALWLPPAYKGTSRSDVGYGVYDLYDLGEFNQKGTVRTKYGTKAQYLQAIQAAHAAGMQVYADVVFDHKGGADGTEWVDAVEVNPSDRNQEISGTYQIQAWTKFDFPGRGNTYSSFKWRWYHFDGVDWDESRKLSRIYKFRGLGKAWDWEVDTENGNYDYLMYADLDMDHPEVVTELKNWGKWYVNTTNIDGFRLDAVKHIKFSFFPDWLSYVRSQTGKPLFTVGEYWSYDINKLHNYITKTNGTMSLFDAPLHNKFYTASKSGGAFDMRTLMTNTLMKDQPTLAVTFVDNHDTEPGQALQSWVDPWFKPLAYAFILTRQEGYPCVFYGDYYGIPQYNIPSLKSKIDPLLIARRDYAYGTQHDYLDHSDIIGWTREGVTEKPGSGLAALITDGPGGSKWMYVGKQHAGKVFYDLTGNRSDTVTINSDGWGEFKVNGGSVSVWVPRKTTVSTIARPITTRPWTGEFVRWTEPRLVAWP

SEQ ID NO: 17399 - protein, 515 aa, Geobacillus stearothermophilus
AAPFNGTMMQYFEWYLPDDGTLWTKVANEANNLSSLGITALWLPPAYKGTSRSDVGYGVYDLYDLGEFNQKGTVRTKYGTKAQYLQAIQAAHAAGMQVYADVVFDHKGGADGTEWVDAVEVNPSDRNQEISGTYQIQAWTKFDFPGRGNTYSSFKWRWYHFDGVDWDESRKLSRIYKFRGGGKAWDWEVDTENGNYDYLMYADLDMDHPEVVTELKNWGKWYVNTTNIDGFRLDAVKHIKFSFFPDWLSYVRSQTGKPLFTVGEYWSYDINKLHNYITKTNGTMSLFDAPLHNKFYTASKSGGAFDMRTLMTNTLMKDQPTLAVTFVDNHDTEPGQALQSWVDPWFKPLAYAFILTRQEGYPCVFYGDYYGIPQYNIPSLKSKIDPLLIARRDYAYGTQHDYLDHSDIIGWTREGVTEKPGSGLAALITDGPGGSKWMYVGKQHAGKVFYDLTGNRSDTVTINSDGWGEFKVNGGSVSVWVPRKTTVSTIARPITTRPWTGEFVRWTEPRLVAWP

SEQ ID NO: 17400 - protein, 515 aa, Geobacillus stearothermophilus
AAPFNGTMMQYFEWYLPDDGTLWTKVANEANNLSSLGITALWLPPAYKGTSRSDVGYGVYDLYDLGEFNQKGTVRTKYGTKAQYLQAIQAAHAAGMQVYADVVFDHKGGADGTEWVDAVEVNPSDRNQEISGTYQIQAWTKFDFPGRGNTYSSFKWRWYHFDGVDWDESRKLSRIYKFRGFGKAWDWEVDTENGNYDYLMYADLDMDHPEVVTELKNWGKWYVNTTNIDGFRLDAVKHIKFSFFPDWLSYVRSQTGKPLFTVGEYWSYDINKLHNYITKTNGTMSLFDAPLHNKFYTASKSGGAFDMRTLMTNTLMKDQPTLAVTFVDNHDTEPGQALQSWVDPWFKPLAYAFILTRQEGYPCVFYGDYYGIPQYNIPSLKSKIDPLLIARRDYAYGTQHDYLDHSDIIGWTREGVTEKPGSGLAALITDGPGGSKWMYVGKQHAGKVFYDLTGNRSDTVTINSDGWGEFKVNGGSVSVWVPRKTTVSTIARPITTRPWTGEFVRWTEPRLVAWP

SEQ ID NO: 17401 - protein, 515 aa, Geobacillus stearothermophilus
AAPFNGTMMQYFEWYLPDDGTLWTKVANEANNLSSLGITALWLPPAYKGTSRSDVGYGVYDLYDLGEFNQKGTVRTKYGTKAQYLQAIQAAHAAGMQVYADVVFDHKGGADGTEWVDAVEVNPSDRNQEISGTYQIQAWTKFDFPGRGNTYSSFKWRWYHFDGVDWDESRKLSRIYKFRGIGKAWDWEVDTENGNYDYLMYADLDMDHPEVVTELKNWGKWYVNTTNIDGFRLDAVKHIKFSFFPDWLSYVRSQTGKPLFTVGEYWSYDINKLHNYITKTNGTMSLFDAPLHNKFYTASKSGGAFDMRTLMTNTLMKDQPTLAVTFVDNHDTEPGQALQSWVDPWFKPLAYAFILTRQEGYPCVFYGDYYGIPQYNIPSLKSKIDPLLIARRDYAYGTQHDYLDHSDIIGWTREGVTEKPGSGLAALITDGPGGSKWMYVGKQHAGKVFYDLTGNRSDTVTINSDGWGEFKVNGGSVSVWVPRKTTVSTIARPITTRPWTGEFVRWTEPRLVAWP

SEQ ID NO: 17402 - protein, 515 aa, Geobacillus stearothermophilus
AAPFNGTMMQYFEWYLPDDGTLWTKVANEANNLSSLGITALWLPPAYKGTSRSDVGYGVYDLYDLGEFNQKGTVRTKYGTKAQYLQAIQAAHAAGMQVYADVVFDHKGGADGTEWVDAVEVNPSDRNQEISGTYQIQAWTKFDFPGRGNTYSSFKWRWYHFDGVDWDESRKLSRIYKFRGDGKAWDWEVDTENGNYDYLMYADLDMDHPEVVTELKNWGKWYVNTTNIDGFRLDAVKHIKFSFFPDWLSYVRSQTGKPLFTVGEYWSYDINKLHNYITKTNGTMSLFDAPLHNKFYTASKSGGAFDMRTLMTNTLMKDQPTLAVTFVDNHDTEPGQALQSWVDPWFKPLAYAFILTRQEGYPCVFYGDYYGIPQYNIPSLKSKIDPLLIARRDYAYGTQHDYLDHSDIIGWTREGVTEKPGSGLAALITDGPGGSKWMYVGKQHAGKVFYDLTGNRSDTVTINSDGWGEFKVNGGSVSVWVPRKTTVSTIARPITTRPWTGEFVRWTEPRLVAWP

SEQ ID NO: 17403 - protein, 515 aa, Geobacillus stearothermophilus
AAPFNGTMMQYFEWYLPDDGTLWTKVANEANNLSSLGITALWLPPAYKGTSRSDVGYGVYDLYDLGEFNQKGTVRTKYGTKAQYLQAIQAAHAAGMQVYADVVFDHKGGADGTEWVDAVEVNPSDRNQEISGTYQIQAWTKFDFPGRGNTYSSFKWRWYHFDGVDWDESRKLSRIYKFRGVGKAWDWEVDTENGNYDYLMYADLDMDHPEVVTELKNWGKWYVNTTNIDGFRLDAVKHIKFSFFPDWLSYVRSQTGKPLFTVGEYWSYDINKLHNYITKTNGTMSLFDAPLHNKFYTASKSGGAFDMRTLMTNTLMKDQPTLAVTFVDNHDTEPGQALQSWVDPWFKPLAYAFILTRQEGYPCVFYGDYYGIPQYNIPSLKSKIDPLLIARRDYAYGTQHDYLDHSDIIGWTREGVTEKPGSGLAALITDGPGGSKWMYVGKQHAGKVFYDLTGNRSDTVTINSDGWGEFKVNGGSVSVWVPRKTTVSTIARPITTRPWTGEFVRWTEPRLVAWP

SEQ ID NO: 17404 - protein, 515 aa, Geobacillus stearothermophilus
AAPFNGTMMQYFEWYLPDDGTLWTKVANEANNLSSLGITALWLPPAYKGTSRSDVGYGVYDLYDLGEFNQKGTVRTKYGTKAQYLQAIQAAHAAGMQVYADVVFDHKGGADGTEWVDAVEVNPSDRNQEISGTYQIQAWTKFDFPGRGNTYSSFKWRWYHFDGVDWDESRKLSRIYKFRGISKAWDWEVDTENGNYDYLMYADLDMDHPEVVTELKNWGKWYVNTTNIDGFRLDAVKHIKFSFFPDWLSYVRSQTGKPLFTVGEYWSYDINKLHNYITKTNGTMSLFDAPLHNKFYTASKSGGAFDMRTLMTNTLMKDQPTLAVTFVDNHDTEPGQALQSWVDPWFKPLAYAFILTRQEGYPCVFYGDYYGIPQYNIPSLKSKIDPLLIARRDYAYGTQHDYLDHSDIIGWTREGVTEKPGSGLAALITDGPGGSKWMYVGKQHAGKVFYDLTGNRSDTVTINSDGWGEFKVNGGSVSVWVPRKTTVSTIARPITTRPWTGEFVRWTEPRLVAWP

SEQ ID NO: 17405 - protein, 515 aa, Geobacillus stearothermophilus
AAPFNGTMMQYFEWYLPDDGTLWTKVANEANNLSSLGITALWLPPAYKGTSRSDVGYGVYDLYDLGEFNQKGTVRTKYGTKAQYLQAIQAAHAAGMQVYADVVFDHKGGADGTEWVDAVEVNPSDRNQEISGTYQIQAWTKFDFPGRGNTYSSFKWRWYHFDGVDWDESRKLSRIYKFRGYGKAWDWEVDTENGNYDYLMYADLDMDHPEVVTELKNWGKWYVNTTNIDGFRLDAVKHIKFSFFPDWLSYVRSQTGKPLFTVGEYWSYDINKLHNYITKTNGTMSLFDAPLHNKFYTASKSGGAFDMRTLMTNTLMKDQPTLAVTFVDNHDTEPGQALQSWVDPWFKPLAYAFILTRQEGYPCVFYGDYYGIPQYNIPSLKSKIDPLLIARRDYAYGTQHDYLDHSDIIGWTREGVTEKPGSGLAALITDGPGGSKWMYVGKQHAGKVFYDLTGNRSDTVTINSDGWGEFKVNGGSVSVWVPRKTTVSTIARPITTRPWTGEFVRWTEPRLVAWP

SEQ ID NO: 17406 - protein, 514 aa, Geobacillus stearothermophilus
APFNGTMMQYFEWYLPDDGTLWTKVANEANNLSSLGITALWLPPAYKGTSRSDVGYGVYDLYDLGEFNQKGTVRTKYGTKAQYLQAIQAAHAAGMQVYADVVFDHKGGADGTEWVDAVEVNPSDRNQEISGTYQIQAWTKFDFPGRGNTYSSFKWRWYHFDGVDWDESRKLSRIYKFRGIGKAWDWEVDTENGNYDYLMYADLDMDHPEVVTELKNWGKWYVNTTNIDGFRLDAVKHIKFSFFPDWLSYVRSQTGKPLFTVGEYWSYDINKLHNYITKTNGTMSLFDAPLHNKFYTASKSGGAFDMRTLMTNTLMKDQPTLAVTFVDNHDTEPGQALQSWVDPWFKPLAYAFILTRQEGYPCVFYGDYYGIPQYNIPSLKSKIDPLLIARRDYAYGTQHDYLDHSDIIGWTREGVTEKPGSGLAALITDGPGGSKWMYVGKQHAGKVFYDLTGNRSDTVTINSDGWGEFKVNGGSVSVWVPRKTTVSTIARPITTRPWTGEFVRWTEPRLVAWP

SEQ ID NO: 17407 - protein, 498 aa, Aspergillus oryzae
MVAWWSLFLYGLQVAAPALAATPADWRSQSIYFLLTDRFARTDGSTTATCNTADQKYCGGTWQGIIDKLDYIQGMGFTAIWITPVTAQLPQTTAYGDAYHGYWQQDIYSLNENYGTADDLKALSSALHERGMYLMVDVVANHMGYDGAGSSVDYSVFKPFSSQDYFHPFCLIQNYEDQTQVEDCWLGDNTVSLPDLDTTKDVVKNEWYDWVGSLVSNYSIDGLRIDTVKHVQKDFWPGYNKAAGVYCIGEVLDGDPAYTCPYQNVMDGVLNYPIYYPLLNAFKSTSGSMHDLYNMINTVKSDCPDSTLLGTFVENHDNPRFASYTNDIALAKNVAAFIILNDGIPIIYAGQEQHYAGGNDPANREATWASGYPTDSELYKLIASANAIRNYAISKDTGFVTYKNWPIYKDDTTIAMRKGTDGSQIVTILSNKGASGDSYTLSLSGAGYTAGQQLTEVIGCTTVTVGSDGNVPVPMAGGLPRVLYPTEKLAGSKICSSS

SEQ ID NO: 17408 - protein, 498 aa, Aspergillus oryzae
MVAWWSLFLYGLQVAAPALAATPADWRSQSIYFLLTDRFARTDGSTTATCNTADQKYCGGTWQGIIDKLDYIQGMGFTAIWITPVTAQLPQTTAYGDAYHGYWQQDIYSLNENYGTADDLKALSSALHERGMYLMVDVVANHMGYDGAGSSVDYSVFKPFSSQDYFHPFCFIQNYEDQTQVEYCWLGDNTVSLLDLDTTKDVVKNEWYDWVGSLVSNYSIDGLRIDTVKHVQKDFWPGYNKAAGVYCIGEVLDVDPAYTCPYQNVMDGVLNYPIYYPLLNAFKSTSGSMDDLYNMINTVKSDCPDSTLLGTFVENHDNPRFASYTNDIALAKNVAAFIILNDGIPIIYAGQEQHYAGGNDPANREATWLSGYPTDSELYKLIASANAIRNYAISKDTGFVTYKNWPIYKDDTTIAMRKGTDGSQIVTILSNKGASGDSYTLSLSGAGYTAGQQLTEVIGCTTVTVGSDGNVPVPMAGGLPRVLYPTEKLAGSKICSSS

SEQ ID NO: 17409 - protein, 498 aa, Aspergillus oryzae
MVAWWSLFLYGLQVAAPALAATPADWRSQSIYFLLTDRFARTDGSTTATCNTADQKYCGNTWQGIIDKLDYIQGMGFTAIWITPVTAQLPQTTAYGDAYHGYWQQDIYSLNENYGTADDLKALSSALHERGMYLMVDVVANHMGYDGAGSSVDYSVFKPFSSQDYFHPFCFIQNYEDQTQVEDCWLGDNTVSLPDLDTTKDVVKNEWYDWVGSLVSNYSIDGLRIDTVKHVQKDFWPGYNKAAGVYCIGEVLDGDPAYTCPYQKVLDGVLNYPIYYPLLNAFKSTSGSMDDLYNMINTVKSDCPDSTLLGTFVENHDNPRFASYTNDIALAKNVAAFIILNDGIPIIYAGQEQHYAGGNDPANREATWLSGYPTDSELYKLIASANAIRNYAISKDTGFVTYKNWPIYKDDTTIAMRKGTDGSQIVTILSNKGASGDSYTLSLSGAGYTAGQQLTEVIGCTTVTVGSDGNVPVPMAGGLPRVLYPTEKLAGSKICSSS

SEQ ID NO: 17410 - protein, 498 aa, Aspergillus oryzae
MVAWWSLFLYGLQVAAPALAATPADWRSQSIYFLLTDRFARTDGSTTATCNTADQKYCGGTWQGIIDKLDYIQGMGFTAIWITPVTAQLPQTTAYGDAYHGYWQQDIYSLNENYGTADDLKALSSALHERGMYLMVDVVANHMGYDGAGSSVDYSVFKPFSSQDYFHPFCFIQNYEDPTQVEDCWLGDNTVSLPDLDTTKDVVKNEWYDWVGSLVSNYSIDGLRIDTVKHVQKDFWPGYNKAAGVYCIGEVLDGDPAYTCPYQNVMDGVLNYPIYYPLLNAFKSTSGSMDDLYNMINTVKSDCPDSTLLGTFVENHDNPRFASYTNDIALAKNVAAFIILNDGIPIIYAGQEQHYAGGNDPANREATWLSGYPTDSELYKLIASANAIRNYAISKDTGFVTYKNWPIYKDDTTIAMRKGTDGSQIVTILSNKGASGDSYTLSLSGAGYTAGQQLTEVIGCTTVTVGSDGNVPVPMAGGLKVVYPRTEKLAGSKICSSS

SEQ ID NO: 17411 - protein, 491 aa, Geobacillus stearothermophilus
AAPFNGTMMQYFEWYLPDDGTLWTKVANEANNLSSLGITALWLPPAYKGTSRSDVGYGAYDLYDLGEFNQKGTVRTKYGTKAQYLQAIQAAHAAGMQVYADVVFDHKGGADGTEWVDAVEVNPSDRNQVISGTYQIQAWTKFDFPGRGNTYSSFKWRWYHFDGVDWDESRKLSRIYLFSGKQWPWEVDNEFGNYDYLMYADLDMDHPEVTTELKNWGKWYVNTTNIDGFRLDAVKHIKFYFFPDWLSYVRSSTGKPLFTVGEYWSGDINKLHNYITKTDGTVSLFDAPLHYKFYNASKSGGAFDMRTLMTNTLMKDQPTLAVTFVDNHDTEPGQALQSWVDPWFKPLAYAFILTRQEGYPCVFYGDYYGIPQYNIPSLKSKIDPLLIARRDYAYGTQHDYLDHSDIIGWTREGGTEKPGSGLAALITDGPGGSKWMYVGKQHAGKVFYDLTGNRSDTVTINSDGWGEFKVNGGSVSVWVPRKTTVSTIARP

SEQ ID NO: 17412 - protein, 491 aa, Geobacillus stearothermophilus
AAPFNGTMMQYFEWYLPDDGTLWTKVANEANNLSSLGITALWLPPAYKGTSRSDVGYGAYDLYDLGEFNQKGTVRTKYGTKAQYLQAIQAAHAAGMQVYADVVFDHKGGADGTEWVDAVEVNPSDRNQVISGTYQIQAWTKFDFPGRGNTYSSFKWRWYHFDGVDWDESRKLSRIYLFEGKAWDWPVDTEFGNYDYLMYADLDMDHPEVTTELKNWGKWYVNTTNIDGFRLDAVKHIKFYFFPDWLSYVRSSTGKPLFTVGEYWSGDINKLHNYITITDGTVSLFDAPLHYKFYNASKSGGAFDMRTLMTNTLMKDQPTLAVTFVDNHDTEPGQALQSWVDPWFKPLAYAFILTRQEGYPCVFYGDYYGIPQYNIPSLKSKIDPLLIARRDYAYGTQHDYLDHSDIIGWTREGGTEKPGSGLAALITDGPGGSKWMYVGKQHAGKVFYDLTGNRSDTVTINSDGWGEFKVNGGSVSVWVPRKTTVSTIARP

SEQ ID NO: 17413 - protein, 488 aa, Geobacillus stearothermophilus
AAPFNGTMMQYFEWYLPDDGTLWTKVANEANNLSSLGITALWLPPAYKGTSRSDVGYGAYDLYDLGEFNQKGTVRTKYGTKAQYLQAIQAAHAAGMQVYADVVFDHKGGADGTEWVDAVEVNPSDRNQEISGTYQIQAWTKFDFPGRGNTYSSFKWRWYHFDGVDWDESRKLSRIYKFRGXXKAWDWEVDTEFGNYDYLMYADLDMDHPEVVTELKNWGKWYVNTTNIDGFRLDAVKHIKFSFFPDWLSYVRSQTGKPLFTVGEYWSYDINKLHNYITKTNGTMSLFDAPLHNKFYTASKSGGAFDMRTLMTNTLMKDQPTLAVTFVDNHDTEPGQALQSWVDPWFKPLAYAFILTRQEGYPCVFYGDYYGIPQYNIPSLKSKIDPLLIARRDYAYGTQHDYLDHSDIIGWTREGVTEKPGSGLAALITDGPGGSKWMYVGKQHAGKVFYDLTGNRSDTVTINSDGWGEFKVNGGSVSVWVPRKTTVS

SEQ ID NO: 17414 - protein, 488 aa, Geobacillus stearothermophilus
AAPFNGTMMQYFEWYLPDDGTLWTKVANEANNLSSLGITALWLPPAYKGTSRSDVGYGVYDLYDLGEFNQKGTVRTKYGTKAQYLQAIQAAHAAGMQVYADVVFDHKGGADGTEWVDAVEVNPSDRNQEISGTYQIQAWTKFDFPGRGNTYSSFKWRWYHFDGVDWDESRKLSRIYKFRGXXKAWDWEVDTEFGNYDYLMYADLDMDHPEVVTELKNWGKWYVNTTNIDGFRLDAVKHIKFSFFPDWLSYVRSQTGKPLFTVGEYWSYDINKLHNYITKTNGTVSLFDAPLHNKFYTASKSGGAFDMRTLMTNTLMKDQPTLAVTFVDNHDTEPGQALQSWVDPWFKPLAYAFILTRQEGYPCVFYGDYYGIPQYNIPSLKSKIDPLLIARRDYAYGTQHDYLDHSDIIGWTREGVTEKPGSGLAALITDGPGGSKWMYVGKQHAGKVFYDLTGNRSDTVTINSDGWGEFKVNGGSVSVWVPRKTTVS

SEQ ID NO: 17415 - protein, 487 aa, Geobacillus stearothermophilus
AAPFNGTMMQYFEWYLPDDGTLWTKVANEANNLSSLGITALWLPPAYKGTSRSDVGYGVYDLYDLGEFNQKGTVRTKYGTKAQYLQAIQAAHAAGMQVYADVVFDHKGGADGTEWVDAVEVNPSDRNQEISGTYQIQAWTKFDFPGRGNTYSSFKWRWYHFDGVDWDESRKLSRIYKFRGGKAWDWEVDTENGNYDYLMYADLDMDHPEVVTELKNWGKWYVNTTNIDGFRLDAVKHIKFSFFPDWLSYVRSQTGKPLFTVGEYWSYDINKLHNYITKTNGTMSLFDAPLHNKFYTASKSGGAFDMRTLMTNTLMKDQPTLAVTFVDNHDTEPGQALQSWVDPWFKPLAYAFILTRQEGYPCVFYGDYYGIPQYNIPSLKSKIDPLLIARRDYAYGTQHDYLDHSDIIGWTREGVTEKPGSGLAALITDGPGGSKWMYVGKQHAGKVFYDLTGNRSDTVTINSDGWGEFKVNGGSVSVWVPRKTTVS

SEQ ID NO: 17416 - protein, 486 aa, Geobacillus stearothermophilus
AAPFNGTMMQYFEWYLPDDGTLWTKVANEANNLSSLGITALWLPPAYKGTSRSDVGYGVYDLYDLGEFNQKGTVRTKYGTKAQYLQAIQAAHAAGMQVYADVVFDHKGGADGTEWVDAVEVNPSDRNQEISGTYQIQAWTKFDFPGRGNTYSSFKWRWYHFDGVDWDESRKLSRIYKFRGKAWDWEVDTEFGNYDYLMYADLDMDHPEVVTELKNWGPWYVLTTNIDGFRLDAVKHIKFSFFPDWLSYVRSSTGKPLFTVGEYWSYDINKLHNYITKTDGTMSLFDAPLHNKFYTASKSGGAFDMRTLMTNTLMKDQPTLAVTFVDNHDTEPGQALQSWVDPWFKPLAYAFILTRQEGYPCVFYGDYYGIPQYNIPSLKSKIDPLLIARRDYAYGTQHDYLDHSDIIGWTREGGTEKPGSGLAALITDGPGGSKWMYVGKQHAGKVFYDLTGNRSDTVTINSDGWGEFKVNGGSVSVWVPRKTTVS

SEQ ID NO: 17417 - protein, 488 aa, Geobacillus stearothermophilus
AAPFNGTMMQYFEWYLPDDGTLWTKVANEANNLSSLGITALWLPPAYKGTSRSDVGYGVYDLYDLGEFNQKGTVRTKYGTKAQYLQAIQAAHAAGMQVYADVVFDHKGGADGTEWVDAVEVNPSDRNQEISGTYQIQAWTKFDFPGRGNTYSSFKWRWYHFDGVDWDESRKLSRIYKFRGXXKAWDWEVDTEFGNYDYLMYADLDMDHPEVVTELKNWGKWYVNTTNIDGFRLDAVKHIKFSFFPDWLSYVRSQTGKPLFTVGEYWSYDINKLHNYITKTNGTTSLFDAPLHNKFYTASKSGGAFDMRTLMTNTLMKDQPTLAVTFVDNHDTEPGQALQSWVDPWFKPLAYAFILTRQEGYPCVFYGDYYGIPQYNIPSLKSKIDPLLIARRDYAYGTQHDYLDHSDIIGWTREGVTEKPGSGLAALITDGPGGSKWMYVGKQHAGKVFYDLTGNRSDTVTINSDGWGEFKVNGGSVSVWVPRKTTVS

SEQ ID NO: 17418 - protein, 487 aa, Geobacillus stearothermophilus
AAPFNGTMMQYFEWYLPDDGTLWTKVANEANNLSSLGITALWLPPAYKGTSRSDVGYGVYDLYDLGEFNQKGTVRTKYGTKAQYLQAIQAAHAAGMQVYADVVFDHKGGADGTEWVDAVEVNPSDRNQEISGTYQIQAWTKFDFPGRGNTYSSFKWRWYHFDGVDWDESRKLSRIYKFRIGKAWDWEVDTENGNYDYLMYADLDMDHPEVVTELKNWGKWYVNTTNIDGFRLDAVKHIKFSFFPDWLSYVRSQTGKPLFTVGEYWSYDINKLHNYITKTNGTMSLFDAPLHNKFYTASKSGGAFDMRTLMTNTLMKDQPTLAVTFVDNHDTEPGQALQSWVDPWFKPLAYAFILTRQEGYPCVFYGDYYGIPQYNIPSLKSKIDPLLIARRDYAYGTQHDYLDHSDIIGWTREGVTEKPGSGLAALITDGPGGSKWMYVGKQHAGKVFYDLTGNRSDTVTINSDGWGEFKVNGGSVSVWVPRKTTVS

SEQ ID NO: 17419 - protein, 488 aa, Geobacillus stearothermophilus
AAPFNGTMMQYFEWYLPDDGTLWTKVANEANNLSSLGITALWLPPAYKGTSRSDVGYGEYDLYDLGEFNQKGTVRTKYGTKAQYLQAIQAAHAAGMQVYADVVFDHKGGADGTEWVDAVEVNPSDRNQEISGTYQIQAWTKFDFPGRGNTYSSFKWRWYHFDGVDWDESRKLSRIYKFRGXXKAWDWEVDTEFGNYDYLMYADLDMDHPEVVTELKNWGKWYVNTTNIDGFRLDAVKHIKFSFFPDWLSYVRSQTGKPLFTVGEYWSYDINKLHNYITKTNGTMSLFDAPLHNKFYTASKSGGAFDMRTLMTNTLMKDQPTLAVTFVDNHDTEPGQALQSWVDPWFKPLAYAFILTRQEGYPCVFYGDYYGIPQYNIPSLKSKIDPLLIARRDYAYGTQHDYLDHSDIIGWTREGVTEKPGSGLAALITDGPGGSKWMYVGKQHAGKVFYDLTGNRSDTVTINSDGWGEFKVNGGSVSVWVPRKTTVS

SEQ ID NO: 17420 - protein, 488 aa, Geobacillus stearothermophilus
AAPFNGTMMQYFEWYLPDDGTLWTKVANEANNLSSLGITALWLPPAYKGTSRSDVGYGVYDLYDLGEFNQKGTVRTKYGTKAQYLQAIQAAHAAGMQVYADVVFDHKGGADGTEWVDAVEVNPSDRNQEISGTYQIQAWTKFDFPGRGNTYSSFKWRWYHFDGVDWDESRKLSRIYKFRGAGKAWDWEVDTENGNYDYLMYADLDMDHPEVVTELKNWGKWYVNTTNIDGFRLDAVKHIKFSFFPDWLSYVRSQTGKPLFTVGEYWSYDINKLHNYITKTNGTMSLFDAPLHNKFYTASKSGGAFDMRTLMTNTLMKDQPTLAVTFVDNHDTEPGQALQSWVDPWFKPLAYAFILTRQEGYPCVFYGDYYGIPQYNIPSLKSKIDPLLIARRDYAYGTQHDYLDHSDIIGWTREGVTEKPGSGLAALITDGPGGSKWMYVGKQHAGKVFYDLTGNRSDTVTINSDGWGEFKVNGGSVSVWVPRKTTVS

SEQ ID NO: 17421 - protein, 486 aa, Geobacillus stearothermophilus
AAPFNGTMMQYFEWYLPDDGTLWTKVANEANNLSSLGITALWLPPAYKGTSRSDVGYGVYDLYDLGEFNQKGTVRTKYGTKAQYLQAIQAAHAAGMQVYADVVFDHKGGADGTEWVDAVEVNPSDRNQEISGTYQIQAWTKFDFPGRGNTYSSFKWRWYHFDGVDWDESRKLSRIYKFRGKAWDWEVDTEFGNYDYLMYADLDMDHPEVVTELKNWGKWYVNTTNIDGFRLDAVKHIKFSFFPDWLSYVRSQTGKPLFTVGEYWSYDINKLHNYITKTNGTTSLFDAPLHNKFYTASKSGGAFDMRTLMTNTLMKDQPTLAVTFVDNHDTEPGQALQSWVDPWFKPLAYAFILTRQEGYPCVFYGDYYGIPQYNIPSLKSKIDPLLIARRDYAYGTQHDYLDHSDIIGWTREGVTEKPGSGLAALITDGPGGSKWMYVGKQHAGKVFYDLTGNRSDTVTINSDGWGEFKVNGGSVSVWVPRKTTVS

SEQ ID NO: 17422 - protein, 488 aa, Geobacillus stearothermophilus
AAPFNGTMMQYFEWYLPDDGTLWTKVANEANNLSSLGITALWLPPAYKGTSRSDVGYGVYDLYDLGEFNQKGTVRTKYGTKAQYLQAIQAAHAAGMQVYADVVFDHKGGADGTEWVDAVEVNPSDRNQEISGTYQIQAWTKFDFPGRGNTYSSFKWRWYHFDGVDWDESRKLSRIYKFRGIGKAWNWEVDTENGNYDYLMYADLDMNHPEVVTELKNWGKWYVNTTNIDGFRLDAVKHIKFSFFPDWLSYVRSQTGKPLFTVGEYWSYDINKLHNYITKTDGTMSLFDAPLHNKFYTASKSGGAFDMRTLMTNTLMKDQPTLAVTFVDNHDTEPGQALQSWVDPWFKPLAYAFILTRQEGYPCVFYGDYYGIPQYNIPSLKSKIDPLLIARRDYAYGTQHDYLDHSDIIGWTREGGTEKPGSGLAALITDGPGGSKWMYVGKQHAGKVFYDLTGNRSDTVTINSDGWGEFKVNGGSVSVWVPRKTTVS

SEQ ID NO: 17423 - protein, 488 aa, Geobacillus stearothermophilus
AAPFNGTMMQYFEWYLPDDGTLWTKVANEANNLSSLGITALWLPPAYKGTSRSDVGYGVYDLYDLGEFNQKGTVRTKYGTKAQYLQAIQAAHAAGMQVYADVVFDHKGGADGTEWVDAVEVNPSDRNQEISGTYQIQAWTKFDFPGRGNTYSSFKWRWYHFDGVDWDESRKLSRIYKFRGCGKAWDWEVDTENGNYDYLMYADLDMDHPEVVTELKNWGKWYVNTTNIDGFRLDAVKHIKFSFFPDWLSYVRSQTGKPLFTVGEYWSYDINKLHNYITKTNGTMSLFDAPLHNKFYTASKSGGAFDMRTLMTNTLMKDQPTLAVTFVDNHDTEPGQALQSWVDPWFKPLAYAFILTRQEGYPCVFYGDYYGIPQYNIPSLKSKIDPLLIARRDYAYGTQHDYLDHSDIIGWTREGVTEKPGSGLAALITDGPGGSKWMYVGKQHAGKVFYDLTGNRSDTVTINSDGWGEFKVNGGSVSVWVPRKTTVS

SEQ ID NO: 17424 - protein, 488 aa, Geobacillus stearothermophilus
AAPFNGTMMQYFEWYLPDDGTLWTKVANEANNLSSLGITALWLPPAYKGTSRSDVGYGVYDLYDLGEFNQKGTVRTKYGTKAQYLQAIQAAHAAGMQVYADVVFDHKGGADGTEWVDAVEVNPSDRNQEISGTYQIQAWTKFDFPGRGNTYSSFKWRWYHFDGVDWDESRKLSRIYKFRGIAKAWDWEVDTENGNYDYLMYADLDMDHPEVVTELKNWGKWYVNTTNIDGFRLDAVKHIKFSFFPDWLSYVRSQTGKPLFTVGEYWSYDINKLHNYITKTNGTMSLFDAPLHNKFYTASKSGGAFDMRTLMTNTLMKDQPTLAVTFVDNHDTEPGQALQSWVDPWFKPLAYAFILTRQEGYPCVFYGDYYGIPQYNIPSLKSKIDPLLIARRDYAYGTQHDYLDHSDIIGWTREGVTEKPGSGLAALITDGPGGSKWMYVGKQHAGKVFYDLTGNRSDTVTINSDGWGEFKVNGGSVSVWVPRKTTVS

SEQ ID NO: 17425 - protein, 488 aa, Geobacillus stearothermophilus
AAPFNGTMMQYFEWYLPDDGTLWTKVANEANNLSSLGITALWLPPAYKGTSRSDVGYGIYDLYDLGEFNQKGTVRTKYGTKAQYLQAIQAAHAAGMQVYADVVFDHKGGADGTEWVDAVEVNPSDRNQEISGTYQIQAWTKFDFPGRGNTYSSFKWRWYHFDGVDWDESRKLSRIYKFRGXXKAWDWEVDTEFGNYDYLMYADLDMDHPEVVTELKNWGKWYVNTTNIDGFRLDAVKHIKFSFFPDWLSYVRSQTGKPLFTVGEYWSYDINKLHNYITKTNGTMSLFDAPLHNKFYTASKSGGAFDMRTLMTNTLMKDQPTLAVTFVDNHDTEPGQALQSWVDPWFKPLAYAFILTRQEGYPCVFYGDYYGIPQYNIPSLKSKIDPLLIARRDYAYGTQHDYLDHSDIIGWTREGVTEKPGSGLAALITDGPGGSKWMYVGKQHAGKVFYDLTGNRSDTVTINSDGWGEFKVNGGSVSVWVPRKTTVS

SEQ ID NO: 17426 - protein, 488 aa, Geobacillus stearothermophilus
AAPFNGTMMQYFEWYLPDDGTLWTKVANEANNLSSLGITALWLPPAYKGTSRSDVGYGVYDLYDLGEFNQKGTVRTKYGTKAQYLQAIQAAHAAGMQVYADVVFDHKGGADGTEWVDAVEVNPSDRNQEISGTYQIQAWTKFDFPGRGNTYSSFKWRWYHFDGVDWDESRKLSRIYKFRGIPKAWDWEVDTENGNYDYLMYADLDMDHPEVVTELKNWGKWYVNTTNIDGFRLDAVKHIKFSFFPDWLSYVRSQTGKPLFTVGEYWSYDINKLHNYITKTNGTMSLFDAPLHNKFYTASKSGGAFDMRTLMTNTLMKDQPTLAVTFVDNHDTEPGQALQSWVDPWFKPLAYAFILTRQEGYPCVFYGDYYGIPQYNIPSLKSKIDPLLIARRDYAYGTQHDYLDHSDIIGWTREGVTEKPGSGLAALITDGPGGSKWMYVGKQHAGKVFYDLTGNRSDTVTINSDGWGEFKVNGGSVSVWVPRKTTVS

SEQ ID NO: 17427 - protein, 488 aa, Geobacillus stearothermophilus
AAPFNGTMMQYFEWYLPDDGTLWTKVANEANNLSSLGITALWLPPAYKGTSRSDVGYGVYDLYDLGEFNQKGTVRTKYGTKAQYLQAIQAAHAAGMQVYADVVFDHKGGADGTEWVDAVEVNPSDRNQEISGTYQIQAWTKFDFPGRGNTYSSFKWRWYHFDGVDWDESRKLSRIYKFRGIGKAWDWEVDTEXGNYDYLMYADLDMDHPEVVTELKNWGKWYVNTTNIDGFRLDAVKHIKFSFFPDWLSYVRSQTGKPLFTVGEYWSYDINKLHNYITKTNGTMSLFDAPLHNKFYTASKSGGAFDMRTLMTNTLMKDQPTLAVTFVDNHDTEPGQALQSWVDPWFKPLAYAFILTRQEGYPCVFYGDYYGIPQYNIPSLKSKIDPLLIARRDYAYGTQHDYLDHSDIIGWTREGXTEKPGSGLAALITDGPGGSKWMYVGKQHAGKVFYDLTGNRSDTVTINSDGWGEFKVNGGSVSVWVPRKTTVS

SEQ ID NO: 17428 - protein, 486 aa, Geobacillus stearothermophilus
AAPFNGTMMQYFEWYLPDDGTLWTKVANEANNLSSLGITALWLPPAYKGTSRSDVGYGVYDLYDLGEFNQKGTVRTKYGTKAQYLQAIQAAHAAGMQVYADVVFDHKGGADGTEWVDAVEVNPSDRNQVISGTYQIQAWTKFDFPGRGNTYSSFKWRWYHFDGVDWDESRKLSRIYLFVGKAWDWEVDTEFGNYDYLMYADLDMDHPEVVTELKNWGKWYVNTTNIDGFRLDAVKHIKFSFFPDWLSYVRSQTGKPLFTVGEYWSYDINKLHNYITKTDGTMSLFDAPLHNKFYTASKSGGAFDMRTLMTNTLMKDQPTLAVTFVDNHDTEPGQALQSWVDPWFKPLAYAFILTRQEGYPCVFYGDYYGIPQYNIPSLKSKIDPLLIARRDYAYGTQHDYLDHSDIIGWTREGGTEKPGSGLAALITDGPGGSKWMYVGKQHAGKVFYDLTGNRSDTVTINSDGWGEFKVNGGSVSVWVPRKTTVS

SEQ ID NO: 17429 - protein, 488 aa, Geobacillus stearothermophilus
AAPFNGTMMQYFEWYLPDDGTLWTKVANEANNLSSLGITALWLPPAYKGTSRSDVGYGVYDLYDLGEFNQKGTVRTKYGTKAQYLQAIQAAHAAGMQVYADVVFDHKGGADGTEWVDAVEVNPSDRNQEISGTYQIQAWTKFDFPGRGNTYSSFKWRWYHFDGVDWDESRKLSRIYKFRGPGKAWDWEVDTENGNYDYLMYADLDMDHPEVVTELKNWGKWYVNTTNIDGFRLDAVKHIKFSFFPDWLSYVRSQTGKPLFTVGEYWSYDINKLHNYITKTNGTMSLFDAPLHNKFYTASKSGGAFDMRTLMTNTLMKDQPTLAVTFVDNHDTEPGQALQSWVDPWFKPLAYAFILTRQEGYPCVFYGDYYGIPQYNIPSLKSKIDPLLIARRDYAYGTQHDYLDHSDIIGWTREGVTEKPGSGLAALITDGPGGSKWMYVGKQHAGKVFYDLTGNRSDTVTINSDGWGEFKVNGGSVSVWVPRKTTVS

SEQ ID NO: 17430 - protein, 488 aa, Geobacillus sp
AAPFNGTMMQYFEWYLPDDGTLWTKVANEANNLSSLGITALWLPPAYKGTSRSDVGYGVYDLYDLGEFNQKGTVRTKYGTKAQYLQAIQAAHAAGMQVYADVVFDHKGGADGTEWVDAVEVNPSDRNQEISGTYQIQAWTKFDFPGRGNTYSSFKWRWYHFDGVDWDESRKLSRIYKFRGIGKAWDWEVDTENGNYDYLMYADLDMDHPEVVTELKNWGKWYVNTTNIDGFRLDAVKHIKFSFFPDWLSYVRSQTGKPLFTVGEYWSYDINKLHNYITKTDGTMSLFDAPLHNKFYTASKSGGAFDMRTLMTNTLMKDQPTLAVTFVDNHDTEPGQALQSWVDPWFKPLAYAFILTRQQGYPCVFYGDYYGIPQYNIPSLKSKIDPLLIARRDYAYGTQHDYLDHSDIIGWTREGVTEKPGSGLAALITDGPGGSKWMYVGKQHAGKVFYDLTGNRSDTVTINSDGWGEFKVNGGSVSVWVPRKTTVS

SEQ ID NO: 17431 - protein, 488 aa, Geobacillus stearothermophilus
AAPFNGTMMQYFEWYLPDDGTLWTKVANEANNLSSLGITALWLPPAYKGTSRSDVGYGVYDLYDLGEFNQKGTVRTKYGTKAQYLQAIQAAHAAGMQVYADVVFDHKGGADGTEWVDAVEVNPSDRNQEISGTYQIQAWTKFDFPGRGNTYSSFKWRWYHFDGVDWDESRKLSRIYKFRGFGKAWDWEVDTENGNYDYLMYADLDMDHPEVVTELKNWGKWYVNTTNIDGFRLDAVKHIKFSFFPDWLSYVRSQTGKPLFTVGEYWSYDINKLHNYITKTNGTMSLFDAPLHNKFYTASKSGGAFDMRTLMTNTLMKDQPTLAVTFVDNHDTEPGQALQSWVDPWFKPLAYAFILTRQEGYPCVFYGDYYGIPQYNIPSLKSKIDPLLIARRDYAYGTQHDYLDHSDIIGWTREGVTEKPGSGLAALITDGPGGSKWMYVGKQHAGKVFYDLTGNRSDTVTINSDGWGEFKVNGGSVSVWVPRKTTVS

SEQ ID NO: 17432 - protein, 488 aa, Geobacillus stearothermophilus
AAPFNGTMMQYFEWYLPDDGTLWTKVANEANNLSSLGITALWLPPAYKGTSRSDVGYGVYDLYDLGEFNQKGTVRTKYGTKAQYLQAIQAAHAAGMQVYADVVFDHKGGADGTEWVDAVEVNPSDRNQEISGTYQIQAWTKFDFPGRGNTYSSFKWRWYHFDGVDWDESRKLSRIYKFRGDGKAWDWEVDTENGNYDYLMYADLDMDHPEVVTELKNWGKWYVNTTNIDGFRLDAVKHIKFSFFPDWLSYVRSQTGKPLFTVGEYWSYDINKLHNYITKTNGTMSLFDAPLHNKFYTASKSGGAFDMRTLMTNTLMKDQPTLAVTFVDNHDTEPGQALQSWVDPWFKPLAYAFILTRQEGYPCVFYGDYYGIPQYNIPSLKSKIDPLLIARRDYAYGTQHDYLDHSDIIGWTREGVTEKPGSGLAALITDGPGGSKWMYVGKQHAGKVFYDLTGNRSDTVTINSDGWGEFKVNGGSVSVWVPRKTTVS

SEQ ID NO: 17433 - protein, 488 aa, Geobacillus stearothermophilus
AAPFNGTMMQYFEWYLPDDGTLWTKVANEANNLSSLGITALWLPPAYKGTSRSDVGYGVYDLYDLGEFNQKGTVRTKYGTKAQYLQAIQAAHAAGMQVYADVVFDHKGGADGTEWVDAVEVNPSDRNQEISGTYQIQAWTKFDFPGRGNTYSSFKWRWYHFDGVDWDESRKLSRIYKFRGTGKAWDWEVDTENGNYDYLMYADLDMDHPEVVTELKNWGKWYVNTTNIDGFRLDAVKHIKFSFFPDWLSYVRSQTGKPLFTVGEYWSYDINKLHNYITKTNGTMSLFDAPLHNKFYTASKSGGAFDMRTLMTNTLMKDQPTLAVTFVDNHDTEPGQALQSWVDPWFKPLAYAFILTRQEGYPCVFYGDYYGIPQYNIPSLKSKIDPLLIARRDYAYGTQHDYLDHSDIIGWTREGVTEKPGSGLAALITDGPGGSKWMYVGKQHAGKVFYDLTGNRSDTVTINSDGWGEFKVNGGSVSVWVPRKTTVS

SEQ ID NO: 17434 - protein, 486 aa, Geobacillus stearothermophilus
AAPFNGTMMQYFEWYLPDDGTLWTKVANEANNLSSLGITALWLPPAYKGTSRSDVGYGVYDLYDLGEFNQKGTVRTKYGTKAQYLQAIQAAHAAGMQVYADVVFDHKGGADGTEWVDAVEVNPSDRNQVISGTYQIQAWTKFDFPGRGNTYSSFKWRWYHFDGVDWDESRKLSRIYLFEGKAWDWEVDTEFGNYDYLMYADLDMDHPEVVTELKNWGKWYVNTTNIDGFRLDAVKHIKFSFFPDWLSYVRSQTGKPLFTVGEYWSYDINKLHNYITKTDGTMSLFDAPLHNKFYTASKSGGAFDMRTLMTNTLMKDQPTLAVTFVDNHDTEPGQALQSWVDPWFKPLAYAFILTRQEGYPCVFYGDYYGIPQYNIPSLKSKIDPLLIARRDYAYGTQHDYLDHSDIIGWTREGGTEKPGSGLAALITDGPGGSKWMYVGKQHAGKVFYDLTGNRSDTVTINSDGWGEFKVNGGSVSVWVPRKTTVS

SEQ ID NO: 17435 - protein, 487 aa, 180
AAPFNGTMMQYFEWYLPDDGTLWTKVANEANNLSSLGITALWLPPAYKGTSRSDVGYGVYDLYDLGEFNQKGTVRTKYGTKAQYLQAIQAAHAAGMQVYADVVFDHKGGADGTEWVDAVEVNPSDRNQEISGTYQIQAWTKFDFPGRGNTYSSFKWRWYHFDGVDWDESRKLSRIYKFRGIKAWDWEVDTENGNYDYLMYADLDMDHPEVVTELKNWGKWYVNTTNIDGFRLDAVKHIKFSFFPDWLSYVRSQTGKPLFTVGEYWSYDINKLHNYITKTNGTMSLFDAPLHNKFYTASKSGGAFDMRTLMTNTLMKDQPTLAVTFVDNHDTEPGQALQSWVDPWFKPLAYAFILTRQEGYPCVFYGDYYGIPQYNIPSLKSKIDPLLIARRDYAYGTQHDYLDHSDIIGWTREGVTEKPGSGLAALITDGPGGSKWMYVGKQHAGKVFYDLTGNRSDTVTINSDGWGEFKVNGGSVSVWVPRKTTVS

SEQ ID NO: 17436 - protein, 488 aa, Geobacillus stearothermophilus
AAPFNGTMMQYFEWYLPDDGTLWTKVANEANNLSSLGITALWLPPAYKGTSRSDVGYGVYDLYDLGEFNQKGTVRTKYGTKAQYLQAIQAAHAAGMQVYADVVFDHKGGADGTEWVDAVEVNPSDRNQEISGTYQIQAWTKFDFPGRGNTYSSFKWRWYHFDGVDWDESRKLSRIYKFRGGGKAWDWEVDTENGNYDYLMYADLDMDHPEVVTELKNWGKWYVNTTNIDGFRLDAVKHIKFSFFPDWLSYVRSQTGKPLFTVGEYWSYDINKLHNYITKTNGTMSLFDAPLHNKFYTASKSGGAFDMRTLMTNTLMKDQPTLAVTFVDNHDTEPGQALQSWVDPWFKPLAYAFILTRQEGYPCVFYGDYYGIPQYNIPSLKSKIDPLLIARRDYAYGTQHDYLDHSDIIGWTREGVTEKPGSGLAALITDGPGGSKWMYVGKQHAGKVFYDLTGNRSDTVTINSDGWGEFKVNGGSVSVWVPRKTTVS

SEQ ID NO: 17437 - protein, 486 aa, Geobacillus stearothermophilus
AAPFNGTMMQYFEWYLPDDGTLWTKVANEANNLSSLGITALWLPPAYKGTSRSDVGYGVYDLYDLGEFNQKGTVRTKYGTKAQYLQAIQAAHAAGMQVYADVVFDHKGGADGTEWVDAVEVNPSDRNQEISGTYQIQAWTKFDFPGRGNTYSSFKWRWYHFDGVDWDESRKLSRIYKFRGKAWDWEVDTENGNYDYLMYADLDMDHPEVVTELKNWGKWYVNTTNIDGFRLDAVKHIKFSFFPDWLSYVRSQTGKPLFTVGEYWSYDINKLHNYITKTNGTMSLFDAPLHNKFYTASKSGGAFDMRTLMTNTLMKDQPTLAVTFVDNHDTEPGQALQSWVDPWFKPLAYAFILTRQEGYPCVFYGDYYGIPQYNIPSLKSKIDPLLIARRDYAYGTQHDYLDHSDIIGWTREGVTEKPGSGLAALITDGPGGSKWMYVGKQHAGKVFYDLTGNRSDTVTINSDGWGEFKVNGGSVSVWVPRKTTVS

SEQ ID NO: 17438 - protein, 488 aa, Geobacillus stearothermophilus
AAPFNGTMMQYFEWYLPDDGTLWTKVANEANNLSSLGITALWLPPAYKGTSRSDVGYGVYDLYDLGEFNQKGTVRTKYGTKAQYLQAIQAAHAAGMQVYADVVFDHKGGADGTEWVDAVEVNPSDRNQEISGTYQIQAWTKFDFPGRGNTYSSFKWRWYHFDGVDWDESRKLSRIYKFRGSGKAWDWEVDTENGNYDYLMYADLDMDHPEVVTELKNWGKWYVNTTNIDGFRLDAVKHIKFSFFPDWLSYVRSQTGKPLFTVGEYWSYDINKLHNYITKTNGTMSLFDAPLHNKFYTASKSGGAFDMRTLMTNTLMKDQPTLAVTFVDNHDTEPGQALQSWVDPWFKPLAYAFILTRQEGYPCVFYGDYYGIPQYNIPSLKSKIDPLLIARRDYAYGTQHDYLDHSDIIGWTREGVTEKPGSGLAALITDGPGGSKWMYVGKQHAGKVFYDLTGNRSDTVTINSDGWGEFKVNGGSVSVWVPRKTTVS

SEQ ID NO: 17439 - protein, 488 aa, Geobacillus stearothermophilus
AAPFNGTMMQYFEWYLPDDGTLWTKVANEANNLSSLGITALWLPPAYKGTSRSDVGYGVYDLYDLGEFNQKGTVRTKYGTKAQYLQAIQAAHAAGMQVYADVVFDHKGGADGTEWVDAVEVNPSDRNQEISGTYQIQAWTKFDFPGRGNTYSSFKWRWYHFDGVDWDESRKLSRIYKFRGISKAWDWEVDTENGNYDYLMYADLDMDHPEVVTELKNWGKWYVNTTNIDGFRLDAVKHIKFSFFPDWLSYVRSQTGKPLFTVGEYWSYDINKLHNYITKTNGTMSLFDAPLHNKFYTASKSGGAFDMRTLMTNTLMKDQPTLAVTFVDNHDTEPGQALQSWVDPWFKPLAYAFILTRQEGYPCVFYGDYYGIPQYNIPSLKSKIDPLLIARRDYAYGTQHDYLDHSDIIGWTREGVTEKPGSGLAALITDGPGGSKWMYVGKQHAGKVFYDLTGNRSDTVTINSDGWGEFKVNGGSVSVWVPRKTTVS

SEQ ID NO: 17440 - protein, 488 aa, Geobacillus stearothermophilus
AAPFNGTMMQYFEWYLPDDGTLWTKVANEANNLSSLGITALWLPPAYKGTSRSDVGYGVYDLYDLGEFNQKGTVRTKYGTKAQYLQAIQAAHAAGMQVYADVVFDHKGGADGTEWVDAVEVNPSDRNQEISGTYQIQAWTKFDFPGRGNTYSSFKWRWYHFDGVDWDESRKLSRIYKFRGIGKAWDWEVDTENGNYDYLMYADLDMDHPEVVTELKNWGKWYVNTTNIDGFRLDAVKHIKFSFFPDWLSYVRSQTGKPLFTVGEYWSYDINKLHNYITKTNGTMSLFDAPLHNKFYTASKSGGAFDMRTLMTNTLMKDQPTLAVTFVDNHDTEPGQALQSWVDPWFKPLAYAFILTRQEGYPCVFYGDYYGIPQYNIPSLKSKIDPLLIARRDYAYGTQHDYLDHSDIIGWTREGVTEKPGSGLAALITDGPGGSKWMYVGKQHAGKVFYDLTGNRSDTVTINSDGWGEFKVNGGSVSVWVPRKTTVS

SEQ ID NO: 17441 - protein, 488 aa, Geobacillus stearothermophilus
AAPFNGTMMQYFEWYLPDDGTLWTKVANEANNLSSLGITALWLPPAYKGTSRSDVGYGVYDLYDLGEFNQKGTVRTKYGTKAQYLQAIQAAHAAGMQVYADVVFDHKGGADGTEWVDAVEVNPSDRNQEISGTYQIQAWTKFDFPGRGNTYSSFKWRWYHFDGVDWDESRKLSRIYKFRGHGKAWDWEVDTENGNYDYLMYADLDMDHPEVVTELKNWGKWYVNTTNIDGFRLDAVKHIKFSFFPDWLSYVRSQTGKPLFTVGEYWSYDINKLHNYITKTNGTMSLFDAPLHNKFYTASKSGGAFDMRTLMTNTLMKDQPTLAVTFVDNHDTEPGQALQSWVDPWFKPLAYAFILTRQEGYPCVFYGDYYGIPQYNIPSLKSKIDPLLIARRDYAYGTQHDYLDHSDIIGWTREGVTEKPGSGLAALITDGPGGSKWMYVGKQHAGKVFYDLTGNRSDTVTINSDGWGEFKVNGGSVSVWVPRKTTVS

SEQ ID NO: 17442 - protein, 486 aa, Geobacillus stearothermophilus
AAPFNGTMMQYFEWYLPDDGTLWTKVANEANNLSSLGITALWLPPAYKGTSRSDVGYGAYDLYDLGEFNQKGTVRTKYGTKAQYLQAIQAAHAAGMQVYADVVFDHKGGADGTEWVDAVEVNPSDRNQEISGTYQIQAWTKFDFPGRGNTYSSFKWRWYHFDGVDWDESRKLSRIYKFRGKAWDWEVDTEFGNYDYLMYADLDMDHPEVVTELKNWGKWYVNTTNIDGFRLDAVKHIKFSFFPDWLSYVRSQTGKPLFTVGEYWSYDINKLHNYITKTNGTMSLFDAPLHNKFYTASKSGGAFDMRTLMTNTLMKDQPTLAVTFVDNHDTEPGQALQSWVDPWFKPLAYAFILTRQEGYPCVFYGDYYGIPQYNIPSLKSKIDPLLIARRDYAYGTQHDYLDHSDIIGWTREGVTEKPGSGLAALITDGPGGSKWMYVGKQHAGKVFYDLTGNRSDTVTINSDGWGEFKVNGGSVSVWVPRKTTVS

SEQ ID NO: 17443 - protein, 488 aa, Geobacillus stearothermophilus
AAPFNGTMMQYFEWYLPDDGTLWTKVANEANNLSSLGITALWLPPAYKGTSRSDVGYGVYDLYDLGEFNQKGTVRTKYGTKAQYLQAIQAAHAAGMQVYADVVFDHKGGADGTEWVDAVEVNPSDRNQEISGTYQIQAWTKFDFPGRGNTYSSFKWRWYHFDGVDWDESRKLSRIYKFRGYGKAWDWEVDTENGNYDYLMYADLDMDHPEVVTELKNWGKWYVNTTNIDGFRLDAVKHIKFSFFPDWLSYVRSQTGKPLFTVGEYWSYDINKLHNYITKTNGTMSLFDAPLHNKFYTASKSGGAFDMRTLMTNTLMKDQPTLAVTFVDNHDTEPGQALQSWVDPWFKPLAYAFILTRQEGYPCVFYGDYYGIPQYNIPSLKSKIDPLLIARRDYAYGTQHDYLDHSDIIGWTREGVTEKPGSGLAALITDGPGGSKWMYVGKQHAGKVFYDLTGNRSDTVTINSDGWGEFKVNGGSVSVWVPRKTTVS

SEQ ID NO: 17444 - protein, 488 aa, Geobacillus stearothermophilus
AAPFNGTMMQYFEWYLPDDGTLWTKVANEANNLSSLGITALWLPPAYKGTSRSDVGYGVYDLYDLGEFNQKGTVRTKYGTKAQYLQAIQAAHAAGMQVYADVVFDHKGGADGTEWVDAVEVNPSDRNQEISGTYQIQAWTKFDFPGRGNTYSSFKWRWYHFDGVDWDESRKLSRIYKFRGLGKAWDWEVDTENGNYDYLMYADLDMDHPEVVTELKNWGKWYVNTTNIDGFRLDAVKHIKFSFFPDWLSYVRSQTGKPLFTVGEYWSYDINKLHNYITKTNGTMSLFDAPLHNKFYTASKSGGAFDMRTLMTNTLMKDQPTLAVTFVDNHDTEPGQALQSWVDPWFKPLAYAFILTRQEGYPCVFYGDYYGIPQYNIPSLKSKIDPLLIARRDYAYGTQHDYLDHSDIIGWTREGVTEKPGSGLAALITDGPGGSKWMYVGKQHAGKVFYDLTGNRSDTVTINSDGWGEFKVNGGSVSVWVPRKTTVS

SEQ ID NO: 17445 - protein, 488 aa, Geobacillus stearothermophilus
AAPFNGTMMQYFEWYLPDDGTLWTKVANEANNLSSLGITALWLPPAYKGTSRSDVGYGQYDLYDLGEFNQKGTVRTKYGTKAQYLQAIQAAHAAGMQVYADVVFDHKGGADGTEWVDAVEVNPSDRNQEISGTYQIQAWTKFDFPGRGNTYSSFKWRWYHFDGVDWDESRKLSRIYKFRGXXKAWDWEVDTEFGNYDYLMYADLDMDHPEVVTELKNWGKWYVNTTNIDGFRLDAVKHIKFSFFPDWLSYVRSQTGKPLFTVGEYWSYDINKLHNYITKTNGTMSLFDAPLHNKFYTASKSGGAFDMRTLMTNTLMKDQPTLAVTFVDNHDTEPGQALQSWVDPWFKPLAYAFILTRQEGYPCVFYGDYYGIPQYNIPSLKSKIDPLLIARRDYAYGTQHDYLDHSDIIGWTREGVTEKPGSGLAALITDGPGGSKWMYVGKQHAGKVFYDLTGNRSDTVTINSDGWGEFKVNGGSVSVWVPRKTTVS

SEQ ID NO: 17446 - protein, 488 aa, Geobacillus stearothermophilus
AAPFNGTMMQYFEWYLPDDGTLWTKVANEANNLSSLGITALWLPPAYKGTSRSDVGYGVYDLYDLGEFNQKGTVRTKYGTKAQYLQAIQAAHAAGMQVYADVVFDHKGGADGTEWVDAVEVNPSDRNQEISGTYQIQAWTKFDFPGRGNTYSSFKWRWYHFDGVDWDESRKLSRIYKFRGVGKAWDWEVDTENGNYDYLMYADLDMDHPEVVTELKNWGKWYVNTTNIDGFRLDAVKHIKFSFFPDWLSYVRSQTGKPLFTVGEYWSYDINKLHNYITKTNGTMSLFDAPLHNKFYTASKSGGAFDMRTLMTNTLMKDQPTLAVTFVDNHDTEPGQALQSWVDPWFKPLAYAFILTRQEGYPCVFYGDYYGIPQYNIPSLKSKIDPLLIARRDYAYGTQHDYLDHSDIIGWTREGVTEKPGSGLAALITDGPGGSKWMYVGKQHAGKVFYDLTGNRSDTVTINSDGWGEFKVNGGSVSVWVPRKTTVS

SEQ ID NO: 17447 - protein, 488 aa, Geobacillus stearothermophilus
AAPFNGTMMQYFEWYLPDDGTLWTKVANEANNLSSLGITALWLPPAYKGTSRSDVGYGVYDLYDLGEFNQKGTVRTKYGTKAQYLQAIQAAHAAGMQVYADVVFDHKGGADGTEWVDAVEVNPSDRNQEISGTYQIQAWTKFDFPGRGNTYSSFKWRWYHFDGVDWDESRKLSRIYKFRGEGKAWDWEVDTENGNYDYLMYADLDMDHPEVVTELKNWGKWYVNTTNIDGFRLDAVKHIKFSFFPDWLSYVRSQTGKPLFTVGEYWSYDINKLHNYITKTNGTMSLFDAPLHNKFYTASKSGGAFDMRTLMTNTLMKDQPTLAVTFVDNHDTEPGQALQSWVDPWFKPLAYAFILTRQEGYPCVFYGDYYGIPQYNIPSLKSKIDPLLIARRDYAYGTQHDYLDHSDIIGWTREGVTEKPGSGLAALITDGPGGSKWMYVGKQHAGKVFYDLTGNRSDTVTINSDGWGEFKVNGGSVSVWVPRKTTVS

SEQ ID NO: 17448 - protein, 486 aa, Geobacillus stearothermophilus
AAPFNGTMMQYFEWYLPDDGTLWTKVANEANNLSSLGITALWLPPAYKGTSRSDVGYGEYDLYDLGEFNQKGTVRTKYGTKAQYLQAIQAAHAAGMQVYADVVFDHKGGADGTEWVDAVEVNPSDRNQEISGTYQIQAWTKFDFPGRGNTYSSFKWRWYHFDGVDWDESRKLSRIYKFRGKAWDWEVDTEFGNYDYLMYADLDMDHPEVVTELKNWGKWYVNTTNIDGFRLDAVKHIKFSFFPDWLSYVRSQTGKPLFTVGEYWSYDINKLHNYITKTNGTMSLFDAPLHNKFYTASKSGGAFDMRTLMTNTLMKDQPTLAVTFVDNHDTEPGQALQSWVDPWFKPLAYAFILTRQEGYPCVFYGDYYGIPQYNIPSLKSKIDPLLIARRDYAYGTQHDYLDHSDIIGWTREGVTEKPGSGLAALITDGPGGSKWMYVGKQHAGKVFYDLTGNRSDTVTINSDGWGEFKVNGGSVSVWVPRKTTVS

SEQ ID NO: 17449 - protein, 488 aa, Geobacillus stearothermophilus
AAPFNGTMMQYFEWYLPDDGTLWTKVANEANNLSSLGITALWLPPAYKGTSRSDVGYGVYDLYDLGEFNQKGTVRTKYGTKAQYLQAIQAAHAAGMQVYADVVFDHKGGADGTEWVDAVEVNPSDRNQEISGTYQIQAWTKFDFPGRGNTYSSFKWRWYHFDGVDWDESRKLSRIYKFRGRGKAWDWEVDTENGNYDYLMYADLDMDHPEVVTELKNWGKWYVNTTNIDGFRLDAVKHIKFSFFPDWLSYVRSQTGKPLFTVGEYWSYDINKLHNYITKTNGTMSLFDAPLHNKFYTASKSGGAFDMRTLMTNTLMKDQPTLAVTFVDNHDTEPGQALQSWVDPWFKPLAYAFILTRQEGYPCVFYGDYYGIPQYNIPSLKSKIDPLLIARRDYAYGTQHDYLDHSDIIGWTREGVTEKPGSGLAALITDGPGGSKWMYVGKQHAGKVFYDLTGNRSDTVTINSDGWGEFKVNGGSVSVWVPRKTTVS

SEQ ID NO: 17450 - protein, 486 aa, Geobacillus stearothermophilus
AAPFNGTMMQYFEWYLPDDGTLWTKVANEANNLSSLGITALWLPPAYKGTSRSDVGYGQYDLYDLGEFNQKGTVRTKYGTKAQYLQAIQAAHAAGMQVYADVVFDHKGGADGTEWVDAVEVNPSDRNQEISGTYQIQAWTKFDFPGRGNTYSSFKWRWYHFDGVDWDESRKLSRIYKFRGKAWDWEVDTEFGNYDYLMYADLDMDHPEVVTELKNWGKWYVNTTNIDGFRLDAVKHIKFSFFPDWLSYVRSQTGKPLFTVGEYWSYDINKLHNYITKTNGTMSLFDAPLHNKFYTASKSGGAFDMRTLMTNTLMKDQPTLAVTFVDNHDTEPGQALQSWVDPWFKPLAYAFILTRQEGYPCVFYGDYYGIPQYNIPSLKSKIDPLLIARRDYAYGTQHDYLDHSDIIGWTREGVTEKPGSGLAALITDGPGGSKWMYVGKQHAGKVFYDLTGNRSDTVTINSDGWGEFKVNGGSVSVWVPRKTTVS

SEQ ID NO: 17451 - protein, 486 aa, Geobacillus stearothermophilus
AAPFNGTMMQYFEWYLPDDGTLWTKVANEANNLSSLGITALWLPPAYKGTSRSDVGYGIYDLYDLGEFNQKGTVRTKYGTKAQYLQAIQAAHAAGMQVYADVVFDHKGGADGTEWVDAVEVNPSDRNQEISGTYQIQAWTKFDFPGRGNTYSSFKWRWYHFDGVDWDESRKLSRIYKFRGKAWDWEVDTEFGNYDYLMYADLDMDHPEVVTELKNWGKWYVNTTNIDGFRLDAVKHIKFSFFPDWLSYVRSQTGKPLFTVGEYWSYDINKLHNYITKTNGTMSLFDAPLHNKFYTASKSGGAFDMRTLMTNTLMKDQPTLAVTFVDNHDTEPGQALQSWVDPWFKPLAYAFILTRQEGYPCVFYGDYYGIPQYNIPSLKSKIDPLLIARRDYAYGTQHDYLDHSDIIGWTREGVTEKPGSGLAALITDGPGGSKWMYVGKQHAGKVFYDLTGNRSDTVTINSDGWGEFKVNGGSVSVWVPRKTTVS

SEQ ID NO: 17452 - protein, 486 aa, Geobacillus stearothermophilus
AAPFNGTMMQYFEWYLPDDGTLWTKVANEANNLSSLGITALWLPPAYKGTSRSDVGYGVYDLYDLGEFNQKGTVRTKYGTKAQYLQAIQAAHAAGMQVYADVVFDHKGGADGTEWVDAVEVNPSDRNQEISGTYQIQAWTKFDFPGRGNTYSSFKWRWYHFDGVDWDESRKLSRIYKFRGKAWDWEVDTEFGNYDYLMYADLDMDHPEVVTELKNWGKWYVNTTNIDGFRLDAVKHIKFSFFPDWLSYVRSQTGKPLFTVGEYWSYDINKLHNYITKTNGTVSLFDAPLHNKFYTASKSGGAFDMRTLMTNTLMKDQPTLAVTFVDNHDTEPGQALQSWVDPWFKPLAYAFILTRQEGYPCVFYGDYYGIPQYNIPSLKSKIDPLLIARRDYAYGTQHDYLDHSDIIGWTREGVTEKPGSGLAALITDGPGGSKWMYVGKQHAGKVFYDLTGNRSDTVTINSDGWGEFKVNGGSVSVWVPRKTTVS

SEQ ID NO: 17453 - protein, 483 aa, Bacillus sp.
HHNGTNGTMMQYFEWHLPNDGNHWNRLRDDASNLRNRGITAIWIPPAWKGTSQNDVGYGAYDLYDLGEFNQKGTVRTKYGTRSQLESAIHALKNNGVQVYGDVVMNHKGGADATENVLAVEVNPNNRNQEISGDYTIEAWTKFDFPGRGNTYSDFKWRWYHFDGVDWDQSRQFQNRIYKFRGKAWDWEVDSEFGNYDYLMYADSDMDHPEVVNELRRWGEWYTNTLNLDGFRIDAVKHIKFSFTRDWLTHVRNATGKEMFAVAEFWKNDLGALENYLNKTNWNHSVFDVPLHYNLYNASNSGGNYDMAKLLNGTVVQKHPMHAVTFVDNHDSQPGESLESFVQEWFKPLAYALILTREQGYPSVFYGDYYGIPTHSVPAMKAKIDPILEARQNFAYGTQHDYFDHHNIIGWTREGNTTHPNSGLATIMSDGPGGEKWMYVGQNKAGQVWHDITGNKPGTVTINADGWANFSVNGGSVSIWVKR

SEQ ID NO: 17454 - protein, 485 aa, Bacillus sp.
HHNGTNGTMMQYFEWHLPNDGNHWNRLRDDASNLRNRGITAIWIPPAWKGTSQNDVGYGAYNLYDLGEFNQKGTVRTKYGTRSQLESAIHALKNNGVQVYGDVVMNHKGGADATENVLAVEVNPNNRNQEISGDYTIEAWTKFDFPGRGNTYSDFKWRWYHFDGVDWDQSRQFQNRIYKFRGDGKAWDWEVDSENGNYDYLMYADVDMDHPEEVNELRRWGEWYTNTLNLDGFRIDAVKHIKYSFTRDWLTHVRNATGKEMFAVAEFWKNDLGALENYLNKTNWNHSVFDVPLHYNLYNASNSGGNYDMAKLLNGTVVQKHPXHAVTFVDNHDSQPGESLESFVQEWFKPLAYALILTREQGYPSVFYGDYYGIPTHSVPAMKAKIDPILEARQNFAYGTQHDYFDHHNIIGWTREGNTTHPNSGLATIMSDGPGGEKWMYVGQNKAGQVWHDITGNKPGTVTINADGWANFSVNGGSVSIWVKR

SEQ ID NO: 17455 - protein, 483 aa, Bacillus sp.
HHNGTNGTMMQYFEWHLPNDGNHWNRLRDDASNLRNRGITAIWIPPAWKGTSQNDVGYGAYDLYDLGEFNQKGTVRTKYGTRSQLESAIHALKNNGVQVYGDVVMNHKGGADATENVLAVEVNPNNRNQEISGDYTIEAWTKFDFPGRGNTYSDFKWRWYHFDGVDWDQSRQFQNRIYKFRGKAWDWEVDSENGNNDYLMFADLDMDHPEVVNELRRWGEWYTNTLNLDGFRIDAVKHIKYSFTRDWLTHVRNATGKEMFAVAEFWKNDLGALENYLNKTNWNHSVFDVPLHYNLYNASNSGGNYDMAKLLNGTVVQKHPMHAVTFVDNHDSQPGESLESFVQEWFKPLAYALILTREQGYPSVFYGDYYGIPTHSVPAMKAKIDPILEARQNFAYGTQHDYFDHHNIIGWTREGNTTHPNSGLATIMSDGPGGEKWMYVGQNKAGQVWHDITGNKPGTVTINADGWANFSVNGGSVSIWVKR

SEQ ID NO: 17456 - protein, 483 aa, Bacillus sp.
HHNGTNGTMMQYFEWHLPNDGNHWNRLRDDASNLRNRGITAIWIPPAWKGTSQNDVGYGAYDLYDLGEFNQKGTVRTKYGTRSQLESAIHALKNNGVQVYGDVVMNHKGGADATENVLAVEVNPNNRNQEISGDYTIEAWTKFDFPGRGNTYSDFKWRWYHFDGVDWDQSRQFQNRIYKFRGKAWDWEVDSEFGNYDYLMYADIDMDHPEVVNELRRWGEWYTNTLNLDGFRIDAVKHIKFSFTRDWLTHVRNATGKEMFAVAEFWKNDLGALENYLNKTNWNHSVFDVPLHYNLYNASNSGGNYDMAKLLNGTVVQKHPMHAVTFVDNHDSQPGESLESFVQEWFKPLAYALILTREQGYPSVFYGDYYGIPTHSVPAMKAKIDPILEARQNFAYGTQHDYFDHHNIIGWTREGNTTHPNSGLATIMSDGPGGEKWMYVGQNKAGQVWHDITGNKPGTVTINADGWANFSVNGGSVSIWVKR

SEQ ID NO: 17457 - protein, 485 aa, Bacillus sp.
HHNGTNGTMMQYFEWHLPNDGNHWNRLRDDASNLRNRGITAIWIPPAWKGTSQNDVGYGAYDLYDLGEFNQKGTVRTKYGTRSQLESAIHALKNNGVQVYGDVVMNHKGGADATENVLAVEVNPNNRNQEISGDYTIEAWTKFDFPGRGNTYSDFKWRWYHFDGVDWDQSRQFQNRIYKFRGDGKAWDWEVDSEFGNYDYLMYADLDMDHPEVVNELRRWGEWYTNTLNLDGFRIDAVKHIKFSFTRDWLTHVRNATGKEMFAVAEFWKNDLGALENYLNKTNWNHSVFDVPLHYNLYNASNSGGNYDMAKLLNGTVVQKHPMHAVTFVDNHDSQPGESLESFVQEWFKPLAYALILTREQGYPSVFYGDYYGIPTHSVPAMKAKIDPILEARQNFAYGTQHDYFDHHNIIGWTREGNTTHPNSGLATIMSDGPGGEKWMYVGQNKAGQVWHDITGNKPGTVTINADGWANFSVNGGSVSIWVKR

SEQ ID NO: 17458 - protein, 483 aa, Bacillus sp.
HHNGTNGTMMQYFEWHLPNDGNHWNRLRDDASNLRNRGITAIWIPPAWKGTSQNDVGYGAYDLYDLGEFNQKGTVRTKYGTRSQLESAIHALKNNGVQVYGDVVMNHKGGADATETVLAVEVNPNNRNQEISGDYTIEAWTKFDFPGRGNTYSDFKWRWYHFDGVDWDQSRQFQNRIYKFRGKAWDWEVDSEYGNNDYLMYADVDMDHPEVVNELRRWGEWYTNTLNLDGFRIDAVKHIKYSFTRDWLTHVRNATGKEMFAVAEFWKNDLGALENYLNKTNWNHSVFDVPLHYNLYNASNSGGNYDMAKLLNGTVVQKHPMHAVTFVDNHDSQPGESLESFVQEWFKPLAYALILTREQGYPSVFYGDYYGIPTHSVPAMKAKIDPILEARQNFAYGTQHDYFDHHNIIGWTREGNTTHPNSGLATIMSDGPGGEKWMYVGQNKAGQVWHDITGNKPGTVTINADGWANFSVNGGSVSIWVKR

SEQ ID NO: 17459 - protein, 485 aa, Bacillus sp.
HHNGTNGTMMQYFEWHLPNDGNHWNRLRDDASNLRNRGITAIWIPPAWKGTSQNDVGYGAYDLYDLGEFNQKGTVRTKYGTRSQLESAIHALKNNGVQVYGDVVMNHKGGADATENVLAVEVNPNNRNQEISGDYTIEAWTKFDFPGRGNTYSDFKWRWYHFDGVDWDQSRQFQNRIYKFRGDGKAWDWEVDSENGNYDYLMYADVDMDHPEVVNELRRWGEWYTNTLNLDGFRIDAVKHIKYSFTRDWLTHVRGATGKEMFAVAEFWKNDLGALENYLNKTNWNHSVFDVPLHYNLYNASNSGGNYDMAKLLNGTVVQKHPMHAVTFVDNHDSQPGESLESFVQEWFKPLAYALILTREQGYPSVFYGDYYGIPTHSVPAMKAKIDPILEARQNFAYGTQHDYFDHLNIIGWTREGNTTHPNSGLATXMSDGPGGEKWMYVGQNKAGQVWHDITGNKPGTVTINADGWANFSVNGGSVSIWVKR

SEQ ID NO: 17460 - protein, 483 aa, Bacillus sp.
HHNGTNGTMMQYFEWHLPNDGNHWNRLRDDASNLRNRGITAIWIPPAWKGTSQNDVGYGAYDLYDLGEFNQKGTVRTKYGTRSQLESAIHALKNNGVQVYGDVVMNHKGGADATENVLAVEVNPNNRNQEISGDYTIEAWTKFDFPGRGNTYSDFKWRWYHFDGVDWDQSRQFQNRIYKFRGKAWDWEVDSEFGNYDYLMYADNDMDHPEVVNELRRWGEWYTNTLNLDGFRIDAVKHIKFSFTRDWLTHVRNATGKEMFAVAEFWKNDLGALENYLNKTNWNHSVFDVPLHYNLYNASNSGGNYDMAKLLNGTVVQKHPMHAVTFVDNHDSQPGESLESFVQEWFKPLAYALILTREQGYPSVFYGDYYGIPTHSVPAMKAKIDPILEARQNFAYGTQHDYFDHHNIIGWTREGNTTHPNSGLATIMSDGPGGEKWMYVGQNKAGQVWHDITGNKPGTVTINADGWANFSVNGGSVSIWVKR

SEQ ID NO: 17461 - protein, 483 aa, Unidentified
HHNGTNGTMMQYFEWHLPNDGNHWNRLRDDASNLRNRGITAIWIPPAWKGTSQNDVGYGAYDLYDLGEFNQKGTVRTKYGTRSQLESAIHALKNNGVQVYGDVVMNHKGGADATENVLAVEVNPNNRNQEISGDYTIEAWTKFDFPGRGNTYSDFKWRWYHFDGVDWDQSRQFQNRIYKFRGKAWDWEVDSEFGNYDYLMYADTDMDHPEVVNELRRWGEWYTNTLNLDGFRIDAVKHIKFSFTRDWLTHVRNATGKEMFAVAEFWKNDLGALENYLNKTNWNHSVFDVPLHYNLYNASNSGGNYDMAKLLNGTVVQKHPMHAVTFVDNHDSQPGESLESFVQEWFKPLAYALILTREQGYPSVFYGDYYGIPTHSVPAMKAKIDPILEARQNFAYGTQHDYFDHHNIIGWTREGNTTHPNSGLATIMSDGPGGEKWMYVGQNKAGQVWHDITGNKPGTVTINADGWANFSVNGGSVSIWVKR

SEQ ID NO: 17462 - protein, 483 aa, Unidentified
HHNGTNGTMMQYFEWHLPNDGNHWNRLRDDASNLRNRGITAIWIPPAWKGTSQNDVGYGAYDLYDLGEFNQKGTVRTKYGTRSQLESAIHALKNNGVQVYGDVVMNHKGGADATENVLAVEVNPNNRNQEISGDYTIEAWTKFDFPGRGNTYSDFKWRWYHFDGVDWDQSRQFQNRIYKFRGKAWDWPVDSENGNYDYLMYADVDMDHPEVVNELRRWGEWYTNTLNLDGFRIDAVKHIKYYFTRDWLTHVRNATGKEMFAVAEFWKNDLGALENYLNITNWNHSVFDVPLHYNLYNASNSGGNYDMAKLLNGTVVQKHPMHAVTFVDNHDSQPGESLESFVQEWFKPLAYALILTREQGYPSVFYGDYYGIPTHSVPAMKAKIDPILEARQNFAYGTQHDYFDHHNIIGWTREGNTTHPNSGLATIMSDGPGGEKWMYVGQNKAGQVWHDITGNKPGTVTINADGWANFSVNGGSVSIWVKR

SEQ ID NO: 17463 - protein, 485 aa, Bacillus sp.
HHNGTNGTMMQYFEWHLPNDGNHWNRLRDDASNLRNRGITAIWIPPAWKGTSQNDVGYGAYDLYDLGEFNQKGTVRTKYGTRSQLESAIHALKNNGVQVYGDVVMNHKGGADATENVLAVEVNPNNRNQEISGDYTIEAWTKFDFPGRGNTYSDFKWRWYHFDGVDWDQSRQFQNRIYKFRGXXKAWDWEVDSEFGNYDYLMYADLDMDHPEVVNELRRWGEWYTNTLNLDGFRIDAVKHIKFSFTRDWLTHVRNATGKEMFAVAEFWKNDLGALENYLNKTNWNHSVFDVPLHYNLYNASNSGGNYDMAKLLNGTVVQKHPMHAVTFVDNHDSQPGESLESFVQEWFKPLAYALILTREQGYPSVFYGDYYGIPTHSVPAMKAKIDPILEARQNFAYGTQHDYFDHHNIIGWTREGNTTHPNSGLATIMSDGPGGEKWMYVGQNKAGQVWHDITGNKPGTVTINADGWANFSVNGGSVSIWVKR

SEQ ID NO: 17464 - protein, 483 aa, Bacillus sp.
HHNGTNGTMMQYFEWHLPNDGNHWNRLRDDASNLRNRGITAIWIPPAWKGTSQNDVGYGAYDLYDLGEFNQKGTVRTKYGTRSQLESAIHALKNNGVQVYGDVVMNHKGGADATENVLAVEVNPNNRNQEISGDYTIEAWTKFDFPGRGNTYSDFKWRWYHFDGVDWDQSRQFQNRIYKFRGKAWDWEVDSEFGNYDYLMYADCDMDHPEVVNELRRWGEWYTNTLNLDGFRIDAVKHIKFSFTRDWLTHVRNATGKEMFAVAEFWKNDLGALENYLNKTNWNHSVFDVPLHYNLYNASNSGGNYDMAKLLNGTVVQKHPMHAVTFVDNHDSQPGESLESFVQEWFKPLAYALILTREQGYPSVFYGDYYGIPTHSVPAMKAKIDPILEARQNFAYGTQHDYFDHHNIIGWTREGNTTHPNSGLATIMSDGPGGEKWMYVGQNKAGQVWHDITGNKPGTVTINADGWANFSVNGGSVSIWVKR

SEQ ID NO: 17465 - protein, 485 aa, Bacillus sp.
HHNGTNGTMMQYFEWHLPNDGNHWNRLRDDASNLRNRGITAIWIPPAWKGTSQNDVGYGAYDLYDLGEFNQKGTVRTKYGTRSQLESAIHALKNNGVQVYGDVVMNHKGGADATENVLAVEVNPNNRNQEISGDYTIEAWTKFDFPGRGNTYSDFKWRWYHFDGVDWDQSRQFQNRIYKFRGXXKAWDWEVDSEFGNYDYLMYADSDMDHPEVVNELRRWGEWYTNTLNLDGFRIDAVKHIKFSFTRDWLTHVRNATGKEMFAVAEFWKNDLGALENYLNKTNWNHSVFDVPLHYNLYNASNSGGNYDMAKLLNGTVVQKHPMHAVTFVDNHDSQPGESLESFVQEWFKPLAYALILTREQGYPSVFYGDYYGIPTHSVPAMKAKIDPILEARQNFAYGTQHDYFDHHNIIGWTREGNTTHPNSGLATIMSDGPGGEKWMYVGQNKAGQVWHDITGNKPGTVTINADGWANFSVNGGSVSIWVKR

SEQ ID NO: 17466 - protein, 483 aa, Bacillus sp.
HHNGTNGTMMQYFEWHLPNDGNHWNRLRDDASNLRNRGITAIWIPPAWKGTSQNDVGYGAYDLYDLGEFNQKGTVRTKYGTRSQLESAIHALKNNGVQVYGDVVMNHKGGADATETVLAVEVNPNNRNQEISGDYTIEAWTKFDFPGRGNTYSDFKWRWYHFDGVDWDQSRQFQNRIYKFRGKAWDWEVDSEYGNYDNLMYADVDMDHPEVVNELRRWGEWYTNTLNLDGFRIDAVKHIKYSFTRDWLTHVRNATGKEMFAVAEFWKNDLGALENYLNKTNWNHSVFDVPLHYNLYNASNSGGNYDMAKLLNGTVVQKHPMHAVTFVDNHDSQPGESLESFVQEWFKPLAYALILTREQGYPSVFYGDYYGIPTHSVPAMKAKIDPILEARQNFAYGTQHDYFDHHNIIGWTREGNTTHPNSGLATIMSDGPGGEKWMYVGQNKAGQVWHDITGNKPGTVTINADGWANFSVNGGSVSIWVKR

SEQ ID NO: 17467 - protein, 485 aa, Bacillus sp.
HHNGTNGTMMQYFEWHLPNDGNHWNRLRDDASNLRNRGITAIWIPPAWKGTSQNDVGYGAYDLYDLGEFNQKGTVRTKYGTRSQLESAIHALKNNGVQVYGDVVMNHKGGADATENVLAVEVNPNNRNQEISGDYTIEAWTKFDFPGRGNTYSDFKWRWYHFDGVDWDQSRQFQNRIYKFRGXXKAWDWEVDSEFGNYDYLMYADIDMDHPEVVNELRRWGEWYTNTLNLDGFRIDAVKHIKFSFTRDWLTHVRNATGKEMFAVAEFWKNDLGALENYLNKTNWNHSVFDVPLHYNLYNASNSGGNYDMAKLLNGTVVQKHPMHAVTFVDNHDSQPGESLESFVQEWFKPLAYALILTREQGYPSVFYGDYYGIPTHSVPAMKAKIDPILEARQNFAYGTQHDYFDHHNIIGWTREGNTTHPNSGLATIMSDGPGGEKWMYVGQNKAGQVWHDITGNKPGTVTINADGWANFSVNGGSVSIWVKR

SEQ ID NO: 17468 - protein, 485 aa, Bacillus sp.
HHNGTNGTMMQYFEWHLPNDGNHWNRLRDDASNLRNRGITAIWIPPAWKGTSQNDVGYGAYDLYDLGEFNQKGTVRTKYGTRSQLESAIHALKNNGVQVYGDVVMNHKGGADATENVLAVEVNPNNRNQEISGDYTIEAWTKFDFPGRGNTYSDFKWRWYHFDGVDWDQSRQFQNRIYKFRGXXKAWDWEVDSEFGNYDYLMYADCDMDHPEVVNELRRWGEWYTNTLNLDGFRIDAVKHIKFSFTRDWLTHVRNATGKEMFAVAEFWKNDLGALENYLNKTNWNHSVFDVPLHYNLYNASNSGGNYDMAKLLNGTVVQKHPMHAVTFVDNHDSQPGESLESFVQEWFKPLAYALILTREQGYPSVFYGDYYGIPTHSVPAMKAKIDPILEARQNFAYGTQHDYFDHHNIIGWTREGNTTHPNSGLATIMSDGPGGEKWMYVGQNKAGQVWHDITGNKPGTVTINADGWANFSVNGGSVSIWVKR

SEQ ID NO: 17469 - protein, 483 aa, Bacillus sp.
HHNGTNGTMMQYFEWHLPNDGNHWNRLRDDASNLRNRGITAIWIPPAWKGTSQNDVGYGAYDLYDLGEFNQKGTVRTKYGTRSQLESAIHALKNNGVQVYGDVVMNHKGGADATETVLAVEVNPNNRNQEISGDYTIEAWTKFDFPGRGNTYSDFKWRWYHFDGVDWDQSRQFQNRIYKFRGKAWDWEVDSENGYYDNLMYADVDMDHPEVVNELRRWGEWYTNTLNLDGFRIDAVKHIKYSFTRDWLTHVRNATGKEMFAVAEFWKNDLGALENYLNKTNWNHSVFDVPLHYNLYNASNSGGNYDMAKLLNGTVVQKHPMHAVTFVDNHDSQPGESLESFVQEWFKPLAYALILTREQGYPSVFYGDYYGIPTHSVPAMKAKIDPILEARQNFAYGTQHDYFDHHNIIGWTREGNTTHPNSGLATIMSDGPGGEKWMYVGQNKAGQVWHDITGNKPGTVTINADGWANFSVNGGSVSIWVKR

SEQ ID NO: 17470 - protein, 485 aa, Bacillus sp.
HHNGTNGTMMQYFEWHLPNDGNHWNRLRDDASNLRNRGITAIWIPPAWKGTSQNDVGYGAYDLYDLGEFNQKGTVRTKYGTRSQLESAIHALKNNGVQVYGDVVMNHKGGADATENVLAVEVNPNNRNQEISGDYTIEAWTKFDFPGRGNTYSDFKWRWYHFDGVDWDQSRQFQNRIYKFRGDGKAWDWEVDSEFGNYDYLMYADVDMDHPEXVNELRRWGEWYTNTLNLDGFRIDAVKHIKYSFTRDWLTHVRNATGKEMFAVAEFWSNDLGALENYLNKTNWNHSVFDVPLHYNLYNASNSGGNYDMAKLLNGTVVQKHPMHAVTFVDNHDSQPGESLESFVQEWFKPLAYALILTREQGYPSVFYGDYYGIPTHSVPAMKAKIDPILEARQNFAYGTQHDYFDHHNIIGWTREGNTTHPNSGLATIMSDGPGGEKWMYVGQNKAGQVWHDITGNKPGTVTINADGWANFSVNGGSVSIWVKR

SEQ ID NO: 17471 - protein, 483 aa, Bacillus sp.
HHNGTNGTMMQYFEWHLPNDGNHWNRLRDDASNLRNRGITAIWIPPAWKGTSQNDVGYGAYDLYDLGEFNQKGTVRTKYGTRSQLESAIHALKNNGVQVYGDVVMNHKGGADATENVLAVEVNPNNRNQEISGDYTIEAWTKFDFPGRGNTYSDFKWRWYHFDGVDWDQSRQFQNRIYKFRGKAWDWEVDSENGFYDYLMYADVDLDHPYVVNELRRWGEWYTNTLNLDGFRIDAVKHIKYSFTRDWLTHVRNATGKEMFAVAEFWKNDLGALENYLNKTNWNHSVFDVPLHYNLYNASNSGGNYDMAKLLNGTVVQKHPMHAVTFVDNHDSQPGESLESFVQEWFKPLAYALILTREQGYPSVFYGDYYGIPTHSVPAMKAKIDPILEARQNFAYGTQHDYFDHHNIIGWTREGNTTHPNSGLATIMSDGPGGEKWMYVGQNKAGQVWHDITGNKPGTVTINADGWANFSVNGGSVSIWVKR

SEQ ID NO: 17472 - protein, 485 aa, Bacillus sp.
HHNGTNGTMMQYFEWHLPNDGNHWNRLRDDASNLRNRGITAIWIPPAWKGTSQNDVGYGAYDLYDLGEFNQKGTVRTKYGTRSQLESAIHALKNNGVQVYGDVVMNHKGGADATENVLAVEVNPNNRNQEISGDYTIEAWTKFDFPGRGNTYSDFKWRWYHFDGVDWDQSRQFQNRIYKFRGXXKAWDWEVDSEFGNYDYLMYADYDMDHPEVVNELRRWGEWYTNTLNLDGFRIDAVKHIKFSFTRDWLTHVRNATGKEMFAVAEFWKNDLGALENYLNKTNWNHSVFDVPLHYNLYNASNSGGNYDMAKLLNGTVVQKHPMHAVTFVDNHDSQPGESLESFVQEWFKPLAYALILTREQGYPSVFYGDYYGIPTHSVPAMKAKIDPILEARQNFAYGTQHDYFDHHNIIGWTREGNTTHPNSGLATIMSDGPGGEKWMYVGQNKAGQVWHDITGNKPGTVTINADGWANFSVNGGSVSIWVKR

SEQ ID NO: 17473 - protein, 483 aa, Unidentified
HHNGTNGTMMQYFEWHLPNDGNHWNRLRDDASNLRNRGITAIWIPPAWKGTSQNDVGYGAYDLYDLGEFNQKGTVRTKYGTRSQLESAIHALKNNGVQVYGDVVMNHKGGADATENVLAVEVNPNNRNQEISGDYTIEAWTKFDFPGRGNTYSDFKWRWYHFDGVDWDQSRQFQNRIYKFRGKAWDWPVDSENGNYDYLMYADVDMDHPEVVNELRRWGEWYTNTLNLDGFRIDAVKHIKYYFTRDWLTHVRNATGKEMFAVAEFWKNDLGALENYLNFTNWNHSVFDVPLHYNLYNASNSGGNYDMAKLLNGTVVQKHPMHAVTFVDNHDSQPGESLESFVQEWFKPLAYALILTREQGYPSVFYGDYYGIPTHSVPAMKAKIDPILEARQNFAYGTQHDYFDHHNIIGWTREGNTTHPNSGLATIMSDGPGGEKWMYVGQNKAGQVWHDITGNKPGTVTINADGWANFSVNGGSVSIWVKR

SEQ ID NO: 17474 - protein, 483 aa, Unidentified
HHNGTNGTMMQYFEWHLPNDGNHWNRLRDDASNLRNRGITAIWIPPAWKGTSQNDVGYGAYDLYDLGEFNQKGTVRTKYGTRSQLESAIHALKNNGVQVYGDVVMNHKGGADATENVLAVEVNPNNRNQEISGDYTIEAWTKFDFPGRGNTYSDFKWRWYHFDGVDWDQSRQFQNRIYKFRGKAWDWPVDSENGNYDYLMYADVDMDHPEVVNELRRWGEWYTNTLNLDGFRIDAVKHIKYFFTRDWLTHVRNATGKEMFAVAEFWKNDLGALENYLNWTNWNHSVFDVPLHYNLYNASNSGGNYDMAKLLNGTVVQKHPMHAVTFVDNHDSQPGESLESFVQEWFKPLAYALILTREQGYPSVFYGDYYGIPTHSVPAMKAKIDPILEARQNFAYGTQHDYFDHHNIIGWTREGNTTHPNSGLATIMSDGPGGEKWMYVGQNKAGQVWHDITGNKPGTVTINADGWANFSVNGGSVSIWVKR

SEQ ID NO: 17475 - protein, 483 aa, Bacillus sp.
HHNGTNGTMMQYFEWHLPNDGNHWNRLRDDASNLRNRGITAIWIPPAWKGTSQNDVGYGAYDLYDLGEFNQKGTVRTKYGTRSQLESAIHALKNNGVQVYGDVVMNHKGGADATENVLAVEVNPNNRNQEISGDYTIEAWTKFDFPGRGNTYSDFKWRWYHFDGVDWDQSRQFQNRIYKFRGKAWDWEVDSEFGNYDYLMYADGDMDHPEVVNELRRWGEWYTNTLNLDGFRIDAVKHIKFSFTRDWLTHVRNATGKEMFAVAEFWKNDLGALENYLNKTNWNHSVFDVPLHYNLYNASNSGGNYDMAKLLNGTVVQKHPMHAVTFVDNHDSQPGESLESFVQEWFKPLAYALILTREQGYPSVFYGDYYGIPTHSVPAMKAKIDPILEARQNFAYGTQHDYFDHHNIIGWTREGNTTHPNSGLATIMSDGPGGEKWMYVGQNKAGQVWHDITGNKPGTVTINADGWANFSVNGGSVSIWVKR

SEQ ID NO: 17476 - protein, 483 aa, Bacillus sp.
HHNGTNGTMMQYFEWHLPNDGNHWNRLRDDASNLRNRGITAIWIPPAWKGTSQNDVGYGAYDLYDLGEFNQKGTVRTKYGTRSQLESAIHALKNNGVQVYGDVVMNHKGGADATENVLAVEVNPNNRNQEISGDYTIEAWTKFDFPGRGNTYSDFKWRWYHFDGVDWDQSRQFQNRIYKFRGKAWDWEVDSEFGNYDYLMYADFDMDHPEVVNELRRWGEWYTNTLNLDGFRIDAVKHIKFSFTRDWLTHVRNATGKEMFAVAEFWKNDLGALENYLNKTNWNHSVFDVPLHYNLYNASNSGGNYDMAKLLNGTVVQKHPMHAVTFVDNHDSQPGESLESFVQEWFKPLAYALILTREQGYPSVFYGDYYGIPTHSVPAMKAKIDPILEARQNFAYGTQHDYFDHHNIIGWTREGNTTHPNSGLATIMSDGPGGEKWMYVGQNKAGQVWHDITGNKPGTVTINADGWANFSVNGGSVSIWVKR

SEQ ID NO: 17477 - protein, 483 aa, Bacillus sp.
HHNGTNGTMMQYFEWHLPNDGNHWNRLRDDASNLRNRGITAIWIPPAWKGTSQNDVGYGAYDLYDLGEFNQKGTVRTKYGTRSQLESAIHALKNNGVQVYGDVVMNHKGGADATENVLAVEVNPNNRNQEISGDYTIEAWTKFDFPGRGNTYSDFKWRWYHFDGVDWDQSRQFQNRIYKFRGKAWDWEVDSEFGNYDYLMYADYDMDHPEVVNELRRWGEWYTNTLNLDGFRIDAVKHIKFSFTRDWLTHVRNATGKEMFAVAEFWKNDLGALENYLNKTNWNHSVFDVPLHYNLYNASNSGGNYDMAKLLNGTVVQKHPMHAVTFVDNHDSQPGESLESFVQEWFKPLAYALILTREQGYPSVFYGDYYGIPTHSVPAMKAKIDPILEARQNFAYGTQHDYFDHHNIIGWTREGNTTHPNSGLATIMSDGPGGEKWMYVGQNKAGQVWHDITGNKPGTVTINADGWANFSVNGGSVSIWVKR

SEQ ID NO: 17478 - protein, 483 aa, Bacillus sp.
HHNGTNGTMMQYFEWHLPNDGNHWNRLRDDASNLRNRGITAIWIPPAWKGTSQNDVGYGAYDLYDLGEFNQKGTVRTKYGTRSQLESAIHALKNNGVQVYGDVVMNHKGGADATENVLAVEVNPNNRNQEISGDYTIEAWTKFDFPGRGNTYSDFKWRWYHFDGVDWDQSRQFQNRIYKFRGKAWDWEVDSEFGNYDYLMYADLDMDYPEVVNELRRWGEWYTNTLNLDGFRIDAVKHIKYSFTRDWLTHVRNATGKEMFAVAEFWKNDLGALENYLNKTNWNHSVFDVPLHYNLYNASNSGGNYDMAKLLNGTVVQKHPMHAVTFVDNHDSQPGESLESFVQEWFKPLAYALILTREQGYPSVFYGDYYGIPTHSVPAMKAKIDPILEARQNFAYGTQHDYFDHHNIIGWTREGNTTHPNSGLATIMSDGPGGEKWMYVGQNKAGQVWHDITGNKPGTVTINADGWANFSVNGGSVSIWVKR

SEQ ID NO: 17479 - protein, 483 aa, Bacillus sp.
HHNGTNGTMMQYFEWHLPNDGNHWNRLRDDASNLRNRGITAIWIPPAWKGTSQNDVGYGAYDLYDLGEFNQKGTVRTKYGTRSQLESAIHALKNNGVQVYGDVVMNHKGGADATENVLAVEVNPNNRNQEISGDYTIEAWTKFDFPGRGNTYSDFKWRWYHFDGVDWDQSRQFQNRIYKFRGKAWDWEVDSEFGNYDYLMYADLDMDHPEVVNELRRWGEWYTNTLNLDGFRIDAVKHIKFSFTRDWLTHVRNATGKEMFAVAEFWKNDLGALENYLNKTNWNHSVFDVPLHYNLYNASNSGGNYDMAKLLNGTVVQKHPMHAVTFVDNHDSQPGESLESFVQEWFKPLAYALILTREQGYPSVFYGDYYGIPTHSVPAMKAKIDPILEARQNFAYGTQHDYFDHHNIIGWTREGNTTHPNSGLATIMSDGPGGEKWMYVGQNKAGQVWHDITGNKPGTVTINADGWANFSVNGGSVSIWVKR

SEQ ID NO: 17480 - protein, 485 aa, Bacillus sp.
HHNGTNGTMMQYFEWHLPNDGNHWNRLRDDASNLRNRGITAIWIPPAWKGTSQNDVGYGAYDLYDLGEFNQKGTVRTKYGTRSQLESAIHALKNNGVQVYGDVVMNHKGGADATENVLAVEVNPNNRNQEISGDYTIEAWTKFDFPGRGNTYSDFKWRWYHFDGVDWDQSRQFQNRIYKFRGXXKAWDWEVDSEFGNYDYLMYADFDMDHPEVVNELRRWGEWYTNTLNLDGFRIDAVKHIKFSFTRDWLTHVRNATGKEMFAVAEFWKNDLGALENYLNKTNWNHSVFDVPLHYNLYNASNSGGNYDMAKLLNGTVVQKHPMHAVTFVDNHDSQPGESLESFVQEWFKPLAYALILTREQGYPSVFYGDYYGIPTHSVPAMKAKIDPILEARQNFAYGTQHDYFDHHNIIGWTREGNTTHPNSGLATIMSDGPGGEKWMYVGQNKAGQVWHDITGNKPGTVTINADGWANFSVNGGSVSIWVKR

SEQ ID NO: 17481 - protein, 483 aa, Bacillus sp.
HHNGTNGTMMQYFEWHLPNDGNHWNRLRDDASNLRNRGITAIWIPPAWKGTSQNDVGYGAYDLYDLGEFNQKGTVRTKYGTRSQLESAIHALKNNGVQVYGDVVMNHKGGADATENVLAVEVNPNNRNQEISGDYTIEAWTKFDFPGRGNTYSDFKWRWYHFDGVDWDQSRQFQNRIYKFRGKAWDWEVDSENGNYDYLMYADVDMDHPEVVNELRRWGEWYTNTLNLDGFRIDAVKHIKYSFTRDWLTHVRNATGKEMFAVAEFWKNDLGALENYLNKTNWNHSVFDVPLHYNLYNASNSGGNYDMAKLLNGTVVQKHPMHAVTFVDNHDSQPGESLESFVQEWFKPLAYALILTREQGYPSVFYGDYYGIPTHSVPAMKAKIDPILEARQNFAYGTQHDYFDHHNIIGWTREGNTTHPNSGLATIMSDGPGGEKWMYVGQDKAGQVWHDITGNKPGTVTINADGWANFSVNGGSVSIWVPK

SEQ ID NO: 17482 - protein, 485 aa, Bacillus sp.
HHNGTNGTMMQYFEWHLPNDGNHWNRLRDDASNLRNRGITAIWIPPAWKGTSQNDVGYGAYDLYDLGEFNQKGTVRTKYGTRSQLESAIHALKNNGVQVYGDVVMNHKGGADATENVLAVEVNPNNRNQEISGDYTIEAWTKFDFPGRGNTYSDFKWRWYHFDGVDWDQSRQFQNRIYKFRGXXKAWDWEVDSEFGNYDYLMYADNDMDHPEVVNELRRWGEWYTNTLNLDGFRIDAVKHIKFSFTRDWLTHVRNATGKEMFAVAEFWKNDLGALENYLNKTNWNHSVFDVPLHYNLYNASNSGGNYDMAKLLNGTVVQKHPMHAVTFVDNHDSQPGESLESFVQEWFKPLAYALILTREQGYPSVFYGDYYGIPTHSVPAMKAKIDPILEARQNFAYGTQHDYFDHHNIIGWTREGNTTHPNSGLATIMSDGPGGEKWMYVGQNKAGQVWHDITGNKPGTVTINADGWANFSVNGGSVSIWVKR

SEQ ID NO: 17483 - protein, 485 aa, Bacillus sp.
HHNGTNGTMMQYFEWHLPNDGNHWNRLRDDASNLRNRGITAIWIPPAWKGTSQNDVGYGAYDLYDLGEFNQKGTVRTKYGTRSQLESAIHALKNNGVQVYGDVVMNHKGGADATENVLAVEVNPNNRNQEISGDYTIEAWTKFDFPGRGNTYSDFKWRWYHFDGVDWDQSRQFQNRIYKFRGXXKAWDWEVDSEFGNYDYLMYADGDMDHPEVVNELRRWGEWYTNTLNLDGFRIDAVKHIKFSFTRDWLTHVRNATGKEMFAVAEFWKNDLGALENYLNKTNWNHSVFDVPLHYNLYNASNSGGNYDMAKLLNGTVVQKHPMHAVTFVDNHDSQPGESLESFVQEWFKPLAYALILTREQGYPSVFYGDYYGIPTHSVPAMKAKIDPILEARQNFAYGTQHDYFDHHNIIGWTREGNTTHPNSGLATIMSDGPGGEKWMYVGQNKAGQVWHDITGNKPGTVTINADGWANFSVNGGSVSIWVKR

SEQ ID NO: 17484 - protein, 485 aa, Bacillus sp.
HHNGTNGTMMQYFEWHLPNDGNHWNRLRDDASNLRNRGITAIWIPPAWKGTSQNDVGYGAYDLYDLGEFNQKGTVRTKYGTRSQLESAIHALKNNGVQVYGDVVMNHKGGADATETVLAVEVNPNNRNQEISGDYTIEAWTKFDFPGRGNTYSDFKWRWYHFDGVDWDQSRQFQNRIYKFRGXXKAWDWEVDSEYGNNDYLMYADVDMDHPEVVNELRRWGEWYTNTLNLDGFRIDAVKHIKYSFTRDWLTHVRNATGKEMFAVAEFWKNDLGALENYLNKTNWNHSVFDVPLHYNLYNASNSGGNYDMAKLLNGTVVQKHPMHAVTFVDNHDSQPGESLESFVQEWFKPLAYALILTREQGYPSVFYGDYYGIPTHSVPAMKAKIDPILEARQNFAYGTQHDYFDHHNIIGWTREGNTTHPNSGLATIMSDGPGGEKWMYVGQNKAGQVWHDITGNKPGTVTINADGWANFSVNGGSVSIWVKR

SEQ ID NO: 17485 - protein, 485 aa, Bacillus sp.
HHNGTNGTMMQYFEWHLPNDGNHWNRLRDDASNLRNRGITAIWIPPAWKGTSQNDVGYGAYDLYDLGEFNQKGTVRTKYGTRSQLESAIHALKNNGVQVYGDVVMNHKGGADATENVLAVEVNPNNRNQEISGDYTIEAWTKFDFPGRGNTYSDFKWRWYHFDGVDWDQSRQFQNRIYKFRGXXKAWDWEVDSEFGNYDYLMYADLDMDYPEVVNELRRWGEWYTNTLNLDGFRIDAVKHIKYSFTRDWLTHVRNATGKEMFAVAEFWKNDLGALENYLNKTNWNHSVFDVPLHYNLYNASNSGGNYDMAKLLNGTVVQKHPMHAVTFVDNHDSQPGESLESFVQEWFKPLAYALILTREQGYPSVFYGDYYGIPTHSVPAMKAKIDPILEARQNFAYGTQHDYFDHHNIIGWTREGNTTHPNSGLATIMSDGPGGEKWMYVGQNKAGQVWHDITGNKPGTVTINADGWANFSVNGGSVSIWVKR

SEQ ID NO: 17486 - protein, 483 aa, Unidentified
HHNGTNGTMMQYFEWHLPNDGNHWNRLRDDASNLRNRGITAIWIPPAWKGTSQNDVGYGAYDLYDLGEFNQKGTVRTKYGTRSQLESAIHALKNNGVQVYGDVVMNHKGGADATENVLAVEVNPNNRNQEISGDYTIEAWTKFDFPGRGNTYSDFKWRWYHFDGVDWDQSRQFQNRIYKFRGKAWDWPVDSENGNYDYLMYADVDMDHPEVVNELRRWGEWYTNTLNLDGFRIDAVKHIKYYFTRDWLTHVRNATGKEMFAVAEFWKNDLGALENYLNWTNWNHSVFDVPLHYNLYNASNSGGNYDMAKLLNGTVVQKHPMHAVTFVDNHDSQPGESLESFVQEWFKPLAYALILTREQGYPSVFYGDYYGIPTHSVPAMKAKIDPILEARQNFAYGTQHDYFDHHNIIGWTREGNTTHPNSGLATIMSDGPGGEKWMYVGQNKAGQVWHDITGNKPGTVTINADGWANFSVNGGSVSIWVKR

SEQ ID NO: 17487 - protein, 485 aa, Bacillus sp.
HHNGTNGTMMQYFEWHLPNDGNHWNRLRDDASNLRNRGITAIWIPPAWKGTSQNDVGYGAYDLYDLGEFNQKGTVRTKYGTRSQLESAIHALKNNGVQVYGDVVMNHKGGADATENVLAVEVNPNNRNQEISGDYTIEAWTKFDFPGRGNTYSDFKWRWYHFDGVDWDQSRQFQNRIYKFRXXGKAWDWEVDSEFGNYDYLMYADTDMDHPEVVNELRRWGEWYTNTLNLDGFRIDAVKHIKFSFTRDWLTHVRNATGKEMFAVAEFWKNDLGALENYLNKTNWNHSVFDVPLHYNLYNASNSGGNYDMAKLLNGTVVQKHPMHAVTFVDNHDSQPGESLESFVQEWFKPLAYALILTREQGYPSVFYGDYYGIPTHSVPAMKAKIDPILEARQNFAYGTQHDYFDHHNIIGWTREGNTTHPNSGLATIMSDGPGGEKWMYVGQNKAGQVWHDITGNKPGTVTINADGWANFSVNGGSVSIWVKR

SEQ ID NO: 17488 - protein, 485 aa, Bacillus sp.
HHNGTNGTMMQYFEWHLPNDGNHWNRLRDDASNLRNRGITAIWIPPAWKGISQNDVGYGAYDLYDLGEFNQKGTVRTKYGTRSQLESAIHALKNNGVQVYGDVVMNHKGGADATENVLAVEVNPNNRNQEISGVYTIEAWTKFDFPGRGNTYSDFKWRWYHFDGVDWDQSRQFQNRIYKFRGDGKAWDWEVDSENGNYDYLMYADVDMDHPEVVNELRRWGEWYTNTLNLDGFRIDAVKHIKYSFTRDWLTHVRNATGKEMFAVAEFWKNDLGALENYLNKTNWNHSVFDVPLHYNLYNASNSGGNYDMAKLLNGTVVQKHPMHAVTFVDNHDSQPGESLESFVQEWFKPLAYALILTREQGYPSVFYGDYYGIPTHSVPAMKAKIDPILEARQNFAYGTQHDYFDHHNIIGWTREGNTTHPNSGLATIMSDGPGGEKWMYAGQNKAGQVWHDITGNKPGTVTINADGWANFSVNGGSVSIWVKR

SEQ ID NO: 17489 - protein, 478 aa, Aspergillus oryzae
ATPADWRSQSIYFLLTDRFARTDGSTTATCNTADQKYCGGTWQGIIDKLDYIQGMGFTAIWITPVTAQLPQTTAYGDAYHGYWQQDIYSLNENYGTADDLKALSSALHERGMYLMVDVVANHMGYDGAGSSVDYSVFKPFSSQDYFHPFCFIQNYEDQTGVEDCQLGDNTVSLPDLDTTKDVVKNEWYDWVGSLVSNYSIDGLRIDTVKHVQKDFWPGYNKAAGVYCIGEVLDGDPAYTCPYQNVMDGVLNYPIYYPLLNAFKSTSGSMDDLYNMINTVKSDCPDSTLLGTFVENHDNPRFASYTNDIALAKNVAAFIILNDGIPIIYAGQEQHYAGGNDPANREATWLSGYPTDSELYKLIASANAIRNYAISKDTGFVTYKNWPIYKDDITIAMRKGTDGSQIVTILSNKGASGDSYTLSLSGAGYTAGQQLTEVIGCTTVTVGSDGNVPVPMAGGLPRVLYPTEKLAGSKICSSS

SEQ ID NO: 17490 - protein, 478 aa, Aspergillus oryzae
ATPADWRSQSIYFLLTDRFARTDGSTTATCNTADKKYCGGTWQGIIDKLDYIQGMGFTAIWITPVTAQLPQTTAFGDAYHGYWQQDIYSLNENYGTADDLKALSSALHERGMYLMVDVVANHMGYDGAGSSVDYSVFKPFSSQDYFHPFCFIQNYEDQTQVEDCWLGYNTVSLPDLDTTKDVVKNEWYDWVGSLVSNYSIDGLRIDTVKHVQKDFWPGYNKAAGVYCIGEVLDGDPAYTCPYQNVMDGVLNYPIYYPLLNAFKSTSGSMDDLYNMINTVKSDCPDSTLLGTFVENHDNPRFASYTNDIALAKNVAAFIILNDGIPIIYAGQEQHYAGGNDPANREATWLSGYPTDSELYKLIASANAIRNYAISKDTGFVTYKNWPIYKDDTTIAMRKGTDGSQIVTILSNKGASGDSYTLSLSGAGYTAGQQLTEVIGCTTVTVGSDGNVPVPMAGGLPRVLYPTEKLAGSKICSSS

SEQ ID NO: 17491 - protein, 478 aa, Aspergillus oryzae
ATPADWRSQSIYFLLTDRFARTDGSTTATCNTADRKYCGGTWQGIIDKLDYIQGMGFTAIWITPVTAQLPQTTAFGDAYHGYWQQDIYSLNENYGTADDLKALSSALHERGMYLMVDVVANHMGYDGAGSSVDYSVFKPFSSQDYFHPFCFIQNYEDQTQVEDCWLGYNTVSLPDLDTTKDVVKNEWYDWVGSLVSNYSIDGLRIDTVKHVQKDFWPGYNKAAGVYCIGEVLDGDPAYTCPYQNVMDGVLNYPIYYPLLNAFKSTSGSMDDLYNMINTVKSDCPDSTLLGTFVENHDNPRFASYTNDIALAKNVAAFIILNDGIPIIYAGQEQHYAGGNDPANREATWLSGYPTDSELYKLIASANAIRNYAISKDTGFVTYKNWPIYKDDTTIAMRKGTDGSQIVTILSNKGASGDSYTLSLSGAGYTAGQQLTEVIGCTTVTVGSDGNVPVPMAGGLPRVLYPTEKLAGSKICSSS

SEQ ID NO: 17492 - protein, 479 aa, Aspergillus oryzae
ATPADWRSQSIYFLLTDRFARTDGSTTATCNTADQKYCGGTWQGIIDKLDYIQGMGFTAIWITPVTAQLPQTTAYGDAYHGYWQQDIYSLNENYGTADDLKALSSALHERGMYLMVDVVANHMGYDGAGSSVDYSVFKPFSSQDYFHPFCFIQNYEDQTQVEDCWLGDPAGLSLPDLDTTKDVVKNEWYDWVGSLVSNYSIDGLRIDTVKHVQKDFWPGYNKAAGVYCIGEVLDGDPAYTCPYQNVMDGVLNYPIYYPLLNAFKSTSGSMDDLYNMINTVKSDCPDSTLLGTFVENHDNPRFASYTNDIALAKNVAAFIILNDGIPIIYAGQEQHYAGGNDPANREATWLSGYPTDSELYKLIASANAIRNYAISKDTGFVTYKNWPIYKDDTTIAMRKGTDGSQIVTILSNKGASGDSYTLSLSGAGYTAGQQLTEVIGCTTVTVGSDGNVPVPMAGGLPRVLYPTEKLAGSKICSSS

SEQ ID NO: 17493 - protein, 479 aa, Aspergillus oryzae
ATPADWRSQSIYFLLTDRFARTDGSTTATCNTADQKYCGGTWQGIIDKLDYIQGMGFTAIWITPVTAQLPQTTAYGDAYHGYWQQDIYSLNENYGTADDLKALSSALHERGMYLMVDVVANHMGYDGAGSSVDYSVFKPFSSQDYFHPFCFIQNYEDQTQVEDCWLGDPAGFSLPDLDTTKDVVKNEWYDWVGSLVSNYSIDGLRIDTVKHVQKDFWPGYNKAAGVYCIGEVLDGDPAYTCPYQNVMDGVLNYPIYYPLLNAFKSTSGSMDDLYNMINTVKSDCPDSTLLGTFVENHDNPRFASYTNDIALAKNVAAFIILNDGIPIIYAGQEQHYAGGNDPANREATWLSGYPTDSELYKLIASANAIRNYAISKDTGFVTYKNWPIYKDDTTIAMRKGTDGSQIVTILSNKGASGDSYTLSLSGAGYTAGQQLTEVIGCTTVTVGSDGNVPVPMAGGLPRVLYPTEKLAGSKICSSS

SEQ ID NO: 17494 - protein, 479 aa, Aspergillus oryzae
ATPADWRSQSIYFLLTDRFARTDGSTTATCNTADQKYCGGTWQGIIDKLDYIQGMGFTAIWITPVTAQLPQTTAYGDAYHGYWQQDIYSLNENYGTADDLKALSSALHERGMYLMVDVVANHMGYDGAGSSVDYSVFKPFSSQDYFHPFCFIQNYEDQTQVEDCWLGDPAGCSLPDLDTTKDVVKNEWYDWVGSLVSNYSIDGLRIDTVKHVQKDFWPGYNKAAGVYCIGEVLDGDPAYTCPYQNVMDGVLNYPIYYPLLNAFKSTSGSMDDLYNMINTVKSDCPDSTLLGTFVENHDNPRFASYTNDIALAKNVAAFIILNDGIPIIYAGQEQHYAGGNDPANREATWLSGYPTDSELYKLIASANAIRNYAISKDTGFVTYKNWPIYKDDTTIAMRKGTDGSQIVTILSNKGASGDSYTLSLSGAGYTAGQQLTEVIGCTTVTVGSDGNVPVPMAGGLPRVLYPTEKLAGSKICSSS

SEQ ID NO: 17495 - protein, 542 aa, Geobacillus stearothermophilus
MKQQKRLYARLLTLLFALIFLLPHSAASAAAPFNGTMMQYFEWYLPDDGTLWTKVANEANNLSSLGITALWLPPAYKGTSRSDVGYGVYDLYDLGEFNQKGTVRTKYGTKAQYLQAIQAAHAAGMQVYADVVFDHKGGADGTEWVDAVEVNPSDRNQEISGTYQIQAWTKFDFPGRGNTYSSFKWRWYHFDGVDWDESRKLSRIYKFIGKAWDWEVDTENGNYDYLMYADLDMDHPEVVTELKNWGKWYVNTTNIDGFRLDAVKHIKFSFFPDWLSYVRSQTGKPLFTVGEYWSYDINKLHNYITKTNGTMSLFDAPLHNKFYTASKSGGAFDMRTLMTNTLMKDQPTLAVTFVDNHDTEPGQALQSWVDPWFKPLAYAFILTRQEGYPCVFYGDYYGIPQYNIPSLKSKIDPLLIARRDYAYGTQHDYLDHSDIIGWTREGVTEKPGSGLAALITDGPGGSKWMYVGKQHAGKVFYDLTGNRSDTVTINSDGWGEFKVNGGSVSVWVPRKTTVSTIARPITTRPWTGEFVRWTEPRLVAWP

SEQ ID NO: 17496 - protein, 516 aa, Synthetic construct
AAAPFNGTMMQYFEWYLPDDGTLWTKVANEANNLSSLGITALWLPPAYKGTSRSDVGYGVYDLYDLGEFNQKGTVRTKYGTKAQYLQAIQAAHAAGMQVYADVVFDHKGGADGTEWVDAVEVNPSDRNQEISGTYQIQAWTKFDFPGRGNTYSSFKWRWYHFDGVDWDESRKLSRIYKFRGIGKAWDWEVDTENGNYDYLMYADLDMDHPEVVTELKNWGEWYVNTTNIDGFRLDAVKHIKFSFFPDWLSYVRSQTGKPLFTVGEYWSYDINKLHNYITKTNGTMSLFDAPLHNKFYTASKSGGAFDMRTLMTNTLMKDQPTLAVTFVDNHDTEPGQALQSWVDPWFKPLAYAFILTRQEGYPCVFYGDYYGIPQYNIPSLKSKIDPLLIARRDYAYGTQHDYLDHSDIIGWTREGVTEKPGSGLAALITDGPGGSKWMYVGKQHAGKVFYDLTGNRSDTVTINSDGWGEFKVNGGSVSVWVPRKTTVSTIARPITTRPWTGEFVRWTEPRLVAWP

SEQ ID NO: 17497 - protein, 516 aa, unidentified
AAAPFNGTMMQYFEWYLPDDGTLWTKVANEANNLSSLGITALWLPPAYKGTSRSDVGYGVYDLYDLGEFNQKGTVRTKYGTKAQYLQAIQAAHAAGMQVYADVVFDHKGGADGTEWVDAVEVNPSDRNQEISGTYQIQAWTKFDFPGRGNTYSSFKWRWYHFDGVDWDESRKLSRIYKFRGIGKAWDWEVDTENGNYDYLMYADLDMDHPEVVTELKNWGKWYVNTTNIDGFRLDAVKHIKFSFFPDWLSYVRSQTGKPLFTVGEYWSYDINKLHNYITKTNGTMSLFDAPLHNKFYTASKSGGAFDMRTLMTNTLMKDQPTLAVTFVDNHDTEPGQALQSWVDPWFKPLAYAFILTRQEGYPCVFYGDYYGIPQYNIPSLKSKIDPLLIARRDYAYGTQHDYLDHSDIIGWTREGVTEKPGSGLAALITDGPGGSKWMYVGKQHAGKVFYDLTGNRSDTVTINSDGWGEFKVNGGSVSVWVPRKTTVSTIAWPITTRPWTGEFVRWTEPRLVAWP

SEQ ID NO: 17498 - protein, 513 aa, Geobacillus stearothermophilus
AAPFNGTMMQYFEWYLPDDGTLWTKVANEANNLSSLGITALWLPPAYKGTSRSDVGYGVYDLYDLGEFNQKGTVRTKYGTKAQYLQAIQAAHAAGMQVYADVVFDHKGGADGTEWVDAVEVNPSDRNQEISGTYQIQAWTKFDFPGRGNTYSSFKWRWYHFDGVDWDESRKLSRIYKFIGKAWDWEVDTENGNYDYLMYADLDMDHPEVVTELKNWGKWYVNTTNIDGFRLDAVKHIKFSFFPDWLSYVRSQTGKPLFTVGEYWSYDINKLHNYITKTNGTMSLFDAPLHNKFYTASKSGGAFDMRTLMTNTLMKDQPTLAVTFVDNHDTEPGQALQSWVDPWFKPLAYAFILTRQEGYPCVFYGDYYGIPQYNIPSLKSKIDPLLIARRDYAYGTQHDYLDHSDIIGWTREGVTEKPGSGLAALITDGPGGSKWMYVGKQHAGKVFYDLTGNRSDTVTINSDGWGEFKVNGGSVSVWVPRKTTVSTIARPITTRPWTGEFVRWTEPRLVAWP

SEQ ID NO: 17499 - protein, 514 aa, Geobacillus stearothermophilus
AAPFNGTMMQYFEWYLPDDGTLWTKVANEANNLSSLGITALWLPPAYKGTSRSDVGYGVYDLYDLGEFNQKGTVRTKYGTKAQYLQAIQAAHAAGMQVYADVVFDHKGGRADGTEWVDAVEVNPSDRNQEISGTYQIQAWTKFDFPGRGNTYSSFKWRWYHFDGVDWDESRKLSRIYKFIGKAWDWEVDTENGNYDYLMYADLDMDHPEVVTELKNWGKWYVNTTNIDGFRLDAVKHIKFSFFPDWLSYVRSQTGKPLFTVGEYWSYDINKLHNYITKTNGTMSLFDAPLHNKFYTASKSGGAFDMRTLMTNTLMKDQPTLAVTFVDNHDTEPGQALQSWVDPWFKPLAYAFILTRQEGYPCVFYGDYYGIPQYNIPSLKSKIDPLLIARRDYAYGTQHDYLDHSDIIGWTREGVTEKPGSGLAALITDGPGGSKWMYVGKQHAGKVFYDLTGNRSDTVTINSDGWGEFKVNGGSVSVWVPRKTTVSTIARPITTRPWTGEFVRWTEPRLVAWP

SEQ ID NO: 17500 - protein, 514 aa, Geobacillus stearothermophilus
AAPFNGTMMQYFEWYLPDDGTLWTKVANEANNLSSLGITALWLPPAYKGTSRSDVGYGVYDLYDLGEFNQKGTVRTKYGTKAQYLQAIQAAHAAGMQVYADVVFDHKGGADGTEWVDAVEVNPSDRNQEISGTYQIQAWTKFDFPGRGNTYSSFKWRWYHFDGVDWDESRKLSRIYKFRGIGAWDWEVDTENGNYDYLMYADLDMDHPEVVTELKNWGKWYVNTTNIDGFRLDAVKHIKFSFFPDWLSYVRSQTGKPLFTVGEYWSYDINKLHNYITKTNGTMSLFDAPLHNKFYTASKSGGAFDMRTLMTNTLMKDQPTLAVTFVDNHDTEPGQALQSWVDPWFKPLAYAFILTRQEGYPCVFYGDYYGIPQYNIPSLKSKIDPLLIARRDYAYGTQHDYLDHSDIIGWTREGVTEKPGSGLAALITDGPGGSKWMYVGKQHAGKVFYDLTGNRSDTVTINSDGWGEFKVNGGSVSVWVPRKTTVSTIARPITTRPWTGEFVRWTEPRLVAWP

SEQ ID NO: 17501 - protein, 514 aa, Geobacillus stearothermophilus
AAPFNGTMMQYFEWYLPDDGTLWTKVANEANNLSSLGITALWLPPAYKGTSRSDVGYGVYDLYDLGEFNQKGTVRTKYGTKAQYLQAIQAAHAAGMQVYADVVFDHKGGADGTEWVDAVEVNPSDRNQEISGTYQIQAWTKFDFPGRGNTYSSFKWRWYHFDGVDWDESRKLSRIYKFGIGKAWDWEVDTENGNYDYLMYADLDMDHPEVVTELKNWGKWYVNTTNIDGFRLDAVKHIKFSFFPDWLSYVRSQTGKPLFTVGEYWSYDINKLHNYITKTNGTMSLFDAPLHNKFYTASKSGGAFDMRTLMTNTLMKDQPTLAVTFVDNHDTEPGQALQSWVDPWFKPLAYAFILTRQEGYPCVFYGDYYGIPQYNIPSLKSKIDPLLIARRDYAYGTQHDYLDHSDIIGWTREGVTEKPGSGLAALITDGPGGSKWMYVGKQHAGKVFYDLTGNRSDTVTINSDGWGEFKVNGGSVSVWVPRKTTVSTIARPITTRPWTGEFVRWTEPRLVAWP

SEQ ID NO: 17502 - protein, 515 aa, Geobacillus stearothermophilus
AAPFNGTMMQYFEWYLPDDGTLWTKVANEANNLSSLGITALWLPPAYKGTSRSDVGYGVYDLYDLGEFNQKGTVRTKYGTKAQYLQAIQAAHAAGMQVYADVVFDHKGGADGTEWVDAVEVNPSDRNQEISGTYQIQAWTKFDFPGRGNTYSSFKWRWYHFDGVDWDESRKLSRIYKFRGIGKAWDWEVDTENGNYDYLMYADLDMDHPEVVTELKNWGKWYVNTTNIDGFRLDAVKHIKFSFFPDWLSYVRSQTGKPLFTVGEYWSYDINKLHNYITKTNGTMSLFDAPLHNKFYTASKSGGAFDMRTLMTNTLMKDQPTLAVTFVDNHDTEPGQALQSWVDPWFKPLAYAFILTRQEGYPCVFYGDYYGIPQYNIPSLKSKIDPLLIARRDYAYGTQHDYLDHSDIIGWTREGVTEKPGSGLAALITDGPGGSKWMYVGKRHAGKVFYDLTGNRSDTVTINSDGWGEFKVNGGSVSVWVPRKTTVSTIARPITTRPWTGEFVRWTEPRLVAWP

SEQ ID NO: 17503 - protein, 515 aa, Geobacillus stearothermophilus
AAPFNGTMMQYFEWYLPDDGTLWTKVANEANNLSSLGITALWLPPAYKGTSRSDVGYGVYDLYDLGEFNQKGTVRTKYGTKAQYLQAIQAAHAAGMQVYADVVFDHKGGADGTEWVDAVEVNPSDRNQEISGTYQIQAWTKFDFPGRGNTYSSFKWRWYHFDGVDWDESRKLSRIYKFRGIGKAWDWEVDTENGNYDYLMYADLDMDHPEVVTELKNWGKWYVNTTNIDGFRLDAVKHIKFSFFPDWLSYVRSQTGKPLFTVGEYWSYDINKLHNYITKTNGTMSLFDAPLHNKFYTASKSGGAFDMRTLMTNTLMKDQPTLAVTFVDNHDTEPGQALQSWVDPWFKPLAYAFILTRREGYPCVFYGDYYGIPQYNIPSLKSKIDPLLIARRDYAYGTQHDYLDHSDIIGWTREGVTEKPGSGLAALITDGPGGSKWMYVGKQHAGKVFYDLTGNRSDTVTINSDGWGEFKVNGGSVSVWVPRKTTVSTIARPITTRPWTGEFVRWTEPRLVAWP

SEQ ID NO: 17504 - protein, 515 aa, Geobacillus stearothermophilus
AAPFNGTMMQYFEWYLPDDGTLWTKVANEANNLSSLGITALWLPPAYKGTSRSDVGYGVYDLYDLGEFNQKGTVRTKYGTKAQYLQAIQAAHAAGMQVYADVVFDHKGGADGTEWVDAVEVNPSDRNQEISGTYQIQAWTKFDFPGRGNTYSSFKWRWYHFDGVDWDESRKLSRIYKFRGIGKAWDWEVDTENGNYDYLMYADLDMDHPEVVTELKNWGKWYVNTTNIDGFRLDAVKHIKFMFFPDWLSYVRSQTGKPLFTVGEYWSYDINKLHNYITKTNGTMSLFDAPLHNKFYTASKSGGAFDMRTLMTNTLMKDQPTLAVTFVDNHDTEPGQALQSWVDPWFKPLAYAFILTRQEGYPCVFYGDYYGIPQYNIPSLKSKIDPLLIARRDYAYGTQHDYLDHSDIIGWTREGVTEKPGSGLAALITDGPGGSKWMYVGKQHAGKVFYDLTGNRSDTVTINSDGWGEFKVNGGSVSVWVPRKTTVSTIARPITTRPWTGEFVRWTEPRLVAWP

SEQ ID NO: 17505 - protein, 515 aa, Geobacillus stearothermophilus
AAPFNGTMMQYFEWYLPDDGTLWTKVANEANNLSSLGITALWLPPAYKGTSRSDVGYGVYDLYDLGEFNQKGTVRTKYGTKAQYLQAIQAAHAAGMQVYADVVFDHKGGADGTEWVDAVEVNPSDRNQEISGTYQIQAWTKFDFPGRGNTYSSFKWRWYHFDGVDWDESRKLSRIYKFRGIGKAWDWEVDTENGNYDYLMYADLDMDHPEVVTELKNWGKWYVNTTNIDGFRLDAVKHIKFGFFPDWLSYVRSQTGKPLFTVGEYWSYDINKLHNYITKTNGTMSLFDAPLHNKFYTASKSGGAFDMRTLMTNTLMKDQPTLAVTFVDNHDTEPGQALQSWVDPWFKPLAYAFILTRQEGYPCVFYGDYYGIPQYNIPSLKSKIDPLLIARRDYAYGTQHDYLDHSDIIGWTREGVTEKPGSGLAALITDGPGGSKWMYVGKQHAGKVFYDLTGNRSDTVTINSDGWGEFKVNGGSVSVWVPRKTTVSTIARPITTRPWTGEFVRWTEPRLVAWP

SEQ ID NO: 17506 - protein, 515 aa, Geobacillus stearothermophilus
AAPFNGTMMQYFEWYLPDDGTLWTKVANEANNLSSLGITALWLPPAYKGTSRSDVGYGVYDLYDLGEFNQKGTVRTKYGTKAQYLQAIQAAHAAGMQVYADVVFDHKGGADGTEWVDAVEVNPSDRNQEISGTYQIQAWTKFDFPGRGNTYSSFKWRWYHFDGVDWDESRKLSRIYKFRGIGKAWDWEVDTENGNYDYLMYADLDMDHPEVVTELKNWGKWYVNTTNIDGFRLDAVKHIKFNFFPDWLSYVRSQTGKPLFTVGEYWSYDINKLHNYITKTNGTMSLFDAPLHNKFYTASKSGGAFDMRTLMTNTLMKDQPTLAVTFVDNHDTEPGQALQSWVDPWFKPLAYAFILTRQEGYPCVFYGDYYGIPQYNIPSLKSKIDPLLIARRDYAYGTQHDYLDHSDIIGWTREGVTEKPGSGLAALITDGPGGSKWMYVGKQHAGKVFYDLTGNRSDTVTINSDGWGEFKVNGGSVSVWVPRKTTVSTIARPITTRPWTGEFVRWTEPRLVAWP

SEQ ID NO: 17507 - protein, 515 aa, Geobacillus stearothermophilus
AAPFNGTMMQYFEWYLPDDGTLWTKVANEANNLSSLGITALWLPPAYKGTSRSDVGYGVYDLYDLGEFNQKGTVRTKYGTKAQYLQAIQAAHAAGMQVYADVVFDHKGGADGTEWVDAVEVNPSDRNQEISGTYQIQAWTKFDFPGRGNTYSSFKWRWYHFDGVDWDESRKLSRIYKFRGIGKAWDWEVDTENGNYDYLMYADLDMDHPEVVTELKNWGKWYVNTTNIDGFRLDAVKHIKFTFFPDWLSYVRSQTGKPLFTVGEYWSYDINKLHNYITKTNGTMSLFDAPLHNKFYTASKSGGAFDMRTLMTNTLMKDQPTLAVTFVDNHDTEPGQALQSWVDPWFKPLAYAFILTRQEGYPCVFYGDYYGIPQYNIPSLKSKIDPLLIARRDYAYGTQHDYLDHSDIIGWTREGVTEKPGSGLAALITDGPGGSKWMYVGKQHAGKVFYDLTGNRSDTVTINSDGWGEFKVNGGSVSVWVPRKTTVSTIARPITTRPWTGEFVRWTEPRLVAWP

SEQ ID NO: 17508 - protein, 515 aa, Geobacillus stearothermophilus
AAPFNGTMMQYFEWYLPDDGTLWTKVANEANNLSSLGITALWLPPAYKGTSRSDVGYGVYDLYDLGEFNQKGTVRTKYGTKAQYLQAIQAAHAAGMQVYADVVFDHKGGADGTEWVDAVEVNPSDRNQEISGTYQIQAWTKFDFPGRGNTYSSFKWRWYHFDGVDWDESRKLSRIYKFRGIGKAWDWEVDTENGNYDYLMYADLDMDHPEVVTELKNWGKWYVNTTNIDGFRLDAVKHIKFSFFPDWLSYVRSQTGKPLFTVGEYWSYDINKLHNYITKTNGTMSLFDAPLHNKFYTASKSGGAFDMRTLMTNTLMKDRPTLAVTFVDNHDTEPGQALQSWVDPWFKPLAYAFILTRQEGYPCVFYGDYYGIPQYNIPSLKSKIDPLLIARRDYAYGTQHDYLDHSDIIGWTREGVTEKPGSGLAALITDGPGGSKWMYVGKQHAGKVFYDLTGNRSDTVTINSDGWGEFKVNGGSVSVWVPRKTTVSTIARPITTRPWTGEFVRWTEPRLVAWP

SEQ ID NO: 17509 - protein, 515 aa, Geobacillus stearothermophilus
AAPFNGTMMQYFEWYLPDDGTLWTKVANEANNLSSLGITALWLPPAYKGTSRSDVGYGVYDLYDLGEFNQKGTVRTKYGTKAQYLQAIQAAHAAGMQVYADVVFDHKGGADGTEWVDAVEVNPSDRNQEISGTYQIQAWTKFDFPGRGNTYSSFKWRWYHFNGVDWDESRKLSRIYKFRGIGKAWNWEVDTENGNYDYLMYADLDMNHPEVVTELKNWGKWYVNTTNIDGFRLDAVKHIKFSFFPDWLSYVRSQTGKPLFTVGEYWSYDINKLHNYITKTDGTMSLFDAPLHNKFYTASKSGGAFDMRTLMTNTLMKDQPTLAVTFVDNHDTEPGQALQSWVDPWFKPLAYAFILTRQEGYPCVFYGDYYGIPQYNIPSLKSKIDPLLIARRDYAYGTQHDYLDHSDIIGWTREGGTEKPGSGLAALITDGPGGSKWMYVGKQHAGKVFYDLTGNRSDTVTINSDGWGEFKVNGGSVSVWVPRKTTVSTIARPITTRPWTGEFVRWTEPRLVAWP

SEQ ID NO: 17510 - protein, 515 aa, Geobacillus stearothermophilus
AAPFNGTMMQYFEWYLPDDGTLWTKVANEANNLSSLGITALWLPPAYKGTSRSDVGYGVYDLYDLGEFNQKGTVRTKYGTKAQYLQAIQAAHAAGMQVYADVVFDHKGGADGTEWVDAVEVNPSDRNQEISGTYQIQAWTKFDFPGRGNTYSSFKWRWYHFDGVDWDESRKLSRIYKFRGIGKAWDWEVDTENGNYDYLMYADLDMDHPEVVTELKNWGKWYVNTTNIDGFRLDAVKHIKFSFFPDWLSYVRSQTGKPLFTVGEYWSYDINKLHNYITKTNGTMSLFDAPLHNKFYTASKSGGAFDMRTLMTNTLMKDQPTLAVTFVDNHDTEPGQALQSWVDPWFKPLAYAFILTRQEGYPCVFYGDYYGIPQYNIPSLKSKIDPLLIARRDYAYGTQHDYLDHSDIIGWTREGVTEKPGSGLAALITDGPGGSKWMYVGKEHAGKVFYDLTGNRSDTVTINSDGWGEFKVNGGSVSVWVPRKTTVSTIARPITTRPWTGEFVRWTEPRLVAWP

SEQ ID NO: 17511 - protein, 515 aa, Geobacillus stearothermophilus
AAPFNGTMMQYFEWYLPDDGTLWTKVANEANNLSSLGITALWLPPAYKGTSRSDVGYGVYDLYDLGEFNQKGTVRTKYGTKAQYLQAIQAAHAAGMQVYADVVFDHKGGADGTEWVDAVEVNPSDRNQEISGTYQIQAWTKFDFPGRGNTYSSFKWRWYHFDGVDWDESRKLSRIYKFRGIGKAWDWEVDTENGNYDYLMYADLDMDHPEVVTELKNWGKWYVNTTNIDGFRLDAVKHIKFSFFPDWVSYVRSQTGKPLFTVGEYWSYDINKLHNYITKTNGTMSLFDAPLHNKFYTASKSGGAFDMRTLMTNTLMKDQPTLAVTFVDNHDTEPGQALQSWVDPWFKPLAYAFILTRQEGYPCVFYGDYYGIPQYNIPSLKSKIDPLLIARRDYAYGTQHDYLDHSDIIGWTREGVTEKPGSGLAALITDGPGGSKWMYVGKQHAGKVFYDLTGNRSDTVTINSDGWGEFKVNGGSVSVWVPRKTTVSTIARPITTRPWTGEFVRWTEPRLVAWP

SEQ ID NO: 17512 - protein, 515 aa, Geobacillus stearothermophilus
AAPFNGTMMQYFEWYLPDDGTLWTKVANEANNLSSLGITALWLPPAYKGTSRSDVGYGVYDLYDLGEFNQKGTVRTKYGTKAQYLQAIQAAHAAGMQVYADVVFDHKGGADGTEWVDAVEVNPSDRNQEISGTYQIQAWTKFDFPGRGNTYSSFKWRWYHFDGVDWDESRKLSRIYKFRGIGKAWDWEVDTENGNYDYLMYADLDMDHPEVVTELKNWGKWYVNTTNIDGFRLDAVKHIKFSFFPDWTSYVRSQTGKPLFTVGEYWSYDINKLHNYITKTNGTMSLFDAPLHNKFYTASKSGGAFDMRTLMTNTLMKDQPTLAVTFVDNHDTEPGQALQSWVDPWFKPLAYAFILTRQEGYPCVFYGDYYGIPQYNIPSLKSKIDPLLIARRDYAYGTQHDYLDHSDIIGWTREGVTEKPGSGLAALITDGPGGSKWMYVGKQHAGKVFYDLTGNRSDTVTINSDGWGEFKVNGGSVSVWVPRKTTVSTIARPITTRPWTGEFVRWTEPRLVAWP

SEQ ID NO: 17513 - protein, 515 aa, Geobacillus stearothermophilus
AAPFNGTMMQYFEWYLPDDGTLWTKVANEANNLSSLGITALWLPPAYKGTSRSDVGYGVYDLYDLGEFNQKGTVRTKYGTKAQYLQAIQAAHAAGMRVYADVVFDHKGGADGTEWVDAVEVNPSDRNQEISGTYQIQAWTKFDFPGRGNTYSSFKWRWYHFDGVDWDESRKLSRIYKFRGIGKAWDWEVDTENGNYDYLMYADLDMDHPEVVTELKNWGKWYVNTTNIDGFRLDAVKHIKFSFFPDWLSYVRSQTGKPLFTVGEYWSYDINKLHNYITKTNGTMSLFDAPLHNKFYTASKSGGAFDMRTLMTNTLMKDQPTLAVTFVDNHDTEPGQALQSWVDPWFKPLAYAFILTRQEGYPCVFYGDYYGIPQYNIPSLKSKIDPLLIARRDYAYGTQHDYLDHSDIIGWTREGVTEKPGSGLAALITDGPGGSKWMYVGKQHAGKVFYDLTGNRSDTVTINSDGWGEFKVNGGSVSVWVPRKTTVSTIARPITTRPWTGEFVRWTEPRLVAWP

SEQ ID NO: 17514 - protein, 515 aa, Geobacillus stearothermophilus
AAPFNGTMMQYFEWYLPDDGTLWTKVANEANNLSSLGITALWLPPAYKGTSRSDVGYGVYDLYDLGEFNQKGTVRTKYGTKAQYLQAIQAAHAAGMQVYADVVFDHKGGADGTEWVDAVEVNPSDRNQEISGTYQIQAWTKFDFPGRGNTYSSFKWRWYHFDGVDWDESRKLSRIYKFRGIGKKWDEEVDTENGNYDYLMYADLDMNHPEVVTELKNWGKWYVNTTNIDGFRLDAVKHIKFSFFPDWLSYVRSQTGKPLFTVGEYWSYDINKLHNYITKTDGTMSLFDAPLHNKFYTASKSGGAFDMRTLMTNTLMKDQPTLAVTFVDNHDTEPGQALQSWVDPWFKPLAYAFILTRQEGYPCVFYGDYYGIPQYNIPSLKSKIDPLLIARRDYAYGTQHDYLDHSDIIGWTREGGTEKPGSGLAALITDGPGGSKWMYVGKQHAGKVFYDLTGNRSDTVTINSDGWGEFKVNGGSVSVWVPRKTTVSTIARPITTRPWTGEFVRWTEPRLVAWP

SEQ ID NO: 17515 - protein, 515 aa, Geobacillus stearothermophilus
AAPFNGTMMQYFEWYLPDDGTLWTKVANEANNLSSLGITALWLPPAYKGTSRSDVGYGVYDLYDLGEFNQKGTVRTKYGTKAQYLQAIQAAHAAGMQVYADVVFDHKGGADGTEWVDAVEVNPSDRNQEISGTYQIQAWTKFDFPGRGNTYSSFKWRWYHFDGVDWDESRKLSRIYKFRGIGKAWDWEVDTENGNYDYLMYADLDMDHPEVVTELKNWGKWYVDTTNIDGFRLDAVKHIKFSFFPDWLSYVRSQTGKPLFTVGEYWSYDINKLHNYITKTNGTMSLFDAPLHNKFYTASKSGGAFDMRTLMTNTLMKDQPTLAVTFVDNHDTEPGQALQSWVDPWFKPLAYAFILTRQEGYPCVFYGDYYGIPQYNIPSLKSKIDPLLIARRDYAYGTQHDYLDHSDIIGWTREGVTEKPGSGLAALITDGPGGSKWMYVGKQHAGKVFYDLTGNRSDTVTINSDGWGEFKVNGGSVSVWVPRKTTVSTIARPITTRPWTGEFVRWTEPRLVAWP

SEQ ID NO: 17516 - protein, 515 aa, Geobacillus stearothermophilus
AAPFNGTMMQYFEWYLPDDGTLWTKVANEANNLSSLGITALWLPPAYKGTSRSDVGYGVYDLYDLGEFNQKGTVRTKYGTKAQYLQAIQAAHAAGMQVYADVVFDHKGGADGTEWVDAVEVNPSDRNQEISGTYQIQAWTKFDFPGRGNTYSSFKWRWYHFDGVDWDESRKLSRIYKFRGIGKAWDWEVDTENGNYDYLMYADLDMDHPEVVTELKNWGKWYVNTTNIDGFRLDAVKHIKFSFFPDWLSYVRSQTGKPLFTVGEYWSYDINKLHNYITKTNGTMSLFDAPLHNKFYTASKSGGAFDMRTLMTNTLMKDEPTLAVTFVDNHDTEPGQALQSWVDPWFKPLAYAFILTRQEGYPCVFYGDYYGIPQYNIPSLKSKIDPLLIARRDYAYGTQHDYLDHSDIIGWTREGVTEKPGSGLAALITDGPGGSKWMYVGKQHAGKVFYDLTGNRSDTVTINSDGWGEFKVNGGSVSVWVPRKTTVSTIARPITTRPWTGEFVRWTEPRLVAWP

SEQ ID NO: 17517 - protein, 515 aa, Geobacillus stearothermophilus
AAPFNGTMMQYFEWYLPDDGTLWTKVANEANNLSSLGITALWLPPAYKGTSRSDVGYGVYDLYDLGEFNQKGTVRTKYGTKAQYLQAIQAAHAAGMQVYADVVFDHKGGADGTEWVDAVEVNPSDRNQEISGTYQIQAWTKFDFPGRGNTYSSFKWRWYHFDGVDWDESRKLSRIYKFRGIGKAWDWEVDTENGNYDYLMYADLDMDHPEVVTELKNWGKWYVNTTNIDGFRLDAVKHIKFEFFPDWLSYVRSQTGKPLFTVGEYWSYDINKLHNYITKTNGTMSLFDAPLHNKFYTASKSGGAFDMRTLMTNTLMKDQPTLAVTFVDNHDTEPGQALQSWVDPWFKPLAYAFILTRQEGYPCVFYGDYYGIPQYNIPSLKSKIDPLLIARRDYAYGTQHDYLDHSDIIGWTREGVTEKPGSGLAALITDGPGGSKWMYVGKQHAGKVFYDLTGNRSDTVTINSDGWGEFKVNGGSVSVWVPRKTTVSTIARPITTRPWTGEFVRWTEPRLVAWP

SEQ ID NO: 17518 - protein, 515 aa, Geobacillus stearothermophilus
AAPFNGTMMQYFEWYLPDDGTLWTKVANEANNLSSLGITALWLPPAYKGTSRSDVGYGQYDLYDLGEFNQKGTVRTKYGTKAQYLQAIQAAHAAGMQVYADVVFDHKGGADGTEWVDAVEVNPSDRNQEISGTYQIQAWTKFDFPGRGNTYSSFKWRWYHFDGVDWDESRKLSRIYKFRGIGKAWDWEVDTENGNYDYLMYADLDMDHPEVVTELKNWGKWYVNTTNIDGFRLDAVKHIKFSFFPDWLSYVRSQTGKPLFTVGEYWSYDINKLHNYITKTNGTMSLFDAPLHNKFYTASKSGGAFDMRTLMTNTLMKDQPTLAVTFVDNHDTEPGQALQSWVDPWFKPLAYAFILTRQEGYPCVFYGDYYGIPQYNIPSLKSKIDPLLIARRDYAYGTQHDYLDHSDIIGWTREGVTEKPGSGLAALITDGPGGSKWMYVGKQHAGKVFYDLTGNRSDTVTINSDGWGEFKVNGGSVSVWVPRKTTVSTIARPITTRPWTGEFVRWTEPRLVAWP

SEQ ID NO: 17519 - protein, 515 aa, Geobacillus stearothermophilus
AAPFNGTMMQYFEWYLPDDGTLWTKVANEANNLSSLGITALWLPPAYKGTSRSDVGYGIYDLYDLGEFNQKGTVRTKYGTKAQYLQAIQAAHAAGMQVYADVVFDHKGGADGTEWVDAVEVNPSDRNQEISGTYQIQAWTKFDFPGRGNTYSSFKWRWYHFDGVDWDESRKLSRIYKFRGIGKAWDWEVDTENGNYDYLMYADLDMDHPEVVTELKNWGKWYVNTTNIDGFRLDAVKHIKFSFFPDWLSYVRSQTGKPLFTVGEYWSYDINKLHNYITKTNGTMSLFDAPLHNKFYTASKSGGAFDMRTLMTNTLMKDQPTLAVTFVDNHDTEPGQALQSWVDPWFKPLAYAFILTRQEGYPCVFYGDYYGIPQYNIPSLKSKIDPLLIARRDYAYGTQHDYLDHSDIIGWTREGVTEKPGSGLAALITDGPGGSKWMYVGKQHAGKVFYDLTGNRSDTVTINSDGWGEFKVNGGSVSVWVPRKTTVSTIARPITTRPWTGEFVRWTEPRLVAWP

SEQ ID NO: 17520 - protein, 515 aa, Geobacillus stearothermophilus
AAPFNGTMMQYFEWYLPDDGTLWTKVANEANNLSSLGITALWLPPAYKGTSRSDVGYGEYDLYDLGEFNQKGTVRTKYGTKAQYLQAIQAAHAAGMQVYADVVFDHKGGADGTEWVDAVEVNPSDRNQEISGTYQIQAWTKFDFPGRGNTYSSFKWRWYHFDGVDWDESRKLSRIYKFRGIGKAWDWEVDTENGNYDYLMYADLDMDHPEVVTELKNWGKWYVNTTNIDGFRLDAVKHIKFSFFPDWLSYVRSQTGKPLFTVGEYWSYDINKLHNYITKTNGTMSLFDAPLHNKFYTASKSGGAFDMRTLMTNTLMKDQPTLAVTFVDNHDTEPGQALQSWVDPWFKPLAYAFILTRQEGYPCVFYGDYYGIPQYNIPSLKSKIDPLLIARRDYAYGTQHDYLDHSDIIGWTREGVTEKPGSGLAALITDGPGGSKWMYVGKQHAGKVFYDLTGNRSDTVTINSDGWGEFKVNGGSVSVWVPRKTTVSTIARPITTRPWTGEFVRWTEPRLVAWP

SEQ ID NO: 17521 - protein, 515 aa, Geobacillus stearothermophilus
AAPFNGTMMQYFEWYLPDDGTLWTKVANEANNLSSLGITALWLPPAYKGTSRSDVGYGVYDLYDLGEFNQKGTVRTKYGTKAQYLQAIQAAHAAGMQVYADVVFDHKGGADGTEWVDAVEVNPSDRNQEISGTYQIQAWTKFDFPGRGNTYSSFKWRWYHFDGVDWDESRKLSRIYKFRGIGKAWDWEVDTENGNYDYLMYADLDMDHPEVVTELKNWGKWYVNTTNIDGFRLDAVKHIKFAFFPDWLSYVRSQTGKPLFTVGEYWSYDINKLHNYITKTNGTMSLFDAPLHNKFYTASKSGGAFDMRTLMTNTLMKDQPTLAVTFVDNHDTEPGQALQSWVDPWFKPLAYAFILTRQEGYPCVFYGDYYGIPQYNIPSLKSKIDPLLIARRDYAYGTQHDYLDHSDIIGWTREGVTEKPGSGLAALITDGPGGSKWMYVGKQHAGKVFYDLTGNRSDTVTINSDGWGEFKVNGGSVSVWVPRKTTVSTIARPITTRPWTGEFVRWTEPRLVAWP

SEQ ID NO: 17522 - protein, 515 aa, Geobacillus stearothermophilus
AAPFNGTMMQYFEWYLPDDGTLWTKVANEANNLSSLGITALWLPPAYKGTSRSDVGYGVYDLYDLGEFNQKGTVRTKYGTKAQYLQAIQAAHAAGMQVYADVVFDHKGGADGTEWVDAVEVNPSDRNQEISGTYQIQAWTKFDFPGRGNTYSSFKWRWYHFDGVDWDESRKLSRIYKFRGIGKAWDWEVDTENGNYDYLMYADLDMDHPEVVTELKNWGKWYVNTTNIDGFRLDAVKHIKFSFFPDWLSYVRSQTGKPLFTVGEYWSYDINKLHNYITKTNGTTSLFDAPLHNKFYTASKSGGAFDMRTLMTNTLMKDQPTLAVTFVDNHDTEPGQALQSWVDPWFKPLAYAFILTRQEGYPCVFYGDYYGIPQYNIPSLKSKIDPLLIARRDYAYGTQHDYLDHSDIIGWTREGVTEKPGSGLAALITDGPGGSKWMYVGKQHAGKVFYDLTGNRSDTVTINSDGWGEFKVNGGSVSVWVPRKTTVSTIARPITTRPWTGEFVRWTEPRLVAWP

SEQ ID NO: 17523 - protein, 515 aa, Geobacillus stearothermophilus
AAPFNGTMMQYFEWYLPDDGTLWTKVANEANNLSSLGITALWLPPAYKGTSRSDVGYGVYDLYDLGEFNQKGTVRTKYGTKAQYLQAIQAAHAAGMQVYADVVFDHKGGADGTEWVDAVEVNPSDRNQEISGTYQIQAWTKFDFPGRGNTYSSFKWRWYHFDGVDWDESRKLSRIYKFRGIGKAWDWEVDTENGNYDYLMYADLDMDHPEVVTELKNWGKWYVNTTNIDGFRLDAVKHIKFDFFPDWLSYVRSQTGKPLFTVGEYWSYDINKLHNYITKTNGTMSLFDAPLHNKFYTASKSGGAFDMRTLMTNTLMKDQPTLAVTFVDNHDTEPGQALQSWVDPWFKPLAYAFILTRQEGYPCVFYGDYYGIPQYNIPSLKSKIDPLLIARRDYAYGTQHDYLDHSDIIGWTREGVTEKPGSGLAALITDGPGGSKWMYVGKQHAGKVFYDLTGNRSDTVTINSDGWGEFKVNGGSVSVWVPRKTTVSTIARPITTRPWTGEFVRWTEPRLVAWP

SEQ ID NO: 17524 - protein, 515 aa, Geobacillus stearothermophilus
AAPFNGTMMQYFEWYLPDDGTLWTKVANEANNLSSLGITALWLPPAYKGTSRSDVGYGVYDLYDLGEFNQKGTVRTKYGTKAQYLQAIQAAHAAGMEVYADVVFDHKGGADGTEWVDAVEVNPSDRNQEISGTYQIQAWTKFDFPGRGNTYSSFKWRWYHFDGVDWDESRKLSRIYKFRGIGKAWDWEVDTENGNYDYLMYADLDMDHPEVVTELKNWGKWYVNTTNIDGFRLDAVKHIKFSFFPDWLSYVRSQTGKPLFTVGEYWSYDINKLHNYITKTNGTMSLFDAPLHNKFYTASKSGGAFDMRTLMTNTLMKDQPTLAVTFVDNHDTEPGQALQSWVDPWFKPLAYAFILTRQEGYPCVFYGDYYGIPQYNIPSLKSKIDPLLIARRDYAYGTQHDYLDHSDIIGWTREGVTEKPGSGLAALITDGPGGSKWMYVGKQHAGKVFYDLTGNRSDTVTINSDGWGEFKVNGGSVSVWVPRKTTVSTIARPITTRPWTGEFVRWTEPRLVAWP

SEQ ID NO: 17525 - protein, 515 aa, Geobacillus stearothermophilus
AAPFNGTMMQYFEWYLPDDGTLWTKVANEANNLSSLGITALWLPPAYKGTSRSDVGYGAYDLYDLGEFNQKGTVRTKYGTKAQYLQAIQAAHAAGMQVYADVVFDHKGGADGTEWVDAVEVNPSDRNQEISGTYQIQAWTKFDFPGRGNTYSSFKWRWYHFDGVDWDESRKLSRIYKFRGIGKAWDWEVDTENGNYDYLMYADLDMDHPEVVTELKNWGKWYVNTTNIDGFRLDAVKHIKFSFFPDWLSYVRSQTGKPLFTVGEYWSYDINKLHNYITKTNGTMSLFDAPLHNKFYTASKSGGAFDMRTLMTNTLMKDQPTLAVTFVDNHDTEPGQALQSWVDPWFKPLAYAFILTRQEGYPCVFYGDYYGIPQYNIPSLKSKIDPLLIARRDYAYGTQHDYLDHSDIIGWTREGVTEKPGSGLAALITDGPGGSKWMYVGKQHAGKVFYDLTGNRSDTVTINSDGWGEFKVNGGSVSVWVPRKTTVSTIARPITTRPWTGEFVRWTEPRLVAWP

SEQ ID NO: 17526 - protein, 515 aa, Geobacillus stearothermophilus
AAPFNGTMMQYFEWYLPDDGTLWTKVANEANNLSSLGITALWLPPAYKGTSRSDVGYGVYDLYDLGEFNQKGTVRTKYGTKAQYLQAIQAAHAAGMQVYADVVFDHKGGADGTEWVDAVEVNPSDRNQEISGTYQIQAWTKFDFPGRGNTYSSFKWRWYHFDGVDWDESRKLSRIYKFRGIGKAWDWEVDTENGNYDYLMYADLDMDHPEVVTELKNWGKWYVNTTNIDGFRLDAVKHIKFFFFPDWLSYVRSQTGKPLFTVGEYWSYDINKLHNYITKTNGTMSLFDAPLHNKFYTASKSGGAFDMRTLMTNTLMKDQPTLAVTFVDNHDTEPGQALQSWVDPWFKPLAYAFILTRQEGYPCVFYGDYYGIPQYNIPSLKSKIDPLLIARRDYAYGTQHDYLDHSDIIGWTREGVTEKPGSGLAALITDGPGGSKWMYVGKQHAGKVFYDLTGNRSDTVTINSDGWGEFKVNGGSVSVWVPRKTTVSTIARPITTRPWTGEFVRWTEPRLVAWP

SEQ ID NO: 17527 - protein, 515 aa, Geobacillus stearothermophilus
AAPFNGTMMQYFEWYLPDDGTLWTKVANEANNLSSLGITALWLPPAYKGTSRSDVGYGVYDLYDLGEFNQKGTVRTKYGTKAQYLQAIQAAHAAGMQVYADVVFDHKGGADGTEWVDAVEVNPSDRNQEISGTYQIQAWTKFDFPGRGNTYSSFKWRWYHFDGVDWDESRKLSRIYKFRGIGKAWDWEVDTENGNYDYLMYADLDMDHPEVVTELKNWGKWYVNTTNIDGFRLDAVKHIKFSFFPDWLSYVRSQTGKPLFTVGEYWSYDINKLHNYITKTNGTMSLFDAPLHNKFYTASKSGGAFDMRTLMTNTLMKDQPTLAVTFVDNHDTEPGQALQSWVDPWFKPLAYAFILTREEGYPCVFYGDYYGIPQYNIPSLKSKIDPLLIARRDYAYGTQHDYLDHSDIIGWTREGVTEKPGSGLAALITDGPGGSKWMYVGKQHAGKVFYDLTGNRSDTVTINSDGWGEFKVNGGSVSVWVPRKTTVSTIARPITTRPWTGEFVRWTEPRLVAWP

SEQ ID NO: 17528 - protein, 515 aa, Geobacillus stearothermophilus
AAPFNGTMMQYFEWYLPDDGTLWTKVANEANNLSSLGITALWLPPAYKGTSRSDVGYGVYDLYDLGEFNQKGTVRTKYGTKAQYLQAIQAAHAAGMQVYADVVFDHKGGADGTEWVDAVEVNPSDRNQEISGTYQIQAWTKFDFPGRGNTYSSFKWRWYHFDGVDWDESRKLSRIYKFRGIGKAWDWEVDTENGNYDYLMYADLDMDHPEVVTELKNWGKWYVNTTNIDGFRLDAVKHIKFLFFPDWLSYVRSQTGKPLFTVGEYWSYDINKLHNYITKTNGTMSLFDAPLHNKFYTASKSGGAFDMRTLMTNTLMKDQPTLAVTFVDNHDTEPGQALQSWVDPWFKPLAYAFILTRQEGYPCVFYGDYYGIPQYNIPSLKSKIDPLLIARRDYAYGTQHDYLDHSDIIGWTREGVTEKPGSGLAALITDGPGGSKWMYVGKQHAGKVFYDLTGNRSDTVTINSDGWGEFKVNGGSVSVWVPRKTTVSTIARPITTRPWTGEFVRWTEPRLVAWP

SEQ ID NO: 17529 - protein, 515 aa, Geobacillus stearothermophilus
AAPFNGTMMQYFEWYLPDDGTLWTKVANEANNLSSLGITALWLPPAYKGTSRSDVGYGVYDLYDLGEFNQKGTVRTKYGTKAQYLQAIQAAHAAGMQVYADVVFDHKGGADGTEWVDAVEVNPSDRNQEISGTYQIQAWTKFDFPGRGNTYSSFKWRWYHFDGVDWDESRKLSRIYKFRGIGKAWDWEVDTENGNYDYLMYADLDMDHPEVVTELKNWGKWYVNTTNIDGFRLDAVKHIKFSFFPDWLSYVRSQTGKPLFTVGEYWSYDINKLHNYITKTNGTVSLFDAPLHNKFYTASKSGGAFDMRTLMTNTLMKDQPTLAVTFVDNHDTEPGQALQSWVDPWFKPLAYAFILTRQEGYPCVFYGDYYGIPQYNIPSLKSKIDPLLIARRDYAYGTQHDYLDHSDIIGWTREGVTEKPGSGLAALITDGPGGSKWMYVGKQHAGKVFYDLTGNRSDTVTINSDGWGEFKVNGGSVSVWVPRKTTVSTIARPITTRPWTGEFVRWTEPRLVAWP

SEQ ID NO: 17530 - protein, 515 aa, Geobacillus stearothermophilus
AAPFNGTMMQYFEWYLPDDGTLWTKVANEANNLSSLGITALWLPPAYKGTSRSDVGYGVYDLYDLGEFNQKGTVRTKYGTKAQYLQAIQAAHAAGMQVYADVVFDHKGGADGTEWVDAVEVNPSDRNQEISGTYQIQAWTKFDFPGRGNTYSSFKWRWYHFDGVDWDESRKLSRIYKFRGIGKAWDWEVDTENGNYDYLMYADLDMDHPEVVTELKNWGKWYVNTTNIDGFRLDAVKHIKFQFFPDWLSYVRSQTGKPLFTVGEYWSYDINKLHNYITKTNGTMSLFDAPLHNKFYTASKSGGAFDMRTLMTNTLMKDQPTLAVTFVDNHDTEPGQALQSWVDPWFKPLAYAFILTRQEGYPCVFYGDYYGIPQYNIPSLKSKIDPLLIARRDYAYGTQHDYLDHSDIIGWTREGVTEKPGSGLAALITDGPGGSKWMYVGKQHAGKVFYDLTGNRSDTVTINSDGWGEFKVNGGSVSVWVPRKTTVSTIARPITTRPWTGEFVRWTEPRLVAWP

SEQ ID NO: 17531 - protein, 515 aa, Geobacillus stearothermophilus
AAPFNGTMMQYFEWYLPDDGTLWTKVANEANNLSSLGITALWLPPAYKGTSRSDVGYGVYDLYDLGEFNQKGTVRTKYGTKAQYLQAIQAAHAAGMQVYADVVFDHKGGADGTEWVDAVEVNPSDRNQEISGTYQIQAWTKFDFPGRGNTYSSFKWRWYHFDGVDWDESRKLSRIYKFRGIGKAWDWEVDTENGNYDYLMYADLDMDHPEVVTELKNWGKWYVNTTNIDGFRLDAVKHIKFHFFPDWLSYVRSQTGKPLFTVGEYWSYDINKLHNYITKTNGTMSLFDAPLHNKFYTASKSGGAFDMRTLMTNTLMKDQPTLAVTFVDNHDTEPGQALQSWVDPWFKPLAYAFILTRQEGYPCVFYGDYYGIPQYNIPSLKSKIDPLLIARRDYAYGTQHDYLDHSDIIGWTREGVTEKPGSGLAALITDGPGGSKWMYVGKQHAGKVFYDLTGNRSDTVTINSDGWGEFKVNGGSVSVWVPRKTTVSTIARPITTRPWTGEFVRWTEPRLVAWP

SEQ ID NO: 17532 - protein, 491 aa, Geobacillus stearothermophilus
AAPFNGTMMQYFEWYLPDDGTLWTKVANEANNLSSLGITALWLPPAYKGTSRSDVGYGAYDLYDLGEFNQKGTVRTKYGTKAQYLQAIQAAHAAGMQVYADVVFDHKGGADGTEWVDAVEVNPSDRNQVISGTYQIQAWTKFDFPGRGNTYSSFKWRWYHFDGVDWDESRKLSRIYLFEGKAWDWPVDTEFGNYDYLMYADLDMDHPEVTTELKNWGKWYVNTTNIDGFRLDAVKHIKFYFFPDWLSYVRSSTGKPLFTVGEYWSGDINKLHNYITKTDGTVSLFDAPLHYKFYNASKSGGAFDMRTLMTNTLMKDQPTLAVTFVDNHDTEPGQALQSWVDPWFKPLAYAFILTRQEGYPCVFYGDYYGIPQYNIPSLKSKIDPLLIARRDYAYGTQHDYLDHSDIIGWTREGGTEKPGSGLAALITDGPGGSKWMYVGKQHAGKVFYDLTGNRSDTVTINSDGWGEFKVNGGSVSVWVPRKTTVSTIARP

SEQ ID NO: 17533 - protein, 491 aa, Geobacillus stearothermophilus
AAPFNGTMMQYFEWYLPDDGTLWTKVANEANNLSSLGITALWLPPAYKGTSRSDVGYGAYDLYDLGEFNQKGTVRTKYGTKAQYLQAIQAAHAAGMQVYADVVFDHKGGADGTEWVDAVEVNPSDRNQVISGTYQIQAWTKFDFPGRGNTYSSFKWRWYHFDGVDWDESRKLSRIYLFEGKAWDWPVDTEFGNYDYLMYADLDMDHPEVTTELKNWGKWYVNTTNIDGFRLDAVKHIKFYFFPDWLSYVRSSTGKPLFTVGEYWSGDINKLHNYITFTDGTVSLFDAPLHYKFYNASKSGGAFDMRTLMTNTLMKDQPTLAVTFVDNHDTEPGQALQSWVDPWFKPLAYAFILTRQEGYPCVFYGDYYGIPQYNIPSLKSKIDPLLIARRDYAYGTQHDYLDHSDIIGWTREGGTEKPGSGLAALITDGPGGSKWMYVGKQHAGKVFYDLTGNRSDTVTINSDGWGEFKVNGGSVSVWVPRKTTVSTIARP

SEQ ID NO: 17534 - protein, 491 aa, Geobacillus stearothermophilus
AAPFNGTMMQYFEWYLPDDGTLWTKVANEANNLSSLGITALWLPPAYKGTSRSDVGYGAYDLYDLGEFNQKGTVRTKYGTKAQYLQAIQAAHAAGMQVYADVVFDHKGGADGTEWVDAVEVNPSDRNQVISGTYQIQAWTKFDFPGRGNTYSSFKWRWYHFDGVDWDESRKLSRIYLFEGKAWDWPVDTEFGNYDYLMYADLDMDHPEVTTELKNWGKWYVNTTNIDGFRLDAVKHIKFYFFPDWLSYVRSSTGKPLFTVGEYWSGDINKLHNYITHTDGTVSLFDAPLHYKFYNASKSGGAFDMRTLMTNTLMKDQPTLAVTFVDNHDTEPGQALQSWVDPWFKPLAYAFILTRQEGYPCVFYGDYYGIPQYNIPSLKSKIDPLLIARRDYAYGTQHDYLDHSDIIGWTREGGTEKPGSGLAALITDGPGGSKWMYVGKQHAGKVFYDLTGNRSDTVTINSDGWGEFKVNGGSVSVWVPRKTTVSTIARP

SEQ ID NO: 17535 - protein, 491 aa, Geobacillus stearothermophilus
AAPFNGTMMQYFEWYLPDDGTLWTKVANEANNLSSLGITALWLPPAYKGTSRSDVGYGAYDLYDLGEFNQKGTVRTKYGTKAQYLQAIQAAHAAGMQVYADVVFDHKGGADGTEWVDAVEVNPSDRNQVISGTYQIQAWTKFDFPGRGNTYSSFKWRWYHFDGVDWDESRKLSRIYLFEGKAWDWPVDTEFGNYDYLMYADLDMDHPEVTTELKNWGKWYVNTTNIDGFRLDAVKHIKFSFFPDWLSYVRSSTGKPLFTVGEYWSGDINKLHNYITITDGTVSLFDAPLHYKFYNASKSGGAFDMRTLMTNTLMKDQPTLAVTFVDNHDTEPGQALQSWVDPWFKPLAYAFILTRQEGYPCVFYGDYYGIPQYNIPSLKSKIDPLLIARRDYAYGTQHDYLDHSDIIGWTREGGTEKPGSGLAALITDGPGGSKWMYVGKQHAGKVFYDLTGNRSDTVTINSDGWGEFKVNGGSVSVWVPRKTTVSTIARP

SEQ ID NO: 17536 - protein, 491 aa, Geobacillus stearothermophilus
AAPFNGTMMQYFEWYLPDDGTLWTKVANEANNLSSLGITALWLPPAYKGTSRSDVGYGAYDLYDLGEFNQKGTVRTKYGTKAQYLQAIQAAHAAGMQVYADVVFDHKGGADGTEWVDAVEVNPSDRNQVISGTYQIQAWTKFDFPGRGNTYSSFKWRWYHFDGVDWDESRKLSRIYLFEGKAWDWPVDTEFGNYDYLMYADLDMDHPEVTTELKNWGKWYVNTTNIDGFRLDAVKHIKFYFFPDWLSYVRSSTGKPLFTVGEYWSGDINKLHNYITYTDGTVSLFDAPLHYKFYNASKSGGAFDMRTLMTNTLMKDQPTLAVTFVDNHDTEPGQALQSWVDPWFKPLAYAFILTRQEGYPCVFYGDYYGIPQYNIPSLKSKIDPLLIARRDYAYGTQHDYLDHSDIIGWTREGGTEKPGSGLAALITDGPGGSKWMYVGKQHAGKVFYDLTGNRSDTVTINSDGWGEFKVNGGSVSVWVPRKTTVSTIARP

SEQ ID NO: 17537 - protein, 491 aa, Geobacillus stearothermophilus
AAPFNGTMMQYFEWYLPDDGTLWTKVANEANNLSSLGITALWLPPAYKGTSRSDVGYGAYDLYDLGEFNQKGTVRTKYGTKAQYLQAIQAAHAAGMQVYADVVFDHKGGADGTEWVDAVEVNPSDRNQVISGTYQIQAWTKFDFPGRGNTYSSFKWRWYHFDGVDWDESRKLSRIYLFSGKQWPWEVDNEFGNYDYLMYADLDMDHPEVTTELKNWGKWYVNTTNIDGFRLDAVKHIKFSFFPDWLSYVRSSTGKPLFTVGEYWSGDINKLHNYITKTDGTVSLFDAPLHYKFYNASKSGGAFDMRTLMTNTLMKDQPTLAVTFVDNHDTEPGQALQSWVDPWFKPLAYAFILTRQEGYPCVFYGDYYGIPQYNIPSLKSKIDPLLIARRDYAYGTQHDYLDHSDIIGWTREGGTEKPGSGLAALITDGPGGSKWMYVGKQHAGKVFYDLTGNRSDTVTINSDGWGEFKVNGGSVSVWVPRKTTVSTIARP

SEQ ID NO: 17538 - protein, 488 aa, Geobacillus stearothermophilus
AAPFNGTMMQYFEWYLPDDGTLWTKVANEANNLSSLGITALWLPPAYKGTSRSDVGYGVYDLYDLGEFNQKGTVRTKYGTKAQYLQAIQAAHAAGMQVYADVVFDHKGGADGTEWVDAVEVNPSDRNQEISGTYQIQAWTKFDFPGRGNTYSSFKWRWYHFDGVDWDESRKLSRIYKFRGIGKAWDWEVDTENGNYDYLMYADLDMDHPEVVTELKNWGKWYVNTTNIDGFRLDAVKHIKFSFFPDWVSYVRSQTGKPLFTVGEYWSYDINKLHNYITKTNGTMSLFDAPLHNKFYTASKSGGAFDMRTLMTNTLMKDQPTLAVTFVDNHDTEPGQALQSWVDPWFKPLAYAFILTRQEGYPCVFYGDYYGIPQYNIPSLKSKIDPLLIARRDYAYGTQHDYLDHSDIIGWTREGVTEKPGSGLAALITDGPGGSKWMYVGKQHAGKVFYDLTGNRSDTVTINSDGWGEFKVNGGSVSVWVPRKTTVS

SEQ ID NO: 17539 - protein, 486 aa, Geobacillus stearothermophilus
AAPFNGTMMQYFEWYLPDDGTLWTKVANEANNLSSLGITALWLPPAYKGTSRSDVGYGVYDLYDLGEFNQKGTVRTKYGTKAQYLQAIQAAHAAGMQVYADVVFDHKGGADGTEWVDAVEVNPSDRNQEISGTYQIQAWTKFDFPGRGNTYSSFKWRWYHFDGVDWDESRKLSRIYKFRGKAWDWEVDTENGFYDYLMYADLDMDHPEVVTELKNWGKWYVNTTNIDGFRLDAVKHIKFSFFPDWLSYVRSQTGKPLFTVGEYWSYDINKLHNYITKTNGTMSLFDAPLHNKFYTASKSGGAFDMRTLMTNTLMKDQPTLAVTFVDNHDTEPGQALQSWVDPWFKPLAYAFILTRQEGYPCVFYGDYYGIPQYNIPSLKSKIDPLLIARRDYAYGTQHDYLDHSDIIGWTREGVTEKPGSGLAALITDGPGGSKWMYVGKQHAGKVFYDLTGNRSDTVTINSDGWGEFKVNGGSVSVWVPRKTTVS

SEQ ID NO: 17540 - protein, 488 aa, Geobacillus stearothermophilus
AAPFNGTMMQYFEWYLPDDGTLWTKVANEANNLSSLGITALWLPPAYKGTSRSDVGYGVYDLYDLGEFNQKGTVRTKYGTKAQYLQAIQAAHAAGMQVYADVVFDHKGGADGTEWVDAVEVNPSDRNQEISGTYQIQAWTKFDFPGRGNTYSSFKWRWYHFDGVDWDESRKLSRIYKFRGIGKAWDWEVDTENGNYDYLMYADLDMDHPEVVTELKNWGKWYVNTTNIDGFRLDAVKHIKFSFFPDWLSYVRSQTGKPLFTVGEYWSYDINKLHNYITKTNGTMSLFDAPLHNKFYTASKSGGAFDMRTLMTNTLMKDQPTLAVTFVDNHDTEPGQALQSWVDPWFKPLAYAFILTRQEGYPCVFYGDYYGIPQYNIPSLKSKIDPLLIARRDYAYGTQHDYLDHSDIIGWTREGVTEKPGSGLAALITDGPGGSKWMYVGKEHAGKVFYDLTGNRSDTVTINSDGWGEFKVNGGSVSVWVPRKTTVS

SEQ ID NO: 17541 - protein, 488 aa, Geobacillus stearothermophilus
AAPFNGTMMQYFEWYLPDDGTLWTKVANEANNLSSLGITALWLPPAYKGTSRSDVGYGVYDLYDLGEFNQKGTVRTKYGTKAQYLQAIQAAHAAGMQVYADVVFDHKGGADGTEWVDAVEVNPSDRNQEISGTYQIQAWTKFDFPGRGNTYSSFKWRWYHFDGVDWDESRKLSRIYKFRGIGKKWDEEVDTENGNYDYLMYADLDMNHPEVVTELKNWGKWYVNTTNIDGFRLDAVKHIKFSFFPDWLSYVRSQTGKPLFTVGEYWSYDINKLHNYITKTDGTMSLFDAPLHNKFYTASKSGGAFDMRTLMTNTLMKDQPTLAVTFVDNHDTEPGQALQSWVDPWFKPLAYAFILTRQEGYPCVFYGDYYGIPQYNIPSLKSKIDPLLIARRDYAYGTQHDYLDHSDIIGWTREGGTEKPGSGLAALITDGPGGSKWMYVGKQHAGKVFYDLTGNRSDTVTINSDGWGEFKVNGGSVSVWVPRKTTVS

SEQ ID NO: 17542 - protein, 487 aa, Geobacillus stearothermophilus
AAPFNGTMMQYFEWYLPDDGTLWTKVANEANNLSSLGITALWLPPAYKGTSRSDVGYGVYDLYDLGEFNQKGTVRTKYGTKAQYLQAIQAAHAAGMQVYADVVFDHKGGRADGTEWVDAVEVNPSDRNQEISGTYQIQAWTKFDFPGRGNTYSSFKWRWYHFDGVDWDESRKLSRIYKFIGKAWDWEVDTENGNYDYLMYADLDMDHPEVVTELKNWGKWYVNTTNIDGFRLDAVKHIKFSFFPDWLSYVRSQTGKPLFTVGEYWSYDINKLHNYITKTNGTMSLFDAPLHNKFYTASKSGGAFDMRTLMTNTLMKDQPTLAVTFVDNHDTEPGQALQSWVDPWFKPLAYAFILTRQEGYPCVFYGDYYGIPQYNIPSLKSKIDPLLIARRDYAYGTQHDYLDHSDIIGWTREGVTEKPGSGLAALITDGPGGSKWMYVGKQHAGKVFYDLTGNRSDTVTINSDGWGEFKVNGGSVSVWVPRKTTVS

SEQ ID NO: 17543 - protein, 488 aa, Geobacillus stearothermophilus
AAPFNGTMMQYFEWYLPDDGTLWTKVANEANNLSSLGITALWLPPAYKGTSRSDVGYGQYDLYDLGEFNQKGTVRTKYGTKAQYLQAIQAAHAAGMQVYADVVFDHKGGADGTEWVDAVEVNPSDRNQEISGTYQIQAWTKFDFPGRGNTYSSFKWRWYHFDGVDWDESRKLSRIYKFRGIGKAWDWEVDTENGNYDYLMYADLDMDHPEVVTELKNWGKWYVNTTNIDGFRLDAVKHIKFSFFPDWLSYVRSQTGKPLFTVGEYWSYDINKLHNYITKTNGTMSLFDAPLHNKFYTASKSGGAFDMRTLMTNTLMKDQPTLAVTFVDNHDTEPGQALQSWVDPWFKPLAYAFILTRQEGYPCVFYGDYYGIPQYNIPSLKSKIDPLLIARRDYAYGTQHDYLDHSDIIGWTREGVTEKPGSGLAALITDGPGGSKWMYVGKQHAGKVFYDLTGNRSDTVTINSDGWGEFKVNGGSVSVWVPRKTTVS

SEQ ID NO: 17544 - protein, 488 aa, Geobacillus stearothermophilus
AAPFNGTMMQYFEWYLPDDGTLWTKVANEANNLSSLGITALWLPPAYKGTSRSDVGYGVYDLYDLGEFNQKGTVRTKYGTKAQYLQAIQAAHAAGMQVYADVVFDHKGGADGTEWVDAVEVNPSDRNQEISGTYQIQAWTKFDFPGRGNTYSSFKWRWYHFDGVDWDESRKLSRIYKFRGIGKAWDWEVDTENGNYDYLMYADLDMDHPEVVTELKNWGKWYVNTTNIDGFRLDAVKHIKFSFFPDWLSYVRSQTGKPLFTVGEYWSYDINKLHNYITKTNGTMSLFDAPLHNKFYTASKSGGAFDMRTLMTNTLMKDQPTLAVTFVDNHDTEPGQALQSWVDPWFKPLAYAFILTRREGYPCVFYGDYYGIPQYNIPSLKSKIDPLLIARRDYAYGTQHDYLDHSDIIGWTREGVTEKPGSGLAALITDGPGGSKWMYVGKQHAGKVFYDLTGNRSDTVTINSDGWGEFKVNGGSVSVWVPRKTTVS

SEQ ID NO: 17545 - protein, 488 aa, Geobacillus stearothermophilus
AAPFNGTMMQYFEWYLPDDGTLWTKVANEANNLSSLGITALWLPPAYKGTSRSDVGYGVYDLYDLGEFNQKGTVRTKYGTKAQYLQAIQAAHAAGMQVYADVVFDHKGGADGTEWVDAVEVNPSDRNQEISGTYQIQAWTKFDFPGRGNTYSSFKWRWYHFDGVDWDESRKLSRIYKFRGIGKAWDWEVDTENGNYDYLMYADLDMDHPEVVTELKNWGKWYVNTTNIDGFRLDAVKHIKFSFFPDWLSYVRSQTGKPLFTVGEYWSYDINKLHNYITKTNGTMSLFDAPLHNKFYTASKSGGAFDMRTLMTNTLMKDEPTLAVTFVDNHDTEPGQALQSWVDPWFKPLAYAFILTRQEGYPCVFYGDYYGIPQYNIPSLKSKIDPLLIARRDYAYGTQHDYLDHSDIIGWTREGVTEKPGSGLAALITDGPGGSKWMYVGKQHAGKVFYDLTGNRSDTVTINSDGWGEFKVNGGSVSVWVPRKTTVS

SEQ ID NO: 17546 - protein, 488 aa, Geobacillus stearothermophilus
AAPFNGTMMQYFEWYLPDDGTLWTKVANEANNLSSLGITALWLPPAYKGTSRSDVGYGVYDLYDLGEFNQKGTVRTKYGTKAQYLQAIQAAHAAGMQVYADVVFDHKGGADGTEWVDAVEVNPSDRNQEISGTYQIQAWTKFDFPGRGNTYSSFKWRWYHFDGVDWDESRKLSRIYKFRGIGKAWDWEVDTENGNYDYLMYADLDMDHPEVVTELKNWGKWYVNTTNIDGFRLDAVKHIKFHFFPDWLSYVRSQTGKPLFTVGEYWSYDINKLHNYITKTNGTMSLFDAPLHNKFYTASKSGGAFDMRTLMTNTLMKDQPTLAVTFVDNHDTEPGQALQSWVDPWFKPLAYAFILTRQEGYPCVFYGDYYGIPQYNIPSLKSKIDPLLIARRDYAYGTQHDYLDHSDIIGWTREGVTEKPGSGLAALITDGPGGSKWMYVGKQHAGKVFYDLTGNRSDTVTINSDGWGEFKVNGGSVSVWVPRKTTVS

SEQ ID NO: 17547 - protein, 488 aa, Geobacillus stearothermophilus
AAPFNGTMMQYFEWYLPDDGTLWTKVANEANNLSSLGITALWLPPAYKGTSRSDVGYGVYDLYDLGEFNQKGTVRTKYGTKAQYLQAIQAAHAAGMQVYADVVFDHKGGADGTEWVDAVEVNPSDRNQEISGTYQIQAWTKFDFPGRGNTYSSFKWRWYHFDGVDWDESRKLSRIYKFRGIGKAWDWEVDTENGNYDYLMYADLDMDHPEVVTELKNWGKWYVNTTNIDGFRLDAVKHIKFDFFPDWLSYVRSQTGKPLFTVGEYWSYDINKLHNYITKTNGTMSLFDAPLHNKFYTASKSGGAFDMRTLMTNTLMKDQPTLAVTFVDNHDTEPGQALQSWVDPWFKPLAYAFILTRQEGYPCVFYGDYYGIPQYNIPSLKSKIDPLLIARRDYAYGTQHDYLDHSDIIGWTREGVTEKPGSGLAALITDGPGGSKWMYVGKQHAGKVFYDLTGNRSDTVTINSDGWGEFKVNGGSVSVWVPRKTTVS

SEQ ID NO: 17548 - protein, 488 aa, Geobacillus stearothermophilus
AAPFNGTMMQYFEWYLPDDGTLWTKVANEANNLSSLGITALWLPPAYKGTSRSDVGYGVYDLYDLGEFNQKGTVRTKYGTKAQYLQAIQAAHAAGMQVYADVVFDHKGGADGTEWVDAVEVNPSDRNQEISGTYQIQAWTKFDFPGRGNTYSSFKWRWYHFDGVDWDESRKLSRIYKFRGIGKAWDWEVDTENGNYDYLMYADLDMDHPEVVTELKNWGKWYVNTTNIDGFRLDAVKHIKFMFFPDWLSYVRSQTGKPLFTVGEYWSYDINKLHNYITKTNGTMSLFDAPLHNKFYTASKSGGAFDMRTLMTNTLMKDQPTLAVTFVDNHDTEPGQALQSWVDPWFKPLAYAFILTRQEGYPCVFYGDYYGIPQYNIPSLKSKIDPLLIARRDYAYGTQHDYLDHSDIIGWTREGVTEKPGSGLAALITDGPGGSKWMYVGKQHAGKVFYDLTGNRSDTVTINSDGWGEFKVNGGSVSVWVPRKTTVS

SEQ ID NO: 17549 - protein, 488 aa, Geobacillus stearothermophilus
AAPFNGTMMQYFEWYLPDDGTLWTKVANEANNLSSLGITALWLPPAYKGTSRSDVGYGVYDLYDLGEFNQKGTVRTKYGTKAQYLQAIQAAHAAGMQVYADVVFDHKGGADGTEWVDAVEVNPSDRNQEISGTYQIQAWTKFDFPGRGNTYSSFKWRWYHFDGVDWDESRKLSRIYKFRGIGKAWDWEVDTENGNYDYLMYADLDMDHPEVVTELKNWGKWYVNTTNIDGFRLDAVKHIKFGFFPDWLSYVRSQTGKPLFTVGEYWSYDINKLHNYITKTNGTMSLFDAPLHNKFYTASKSGGAFDMRTLMTNTLMKDQPTLAVTFVDNHDTEPGQALQSWVDPWFKPLAYAFILTRQEGYPCVFYGDYYGIPQYNIPSLKSKIDPLLIARRDYAYGTQHDYLDHSDIIGWTREGVTEKPGSGLAALITDGPGGSKWMYVGKQHAGKVFYDLTGNRSDTVTINSDGWGEFKVNGGSVSVWVPRKTTVS

SEQ ID NO: 17550 - protein, 488 aa, Geobacillus stearothermophilus
AAPFNGTMMQYFEWYLPDDGTLWTKVANEANNLSSLGITALWLPPAYKGTSRSDVGYGVYDLYDLGEFNQKGTVRTKYGTKAQYLQAIQAAHAAGMQVYADVVFDHKGGADGTEWVDAVEVNPSDRNQEISGTYQIQAWTKFDFPGRGNTYSSFKWRWYHFDGVDWDESRKLSRIYKFRGIGKAWDWEVDTENGNYDYLMYADLDMDHPEVVTELKNWGKWYVNTTNIDGFRLDAVKHIKFTFFPDWLSYVRSQTGKPLFTVGEYWSYDINKLHNYITKTNGTMSLFDAPLHNKFYTASKSGGAFDMRTLMTNTLMKDQPTLAVTFVDNHDTEPGQALQSWVDPWFKPLAYAFILTRQEGYPCVFYGDYYGIPQYNIPSLKSKIDPLLIARRDYAYGTQHDYLDHSDIIGWTREGVTEKPGSGLAALITDGPGGSKWMYVGKQHAGKVFYDLTGNRSDTVTINSDGWGEFKVNGGSVSVWVPRKTTVS

SEQ ID NO: 17551 - protein, 487 aa, Geobacillus stearothermophilus
AAPFNGTMMQYFEWYLPDDGTLWTKVANEANNLSSLGITALWLPPAYKGTSRSDVGYGVYDLYDLGEFNQKGTVRTKYGTKAQYLQAIQAAHAAGMQVYADVVFDHKGGADGTEWVDAVEVNPSDRNQEISGTYQIQAWTKFDFPGRGNTYSSFKWRWYHFDGVDWDESRKLSRIYKFGIGKAWDWEVDTENGNYDYLMYADLDMDHPEVVTELKNWGKWYVNTTNIDGFRLDAVKHIKFSFFPDWLSYVRSQTGKPLFTVGEYWSYDINKLHNYITKTNGTMSLFDAPLHNKFYTASKSGGAFDMRTLMTNTLMKDQPTLAVTFVDNHDTEPGQALQSWVDPWFKPLAYAFILTRQEGYPCVFYGDYYGIPQYNIPSLKSKIDPLLIARRDYAYGTQHDYLDHSDIIGWTREGVTEKPGSGLAALITDGPGGSKWMYVGKQHAGKVFYDLTGNRSDTVTINSDGWGEFKVNGGSVSVWVPRKTTVS

SEQ ID NO: 17552 - protein, 488 aa, Geobacillus stearothermophilus
AAPFNGTMMQYFEWYLPDDGTLWTKVANEANNLSSLGITALWLPPAYKGTSRSDVGYGVYDLYDLGEFNQKGTVRTKYGTKAQYLQAIQAAHAAGMQVYADVVFDHKGGADGTEWVDAVEVNPSDRNQEISGTYQIQAWTKFDFPGRGNTYSSFKWRWYHFDGVDWDESRKLSRIYKFRGIGKAWDWEVDTENGNYDYLMYADLDMDHPEVVTELKNWGKWYVDTTNIDGFRLDAVKHIKFSFFPDWLSYVRSQTGKPLFTVGEYWSYDINKLHNYITKTNGTMSLFDAPLHNKFYTASKSGGAFDMRTLMTNTLMKDQPTLAVTFVDNHDTEPGQALQSWVDPWFKPLAYAFILTRQEGYPCVFYGDYYGIPQYNIPSLKSKIDPLLIARRDYAYGTQHDYLDHSDIIGWTREGVTEKPGSGLAALITDGPGGSKWMYVGKQHAGKVFYDLTGNRSDTVTINSDGWGEFKVNGGSVSVWVPRKTTVS

SEQ ID NO: 17553 - protein, 488 aa, Synthetic construct
AAPFNGTMMQYFEWYLPDDGTLWTKVANEANNLSSLGITALWLPPAYKGTSRSDVGYGVYDLYDLGEFNQKGTVRTKYGTKAQYLQAIQAAHAAGMQVYADVVFDHKGGADGTEWVDAVEVNPSDRNQEISGTYQIQAWTKFDFPGRGNTYSSFKWRWYHFDGVDWDESRKLSRIYKFRGIGKAWDWEVDTENGNYDYLMYADLDMDHPEVVTELKNWGEWYVNTTNIDGFRLDAVKHIKFSFFPDWLSYVRSQTGKPLFTVGEYWSYDINKLHNYITKTNGTMSLFDAPLHNKFYTASKSGGAFDMRTLMTNTLMKDQPTLAVTFVDNHDTEPGQALQSWVDPWFKPLAYAFILTRQEGYPCVFYGDYYGIPQYNIPSLKSKIDPLLIARRDYAYGTQHDYLDHSDIIGWTREGVTEKPGSGLAALITDGPGGSKWMYVGKQHAGKVFYDLTGNRSDTVTINSDGWGEFKVNGGSVSVWVPRKTTVS

SEQ ID NO: 17554 - protein, 488 aa, Geobacillus stearothermophilus
AAPFNGTMMQYFEWYLPDDGTLWTKVANEANNLSSLGITALWLPPAYKGTSRSDVGYGVYDLYDLGEFNQKGTVRTKYGTKAQYLQAIQAAHAAGMQVYADVVFDHKGGADGTEWVDAVEVNPSDRNQEISGTYQIQAWTKFDFPGRGNTYSSFKWRWYHFDGVDWDESRKLSRIYKFRGIGKAWDWEVDTENGNYDYLMYADLDMDHPEVVTELKNWGKWYVNTTNIDGFRLDAVKHIKFSFFPDWLSYVRSQTGKPLFTVGEYWSYDINKLHNYITKTNGTMSLFDAPLHNKFYTASKSGGAFDMRTLMTNTLMKDQPTLAVTFVDNHDTEPGQALQSWVDPWFKPLAYAFILTREEGYPCVFYGDYYGIPQYNIPSLKSKIDPLLIARRDYAYGTQHDYLDHSDIIGWTREGVTEKPGSGLAALITDGPGGSKWMYVGKQHAGKVFYDLTGNRSDTVTINSDGWGEFKVNGGSVSVWVPRKTTVS

SEQ ID NO: 17555 - protein, 486 aa, Geobacillus stearothermophilus
AAPFNGTMMQYFEWYLPDDGTLWTKVANEANNLSSLGITALWLPPAYKGTSRSDVGYGVYDLYDLGEFNQKGTVRTKYGTKAQYLQAIQAAHAAGMQVYADVVFDHKGGADGTEWVDAVEVNPSDRNQVISGTYQIQAWTKFDFPGRGNTYSSFKWRWYHFDGVDWDESRKLSRIYLFEGKAWDWEVDTEFGNYDYLMYADLDMDHPEVVTELKNWGKWYVNTTNIDGFRLDAVKHIKFQFFPDWLSYVRSQTGKPLFTVGEYWSYDINKLHNYITKTDGTMSLFDAPLHNKFYTASKSGGAFDMRTLMTNTLMKDQPTLAVTFVDNHDTEPGQALQSWVDPWFKPLAYAFILTRQEGYPCVFYGDYYGIPQYNIPSLKSKIDPLLIARRDYAYGTQHDYLDHSDIIGWTREGGTEKPGSGLAALITDGPGGSKWMYVGKQHAGKVFYDLTGNRSDTVTINSDGWGEFKVNGGSVSVWVPRKTTVS

SEQ ID NO: 17556 - protein, 488 aa, Geobacillus stearothermophilus
AAPFNGTMMQYFEWYLPDDGTLWTKVANEANNLSSLGITALWLPPAYKGTSRSDVGYGVYDLYDLGEFNQKGTVRTKYGTKAQYLQAIQAAHAAGMQVYADVVFDHKGGADGTEWVDAVEVNPSDRNQEISGTYQIQAWTKFDFPGRGNTYSSFKWRWYHFDGVDWDESRKLSRIYKFRGIGKAWDWEVDTENGNYDYLMYADLDMDHPEVVTELKNWGKWYVNTTNIDGFRLDAVKHIKFNFFPDWLSYVRSQTGKPLFTVGEYWSYDINKLHNYITKTNGTMSLFDAPLHNKFYTASKSGGAFDMRTLMTNTLMKDQPTLAVTFVDNHDTEPGQALQSWVDPWFKPLAYAFILTRQEGYPCVFYGDYYGIPQYNIPSLKSKIDPLLIARRDYAYGTQHDYLDHSDIIGWTREGVTEKPGSGLAALITDGPGGSKWMYVGKQHAGKVFYDLTGNRSDTVTINSDGWGEFKVNGGSVSVWVPRKTTVS

SEQ ID NO: 17557 - protein, 488 aa, Geobacillus stearothermophilus
AAPFNGTMMQYFEWYLPDDGTLWTKVANEANNLSSLGITALWLPPAYKGTSRSDVGYGVYDLYDLGEFNQKGTVRTKYGTKAQYLQAIQAAHAAGMQVYADVVFDHKGGADGTEWVDAVEVNPSDRNQEISGTYQIQAWTKFDFPGRGNTYSSFKWRWYHFDGVDWDESRKLSRIYKFRGIGKAWDWEVDTENGNYDYLMYADLDMDHPEVVTELKNWGKWYVNTTNIDGFRLDAVKHIKFSFFPDWLSYVRSQTGKPLFTVGEYWSYDINKLHNYITKTNGTVSLFDAPLHNKFYTASKSGGAFDMRTLMTNTLMKDQPTLAVTFVDNHDTEPGQALQSWVDPWFKPLAYAFILTRQEGYPCVFYGDYYGIPQYNIPSLKSKIDPLLIARRDYAYGTQHDYLDHSDIIGWTREGVTEKPGSGLAALITDGPGGSKWMYVGKQHAGKVFYDLTGNRSDTVTINSDGWGEFKVNGGSVSVWVPRKTTVS

SEQ ID NO: 17558 - protein, 487 aa, Geobacillus stearothermophilus
AAPFNGTMMQYFEWYLPDDGTLWTKVANEANNLSSLGITALWLPPAYKGTSRSDVGYGVYDLYDLGEFNQKGTVRTKYGTKAQYLQAIQAAHAAGMQVYADVVFDHKGGADGTEWVDAVEVNPSDRNQEISGTYQIQAWTKFDFPGRGNTYSSFKWRWYHFDGVDWDESRKLSRIYKFRGIGAWDWEVDTENGNYDYLMYADLDMDHPEVVTELKNWGKWYVNTTNIDGFRLDAVKHIKFSFFPDWLSYVRSQTGKPLFTVGEYWSYDINKLHNYITKTNGTMSLFDAPLHNKFYTASKSGGAFDMRTLMTNTLMKDQPTLAVTFVDNHDTEPGQALQSWVDPWFKPLAYAFILTRQEGYPCVFYGDYYGIPQYNIPSLKSKIDPLLIARRDYAYGTQHDYLDHSDIIGWTREGVTEKPGSGLAALITDGPGGSKWMYVGKQHAGKVFYDLTGNRSDTVTINSDGWGEFKVNGGSVSVWVPRKTTVS

SEQ ID NO: 17559 - protein, 488 aa, Geobacillus stearothermophilus
AAPFNGTMMQYFEWYLPDDGTLWTKVANEANNLSSLGITALWLPPAYKGTSRSDVGYGVYDLYDLGEFNQKGTVRTKYGTKAQYLQAIQAAHAAGMEVYADVVFDHKGGADGTEWVDAVEVNPSDRNQEISGTYQIQAWTKFDFPGRGNTYSSFKWRWYHFDGVDWDESRKLSRIYKFRGIGKAWDWEVDTENGNYDYLMYADLDMDHPEVVTELKNWGKWYVNTTNIDGFRLDAVKHIKFSFFPDWLSYVRSQTGKPLFTVGEYWSYDINKLHNYITKTNGTMSLFDAPLHNKFYTASKSGGAFDMRTLMTNTLMKDQPTLAVTFVDNHDTEPGQALQSWVDPWFKPLAYAFILTRQEGYPCVFYGDYYGIPQYNIPSLKSKIDPLLIARRDYAYGTQHDYLDHSDIIGWTREGVTEKPGSGLAALITDGPGGSKWMYVGKQHAGKVFYDLTGNRSDTVTINSDGWGEFKVNGGSVSVWVPRKTTVS

SEQ ID NO: 17560 - protein, 488 aa, Geobacillus stearothermophilus
AAPFNGTMMQYFEWYLPDDGTLWTKVANEANNLSSLGITALWLPPAYKGTSRSDVGYGVYDLYDLGEFNQKGTVRTKYGTKAQYLQAIQAAHAAGMQVYADVVFDHKGGADGTEWVDAVEVNPSDRNQEISGTYQIQAWTKFDFPGRGNTYSSFKWRWYHFDGVDWDESRKLSRIYKFRGIGKAWDWEVDTENGNYDYLMYADLDMDHPEVVTELKNWGKWYVNTTNIDGFRLDAVKHIKFSFFPDWTSYVRSQTGKPLFTVGEYWSYDINKLHNYITKTNGTMSLFDAPLHNKFYTASKSGGAFDMRTLMTNTLMKDQPTLAVTFVDNHDTEPGQALQSWVDPWFKPLAYAFILTRQEGYPCVFYGDYYGIPQYNIPSLKSKIDPLLIARRDYAYGTQHDYLDHSDIIGWTREGVTEKPGSGLAALITDGPGGSKWMYVGKQHAGKVFYDLTGNRSDTVTINSDGWGEFKVNGGSVSVWVPRKTTVS

SEQ ID NO: 17561 - protein, 488 aa, Geobacillus stearothermophilus
AAPFNGTMMQYFEWYLPDDGTLWTKVANEANNLSSLGITALWLPPAYKGTSRSDVGYGVYDLYDLGEFNQKGTVRTKYGTKAQYLQAIQAAHAAGMRVYADVVFDHKGGADGTEWVDAVEVNPSDRNQEISGTYQIQAWTKFDFPGRGNTYSSFKWRWYHFDGVDWDESRKLSRIYKFRGIGKAWDWEVDTENGNYDYLMYADLDMDHPEVVTELKNWGKWYVNTTNIDGFRLDAVKHIKFSFFPDWLSYVRSQTGKPLFTVGEYWSYDINKLHNYITKTNGTMSLFDAPLHNKFYTASKSGGAFDMRTLMTNTLMKDQPTLAVTFVDNHDTEPGQALQSWVDPWFKPLAYAFILTRQEGYPCVFYGDYYGIPQYNIPSLKSKIDPLLIARRDYAYGTQHDYLDHSDIIGWTREGVTEKPGSGLAALITDGPGGSKWMYVGKQHAGKVFYDLTGNRSDTVTINSDGWGEFKVNGGSVSVWVPRKTTVS

SEQ ID NO: 17562 - protein, 488 aa, unidentified
AAPFNGTMMQYFEWYLPDDGTLWTKVANEANNLSSLGITALWLPPAYKGTSRSDVGYGVYDLYDLGEFNQKGTVRTKYGTKAQYLQAIQAAHAAGMQVYADVVFDHKGGADGTEWVDAVEVNPSDRNQEISGTYQIQAWTKFDFPGRGNTYSSFKWRWYHFDGVDWDESRKLSRIYKFRGIGKAWDWEVDTENGNYDYLMYADLDMDHPEVVTELKNWGKWYVNTTNIDGFRLDAVKHIKFSFFPDWLSYVRSQTGKPLFTVGEYWSYDINKLHNYITKTNGTMSLFDAPLHNKFYTASKSGGAFDMRTLMTNTLMKDQPTLAVTFVDNHDTEPGQALQSWCDPWFKPLAYAFILTRQEGYPCVFYGDYYGIPQYNIPSLKSKIDPLLIARRDYAYGTQHDYLDHSDIIGWTREGVTEKPGSGLAALITDGPGGSKWMYVGKQHAGKVFYDLTGNRSDTVTINSDGWGEFKVNGGSVSVWVPRKTTVS

SEQ ID NO: 17563 - protein, 488 aa, Geobacillus stearothermophilus
AAPFNGTMMQYFEWYLPDDGTLWTKVANEANNLSSLGITALWLPPAYKGTSRSDVGYGVYDLYDLGEFNQKGTVRTKYGTKAQYLQAIQAAHAAGMQVYADVVFDHKGGADGTEWVDAVEVNPSDRNQEISGTYQIQAWTKFDFPGRGNTYSSFKWRWYHFNGVDWDESRKLSRIYKFRGIGKAWNWEVDTENGNYDYLMYADLDMNHPEVVTELKNWGKWYVNTTNIDGFRLDAVKHIKFSFFPDWLSYVRSQTGKPLFTVGEYWSYDINKLHNYITKTDGTMSLFDAPLHNKFYTASKSGGAFDMRTLMTNTLMKDQPTLAVTFVDNHDTEPGQALQSWVDPWFKPLAYAFILTRQEGYPCVFYGDYYGIPQYNIPSLKSKIDPLLIARRDYAYGTQHDYLDHSDIIGWTREGGTEKPGSGLAALITDGPGGSKWMYVGKQHAGKVFYDLTGNRSDTVTINSDGWGEFKVNGGSVSVWVPRKTTVS

SEQ ID NO: 17564 - protein, 488 aa, Bacillus stearothermophilus
AAPFNGTMMQYFEWYLPDDGTLWTKVANEANNLSSLGITALWLPPAYKGTSRSDVGYGIYDLYDLGEFNQKGTVRTKYGTKAQYLQAIQAAHAAGMQVYADVVFDHKGGADGTEWVDAVEVNPSDRNQEISGTYQIQAWTKFDFPGRGNTYSSFKWRWYHFDGVDWDESRKLSRIYKFRGIGKAWDWEVDTENGNYDYLMYADLDMDHPEVVTELKNWGKWYVNTTNIDGFRLDAVKHIKFSFFPDWLSYVRSQTGKPLFTVGEYWSYDINKLHNYITKTNGTMSLFDAPLHNKFYTASKSGGAFDMRTLMTNTLMKDQPTLAVTFVDNHDTEPGQALQSWVDPWFKPLAYAFILTRQEGYPCVFYGDYYGIPQYNIPSLKSKIDPLLIARRDYAYGTQHDYLDHSDIIGWTREGVTEKPGSGLAALITDGPGGSKWMYVGKQHAGKVFYDLTGNRSDTVTINSDGWGEFKVNGGSVSVWVPRKTTVS

SEQ ID NO: 17565 - protein, 488 aa, Geobacillus stearothermophilus
AAPFNGTMMQYFEWYLPDDGTLWTKVANEANNLSSLGITALWLPPAYKGTSRSDVGYGVYDLYDLGEFNQKGTVRTKYGTKAQYLQAIQAAHAAGMQVYADVVFDHKGGADGTEWVDAVEVNPSDRNQEISGTYQIQAWTKFDFPGRGNTYSSFKWRWYHFDGVDWDESRKLSRIYKFRGIGKAWDWEVDTENGNYDYLMYADLDMDHPEVVTELKNWGKWYVNTTNIDGFRLDAVKHIKFSFFPDWLSYVRSQTGKPLFTVGEYWSYDINKLHNYITKTNGTMSLFDAPLHNKFYTASKSGGAFDMRTLMTNTLMKDRPTLAVTFVDNHDTEPGQALQSWVDPWFKPLAYAFILTRQEGYPCVFYGDYYGIPQYNIPSLKSKIDPLLIARRDYAYGTQHDYLDHSDIIGWTREGVTEKPGSGLAALITDGPGGSKWMYVGKQHAGKVFYDLTGNRSDTVTINSDGWGEFKVNGGSVSVWVPRKTTVS

SEQ ID NO: 17566 - protein, 488 aa, Geobacillus stearothermophilus
AAPFNGTMMQYFEWYLPDDGTLWTKVANEANNLSSLGITALWLPPAYKGTSRSDVGYGVYDLYDLGEFNQKGTVRTKYGTKAQYLQAIQAAHAAGMQVYADVVFDHKGGADGTEWVDAVEVNPSDRNQEISGTYQIQAWTKFDFPGRGNTYSSFKWRWYHFDGVDWDESRKLSRIYKFRGIGKAWDWEVDTENGNYDYLMYADLDMDHPEVVTELKNWGKWYVNTTNIDGFRLDAVKHIKFSFFPDWLSYVRSQTGKPLFTVGEYWSYDINKLHNYITKTNGTMSLFDAPLHNKFYTASKSGGAFDMRTLMTNTLMKDQPTLAVTFVDNHDTEPGQALQSWVDPWFKPLAYAFILTRQEGYPCVFYGDYYGIPQYNIPSLKSKIDPLLIARRDYAYGTQHDYLDHSDIIGWTREGVTEKPGSGLAALITDGPGGSKWMYVGKQHAGKVFYDLTGNRSDTVTITSDGWGEFKVNGGSVSVWVPRKTTVS

SEQ ID NO: 17567 - protein, 488 aa, Geobacillus stearothermophilus
AAPFNGTMMQYFEWYLPDDGTLWTKVANEANNLSSLGITALWLPPAYKGTSRSDVGYGVYDLYDLGEFNQKGTVRTKYGTKAQYLQAIQAAHAAGMQVYADVVFDHKGGADGTEWVDAVEVNPSDRNQEISGTYQIQAWTKFDFPGRGNTYSSFKWRWYHFDGVDWDESRKLSRIYKFRGIGKAWDWEVDTENGNYDYLMYADLDMDHPEVVTELKNWGKWYVNTTNIDGFRLDAVKHIKFSFFPDWLSYVRSQTGKPLFTVGEYWSYDINKLHNYITKTNGTMSLFDAPLHNKFYTASKSGGAFDMRTLMTNTLMKDQPTLAVTFVDNHDTEPGQALQSWVDPWFKPLAYAFILTRQEGYPCVFYGDYYGIPQYNIPSLKSKIDPLLIARRDYAYGTQHDYLDHSDIIGWTREGVTEKPGSGLAALITDGPGGSKWMYVGKRHAGKVFYDLTGNRSDTVTINSDGWGEFKVNGGSVSVWVPRKTTVS

SEQ ID NO: 17568 - protein, 488 aa, Geobacillus stearothermophilus
AAPFNGTMMQYFEWYLPDDGTLWTKVANEANNLSSLGITALWLPPAYKGTSRSDVGYGVYDLYDLGEFNQKGTVRTKYGTKAQYLQAIQAAHAAGMQVYADVVFDHKGGADGTEWVDAVEVNPSDRNQEISGTYQIQAWTKFDFPGRGNTYSSFKWRWYHFDGVDWDESRKLSRIYKFRGIGKAWDWEVDTENGNYDYLMYADLDMDHPEVVTELKNWGKWYVNTTNIDGFRLDAVKHIKFAFFPDWLSYVRSQTGKPLFTVGEYWSYDINKLHNYITKTNGTMSLFDAPLHNKFYTASKSGGAFDMRTLMTNTLMKDQPTLAVTFVDNHDTEPGQALQSWVDPWFKPLAYAFILTRQEGYPCVFYGDYYGIPQYNIPSLKSKIDPLLIARRDYAYGTQHDYLDHSDIIGWTREGVTEKPGSGLAALITDGPGGSKWMYVGKQHAGKVFYDLTGNRSDTVTINSDGWGEFKVNGGSVSVWVPRKTTVS

SEQ ID NO: 17569 - protein, 488 aa, Geobacillus stearothermophilus
AAPFNGTMMQYFEWYLPDDGTLWTKVANEANNLSSLGITALWLPPAYKGTSRSDVGYGVYDLYDLGEFNQKGTVRTKYGTKAQYLQAIQAAHAAGMQVYADVVFDHKGGADGTEWVDAVEVNPSDRNQEISGTYQIQAWTKFDFPGRGNTYSSFKWRWYHFDGVDWDESRKLSRIYKFRGIGKAWDWEVDTENGNYDYLMYADLDMDHPEVVTELKNWGKWYVNTTNIDGFRLDAVKHIKFFFFPDWLSYVRSQTGKPLFTVGEYWSYDINKLHNYITKTNGTMSLFDAPLHNKFYTASKSGGAFDMRTLMTNTLMKDQPTLAVTFVDNHDTEPGQALQSWVDPWFKPLAYAFILTRQEGYPCVFYGDYYGIPQYNIPSLKSKIDPLLIARRDYAYGTQHDYLDHSDIIGWTREGVTEKPGSGLAALITDGPGGSKWMYVGKQHAGKVFYDLTGNRSDTVTINSDGWGEFKVNGGSVSVWVPRKTTVS

SEQ ID NO: 17570 - protein, 486 aa, Geobacillus stearothermophilus
AAPFNGTMMQYFEWYLPDDGTLWTKVANEANNLSSLGITALWLPPAYKGTSRSDVGYGVYDLYDLGEFNQKGTVRTKYGTKAQYLQAIQAAHAAGMQVYADVVFDHKGGADGTEWVDAVEVNPSDRNQEISGTYQIQAWTKFDFPGRGNTYSSFKWRWYHFDGVDWDESRKLSRIYKFIGKAWDWEVDTENGNYDYLMYADLDMDHPEVVTELKNWGKWYVNTTNIDGFRLDAVKHIKFSFFPDWLSYVRSQTGKPLFTVGEYWSYDINKLHNYITKTNGTMSLFDAPLHNKFYTASKSGGAFDMRTLMTNTLMKDQPTLAVTFVDNHDTEPGQALQSWVDPWFKPLAYAFILTRQEGYPCVFYGDYYGIPQYNIPSLKSKIDPLLIARRDYAYGTQHDYLDHSDIIGWTREGVTEKPGSGLAALITDGPGGSKWMYVGKQHAGKVFYDLTGNRSDTVTINSDGWGEFKVNGGSVSVWVPRKTTVS

SEQ ID NO: 17571 - protein, 488 aa, Geobacillus stearothermophilus
AAPFNGTMMQYFEWYLPDDGTLWTKVANEANNLSSLGITALWLPPAYKGTSRSDVGYGAYDLYDLGEFNQKGTVRTKYGTKAQYLQAIQAAHAAGMQVYADVVFDHKGGADGTEWVDAVEVNPSDRNQEISGTYQIQAWTKFDFPGRGNTYSSFKWRWYHFDGVDWDESRKLSRIYKFRGIGKAWDWEVDTENGNYDYLMYADLDMDHPEVVTELKNWGKWYVNTTNIDGFRLDAVKHIKFSFFPDWLSYVRSQTGKPLFTVGEYWSYDINKLHNYITKTNGTMSLFDAPLHNKFYTASKSGGAFDMRTLMTNTLMKDQPTLAVTFVDNHDTEPGQALQSWVDPWFKPLAYAFILTRQEGYPCVFYGDYYGIPQYNIPSLKSKIDPLLIARRDYAYGTQHDYLDHSDIIGWTREGVTEKPGSGLAALITDGPGGSKWMYVGKQHAGKVFYDLTGNRSDTVTINSDGWGEFKVNGGSVSVWVPRKTTVS

SEQ ID NO: 17572 - protein, 488 aa, Geobacillus stearothermophilus
AAPFNGTMMQYFEWYLPDDGTLWTKVANEANNLSSLGITALWLPPAYKGTSRSDVGYGVYDLYDLGEFNQKGTVRTKYGTKAQYLQAIQAAHAAGMQVYADVVFDHKGGADGTEWVDAVEVNPSDRNQEISGTYQIQAWTKFDFPGRGNTYSSFKWRWYHFDGVDWDESRKLSRIYKFRGIGKAWDWEVDTENGNYDYLMYADLDMDHPEVVTELKNWGKWYVNTTNIDGFRLDAVKHIKFLFFPDWLSYVRSQTGKPLFTVGEYWSYDINKLHNYITKTNGTMSLFDAPLHNKFYTASKSGGAFDMRTLMTNTLMKDQPTLAVTFVDNHDTEPGQALQSWVDPWFKPLAYAFILTRQEGYPCVFYGDYYGIPQYNIPSLKSKIDPLLIARRDYAYGTQHDYLDHSDIIGWTREGVTEKPGSGLAALITDGPGGSKWMYVGKQHAGKVFYDLTGNRSDTVTINSDGWGEFKVNGGSVSVWVPRKTTVS

SEQ ID NO: 17573 - protein, 488 aa, Geobacillus stearothermophilus
AAPFNGTMMQYFEWYLPDDGTLWTKVANEANNLSSLGITALWLPPAYKGTSRSDVGYGVYDLYDLGEFNQKGTVRTKYGTKAQYLQAIQAAHAAGMQVYADVVFDHKGGADGTEWVDAVEVNPSDRNQEISGTYQIQAWTKFDFPGRGNTYSSFKWRWYHFDGVDWDESRKLSRIYKFRGIGKAWDWEVDTENGNYDYLMYADLDMDHPEVVTELKNWGKWYVNTTNIDGFRLDAVKHIKFQFFPDWLSYVRSQTGKPLFTVGEYWSYDINKLHNYITKTNGTMSLFDAPLHNKFYTASKSGGAFDMRTLMTNTLMKDQPTLAVTFVDNHDTEPGQALQSWVDPWFKPLAYAFILTRQEGYPCVFYGDYYGIPQYNIPSLKSKIDPLLIARRDYAYGTQHDYLDHSDIIGWTREGVTEKPGSGLAALITDGPGGSKWMYVGKQHAGKVFYDLTGNRSDTVTINSDGWGEFKVNGGSVSVWVPRKTTVS

SEQ ID NO: 17574 - protein, 488 aa, Geobacillus stearothermophilus
AAPFNGTMMQYFEWYLPDDGTLWTKVANEANNLSSLGITALWLPPAYKGTSRSDVGYGVYDLYDLGEFNQKGTVRTKYGTKAQYLQAIQAAHAAGMQVYADVVFDHKGGADGTEWVDAVEVNPSDRNQEISGTYQIQAWTKFDFPGRGNTYSSFKWRWYHFDGVDWDESRKLSRIYKFRGIGKAWDWEVDTENGNYDYLMYADLDMDHPEVVTELKNWGKWYVNTTNIDGFRLDAVKHIKFSFFPDWLSYVRSQTGKPLFTVGEYWSYDINKLHNYITKTNGTTSLFDAPLHNKFYTASKSGGAFDMRTLMTNTLMKDQPTLAVTFVDNHDTEPGQALQSWVDPWFKPLAYAFILTRQEGYPCVFYGDYYGIPQYNIPSLKSKIDPLLIARRDYAYGTQHDYLDHSDIIGWTREGVTEKPGSGLAALITDGPGGSKWMYVGKQHAGKVFYDLTGNRSDTVTINSDGWGEFKVNGGSVSVWVPRKTTVS

SEQ ID NO: 17575 - protein, 488 aa, Geobacillus stearothermophilus
AAPFNGTMMQYFEWYLPDDGTLWTKVANEANNLSSLGITALWLPPAYKGTSRSDVGYGVYDLYDLGEFNQKGTVRTKYGTKAQYLQAIQAAHAAGMQVYADVVFDHKGGADGTEWVDAVEVNPSDRNQEISGTYQIQAWTKFDFPGRGNTYSSFKWRWYHFDGVDWDESRKLSRIYKFRGIGKAWDWEVDTENGNYDYLMYADLDMDHPEVVTELKNWGKWYVNTTNIDGFRLDAVKHIKFEFFPDWLSYVRSQTGKPLFTVGEYWSYDINKLHNYITKTNGTMSLFDAPLHNKFYTASKSGGAFDMRTLMTNTLMKDQPTLAVTFVDNHDTEPGQALQSWVDPWFKPLAYAFILTRQEGYPCVFYGDYYGIPQYNIPSLKSKIDPLLIARRDYAYGTQHDYLDHSDIIGWTREGVTEKPGSGLAALITDGPGGSKWMYVGKQHAGKVFYDLTGNRSDTVTINSDGWGEFKVNGGSVSVWVPRKTTVS

SEQ ID NO: 17576 - protein, 488 aa, Geobacillus stearothermophilus
AAPFNGTMMQYFEWYLPDDGTLWTKVANEANNLSSLGITALWLPPAYKGTSRSDVGYGEYDLYDLGEFNQKGTVRTKYGTKAQYLQAIQAAHAAGMQVYADVVFDHKGGADGTEWVDAVEVNPSDRNQEISGTYQIQAWTKFDFPGRGNTYSSFKWRWYHFDGVDWDESRKLSRIYKFRGIGKAWDWEVDTENGNYDYLMYADLDMDHPEVVTELKNWGKWYVNTTNIDGFRLDAVKHIKFSFFPDWLSYVRSQTGKPLFTVGEYWSYDINKLHNYITKTNGTMSLFDAPLHNKFYTASKSGGAFDMRTLMTNTLMKDQPTLAVTFVDNHDTEPGQALQSWVDPWFKPLAYAFILTRQEGYPCVFYGDYYGIPQYNIPSLKSKIDPLLIARRDYAYGTQHDYLDHSDIIGWTREGVTEKPGSGLAALITDGPGGSKWMYVGKQHAGKVFYDLTGNRSDTVTINSDGWGEFKVNGGSVSVWVPRKTTVS

SEQ ID NO: 17577 - protein, 486 aa, Geobacillus stearothermophilus
AAPFNGTMMQYFEWYLPDDGTLWTKVANEANNLSSLGITALWLPPAYKGTSRSDVGYGVYDLYDLGEFNQKGTVRTKYGTKAQYLQAIQAAHAAGMQVYADVVFDHKGGADGTEWVDAVEVNPSDRNQEISGTYQIQAWTKFDFPGRGNTYSSFKWRWYHFDGVDWDESRKLSRIYKFRGKAWDWEVDTEFGNYDYLMYADLDMDHPEVVTELKNWGPWYVLTTNIDGFRLDAVKHIKFQFFPDWLSYVRSSTGKPLFTVGEYWSYDINKLHNYITKTDGTMSLFDAPLHNKFYTASKSGGAFDMRTLMTNTLMKDQPTLAVTFVDNHDTEPGQALQSWVDPWFKPLAYAFILTRQEGYPCVFYGDYYGIPQYNIPSLKSKIDPLLIARRDYAYGTQHDYLDHSDIIGWTREGGTEKPGSGLAALITDGPGGSKWMYVGKQHAGKVFYDLTGNRSDTVTINSDGWGEFKVNGGSVSVWVPRKTTVS

SEQ ID NO: 17578 - protein, 484 aa, Aspergillus niger
AATALAATPADWRSQSIYFLLTDRFARTDGSTTATCNTADQKYCGGTWQGIIDKLDYIQGMGFTAIWITPVTAQLPQTTAYGDAYHGYWQQDIYSLNENYGTADDLKALSSALHERGMYLMVDVVANHMGYDGAGSSVDYSVFKPFSSQDYFHPFCFIQNYEDQTQVEDCWLGDNTVSLPDLDTTKDVVKNEWYDWVGSLVSNYSIDGLRIDTVKHVQKDFWPGYNKAAGVYCIGEVLDGDPAYTCPYQNVLDGVLNYPIYYPLLNAFKSTSGSMDDLYNMINTVKSDCPDSTLLGTFVENHDNPRFASYTNDIALAKNVAAFIILNDGIPIIYAGQEQHYAGGNDPANREATWLSGYPTDSELYKLIASANAIRNYAISKDTGFVTYKNWPIYKDDTTIALRKGTDGSQIVTILSNKGASGDSYTLSLSGAGYTAGQQLTEVIGCTTVTVGSDGNVPVPLAGGLPRVLYPTEKLAGSKICSSS

SEQ ID NO: 17579 - protein, 484 aa, Aspergillus niger
AATALAATPADWRSQSIYFLLTDRFARTDGSTTATCNTADQKYCGGTWQGIIDKLDYIQGMGFTAIWITPVTAQLPQTTAYGDAYHGYWQQDIYSLNENYGTADDLKALSSALHERGMYLMVDVVANHMGYDGAGSSVDYSVFKPFSSQDYFHPFCFIQNYEDQTQVEDCWLGDNTVSLPDLDTTKDVVKNEWYDWVGSLVSNYSIDGLRIDTVKHVQKDFWPGYNKAAGVYCIGEVLDGDPAYTCPYQNVMDGVLNYPMYYPLLNAFKSTSGSMDDLYNMINTMKSDCPDSTLLGTFVENHDNPRFASYTNDMALAKNVAAFIILNDGIPIIYAGQEQHYAGGNDPANREATWLSGYPTDSELYKLIASANAIRNYAISKDTGFVTYKNWPIYKDDTTIAMRKGTDGSQIVTILSNKGASGDSYTLSLSGAGYTAGQQLTEVIGCTTVTVGSDGNVPVPMAGGLPRVLYPTEKLAGSKICSSS

SEQ ID NO: 17580 - protein, 484 aa, Aspergillus niger
AATALAATPADWRSQSIYFLLTDRFARTDGSTTATCNTADQKYCGGTWQGIIDKLDYIQGMGFTAIWITPVTAQLPQTTAYGDAYHGYWQQDIYSLNENYGTADDLKALSSALHERGMYLMVDVVANHMGYDGAGSSVDYSVFKPFSSQDYFHPFCFIQNYEDQTQVEDCWLGDNTVSLPDLDTTKDVVKNEWYDWVGSLVSNYSIDGLRIDTVKHVQKDFWPGYNKAAGVYCIGEVLDGDPAYTCPYQNVLDGVLNYPIYYPLLNAFKSTSGSIDDLYNMINTVKSDCPDSTLLGTFVENHDNPRFASYTNDIALAKNVAAFIILNDGIPIIYAGQEQHYAGGNDPANREATWLSGYPTDSELYKLIASANAIRNYAISKDTGFVTYKNWPIYKDDTTIAMRKGTDGSQIVTILSNKGASGDSYTLSLSGAGYTAGQQLTEVIGCTTVTVGSDGNVPVPLAGGLPRVLYPTEKLAGSKICSSS

SEQ ID NO: 17581 - protein, 484 aa, Aspergillus niger
AATALAATPADWRSQSIYFLLTDRFARTDGSTTATCNTADQKYCGGTWQGIIDKLDYIQGMGFTAIWITPVTAQLPQTTAYGDAYHGYWQQDIYSLNENYGTADDLKALSSALHERGMYLMVDVVANHMGYDGAGSSVDYSVFKPFSSQDYFHPFCFIQNYEDQTQVEDCWLGDNTVSLPDLDTTKDVVKNMWYDWVGSLVSNYSIDGLRIDTVKHVQKDFWPGYNKAAGVYCIGEVLDGDPAYTCPYQNVMDGVLNYPIYYPLLNAFKSTSGSMDDLYNMINTVKSDCPDSTLLGTFMENHDNPRFASYTNDIALAKNVAAFIILNDGIPIIYAGQEQHYAGGNDPANREATWLSGYPTDSELYKLIASANAIRNYAISKDTGFVTYKNWPIYKDDTTIAMRKGTDGSQIVTILSNKGASGDSYTLSLSGAGYTAGQQLMEVIGCTTVTVGSDGNVPVPMAGGLPRVLYPTEKLAGSKICSSS

SEQ ID NO: 17582 - protein, 484 aa, Aspergillus niger
AATALAATPADWRSQSIYFLLTDRFARTDGSTTATCNTADQKYCGGTWQGIIDKLDYIQGMGFTAIWITPVTAQLPQTTAYGDAYHGYWQQDIYSLNENYGTADDLKALSSALHERGMYLMVDVVANHMGYDGAGSSVDYSVFKPFSSQDYFHPFCFIQNYEDQTQVEDCWLGDNTVSLPDLDTTKDVVKNEWYDWVGSLVSNYSIDGLRIDTVKHVQKDFWPGYNKAAGVYCIGEVLDGDPAYTCPYQNVLDGVLNYPIYYPLLNAFKSTSGSMDDLYNEINTVKSDCPDSTLLGTFVENHDNPRFASYTNDIALAKNVAAFIILNDGIPIIYAGQEQHYAGGNDPANREATWLSGYPTDSELYKLIASANAIRNYAISKDTGFVTYKNWPIYKDDTTIALRKGTDGSQIVTILSNKGASGDSYTLSLSGAGYTAGQQLTEVIGCTTVTVGSDGNVPVPMAGGLPRVLYPTEKLAGSKICSSS

SEQ ID NO: 17583 - protein, 484 aa, Aspergillus niger CBS 513.88
ASQVLSATPADWRSQSIYFLLTDRFARTDGSTTATCNTADQKYCGGTWQGIIDKLDYIQGMGFTAIWITPVTAQLPQTTAYGDAYHGYWQQDIYSLNENYGTADDLKALSSALHERGMYLMVDVVANHMGYDGAGSSVDYSVFKPFSSQDYFHPFCFIQNYEDQTQVEDCWLGDNTVSLPDLDTTKDVVKNEWYDWVGSLVSNYSIDGLRIDTVKHVQKDFWPGYNKAAGVYCIGEVLDGDPAYTCPYQNVMDGVLNYPIYYPLLNAFKSTSGSMDDLYNMINTVKSDCPDSTLLGTFVENHDNPRFASYTNDIALAKNVAAFIILNDGIPIIYAGQEQHYAGGNDPANREATWLSGYPTDSELYKLIASANAIRNYAISKDTGFVTYKNWPIYKDDTTIAMRKGTDGSQIVTILSNKGASGDSYTLSLSGAGYTAGQQLTEVIGCTTVTVGSDGNVPVPMAGGLPRVLYPTEKLAGSKICSSS

SEQ ID NO: 17584 - protein, 483 aa, Bacillus sp.
HHNGTNGTMMQYFEWHLPNDGNHWNRLRDDASNLRNRGITAIWIPPAWKGTSQNDVGYGAYDLYDLGEFNQKGTVRTKYGTRSQLESAIHALKNNGVQVYGDVVMNHKGGADATENVLAVEVNPNNRNQEISGDYTIEAWTKFDFPGRGNTYSDFKWRWYHFDGVDWDQSRQFQNRIYKFRGKAWDEEVDSEFGNYDYLMYADYDMDHPEVVNELRRWGEWYTNTLNLDGFRIDAVKHIKFSFTRDWLTHVRNATGKEMFAVAEFWKNDLGALENYLNKTNWNHSVFDVPLHYNLYNASNSGGNYDMAKLLNGTVVQKHPMHAVTFVDNHDSQPGESLESFVQEWFKPLAYALILTREQGYPSVFYGDYYGIPTHSVPAMKAKIDPILEARQNFAYGTQHDYFDHHNIIGWTREGNTTHPNSGLATIMSDGPGGEKWMYVGQNKAGQVWHDITGNKPGTVTINADGWANFSVNGGSVSIWVKR

SEQ ID NO: 17585 - protein, 483 aa, Bacillus sp.
HHNGTNGTMMQYFEWHLPNDGNHWNRLRDDASNLRNRGITAIWIPPAWKGTSQNDVGYGAYDLYDLGEFNQKGTVRTKYGTRSQLESAIHALKNNGVQVYGDVVMNHKGGADATENVLAVEVNPNNRNQEISDDYTIEAWTKFDFPGRRNTYSDFKWRWYHFDGVDWDQSRQFQNRIYKFRGKAWDWEVDSENGNNDYLMYADLDMDHPEVVNELRRWGEWYTNTLNLDGFRIDAVKHIKYSFTRDWLTHVRNATGKEMFAVAEFWKNDLGALENYLNKTNWNHSVFDVPLHYNLYNASNSGGNYDMAKLLNGTVVQKHPMHAVTFVDNHDSQPGESLESFVQEWFKPLAYALILTREQGYPSVFYGDYYGIPTHSVPAMKAKIDPILEARQNFAYGTQHDYFDHHNIIGWTREGNTTHPNSGLATIMSDGPGGEKWMYVGQNKAGQVWHDITGNKPGTVTINADGWANFSVNGGSVSIWVKR

SEQ ID NO: 17586 - protein, 483 aa, Bacillus sp.
HHNGTNGTMMQYFEWHLPNDGNHWNRLRDDASNLRNRGITAIWIPPAWKGTSQNDVGYGAYDLYDLGEFNQKGTVRTKYGTRSQLESAIHALKNNGVQVYGDVVMNHKGGADATENVLAVEVNPNNRNQEISGDYTIEAWTKFDFPGRGNTYSDFKWRWYHFDGVDWDQSRQFQNRIYKFRGKAWDWEVDSEFGNYDYLMYADYDMDHPEVVNELRRWGEWYTNTLNLDGFRIDAVKHIKFSFTRDWLTHVRNATGKEMFAVAEFWKNDLGALENYLNKTNWNHSVFDVPLHYNLYNASNSGGNYDMAKLLNGTVVQKHPMHAVTFVDNHDSQPGESLESFVQEWFKPLAYALILTREQGYPSVFYGDYYGIPTHSVPAMKAKIDPILEARQNFAYGTQHDYFDHHNIIGWTREGNTTHPNSGLATIMSDGPGGEKWMYVGQNKAGQVWHDITGNKPGTVTINADGWANFSVNEGSVSIWVKR

SEQ ID NO: 17587 - protein, 483 aa, Bacillus sp.
HHNGTNGTMMQYFEWHLPNDGNHWNRLRDDASNLRNRGITAIWIPPAWKGTSQNDVGYGAYDLYDLGEFNQKGTVRTKYGTRSQLESAIHALKNNGVQVYGDVVMNHKGGADATENVLAVEVNPNNRNQEISGDYTIEAWTKFDFPGRGNTYSDFKWRWYHFDGVDWDQSRQFQNRIYKFRGKAWDWEVDSEFGNYDYLMYADYDMDHPEVVNELRRWGEWYTNTLNLDGFRIDAVKHIKFSFTRDWLTHVRNATGKEMFAVAEFWKNDLGALENYLNKTNWNHSVFDVPLHYNLYNASNSGGNYDMAKLLNGTVVQKHPMHAVTFVDNHDSQPGESLESFVQEWFKPLAYALILTREQGYPSVFYGDYYGIPTHSVPAMKAKIDPILEARQNFAYGTQHDYFDHHNIIGWTREGNTTHPNSGLATIMSDGPGGEKWMYVGQNKAGQVWHDITGNKPGTVTINADGWANFSVNGRSVSIWVKR

SEQ ID NO: 17588 - protein, 483 aa, Bacillus sp.
HHNGTNGTMMQYFEWHLPNDGNHWNRLRDDASNLRNRGITAIWIPPAWKGTSQNDVGYGAYDLYDLGEFNQKGTVRTKYGTRSQLESAIHALKNNGVQVYGDVVMNHKGGADATENVLAVEVNPNNRNQEISEDYTIEAWTKFDFPGRGNTYSDFKWRWYHFDGVDWDQSRQFQNRIYKFRGKAWDWEVDSENGYYDNLFYADVDMDHPEVVNELRRWGEWYTNTLNLDGFRIDAVKHIKYSFTRDWLTHVRNATGKEMFAVAEFWKNDLGALENYLNKTNWNHSVFDVPLHYNLYNASNSGGNYDMAKLLNGTVVQKHPMHAVTFVDNHDSQPGESLESFVQEWFKPLAYALILTREQGYPSVFYGDYYGIPTHSVPAMKAKIDPILEARQNFAYGTQHDYFDHHNIIGWTREGNTTHPNSGLATIMSDGPGGEKWMYVGQNKAGQVWHDITGNKPGTVTINADGWANFSVNGGSVSIWVKR

SEQ ID NO: 17589 - protein, 485 aa, Bacillus sp.
HHNGTNGTMMQYFEWHLPNDGNHWNRLRDDASNLRNRGITAIWIPPAWKGISQNDVGYGAYDLYDLGEFNQKGTVRTKYGTRSQLESAIHALKNNGVQVYGDVVMNHKGGADATENVLAVEVNPNNRNQEISGDYTIEAWTKFDFPGRGNTYSDFKWRWYHFDGVDWDQSRQFQNRIYRFRGDGKAWDWEVDSENGNYDYLMYADVDMDHPEEVNELRRWGEWYTNTLNLDGFRIDAVKHIKYSFTRDWLTHVRNATGKEMFAVAEFWKNDLGALENYLNKTNWNHSVFDVPLHYNLYNASNSGGNYDMAKLLNGTVVQKHPMHAVTFVDNHDSQPGESLESFVQEWFKPLAYALILTREQGYPSVFYGDYYGIPTHSVPAMKAKIDPILEARQNFAYGTQHDFFDHHNIIGWTREGNTTHPNSGLATIMSDGPGGEKWMYVGQNKAGQVWHDITGNKPGTVTINADGWANFSVNGGSVSIWVKR

SEQ ID NO: 17590 - protein, 485 aa, Bacillus sp.
HHNGTNGTMMQYFEWHLPNDGNHWNRLRDDASNLRNRGITAIWIPPAWKGTSQNDVGYGAYDLYDLGEFNQKGTVRTKYGTRSQLESAIHALKNNGVQVYGDVVMNHKGGADATETVLAVEVNPNNRNQEISEDYTIEAWTKFDFPGRGNTYSDFKWRWYHFDGVDWDQSRQFQNRIYKFRGXXKAWDWEVDSENGNNDYLMYADLDMDHPEVVNELRRWGEWYTNTLNLDGFRIDAVKHIKYSFTRDWLTHVRNATGKEMFAVAEFWKNDLGALENYLNKTNWNHSVFDVPLHYNLYNASNSGGNYDMAKLLNGTVVQKHPMHAVTFVDNHDSQPGESLESFVQEWFKPLAYALILTREQGYPSVFYGDYYGIPTHSVPAMKAKIDPILEARQNFAYGTQHDYFDHHNIIGWTREGNTTHPNSGLATIMSDGPGGEKWMYVGQNKAGQVWHDITGNKPGTVTINADGWANFSVNGGSVSIWVKR

SEQ ID NO: 17591 - protein, 483 aa, Bacillus sp.
HHNGTNGTMMQYFEWHLPNDGNHWNRLRDDASNLRNRGITAIWIPPAWKGTSQNDVGYGAYDLYDLGEFNQKGTVRTKYGTRSQLESAIHALKNNGVQVYGDVVMNHKGGADATENVLAVEVNPNNRNQEISGDYTIEAWTKFDFPGRGNTYSDFKWRWYHFDGVDWDQSRQFQNRIYKFRGKAWDWEVDSENGNYDYLMYADLDMDHPGVVNELRRWGEWYTNTLNLDGFRIDAVKHIKYSFTRDWLTHVRNATGKEMFAVAEFWKNDLGALENYLNKTNWNHSVFDVPLHYNLYNASNSVGNYDMAKLLNGTVVQKHPMHAVTFVDNHDSQPGESLESFVQEWFKPLAYALILTREQGYPSVFYGDYYGIPTHSVPAMKAKIDPILEARQNFAYGTQHDYFDHHNIIGWTREGNTTHPNSGLATIMSDGPGGEKWMYVGQNKVGQVWHDITGNKPGTVTINADGWANFSVNGGSVSIWVKR

SEQ ID NO: 17592 - protein, 483 aa, Bacillus sp.
HHNGTNGTMMQYFEWHLPNDGNHWNRLRDDASNLRNRGITAIWIPPAWKGTSQNDVGYGAYDLYDLGEFNQKGTVRTKYGTRSQLESAIHALKNNGVQVYGDVVMNHKGGADATENVLAVEVNPNNRNQEISGDYTIEAYTKFDFPGRGNTYSDFKWRWYHFDGVDWDQSRQFQNRIYKFRGKAWDWEVDSEFGNYDYLMYADYDMDHPEVVNELRRWGEWYTNTLNLDGFRIDAVKHIKFSFTRDWLTHVRNATGKEMFAVAEFWKNDLGALENYLNKTNWNHSVFDVPLHYNLYNASNSGGNYDMAKLLNGTVVQKHPMHAVTFVDNHDSQPGESLESFVQEWFKPLAYALILTREQGYPSVFYGDYYGIPTHSVPAMKAKIDPILEARQNFAYGTQHDYFDHHNIIGWTREGNTTHPNSGLATIMSDGPGGEKWMYVGQNKAGQVWHDITGNKPGTVTINADGWANFSVNGGSVSIWVKR

SEQ ID NO: 17593 - protein, 483 aa, Bacillus sp.
HHNGTNGTMMQYFEWHLPNDGNHWNRLRDDASNLRNRGITAIWIPPAWKGTSQNDVGYGAYDLYDLGEFNQKGTVRTKYGTRSQLESAIHALKNNGVQVYGDVVMNHKGGADATETVLAVEVNPNNRNQEISEDYTIEAWTKFDFPERGNTHSDFKWRWYHFDGVDWDQSRQFQNRIYKFRGKAWDWEVDSENGNYDYLMYADVDMDHPEVVNELRRWGEWYTNTLNLDGFRIDAVKHIKYSFTRDWLTHVRNATGKEMFAVAEFWKNDLGALENYLNKTNWNHSVFDVPLHYNLYNASNSGGNYDMAKLLNGTVVQKHPMHAVTFVDNHDSQPGESLESFVQEWFKPLAYALILTREQGYPSVFYGDYYGIPTHSVPAMKAKIDPILEARQNFAYGTQHDYFDHHNIIGWTREGNTTHPNSGLATIMSDGPGGEKWMYVGQNKAGQVWHDITGNKPGTVTINADGWANFSVNGGSVSIWVKR

SEQ ID NO: 17594 - protein, 485 aa, Bacillus sp.
HHNGTNGTMMQYFEWHLPNDGNHWNRLRDDASNLRNRGITAIWIPPAWKGTSQNDVGYGAYDLYDLGEFNQKGTVRTKYGTRSQLESAIHALKNNGVQVYGDVVMNHKGGADATENVLAVEVNPNNRNQEISDDYTIEAWTKFDFPGRRNTYSDFKWRWYHFDGVDWDQSRQFQNRIYKFRGXXKAWDWEVDSENGNNDYLMYADLDMDHPEVVNELRRWGEWYTNTLNLDGFRIDAVKHIKYSFTRDWLTHVRNATGKEMFAVAEFWKNDLGALENYLNKTNWNHSVFDVPLHYNLYNASNSGGNYDMAKLLNGTVVQKHPMHAVTFVDNHDSQPGESLESFVQEWFKPLAYALILTREQGYPSVFYGDYYGIPTHSVPAMKAKIDPILEARQNFAYGTQHDYFDHHNIIGWTREGNTTHPNSGLATIMSDGPGGEKWMYVGQNKAGQVWHDITGNKPGTVTINADGWANFSVNGGSVSIWVKR

SEQ ID NO: 17595 - protein, 483 aa, Bacillus sp.
HHNGTNGTMMQYFEWHLPNDGNHWNRLRDDASNLRNRGITAIWIPPAWKGTSQNDVGYGAYDLYDLGEFNQKGTVRTKYGTRSQLESAIHALKNNGVQVYGDVVMNHKGGADATENVLAVEVNPNNRNQEISDDYTIEAWTKFDFPGRRNTYSDFKWRWYHFDGVDWDQSRQFQNRIYKFRGKAWDWEVDSENGNYDNLMYADVDLDHPEVVNELRRWGEWYTNTLNLDGFRIDAVKHIKYSFTRDWLTHVRNATGKEMFAVAEFWKNDLGALENYLNKTNWNHSVFDVPLHYNLYNASNSGGNYDMAKLLNGTVVQKHPMHAVTFVDNHDSQPGESLESFVQEWFKPLAYALILTREQGYPSVFYGDYYGIPTHSVPAMKAKIDPILEARQNFAYGTQHDYFDHHNIIGWTREGNTTHPNSGLATIMSDGPGGEKWMYVGQNKAGQVWHDITGNKPGTVTINADGWANFSVNGGSVSIWVKR

SEQ ID NO: 17596 - protein, 485 aa, Bacillus sp.
HHNGTNGTMMQYFEWHLPNDGNHWNRLRDDASNLRNRGITAIWIPPAWKGTSQNDVGYGAYDLYDLGEFNQKGTVRTKYGTRSQLESAIHALKNNGVQVYGDVVMNHKGGADATENVLAVEVNPNNRNQEISGDYTIEAWTKFDFPGRGNTYSDFKWRWYHFDGVDWDQSRQFQNRIYKFRGXXKAWDWEVDSENGNYDYLMYADLDMDHPGVVNELRRWGEWYTNTLNLDGFRIDAVKHIKYSFTRDWLTHVRNATGKEMFAVAEFWKNDLGALENYLNKTNWNHSVFDVPLHYNLYNASNSVGNYDMAKLLNGTVVQKHPMHAVTFVDNHDSQPGESLESFVQEWFKPLAYALILTREQGYPSVFYGDYYGIPTHSVPAMKAKIDPILEARQNFAYGTQHDYFDHHNIIGWTREGNTTHPNSGLATIMSDGPGGEKWMYVGQNKVGQVWHDITGNKPGTVTINADGWANFSVNGGSVSIWVKR

SEQ ID NO: 17597 - protein, 483 aa, Bacillus sp.
HHNGTNGTMMQYFEWHLPNDGNHWNRLRDDASNLRNRGITAIWIPPAWKGTSQNDVGYGAYDLYDLGEFNQKGTVRTKYGTRSQLESAIHALKNNGVQVYGDVVMNHKGGADATENVLAVEVNPNNRNQEISGDYTIEAWTKFDFPGRGNTYSDFKWRWYHFDGVDWDQSRQFQNRIYKFRGKAWDWEVDSEFGNYDYLMYADYDMDHPEVVNELRRWGEWYTNTLNLDGFRIDAVKHIKYSFTRDWLTHVRNATGKRMFAVAEFWKNDLDALENYLNKTNWNHSVFDVPLHYNLYNASNSGGNYDMAKLLNGTVVQKHPMHAVTFVDNHDSQPGESLESFVQEWFKPLAYALILTREQGYPSVFYGDYYGIPTHSVPAMKAKIDPILEARQNFAYGTQHDYFDHHNIIGWTREGNTTHPNSGLATIMSDGPGGEKWMYVGQNKAGQVWHDITGNKPGTVTINADGWANFSVNGGSVSIWVKR

SEQ ID NO: 17598 - protein, 483 aa, Bacillus sp.
HHNGTNGTMMQYFEWHLPNDGNHWNRLRDDASNLRNRGITAIWIPPAWKGTSQNDVGYGAYDLYDLGEFNQKGTVRTKYGTRSQLESAIHALKNNGVQVYGDVVMNHKGGADATENVLAVEVNPNNRNQEISGDYTIEAWTKFDFPGRGNTYSDFKWRWYHFDGVDWDQSRQFQNRIYKFRGKAWDWEVDSEFGNYDYLMYADYDMDHPEVVNELRRWGEWYTNTLNLDGFRIDAVKHIKFSFTRDWLTHVRNATGKEMFAVAEFWKNDLGALENYLNKTNDNHSVFDVPLHYNLYNASNSGGNYDMAKLLNGTVVQKHPMHAVTFVDNHDSQPGESLESFVQEWFKPLAYALILTREQGYPSVFYGDYYGIPTHSVPAMKAKIDPILEARQNFAYGTQHDYFDHHNIIGWTREGNTTHPNSGLATIMSDGPGGEKWMYVGQNKAGQVWHDITGNKPGTVTINADGWANFSVNGGSVSIWVKR

SEQ ID NO: 17599 - protein, 483 aa, Bacillus sp.
HHNGTNGTMMQYFEWHLPNDGNHWNRLRDDASNLRNRGITAIWIPPAWKGTSQNDVGYGAYDLYDLGEFNQKGTVRTKYGTRSQLESAIHALKNNGVQVYGDVVMNHKGGADATENVLAVEVNPNNRNQEISGDYTIEAWTKFDFPGRGNTYSDFKWRWYHFDGVDWDQSRQFQNRIYKFRGKAWDWEVDSENGNYDYLMYADVDLDHPEVGNELRRWGEWYTNTLNLDGFRIDAVKHIKYSFTRDWLTHVRNATGKEMFAVAEFWKNDLGALENYLNKTNWNHSVFDVPLHYNLYNASNSGGVYDMAKLLNGTVVQKHPMHAVTFVDNHDSQPGESLESFVQEWFKPLAYALILTREQGYPSVFYGDYYGIPTHSVPAMKAKIDPILEARQNFAYGTQHDYFDHHNIIGWTREGNTTHPNSGLATIMSDGPGGEKWMYVGQNKAGVVWHDITGNKPGTVTINADGWANFSVNGGSVSIWVKR

SEQ ID NO: 17600 - protein, 483 aa, Bacillus sp.
HHNGTNGTMMQYFEWHLPNDGNHWNRLRDDASNLRNRGITAIWIPPAWKGTSQNDVGYGAYDLYDLGEFNQKGTVRTKYGTRSQLESAIHALKNNGVQVYGDVVMNHKGGADATENVLAVEVNPNNRNQEISEDYTIEAWTKFDFPGRGNTYSDFKWRWYHFDGVDWDQSRQFQNRIYKFRGKAWDWEVDSEYGNNDFLMYADVDMDHPEVVNELRRWGEWYTNTLNLDGFRIDAVKHIKYSFTRDWLTHVRNATGKEMFAVAEFWKNDLGALENYLNKTNWNHSVFDVPLHYNLYNASNSGGNYDMAKLLNGTVVQKHPMHAVTFVDNHDSQPGESLESFVQEWFKPLAYALILTREQGYPSVFYGDYYGIPTHSVPAMKAKIDPILEARQNFAYGTQHDYFDHHNIIGWTREGNTTHPNSGLATIMSDGPGGEKWMYVGQNKAGQVWHDITGNKPGTVTINADGWANFSVNGGSVSIWVKR

SEQ ID NO: 17601 - protein, 483 aa, Bacillus sp.
HHNGTNGTMMQYFEWHLPNDGNHWNRLRDDASNLRNRGITAIWIPPAWKGTSQNDVGYGAYDLYDLGEFNQKGTVRTKYGTRSQLESAIHALKNNGVQVYGDVVMNHKGGADATENVLAVEVNPNNRNQEISEDYTIEAWTRFDFPGRGNTYSDFKWRWYHFDGVDWDQSRQFQNRIYKFRGKAWDWEVDSEFGNNDYLMYADVDMDHPEVVNELRRWGEWYTNTLNLDGFRIDAVKHIKYSFTRDWLTHVRNATGKEMFAVAEFWKNDLGALENYLNKTNWNHSVFDVPLHYNLYNASNSGGNYDMAKLLNGTVVQKHPMHAVTFVDNHDSQPGESLESFVQEWFKPLAYALILTREQGYPSVFYGDYYGIPTHSVPAMKAKIDPILEARQNFAYGTQHDYFDHHNIIGWTREGNTTHPNSGLATIMSDGPGGEKWMYVGQNKAGQVWHDITGNKPGTVTINADGWANFSVNGGSVSIWVKR

SEQ ID NO: 17602 - protein, 483 aa, Bacillus sp.
HHNGTNGTMMQYFEWHLPNDGNHWNRLRDDASNLRNRGITAIWIPPAWKGTSQNDVGYGAYDLYDLGEFNQKGTVRTKYGTRSQLESAIHALKNNGVQVYGDVVMNHKGGADATENVLAVEVNPNNRNQEISGDYTIEAWTKFDFPGRGNTYSDFKWRWYHFDGVDWDQSRQFQNRIYKFRGKAWDWEVDSEFGNYDYLMYADYDMDHPEVVNELRRWGEWYTNTLNLDGFRIDAVKHIKFSFTRDWLTHVRNATGKEMFAVAEFWKNDLGALENYLNKTNWNHSVFDVPLHYNLYNASNSGGNYDMAKLLNGTVVQKHPMHAVTFVDNHDSQPGESLESFVQEWFKPLAYALILTREQGYPSVFYGDYYGIPTHSVPAMKAKIDPILEARQNFAYGTQHDYFDHHNIIGWTREGNTTHPNSGLATIMSDGPGGEKWMYVGQNKAGQVWHDITGNKPGTVTINADGWANFSVNGMSVSIWVKR

SEQ ID NO: 17603 - protein, 483 aa, Bacillus sp.
HHNGTNGTMMQYFEWHLPNDGNHWNRLRDDASNLRNRGITAIWIPPAWKGTSQNDVGYGAYDLYDLGEFNQKGTVRTKYGTRSQLESAIHALKNNGVQVYGDVVMNHKGGADATENVLAVEVNPNNRNQEISEDYTIEAWTRFDFPGRGNTYSDFKWRWYHFDGVDWDQSRQFQNRIYKFRGKAWDWEVDSENGFYDNLMYADVDMDHPEVVNELRRWGEWYTNTLNLDGFRIDAVKHIKYSFTRDWLTHVRNATGKEMFAVAEFWKNDLGALENYLNKTNWNHSVFDVPLHYNLYNASNSGGNYDMAKLLNGTVVQKHPMHAVTFVDNHDSQPGESLESFVQEWFKPLAYALILTREQGYPSVFYGDYYGIPTHSVPAMKAKIDPILEARQNFAYGTQHDYFDHHNIIGWTREGNTTHPNSGLATIMSDGPGGEKWMYVGQNKAGQVWHDITGNKPGTVTINADGWANFSVNGGSVSIWVKR

SEQ ID NO: 17604 - protein, 485 aa, Bacillus sp.
HHNGTNGTMMQYFEWHLPNDGNHWNRLRDDASNLRNRGITAIWIPPAWKGTSQNDVGYGAYDLYDLGEFNQKGTVRTKYGTRSQLESAIHALKNNGVQVYGDVVMNHKGGADATENVLAVEVNPNNRNQEISEDYTIEAWTRFDFPGRGNTYSDFKWRWYHFDGVDWDQSRQFQNRIYKFRGXXKAWDWEVDSEFGNNDYLMYADVDMDHPEVVNELRRWGEWYTNTLNLDGFRIDAVKHIKYSFTRDWLTHVRNATGKEMFAVAEFWKNDLGALENYLNKTNWNHSVFDVPLHYNLYNASNSGGNYDMAKLLNGTVVQKHPMHAVTFVDNHDSQPGESLESFVQEWFKPLAYALILTREQGYPSVFYGDYYGIPTHSVPAMKAKIDPILEARQNFAYGTQHDYFDHHNIIGWTREGNTTHPNSGLATIMSDGPGGEKWMYVGQNKAGQVWHDITGNKPGTVTINADGWANFSVNGGSVSIWVKR

SEQ ID NO: 17605 - protein, 485 aa, Bacillus sp.
HHNGTNGTMMQYFEWHLPNDGNHWNRLRDDASNLRNRGITAIWIPPAWKGTSQNDVGYGAYDLYDLGEFNQKGTVRTKYGTRSQLESAIHALKNNGVQVYGDVVMNHKGGADATENVLAVEVNPNNRNQEISEDYTIEAWTKFDFPGRGNTYSDFKWRWYHFDGVDWDQSRQFQNRIYKFRGXXKAWDWEVDSEYGNNDFLMYADVDMDHPEVVNELRRWGEWYTNTLNLDGFRIDAVKHIKYSFTRDWLTHVRNATGKEMFAVAEFWKNDLGALENYLNKTNWNHSVFDVPLHYNLYNASNSGGNYDMAKLLNGTVVQKHPMHAVTFVDNHDSQPGESLESFVQEWFKPLAYALILTREQGYPSVFYGDYYGIPTHSVPAMKAKIDPILEARQNFAYGTQHDYFDHHNIIGWTREGNTTHPNSGLATIMSDGPGGEKWMYVGQNKAGQVWHDITGNKPGTVTINADGWANFSVNGGSVSIWVKR

SEQ ID NO: 17606 - protein, 483 aa, Geobacillus stearothermophilus
FNGTMMQYFEWYLPDDGTLWTKVANEANNLSSLGITALWLPPAYKGTSRSDVGYGVYDLYDLGEFNQKGTVRTKYGTKAQYLQAIQAAHAAGMQVYADVVFDHKGGADGTEWVDAVEVNPSDRNQEISGTYQIQAWTKFDFPGRGNTYSSFKWRWYHFDGVDWDESRKLSRIYKFRGKAWDWEVDTEFGNYDYLMYADLDMDHPEVVTELKNWGKWYVNTTNIDGFRLDAVKHIKFSFFPDWLSYVRSQTGKPLFTVGEYWSYDINKLHNYITKTDGTMSLFDAPLHNKFYTASKSGGAFDMRTLMTNTLMKDQPTLAVTFVDNHDTEPGQALQSWVDPWFKPLAYAFILTRQEGYPCVFYGDYYGIPQYNIPSLKSKIDPLLIARRDYAYGTQHDYLDHSDIIGWTREGGTEKPGSGLAALITDGPGGSKWMYVGKQHAGKVFYDLTGNRSDTVTINSDGWGEFKVNGGSVSVWVPKISTTS

SEQ ID NO: 17607 - protein, 482 aa, Bacillus sp.
HHNGTNGTMMQYFEWHLPNDGNHWNRLRDDASNLRNRGITAIWIPPAWKGTSQNDVGYGAYDLYDLGEFNQKGTVRTKYGTRSQLESAIHALKNNGVQVYGDVVMNHKGGADATENVLAVEVNPNNRNQEISGDYTIEAWTKFDFPGRGNRYSDFKWRWYHFDGVDWDQSRQFQNRIYKFRGKAWDWEVDSENGNYDYLMYADVDMDHPYVVNELRRWGEWYTNTLNLDGFRIDAVKHIKYSFTRDWLTHVRNATGKEMFAVAEFWKNDLGALENYLNKTNWNHSVFDVPLHYNLYNASNSGGNYDMAKLLNGTVVQKHNMHAVTFVDNHDSQPGESLESFVQEWFKPLAYALILTREGYPSVFYGDYYGIPTHSVPAMKAKIDPILEARQNFAYGTQHDYFDHHNIIGWTREGNTDHPNSGLATIMSDGPGGEKWMYVGQNKAGQVWHDITGNKPGTVTINADGWANFSVNGGSVSIWVKR

SEQ ID NO: 17608 - protein, 482 aa, Bacillus amyloliquefaciens
NGTLMQYFEWYTPNDGQHWKRLQNDAEHLSDIGITAVWIPPAYKGLSQSDNGYGPYDLYDLGEFQQKGTVRTKYGTKSELQDAIGSLHSRNVQVYGDVVLNHKAGADATEDVTAVEVNPANRNQETSEEYQIKAWTDFRFPGRGNTYSDFKWHWYHFDGADWDESRKISRIFKFRGEGKAWDWEVSSENGNYDYLMYVDVDYDHPDVVAETKKWGIWYANELSLDGFRIDAAKHIKFSFLRDWVQAVRQATGKEMFTVAEYWQNSAGKLENYLNKTSFNQSVFDVPLHFNLQAASSQGGGYDMRRLLDGTVVSRHPEKAVTFVENHDTQPGQSLESTVQTWFKPLAYAFILTRESGYPQVFYGDMYGTKGTSPREIPSLKDSIEPILKARKEYAYGPQHDYIDHPDVIGWTREGDSSAAKSGLAALITDGPGGSKRMYAGLKNAGETWYDITGNRSDTVKIGSDGWGEFHVNDGSVSIYVQK

SEQ ID NO: 17609 - protein, 480 aa, Bacillus amyloliquefaciens
VNGTLMQYFEWYTPNDGQHWKRLQNDAEHLSDIGITAVWIPPAYKGLSQSDNGYGPYDLYDLGEFQQKGTVRTKYGTKSELQDAIGSLHSRNVQVYGDVVLNHKAGADATEDVTAVEVNPANRNQETSEEYQIKAWTDFRFPGRGNTYSDFKWYWYHFDGADWDESRKISRIFKFRGEGKTWDWEVSSEFGNYDYLMYADVDYDHPDVVAETKKWGIWYANELSLDGFRIDAAKHIKFSFLRDWVQAVRQATGKEMFTVAEYWSNNAGKLENYLNKTSFNQSVFDVPLHFNLQAASSQGGGYDMRRLLDGTVVSRHPEKAVTFVENHDTQPGQSLESTVQTWFKPLAYAFILTRESGYPQVFYGDMYGTKGTSPKEIPSLKDNIEPILKARKEYAYGPQHDYIDHPDVIGWTREGDSSAAKSGLAALITDGPGGSKRMYAGLKNAGETWYDITGNRSDTVKIGSDGWGEFHVNDGSVSIY

SEQ ID NO: 17610 - protein, 479 aa, Aspergillus oryzae
ATPADWRSQSIYFLLTDRFARTDGSTTATCNTADQKYCGGTWQGIIDKLDYIQGMGFTAIWITPVTAQLPQTTAAGDAYHGYWQQDIYSLNENYGTADDLKALSSALHERGMYLMVDVVANHMGYDGAGSSVDYSVFKPFSSQDYFHPFCFIQNYEDQTQVEDCWLGDPAGFSLPDLDTTKDVVKNEWYDWVGSLVSNYSIDGLRIDTVKHVQKDFWPGYNKAAGVYCIGEVLDGDPAYTCPYQNVMDGVLNYPIYYPLLNAFKSTSGSMDDLYNMINTVKSDCPDSTLLGTFVENHDNPRFASYTNDIALAKNVAAFIILNDGIPIIYAGQEQHYAGGNDPANREATWLSGYPTDSELYKLIASANAIRNYAISKDTGFVTYKNWPIYKDDTTIAMRKGTDGSQIVTILSNKGASGDSYTLSLSGAGYTAGQQLTEVIGCTTVTVGSDGNVPVPMAGGLPRVLYPTEKLAGSKICSSS

SEQ ID NO: 17611 - protein, 480 aa, unidentified
TNGTMMQYFEWYLPNDGNHWNRLRSDASNLKDKGISAVWIPPAWKGASQNDVGYGAYDLYDLGEFNQKGTIRTKYGTRNQLQAAVNALKSNGIQVYGDVVMNHKGGADATEMVRAVEVNPNNRNQEVSGEYTIEAWTKFDFPGRGNTHSNFKWRWYHFDGVDWDQSRKLNNRIYKFRGDGKGWDWEVDTENGNYDYLMYADIDMDHPEVVNELRNWGVWYTNTLGLDGFRIDAVKHIKYSFTRDWINHVRSATGKNMFAVAEFWKNDLGAIENYLNKTNWNHSVFDVPLHYNLYNASKSGGNYDMRQIFNGTVVQRHPMHAVTFVDNHDSQPEEALESFVEEWFKPLAYALTLTREQGYPSVFYGDYYGIPTHGVPAMKSKIDPILEARQKYAYGRQNDYLDHHNIIGWTREGNTAHPNSGLATIMSDGAGGNKWMFVGRNKAGQVWTDITGNRAGTVTINADGWGNFSVNGGSVSIWVN

SEQ ID NO: 17612 - protein, 513 aa, Geobacillus stearothermophilus
AAPFNGTMMQYFEWYLPDDGTLWTKVANEANNLSSLGITALWLPPAYKGTSRSDVGYGVYDLYDLGEFNQKGTVRTKYGTKAQYLQAIQAAHAAGMQVYADVVFDHKGGADGTEWVDAVEVNPSDRNQVISGTYQIQAWTKFDFPGRGNTYSSFKWRWYHFDGVDWDESRKLSRIYLFEGKAWDWEVDTEFGNYDYLMYADLDMDHPEVVTELKNWGKWYVNTTNIDGFRLDAVKHIKFSFFPDWLSYVRSQTGKPLFTVGEYWSYDINKLHNYITKTNGTMSLFDAPLHNKFYTASKSGGAFDMRTLMTNTLMKDQPTLAVTFVDNHDTEPGQALQSWVDPWFKPLAYAFILTRQEGYPCVFYGDYYGIPQYNIPSLKSKIDPLLIARRDYAYGTQHDYLDHSDIIGWTREGVTEKPGSGLAALITDGPGGSKWMYVGKQHAGKVFYDLTGNRSDTVTINSDGWGEFKVNGGSVSVWVPRKTTVSTIARPITTRPWTGEFVRWTEPRLVAWP

SEQ ID NO: 17613 - protein, 513 aa, Geobacillus stearothermophilus
AAPFNGTMMQYFEWYLPDDGTLWTKVANEANNLSSLGITALWLPPAYKGTSRSDVGYGVYDLYDLGEFNQKGTVRTKYGTKAQYLQAIQAAHAAGMQVYADVVFDHKGGADGTEWVDAVEVNPSDRNQEISGTYQIQAWTKFDFPGRGNTYSSFKWRWYHFDGVDWDESRKLSRIYKFRGKAWDWEVDTEFGNYDYLMYADLDMDHPEVVTELKNWGPWYVLTTNIDGFRLDAVKHIKFSFFPDWLSYVRSSTGKPLFTVGEYWSYDINKLHNYITKTNGTMSLFDAPLHNKFYTASKSGGAFDMRTLMTNTLMKDQPTLAVTFVDNHDTEPGQALQSWVDPWFKPLAYAFILTRQEGYPCVFYGDYYGIPQYNIPSLKSKIDPLLIARRDYAYGTQHDYLDHSDIIGWTREGVTEKPGSGLAALITDGPGGSKWMYVGKQHAGKVFYDLTGNRSDTVTINSDGWGEFKVNGGSVSVWVPRKTTVSTIARPITTRPWTGEFVRWTEPRLVAWP

SEQ ID NO: 17614 - protein, 513 aa, Geobacillus stearothermophilus
AAPFNGTMMQYFEWYLPDDGTLWTKVANEANNLSSLGITALWLPPAYKGTSRSDVGYGVYDLYDLGEFNQKGTVRTKYGTKAQYLQAIQAAHAAGMQVYADVVFDHKGGADGTEWVDAVEVNPSDRNQVISGTYQIQAWTKFDFPGRGNTYSSFKWRWYHFDGVDWDESRKLSRIYLFVGKAWDWEVDTEFGNYDYLMYADLDMDHPEVVTELKNWGKWYVNTTNIDGFRLDAVKHIKFSFFPDWLSYVRSQTGKPLFTVGEYWSYDINKLHNYITKTNGTMSLFDAPLHNKFYTASKSGGAFDMRTLMTNTLMKDQPTLAVTFVDNHDTEPGQALQSWVDPWFKPLAYAFILTRQEGYPCVFYGDYYGIPQYNIPSLKSKIDPLLIARRDYAYGTQHDYLDHSDIIGWTREGVTEKPGSGLAALITDGPGGSKWMYVGKQHAGKVFYDLTGNRSDTVTINSDGWGEFKVNGGSVSVWVPRKTTVSTIARPITTRPWTGEFVRWTEPRLVAWP

SEQ ID NO: 17615 - protein, 514 aa, Geobacillus stearothermophilus
AAPFNGTMMQYFEWYLPDDGTLWTKVANEANNLSSLGITALWLPPAYKGTSRSDVGYGVYDLYDLGEFNQKGTVRTKYGTKAQYLQAIQAAHAAGMQVYADVVFDHKGGADGTEWVDAVEVNPSDRNQEISGTYQIQAWTKFDFPGRGNTYSSFKWRWYHFDGVDWDESRKLSRIYKRGIGKAWDWEVDTENGNYDYLMYADLDMDHPEVVTELKNWGKWYVNTTNIDGFRLDAVKHIKFSFFPDWLSYVRSQTGKPLFTVGEYWSYDINKLHNYITKTNGTMSLFDAPLHNKFYTASKSGGAFDMRTLMTNTLMKDQPTLAVTFVDNHDTEPGQALQSWVDPWFKPLAYAFILTRQEGYPCVFYGDYYGIPQYNIPSLKSKIDPLLIARRDYAYGTQHDYLDHSDIIGWTREGVTEKPGSGLAALITDGPGGSKWMYVGKQHAGKVFYDLTGNRSDTVTINSDGWGEFKVNGGSVSVWVPRKTTVSTIARPITTRPWTGEFVRWTEPRLVAWP

SEQ ID NO: 17616 - protein, 515 aa, Geobacillus stearothermophilus
AAPFNGTMMQYFEWYLPDDGTLWTKVANEANNLSSLGITALWLPPAYKGTSRSDVGYGVYDLYDLGEFNQKGTVRTKYGTKAQYLQAIQAAHAAGMRVYADVVFDHKGGADGTEWVDAVEVNPSDRNQEISGTYQIQAWTKFDFPGRGNTYSSFKWRWYHFDGVDWDESRKLSRIYKFRGIGKAWDWEVDTENGNYDYLMYADLDMDHPEVVTELKNWGKWYVNTTNIDGFRLDAVKHIKFSFFPDWLSYVRSQTGKPLFTVGEYWSYDINKLHNYITKTNGTMSLFDAPLHNKFYTASKSGGAFDMRTLMTNTLMKDEPTLAVTFVDNHDTEPGQALQSWVDPWFKPLAYAFILTRQEGYPCVFYGDYYGIPQYNIPSLKSKIDPLLIARRDYAYGTQHDYLDHSDIIGWTREGVTEKPGSGLAALITDGPGGSKWMYVGKQHAGKVFYDLTGNRSDTVTINSDGWGEFKVNGGSVSVWVPRKTTVSTIARPITTRPWTGEFVRWTEPRLVAWP

SEQ ID NO: 17617 - protein, 515 aa, Geobacillus stearothermophilus
AAPFNGTMMQYFEWYLPDDGTLWTKVANEANNLSSLGITALWLPPAYKGTSRSDVGYGVYDLYDLGEFNQKGTVRTKYGTKAQYLQAIQAAHAAGMQVYADVVFDHKGGADGTEWVDAVEVNPSDRNQEISGTYQIQAWTKFDFPGRGNTYSSFKWRWYHFDGVDWDESRKLSRIYKFRGIGKAWDWEVDTENGNYDYLMYADLDMDHPEVVTELKNWGKWYVNTTNIDGFRLDAVKHIKFSFFPDWLSYVRSQTGKPLFTVGEYWSYDINKLHNYITKTNGTMSLFDAPLHNKFYTASKSGGAFDMRTLMTNTLMKDEPTLAVTFVDNHDTEPGQALQSWVDPWFKPLAYAFILTRQEGYPCVFYGDYYGIPQYNIPSLKSKIDPLLIARRDYAYGTQHDYLDHSDIIGWTREGVTEKPGSGLAALITDGPGGSKWMYVGKEHAGKVFYDLTGNRSDTVTINSDGWGEFKVNGGSVSVWVPRKTTVSTIARPITTRPWTGEFVRWTEPRLVAWP

SEQ ID NO: 17618 - protein, 515 aa, Geobacillus stearothermophilus
AAPFNGTMMQYFEWYLPDDGTLWTKVANEANNLSSLGITALWLPPAYKGTSRSDVGYGVYDLYDLGEFNQKGTVRTKYGTKAQYLQAIQAAHAAGMQVYADVVFDHKGGADGTEWVDAVEVNPSDRNQEISGTYQIQAWTKFDFPGRGNTYSSFKWRWYHFDGVDWDESRKLSRIYKFRGIGKAWDWEVDTENGNYDYLMYADLDMDHPEVVTELKNWGKWYVNTTNIDGFRLDAVKHIKFSFFPDWLSYVRSQTGKPLFTVGEYWSYDINKLHNYITKTNGTMSLFDAPLHNKFYTASKSGGAFDMRTLMTNTLMKDQPTLAVTFVDNHDTEPGQALQSWVDPWFKPLAYAFILTRREGYPCVFYGDYYGIPQYNIPSLKSKIDPLLIARRDYAYGTQHDYLDHSDIIGWTREGVTEKPGSGLAALITDGPGGSKWMYVGKEHAGKVFYDLTGNRSDTVTINSDGWGEFKVNGGSVSVWVPRKTTVSTIARPITTRPWTGEFVRWTEPRLVAWP

SEQ ID NO: 17619 - protein, 515 aa, Geobacillus stearothermophilus
AAPFNGTMMQYFEWYLPDDGTLWTKVANEANNLSSLGITALWLPPAYKGTSRSDVGYGVYDLYDLGEFNQKGTVRTKYGTKAQYLQAIQAAHAAGMRVYADVVFDHKGGADGTEWVDAVEVNPSDRNQEISGTYQIQAWTKFDFPGRGNTYSSFKWRWYHFDGVDWDESRKLSRIYKFRGIGKAWDWEVDTENGNYDYLMYADLDMDHPEVVTELKNWGKWYVNTTNIDGFRLDAVKHIKFSFFPDWLSYVRSQTGKPLFTVGEYWSYDINKLHNYITKTNGTMSLFDAPLHNKFYTASKSGGAFDMRTLMTNTLMKDQPTLAVTFVDNHDTEPGQALQSWVDPWFKPLAYAFILTRREGYPCVFYGDYYGIPQYNIPSLKSKIDPLLIARRDYAYGTQHDYLDHSDIIGWTREGVTEKPGSGLAALITDGPGGSKWMYVGKQHAGKVFYDLTGNRSDTVTINSDGWGEFKVNGGSVSVWVPRKTTVSTIARPITTRPWTGEFVRWTEPRLVAWP

SEQ ID NO: 17620 - protein, 515 aa, Geobacillus stearothermophilus
AAPFNGTMMQYFEWYLPDDGTLWTKVANEANNLSSLGITALWLPPAYKGTSRSDVGYGVYDLYDLGEFNQKGTVRTKYGTKAQYLQAIQAAHAAGMQVYADVVFDHKGGADGTEWVDAVEVNPSDRNQEISGTYQIQAWTKFDFPGRGNTYSSFKWRWYHFDGVDWDESRKLSRIYKFRGIGKAWDWEVDTENGNYDYLMYADLDMDHPEVVTELKNWGKWYVNTTNIDGFRLDAVKHIKFSFFPDWLSYVRSQTGKPLFTVGEYWSYDINKLHNYITKTNGTMSLFDAPLHNKFYTASKSGGAFDMRTLMTNTLMKDRPTLAVTFVDNHDTEPGQALQSWVDPWFKPLAYAFILTRQEGYPCVFYGDYYGIPQYNIPSLKSKIDPLLIARRDYAYGTQHDYLDHSDIIGWTREGVTEKPGSGLAALITDGPGGSKWMYVGKEHAGKVFYDLTGNRSDTVTINSDGWGEFKVNGGSVSVWVPRKTTVSTIARPITTRPWTGEFVRWTEPRLVAWP

SEQ ID NO: 17621 - protein, 515 aa, Geobacillus stearothermophilus
AAPFNGTMMQYFEWYLPDDGTLWTKVANEANNLSSLGITALWLPPAYKGTSRSDVGYGVYDLYDLGEFNQKGTVRTKYGTKAQYLQAIQAAHAAGMQVYADVVFDHKGGADGTEWVDAVEVNPSDRNQEISGTYQIQAWTKFDFPGRGNTYSSFKWRWYHFDGVDWDESRKLSRIYKFRGIGKAWDWEVDTENGNYDYLMYADLDMDHPEVVTELKNWGKWYVNTTNIDGFRLDAVKHIKFQFFPDWLSYVRSQTGKPLFTVGEYWSYDINKLHNYITKTNGTMSLFDAPLHNKFYTASKSGGAFDMRTLMTNTLMKDRPTLAVTFVDNHDTEPGQALQSWVDPWFKPLAYAFILTRQEGYPCVFYGDYYGIPQYNIPSLKSKIDPLLIARRDYAYGTQHDYLDHSDIIGWTREGVTEKPGSGLAALITDGPGGSKWMYVGKQHAGKVFYDLTGNRSDTVTINSDGWGEFKVNGGSVSVWVPRKTTVSTIARPITTRPWTGEFVRWTEPRLVAWP

SEQ ID NO: 17622 - protein, 515 aa, Geobacillus stearothermophilus
AAPFNGTMMQYFEWYLPDDGTLWTKVANEANNLSSLGITALWLPPAYKGTSRSDVGYGVYDLYDLGEFNQKGTVRTKYGTKAQYLQAIQAAHAAGMQVYADVVFDHKGGADGTEWVDAVEVNPSDRNQEISGTYQIQAWTKFDFPGRGNTYSSFKWRWYHFDGVDWDESRKLSRIYKFRGIGKAWDWEVDTENGNYDYLMYADLDMDHPEVVTELKNWGKWYVNTTNIDGFRLDAVKHIKFQFFPDWLSYVRSQTGKPLFTVGEYWSYDINKLHNYITKTNGTMSLFDAPLHNKFYTASKSGGAFDMRTLMTNTLMKDQPTLAVTFVDNHDTEPGQALQSWVDPWFKPLAYAFILTRQEGYPCVFYGDYYGIPQYNIPSLKSKIDPLLIARRDYAYGTQHDYLDHSDIIGWTREGVTEKPGSGLAALITDGPGGSKWMYVGKRHAGKVFYDLTGNRSDTVTINSDGWGEFKVNGGSVSVWVPRKTTVSTIARPITTRPWTGEFVRWTEPRLVAWP

SEQ ID NO: 17623 - protein, 515 aa, Geobacillus stearothermophilus
AAPFNGTMMQYFEWYLPDDGTLWTKVANEANNLSSLGITALWLPPAYKGTSRSDVGYGVYDLYDLGEFNQKGTVRTKYGTKAQYLQAIQAAHAAGMEVYADVVFDHKGGADGTEWVDAVEVNPSDRNQEISGTYQIQAWTKFDFPGRGNTYSSFKWRWYHFDGVDWDESRKLSRIYKFRGIGKAWDWEVDTENGNYDYLMYADLDMDHPEVVTELKNWGKWYVNTTNIDGFRLDAVKHIKFSFFPDWLSYVRSQTGKPLFTVGEYWSYDINKLHNYITKTNGTMSLFDAPLHNKFYTASKSGGAFDMRTLMTNTLMKDQPTLAVTFVDNHDTEPGQALQSWVDPWFKPLAYAFILTREEGYPCVFYGDYYGIPQYNIPSLKSKIDPLLIARRDYAYGTQHDYLDHSDIIGWTREGVTEKPGSGLAALITDGPGGSKWMYVGKQHAGKVFYDLTGNRSDTVTINSDGWGEFKVNGGSVSVWVPRKTTVSTIARPITTRPWTGEFVRWTEPRLVAWP

SEQ ID NO: 17624 - protein, 515 aa, Geobacillus stearothermophilus
AAPFNGTMMQYFEWYLPDDGTLWTKVANEANNLSSLGITALWLPPAYKGTSRSDVGYGVYDLYDLGEFNQKGTVRTKYGTKAQYLQAIQAAHAAGMEVYADVVFDHKGGADGTEWVDAVEVNPSDRNQEISGTYQIQAWTKFDFPGRGNTYSSFKWRWYHFDGVDWDESRKLSRIYKFRGIGKAWDWEVDTENGNYDYLMYADLDMDHPEVVTELKNWGKWYVNTTNIDGFRLDAVKHIKFSFFPDWLSYVRSQTGKPLFTVGEYWSYDINKLHNYITKTNGTMSLFDAPLHNKFYTASKSGGAFDMRTLMTNTLMKDEPTLAVTFVDNHDTEPGQALQSWVDPWFKPLAYAFILTRQEGYPCVFYGDYYGIPQYNIPSLKSKIDPLLIARRDYAYGTQHDYLDHSDIIGWTREGVTEKPGSGLAALITDGPGGSKWMYVGKQHAGKVFYDLTGNRSDTVTINSDGWGEFKVNGGSVSVWVPRKTTVSTIARPITTRPWTGEFVRWTEPRLVAWP

SEQ ID NO: 17625 - protein, 515 aa, Geobacillus stearothermophilus
AAPFNGTMMQYFEWYLPDDGTLWTKVANEANNLSSLGITALWLPPAYKGTSRSDVGYGVYDLYDLGEFNQKGTVRTKYGTKAQYLQAIQAAHAAGMEVYADVVFDHKGGADGTEWVDAVEVNPSDRNQEISGTYQIQAWTKFDFPGRGNTYSSFKWRWYHFDGVDWDESRKLSRIYKFRGIGKAWDWEVDTENGNYDYLMYADLDMDHPEVVTELKNWGKWYVNTTNIDGFRLDAVKHIKFSFFPDWLSYVRSQTGKPLFTVGEYWSYDINKLHNYITKTNGTMSLFDAPLHNKFYTASKSGGAFDMRTLMTNTLMKDRPTLAVTFVDNHDTEPGQALQSWVDPWFKPLAYAFILTRQEGYPCVFYGDYYGIPQYNIPSLKSKIDPLLIARRDYAYGTQHDYLDHSDIIGWTREGVTEKPGSGLAALITDGPGGSKWMYVGKQHAGKVFYDLTGNRSDTVTINSDGWGEFKVNGGSVSVWVPRKTTVSTIARPITTRPWTGEFVRWTEPRLVAWP

SEQ ID NO: 17626 - protein, 515 aa, Geobacillus stearothermophilus
AAPFNGTMMQYFEWYLPDDGTLWTKVANEANNLSSLGITALWLPPAYKGTSRSDVGYGVYDLYDLGEFNQKGTVRTKYGTKAQYLQAIQAAHAAGMQVYADVVFDHKGGADGTEWVDAVEVNPSDRNQEISGTYQIQAWTKFDFPGRGNTYSSFKWRWYHFDGVDWDESRKLSRIYKFRGIGKAWDWEVDTENGNYDYLMYADLDMDHPEVVTELKNWGKWYVNTTNIDGFRLDAVKHIKFSFFPDWLSYVRSQTGKPLFTVGEYWSYDINKLHNYITKTNGTMSLFDAPLHNKFYTASKSGGAFDMRTLMTNTLMKDRPTLAVTFVDNHDTEPGQALQSWVDPWFKPLAYAFILTREEGYPCVFYGDYYGIPQYNIPSLKSKIDPLLIARRDYAYGTQHDYLDHSDIIGWTREGVTEKPGSGLAALITDGPGGSKWMYVGKQHAGKVFYDLTGNRSDTVTINSDGWGEFKVNGGSVSVWVPRKTTVSTIARPITTRPWTGEFVRWTEPRLVAWP

SEQ ID NO: 17627 - protein, 515 aa, Geobacillus stearothermophilus
AAPFNGTMMQYFEWYLPDDGTLWTKVANEANNLSSLGITALWLPPAYKGTSRSDVGYGVYDLYDLGEFNQKGTVRTKYGTKAQYLQAIQAAHAAGMEVYADVVFDHKGGADGTEWVDAVEVNPSDRNQEISGTYQIQAWTKFDFPGRGNTYSSFKWRWYHFDGVDWDESRKLSRIYKFRGIGKAWDWEVDTENGNYDYLMYADLDMDHPEVVTELKNWGKWYVNTTNIDGFRLDAVKHIKFSFFPDWLSYVRSQTGKPLFTVGEYWSYDINKLHNYITKTNGTMSLFDAPLHNKFYTASKSGGAFDMRTLMTNTLMKDQPTLAVTFVDNHDTEPGQALQSWVDPWFKPLAYAFILTRREGYPCVFYGDYYGIPQYNIPSLKSKIDPLLIARRDYAYGTQHDYLDHSDIIGWTREGVTEKPGSGLAALITDGPGGSKWMYVGKQHAGKVFYDLTGNRSDTVTINSDGWGEFKVNGGSVSVWVPRKTTVSTIARPITTRPWTGEFVRWTEPRLVAWP

SEQ ID NO: 17628 - protein, 515 aa, Geobacillus stearothermophilus
AAPFNGTMMQYFEWYLPDDGTLWTKVANEANNLSSLGITALWLPPAYKGTSRSDVGYGVYDLYDLGEFNQKGTVRTKYGTKAQYLQAIQAAHAAGMQVYADVVFDHKGGADGTEWVDAVEVNPSDRNQEISGTYQIQAWTKFDFPGRGNTYSSFKWRWYHFDGVDWDESRKLSRIYKFRGIGKAWDWEVDTENGNYDYLMYADLDMDHPEVVTELKNWGKWYVNTTNIDGFRLDAVKHIKFSFFPDWLSYVRSQTGKPLFTVGEYWSYDINKLHNYITKTNGTMSLFDAPLHNKFYTASKSGGAFDMRTLMTNTLMKDEPTLAVTFVDNHDTEPGQALQSWVDPWFKPLAYAFILTRQEGYPCVFYGDYYGIPQYNIPSLKSKIDPLLIARRDYAYGTQHDYLDHSDIIGWTREGVTEKPGSGLAALITDGPGGSKWMYVGKRHAGKVFYDLTGNRSDTVTINSDGWGEFKVNGGSVSVWVPRKTTVSTIARPITTRPWTGEFVRWTEPRLVAWP

SEQ ID NO: 17629 - protein, 515 aa, Geobacillus stearothermophilus
AAPFNGTMMQYFEWYLPDDGTLWTKVANEANNLSSLGITALWLPPAYKGTSRSDVGYGVYDLYDLGEFNQKGTVRTKYGTKAQYLQAIQAAHAAGMQVYADVVFDHKGGADGTEWVDAVEVNPSDRNQEISGTYQIQAWTKFDFPGRGNTYSSFKWRWYHFDGVDWDESRKLSRIYKFRGIGKAWDWEVDTEXGNYDYLMYADLDMDHPEVVTELKNWGKWYVNTTNIDGFRLDAVKHIKFSFFPDWLSYVRSQTGKPLFTVGEYWSYDINKLHNYITKTNGTMSLFDAPLHNKFYTASKSGGAFDMRTLMTNTLMKDQPTLAVTFVDNHDTEPGQALQSWVDPWFKPLAYAFILTRQEGYPCVFYGDYYGIPQYNIPSLKSKIDPLLIARRDYAYGTQHDYLDHSDIIGWTREGXTEKPGSGLAALITDGPGGSKWMYVGKQHAGKVFYDLTGNRSDTVTINSDGWGEFKVNGGSVSVWVPRKTTVSIAARPITTRPWTGEFVRWTEPRLVAWP

SEQ ID NO: 17630 - protein, 515 aa, Geobacillus stearothermophilus
AAPFNGTMMQYFEWYLPDDGTLWTKVANEANNLSSLGITALWLPPAYKGTSRSDVGYGVYDLYDLGEFNQKGTVRTKYGTKAQYLQAIQAAHAAGMRVYADVVFDHKGGADGTEWVDAVEVNPSDRNQEISGTYQIQAWTKFDFPGRGNTYSSFKWRWYHFDGVDWDESRKLSRIYKFRGIGKAWDWEVDTENGNYDYLMYADLDMDHPEVVTELKNWGKWYVNTTNIDGFRLDAVKHIKFSFFPDWLSYVRSQTGKPLFTVGEYWSYDINKLHNYITKTNGTMSLFDAPLHNKFYTASKSGGAFDMRTLMTNTLMKDQPTLAVTFVDNHDTEPGQALQSWVDPWFKPLAYAFILTRQEGYPCVFYGDYYGIPQYNIPSLKSKIDPLLIARRDYAYGTQHDYLDHSDIIGWTREGVTEKPGSGLAALITDGPGGSKWMYVGKEHAGKVFYDLTGNRSDTVTINSDGWGEFKVNGGSVSVWVPRKTTVSTIARPITTRPWTGEFVRWTEPRLVAWP

SEQ ID NO: 17631 - protein, 515 aa, Geobacillus stearothermophilus
AAPFNGTMMQYFEWYLPDDGTLWTKVANEANNLSSLGITALWLPPAYKGTSRSDVGYGVYDLYDLGEFNQKGTVRTKYGTKAQYLQAIQAAHAAGMRVYADVVFDHKGGADGTEWVDAVEVNPSDRNQEISGTYQIQAWTKFDFPGRGNTYSSFKWRWYHFDGVDWDESRKLSRIYKFRGIGKAWDWEVDTENGNYDYLMYADLDMDHPEVVTELKNWGKWYVNTTNIDGFRLDAVKHIKFSFFPDWLSYVRSQTGKPLFTVGEYWSYDINKLHNYITKTNGTMSLFDAPLHNKFYTASKSGGAFDMRTLMTNTLMKDQPTLAVTFVDNHDTEPGQALQSWVDPWFKPLAYAFILTRQEGYPCVFYGDYYGIPQYNIPSLKSKIDPLLIARRDYAYGTQHDYLDHSDIIGWTREGVTEKPGSGLAALITDGPGGSKWMYVGKRHAGKVFYDLTGNRSDTVTINSDGWGEFKVNGGSVSVWVPRKTTVSTIARPITTRPWTGEFVRWTEPRLVAWP

SEQ ID NO: 17632 - protein, 515 aa, Geobacillus stearothermophilus
AAPFNGTMMQYFEWYLPDDGTLWTKVANEANNLSSLGITALWLPPAYKGTSRSDVGYGVYDLYDLGEFNQKGTVRTKYGTKAQYLQAIQAAHAAGMQVYADVVFDHKGGADGTEWVDAVEVNPSDRNQEISGTYQIQAWTKFDFPGRGNTYSSFKWRWYHFNGVDWDESRKLSRIYKFRGIGKAWNWEVDTENGNYDYLMYANLDMNHPEVVTELKNWGKWYVNTTNIDGFRLDAVKHIKFSFFPDWLSYVRSQTGKPLFTVGEYWSYDINKLHNYITKTDGTMSLFDAPLHNKFYTASKSGGAFDMRTLMTNTLMKDQPTLAVTFVDNHDTEPGQALQSWVDPWFKPLAYAFILTRQEGYPCVFYGDYYGIPQYNIPSLKSKIDPLLIARRDYAYGTQHDYLDHSDIIGWTREGGTEKPGSGLAALITDGPGGSKWMYVGKQHAGKVFYDLTGNRSDTVTINSDGWGEFKVNGGSVSVWVPRKTTVSTIARPITTRPWTGEFVRWTEPRLVAWP

SEQ ID NO: 17633 - protein, 515 aa, Geobacillus stearothermophilus
AAPFNGTMMQYFEWYLPDDGTLWTKVANEANNLSSLGITALWLPPAYKGTSRSDVGYGVYDLYDLGEFNQKGTVRTKYGTKAQYLQAIQAAHAAGMQVYADVVFDHKGGADGTEWVDAVEVNPSDRNQEISGTYQIQAWTKFDFPGRGNTYSSFKWRWYHFDGVDWDESRKLSRIYKFRGIGKAWDWEVDTENGNYDYLMYADLDMDHPEVVTELKNWGKWYVNTTNIDGFRLDAVKHIKFSFFPDWLSYVRSQTGKPLFTVGEYWSYDINKLHNYITKTNGTMSLFDAPLHNKFYTASKSGGAFDMRTLMTNTLMKDQPTLAVTFVDNHDTEPGQALQSWVDPWFKPLAYAFILTREEGYPCVFYGDYYGIPQYNIPSLKSKIDPLLIARRDYAYGTQHDYLDHSDIIGWTREGVTEKPGSGLAALITDGPGGSKWMYVGKEHAGKVFYDLTGNRSDTVTINSDGWGEFKVNGGSVSVWVPRKTTVSTIARPITTRPWTGEFVRWTEPRLVAWP

SEQ ID NO: 17634 - protein, 515 aa, Geobacillus stearothermophilus
AAPFNGTMMQYFEWYLPDDGTLWTKVANEANNLSSLGITALWLPPAYKGTSRSDVGYGVYDLYDLGEFNQKGTVRTKYGTKAQYLQAIQAAHAAGMQVYADVVFDHKGGADGTEWVDAVEVNPSDRNQEISGTYQIQAWTKFDFPGRGNTYSSFKWRWYHFDGVDWDESRKLSRIYKFRGIGKAWDWEVDTENGNYDYLMYADLDMDHPEVVTELKNWGKWYVDTTNIDGFRLDAVKHIKFQFFPDWLSYVRSQTGKPLFTVGEYWSYDINKLHNYITKTNGTMSLFDAPLHNKFYTASKSGGAFDMRTLMTNTLMKDQPTLAVTFVDNHDTEPGQALQSWVDPWFKPLAYAFILTRQEGYPCVFYGDYYGIPQYNIPSLKSKIDPLLIARRDYAYGTQHDYLDHSDIIGWTREGVTEKPGSGLAALITDGPGGSKWMYVGKQHAGKVFYDLTGNRSDTVTINSDGWGEFKVNGGSVSVWVPRKTTVSTIARPITTRPWTGEFVRWTEPRLVAWP

SEQ ID NO: 17635 - protein, 515 aa, Geobacillus stearothermophilus
AAPFNGTMMQYFEWYLPDDGTLWTKVANEANNLSSLGITALWLPPAYKGTSRSDVGYGVYDLYDLGEFNQKGTVRTKYGTKAQYLQAIQAAHAAGMRVYADVVFDHKGGADGTEWVDAVEVNPSDRNQEISGTYQIQAWTKFDFPGRGNTYSSFKWRWYHFDGVDWDESRKLSRIYKFRGIGKAWDWEVDTENGNYDYLMYADLDMDHPEVVTELKNWGKWYVNTTNIDGFRLDAVKHIKFQFFPDWLSYVRSQTGKPLFTVGEYWSYDINKLHNYITKTNGTMSLFDAPLHNKFYTASKSGGAFDMRTLMTNTLMKDQPTLAVTFVDNHDTEPGQALQSWVDPWFKPLAYAFILTRQEGYPCVFYGDYYGIPQYNIPSLKSKIDPLLIARRDYAYGTQHDYLDHSDIIGWTREGVTEKPGSGLAALITDGPGGSKWMYVGKQHAGKVFYDLTGNRSDTVTINSDGWGEFKVNGGSVSVWVPRKTTVSTIARPITTRPWTGEFVRWTEPRLVAWP

SEQ ID NO: 17636 - protein, 515 aa, Geobacillus stearothermophilus
AAPFNGTMMQYFEWYLPDDGTLWTKVANEANNLSSLGITALWLPPAYKGTSRSDVGYGVYDLYDLGEFNQKGTVRTKYGTKAQYLQAIQAAHAAGMQVYADVVFDHKGGADGTEWVDAVEVNPSDRNQEISGTYQIQAWTKFDFPGRGNTYSSFKWRWYHFDGVDWDESRKLSRIYKFRGIGKAWDWEVDTENGNYDYLMYADLDMDHPEVVTELKNWGKWYVNTTNIDGFRLDAVKHIKFSFFPDWLSYVRSQTGKPLFTVGEYWSYDINKLHNYITKTNGTMSLFDAPLHNKFYTASKSGGAFDMRTLMTNTLMKDQPTLAVTFVDNHDTEPGQALQSWVDPWFKPLAYAFILTRQEGYPCVFYGDYYGIPQYNIPSLKSKIDPLLIARRDYAYGTQHDYLDHSDIIGWTREGVTEKPGSGLAALITDGPGGSKWMYVGKQHAGKVFYDLTGNRSDTVTITSDGWGEFKVNGGSVSVWVPRKTTVSTITRPITTRPWTGEFVRWTEPRLVAWP

SEQ ID NO: 17637 - protein, 515 aa, Geobacillus stearothermophilus
AAPFNGTMMQYFEWYLPDDGTLWTKVANEANNLSSLGITALWLPPAYKGTSRSDVGYGVYDLYDLGEFNQKGTVRTKYGTKAQYLQAIQAAHAAGMQVYADVVFDHKGGADGTEWVDAVEVNPSDRNQEISGTYQIQAWTKFDFPGRGNTYSSFKWRWYHFDGVDWDESRKLSRIYKFRGIGKKWNEEVDTENGNYDYLMYADLDMNHPEVVTELKNWGKWYVNTTNIDGFRLDAVKHIKFSFFPDWLSYVRSQTGKPLFTVGEYWSYDINKLHNYITKTDGTMSLFDAPLHNKFYTASKSGGAFDMRTLMTNTLMKDQPTLAVTFVDNHDTEPGQALQSWVDPWFKPLAYAFILTRQEGYPCVFYGDYYGIPQYNIPSLKSKIDPLLIARRDYAYGTQHDYLDHSDIIGWTREGGTEKPGSGLAALITDGPGGSKWMYVGKQHAGKVFYDLTGNRSDTVTINSDGWGEFKVNGGSVSVWVPRKTTVSTIARPITTRPWTGEFVRWTEPRLVAWP

SEQ ID NO: 17638 - protein, 515 aa, Geobacillus stearothermophilus
AAPFNGTMMQYFEWYLPDDGTLWTKVADEANNLSSLGITALWLPPAYKGTSRSDVGYGVYDLYDLGEFNQKGTVRTKYGTKAQYLQAIQAAHAAGMQVYADVVFDHKGGADGTEWVDAVEVNPSDRNQEISGTYQIQAWTKFDFPGRGNTYSSFKWRWYHFDGVDWDESRKLSRIYKFRGIGKAWDWEVDTENGNYDYLMYADLDMDHPEVVTELKNWGKWYVNTTNIDGFRLDAVKHIKFSFFPDWLSYVRSQTGKPLFTVGEYWSYDINKLHNYITKTNGTMSLFDAPLHNKFYTASKSGGAFDMQTLMTNTLMKDQPTLAVTFVDNHDTEPGQALQSWVDPWFKPLAYAFILTRQEGYPCVFYGDYYGIPQYNIPSLKSKIDPLLIARRDYAYGTQHDYLDHSDIIGWTREGVTEKPGSGLAALITDGPGGSKWMYVGKQHAGKVFYDLTGNRSDTVTINSDGWGEFKVNGGSVSVWVPRKTTVSTIARPITTRPWTGEFVRWTEPRLVAWP

SEQ ID NO: 17639 - protein, 515 aa, Geobacillus stearothermophilus
AAPFNGTMMQYFEWYLPDDGTLWTKVANEANNLSSLGITALWLPPAYKGTSRSDVGYGVYDLYDLGEFNQKGTVRTKYGTKAQYLQAIQAAHAAGMQVYADVVFDHKGGADGTEWVDAVEVNPSDRNQEISGTYQIQAWTKFDFPGRGNTYSSFKWRWYHFDGVDWDESRKLSRIYKFRGIGKAWDWEVDTENGNYDYLMYADLDMDHPEVVTELKNWGKWYVNTTNIDGFRLDAVKHIKFQFFPDWLSYVRSQTGKPLFTVGEYWSYDINKLHNYITKTNGTMSLFDAPLHNKFYTASKSGGAFDMRTLMTNTLMKDQPTLAVTFVDNHDTEPGQALQSWVDPWFKPLAYAFILTRQEGYPCVFYGDYYGIPQYNIPSLKSKIDPLLIARRDYAYGTQHDYLDHSDIIGWTREGVTEKPGSGLAALITDGPGGSKWMYVGKEHAGKVFYDLTGNRSDTVTINSDGWGEFKVNGGSVSVWVPRKTTVSTIARPITTRPWTGEFVRWTEPRLVAWP

SEQ ID NO: 17640 - protein, 515 aa, Geobacillus stearothermophilus
AAPFNGTMMQYFEWYLPDDGTLWTKVANEANNLSSLGITALWLPPAYKGTSRSDVGYGVYDLYDLGEFNQKGTVRTKYGTKAQYLQAIQAAHAAGMQVYADVVFDHKGGADGTEWVDAVEVNPSDRNQEISGTYQIQAWTKFDFPGRGNTYSSFKWRWYHFDGVDWDESRKLSRIYKFRGIGKAWDWEVDTENGNYDYLMYADLDMDHPEVVTELKNWGKWYVNTTNIDGFRLDAVKHIKFSFFPDWLSYVRSQTGKPLFTVGEYWSYDINKLHNYITKTNGTMSLFDAPLHNKFYTASKSGGAFDMRTLMTNTLMKDQPTLAVTFVDNHDTEPGQALQSWVDPWFKPLAYAFILTRREGYPCVFYGDYYGIPQYNIPSLKSKIDPLLIARRDYAYGTQHDYLDHSDIIGWTREGVTEKPGSGLAALITDGPGGSKWMYVGKRHAGKVFYDLTGNRSDTVTINSDGWGEFKVNGGSVSVWVPRKTTVSTIARPITTRPWTGEFVRWTEPRLVAWP

SEQ ID NO: 17641 - protein, 515 aa, Geobacillus stearothermophilus
AAPFNGTMMQYFEWYLPDDGTLWTKVANEANNLSSLGITALWLPPAYKGTSRSDVGYGVYDLYDLGEFNQKGTVRTKYGTKAQYLQAIQAAHAAGMEVYADVVFDHKGGADGTEWVDAVEVNPSDRNQEISGTYQIQAWTKFDFPGRGNTYSSFKWRWYHFDGVDWDESRKLSRIYKFRGIGKAWDWEVDTENGNYDYLMYADLDMDHPEVVTELKNWGKWYVNTTNIDGFRLDAVKHIKFQFFPDWLSYVRSQTGKPLFTVGEYWSYDINKLHNYITKTNGTMSLFDAPLHNKFYTASKSGGAFDMRTLMTNTLMKDQPTLAVTFVDNHDTEPGQALQSWVDPWFKPLAYAFILTRQEGYPCVFYGDYYGIPQYNIPSLKSKIDPLLIARRDYAYGTQHDYLDHSDIIGWTREGVTEKPGSGLAALITDGPGGSKWMYVGKQHAGKVFYDLTGNRSDTVTINSDGWGEFKVNGGSVSVWVPRKTTVSTIARPITTRPWTGEFVRWTEPRLVAWP

SEQ ID NO: 17642 - protein, 515 aa, Geobacillus stearothermophilus
AAPFNGTMMQYFEWYLPDDGTLWTKVANEANNLSSLGITALWLPPAYKGTSRSDVGYGVYDLYDLGEFNQKGTVRTKYGTKAQYLQAIQAAHAAGMQVYADVVFDHKGGADGTEWVDAVEVNPSDRNQEISGTYQIQAWTKFDFPGRGNTYSSFKWRWYHFDGVDWDESRKLSRIYKFRGIGKAWDWEVDTENGNYDYLMYADLDMDHPEVVTELKNWGKWYVNTTNIDGFRLDAVKHIKFQFFPDWLSYVRSQTGKPLFTVGEYWSYDINKLHNYITKTNGTMSLFDAPLHNKFYTASKSGGAFDMRTLMTNTLMKDEPTLAVTFVDNHDTEPGQALQSWVDPWFKPLAYAFILTRQEGYPCVFYGDYYGIPQYNIPSLKSKIDPLLIARRDYAYGTQHDYLDHSDIIGWTREGVTEKPGSGLAALITDGPGGSKWMYVGKQHAGKVFYDLTGNRSDTVTINSDGWGEFKVNGGSVSVWVPRKTTVSTIARPITTRPWTGEFVRWTEPRLVAWP

SEQ ID NO: 17643 - protein, 515 aa, Geobacillus stearothermophilus
AAPFNGTMMQYFEWYLPDDGTLWTKVAREANNLSSLGITALWLPPAYKGTSRSDVGYGVYDLYDLGEFNQKGTVRTKYGTKAQYLQAIQAAHAAGMQVYADVVFDHKGGADGTEWVDAVEVNPSDRNQEISGTYQIQAWTKFDFPGRGNTYSSFKWRWYHFDGVDWDESRKLSRIYKFRGIGKAWDWEVDTENGNYDYLMYADLDMDHPEVVTELKNWGKWYVNTTNIDGFRLDAVKHIKFSFFPDWLSYVRSQTGKPLFTVGEYWSYDINKLHNYITKTNGTMSLFDAPLHNKFYTASKSGGAFDMRTLMTNTLMKNQPTLAVTFVDNHDTEPGQALQSWVDPWFKPLAYAFILTRQEGYPCVFYGDYYGIPQYNIPSLKSKIDPLLIARRDYAYGTQHDYLDHSDIIGWTREGVTEKPGSGLAALITDGPGGSKWMYVGKQHAGKVFYDLTGNRSDTVTINSDGWGEFKVNGGSVSVWVPRKTTVSTIARPITTRPWTGEFVRWTEPRLVAWP

SEQ ID NO: 17644 - protein, 515 aa, Geobacillus stearothermophilus
AAPFNGTMMQYFEWYLPDDGTLWTKVANEANNLSSLGITALWLPPAYKGTSRSDVGYGVYDLYDLGEFNQKGTVRTKYGTKAQYLQAIQAAHAAGMEVYADVVFDHKGGADGTEWVDAVEVNPSDRNQEISGTYQIQAWTKFDFPGRGNTYSSFKWRWYHFDGVDWDESRKLSRIYKFRGIGKAWDWEVDTENGNYDYLMYADLDMDHPEVVTELKNWGKWYVNTTNIDGFRLDAVKHIKFSFFPDWLSYVRSQTGKPLFTVGEYWSYDINKLHNYITKTNGTMSLFDAPLHNKFYTASKSGGAFDMRTLMTNTLMKDQPTLAVTFVDNHDTEPGQALQSWVDPWFKPLAYAFILTRQEGYPCVFYGDYYGIPQYNIPSLKSKIDPLLIARRDYAYGTQHDYLDHSDIIGWTREGVTEKPGSGLAALITDGPGGSKWMYVGKEHAGKVFYDLTGNRSDTVTINSDGWGEFKVNGGSVSVWVPRKTTVSTIARPITTRPWTGEFVRWTEPRLVAWP

SEQ ID NO: 17645 - protein, 515 aa, Geobacillus stearothermophilus
AAPFNGTMMQYFEWYLPDDGTLWTKVANEANNLSSLGITALWLPPAYKGTSRSDVGYGVYDLYDLGEFNQKGTVRTKYGTKAQYLQAIQAAHAAGMQVYADVVFDHKGGADGTEWVDAVEVNPSDRNQEISGTYQIQAWTKFDFPGRGNTYSSFKWRWYHFDGVDWDESRKLSRIYKFRGIGKAWDWEVDTENGNYDYLMYADLDMDHPEVVTELKNWGKWYVNTTNIDGFRLDAVKHIKFSFFPDWLSYVRSQTGKPLFTVGEYWSYDINKLHNYITKTNGTMSLFDAPLHNKFYTASKSGGAFDMRTLMTNTLMKDEPTLAVTFVDNHDTEPGQALQSWVDPWFKPLAYAFILTREEGYPCVFYGDYYGIPQYNIPSLKSKIDPLLIARRDYAYGTQHDYLDHSDIIGWTREGVTEKPGSGLAALITDGPGGSKWMYVGKQHAGKVFYDLTGNRSDTVTINSDGWGEFKVNGGSVSVWVPRKTTVSTIARPITTRPWTGEFVRWTEPRLVAWP

SEQ ID NO: 17646 - protein, 515 aa, Geobacillus stearothermophilus
AAPFNGTMMQYFEWYLPDDGTLWTKVANEANNLSSLGITALWLPPAYKGTSRSDVGYGVYDLYDLGEFNQKGTVRTKYGTKAQYLQAIQAAHAAGMRVYADVVFDHKGGADGTEWVDAVEVNPSDRNQEISGTYQIQAWTKFDFPGRGNTYSSFKWRWYHFDGVDWDESRKLSRIYKFRGIGKAWDWEVDTENGNYDYLMYADLDMDHPEVVTELKNWGKWYVNTTNIDGFRLDAVKHIKFSFFPDWLSYVRSQTGKPLFTVGEYWSYDINKLHNYITKTNGTMSLFDAPLHNKFYTASKSGGAFDMRTLMTNTLMKDRPTLAVTFVDNHDTEPGQALQSWVDPWFKPLAYAFILTRQEGYPCVFYGDYYGIPQYNIPSLKSKIDPLLIARRDYAYGTQHDYLDHSDIIGWTREGVTEKPGSGLAALITDGPGGSKWMYVGKQHAGKVFYDLTGNRSDTVTINSDGWGEFKVNGGSVSVWVPRKTTVSTIARPITTRPWTGEFVRWTEPRLVAWP

SEQ ID NO: 17647 - protein, 515 aa, Geobacillus stearothermophilus
AAPFNGTMMQYFEWYLPDDGTLWTKVANEANNLSSLGITALWLPPAYKGTSRSDVGYGVYDLYDLGEFNQKGTVRTKYGTKAQYLQAIQAAHAAGMRVYADVVFDHKGGADGTEWVDAVEVNPSDRNQEISGTYQIQAWTKFDFPGRGNTYSSFKWRWYHFDGVDWDESRKLSRIYKFRGIGKAWDWEVDTENGNYDYLMYADLDMDHPEVVTELKNWGKWYVNTTNIDGFRLDAVKHIKFSFFPDWLSYVRSQTGKPLFTVGEYWSYDINKLHNYITKTNGTMSLFDAPLHNKFYTASKSGGAFDMRTLMTNTLMKDQPTLAVTFVDNHDTEPGQALQSWVDPWFKPLAYAFILTREEGYPCVFYGDYYGIPQYNIPSLKSKIDPLLIARRDYAYGTQHDYLDHSDIIGWTREGVTEKPGSGLAALITDGPGGSKWMYVGKQHAGKVFYDLTGNRSDTVTINSDGWGEFKVNGGSVSVWVPRKTTVSTIARPITTRPWTGEFVRWTEPRLVAWP

SEQ ID NO: 17648 - protein, 515 aa, Geobacillus stearothermophilus
AAPFNGTMMQYFEWYLPDDGTLWTKVANEANNLSSLGITALWLPPAYKGTSRSDVGYGVYDLYDLGEFNQKGTVRTKYGTKAQYLQAIQAAHAAGMQVYADVVFDHKGGADGTEWVDAVEVNPSDRNQEISGTYQIQAWTKFDFPGRGNTYSSFKWRWYHFDGVDWDESRKLSRIYKFRGIGKAWDWEVDTENGNYDYLMYADLDMDHPEVVTELKNWGKWYVNTTNIDGFRLDAVKHIKFQFFPDWLSYVRSQTGKPLFTVGEYWSYDINKLHNYITKTNGTMSLFDAPLHNKFYTASKSGGAFDMRTLMTNTLMKDQPTLAVTFVDNHDTEPGQALQSWVDPWFKPLAYAFILTREEGYPCVFYGDYYGIPQYNIPSLKSKIDPLLIARRDYAYGTQHDYLDHSDIIGWTREGVTEKPGSGLAALITDGPGGSKWMYVGKQHAGKVFYDLTGNRSDTVTINSDGWGEFKVNGGSVSVWVPRKTTVSTIARPITTRPWTGEFVRWTEPRLVAWP

SEQ ID NO: 17649 - protein, 515 aa, Geobacillus stearothermophilus
AAPFNGTMMQYFEWYLPDDGTLWTKVANEANNLSSLGITALWLPPAYKGTSRSDVGYGVYDLYDLGEFNQKGTVRTKYGTKAQYLQAIQAAHAAGMQVYADVVFDHKGGADGTEWVDAVEVNPSDRNQEISGTYQIQAWTKFDFPGRGNTYSSFKWRWYHFDGVDWDESRKLSRIYKFRGIGKAWDWEVDTENGNYDYLMYADLDMDHPEVVTELKNWGKWYVNTTNIDGFRLDAVKHIKFSFFPDWLSYVRSQTGKPLFTVGEYWSYDINKLHNYITKTNGTMSLFDAPLHNKFYTASKSGGAFDMRTLMTNTLMKDQPTLAVTFVDNHDTEPGQALQSWVDPWFKPLAYAFILTREEGYPCVFYGDYYGIPQYNIPSLKSKIDPLLIARRDYAYGTQHDYLDHSDIIGWTREGVTEKPGSGLAALITDGPGGSKWMYVGKRHAGKVFYDLTGNRSDTVTINSDGWGEFKVNGGSVSVWVPRKTTVSTIARPITTRPWTGEFVRWTEPRLVAWP

SEQ ID NO: 17650 - protein, 515 aa, Geobacillus stearothermophilus
AAPFNGTMMQYFEWYLPDDGTLWTKVANEANNLSSLGITALWLPPAYKGTSRSDVGYGVYDLYDLGEFNQKGTVRTKYGTKAQYLQAIQAAHAAGMQVYADVVFDHKGGADGTEWVDAVEVNPSDRNQEISGTYQIQAWTKFDFPGRGNTYSSFKWRWYHFDGVDWDESRKLSRIYKFRGIGKAWDWEVDTENGNYDYLMYADLDMDHPEVVTELKNWGKWYVNTTNIDGFRLDAVKHIKFSFFPDWLSYVRSQTGKPLFTVGEYWSYDINKLHNYITKTNGTMSLFDAPLHNKFYTASKSGGAFDMRTLMTNTLMKDRPTLAVTFVDNHDTEPGQALQSWVDPWFKPLAYAFILTRREGYPCVFYGDYYGIPQYNIPSLKSKIDPLLIARRDYAYGTQHDYLDHSDIIGWTREGVTEKPGSGLAALITDGPGGSKWMYVGKQHAGKVFYDLTGNRSDTVTINSDGWGEFKVNGGSVSVWVPRKTTVSTIARPITTRPWTGEFVRWTEPRLVAWP

SEQ ID NO: 17651 - protein, 515 aa, Geobacillus stearothermophilus
AAPFNGTMMQYFEWYLPDDGTLWTKVANEANNLSSLGITALWLPPAYKGTSRSDVGYGVYDLYDLGEFNQKGTVRTKYGTKAQYLQAIQAAHAAGMQVYADVVFDHKGGADGTEWVDAVEVNPSDRNQEISGTYQIQAWTKFDFPGRGNTYSSFKWRWYHFNGVDWDESRKLSRIYKFRGIGKKWNWEVDTENGNYDYLMYADLDMNHPEVVTELKNWGKWYVNTTNIDGFRLDAVKHIKFSFFPDWLSYVRSQTGKPLFTVGEYWSYDINKLHNYITKTDGTMSLFDAPLHNKFYTASKSGGAFDMRTLMTNTLMKDQPTLAVTFVDNHDTEPGQALQSWVDPWFKPLAYAFILTRQEGYPCVFYGDYYGIPQYNIPSLKSKIDPLLIARRDYAYGTQHDYLDHSDIIGWTREGGTEKPGSGLAALITDGPGGSKWMYVGKQHAGKVFYDLTGNRSDTVTINSDGWGEFKVNGGSVSVWVPRKTTVSTIARPITTRPWTGEFVRWTEPRLVAWP

SEQ ID NO: 17652 - protein, 515 aa, Geobacillus stearothermophilus
AAPFNGTMMQYFEWYLPDDGTLWTKVANEANNLSSLGITALWLPPAYKGTSRSDVGYGVYDLYDLGEFNQKGTVRTKYGTKAQYLQAIQAAHAAGMQVYADVVFDHKGGADGTEWVDAVEVNPSDRNQEISGTYQIQAWTKFDFPGRGNTYSSFKWRWYHFDGVDWDESRKLSRIYKFRGIGKAWDWEVDTENGNYDYLMYADLDMDHPEVVTELKNWGKWYVNTTNIDGFRLDAVKHIKFSFFPDWLSYVRSQTGKPLFTVGEYWSYDINKLHNYITKTNGTMSLFDAPLHNKFYTASKSGGAFDMRTLMTNTLMKDRPTLAVTFVDNHDTEPGQALQSWVDPWFKPLAYAFILTRQEGYPCVFYGDYYGIPQYNIPSLKSKIDPLLIARRDYAYGTQHDYLDHSDIIGWTREGVTEKPGSGLAALITDGPGGSKWMYVGKRHAGKVFYDLTGNRSDTVTINSDGWGEFKVNGGSVSVWVPRKTTVSTIARPITTRPWTGEFVRWTEPRLVAWP

SEQ ID NO: 17653 - protein, 515 aa, Geobacillus stearothermophilus
AAPFNGTMMQYFEWYLPDDGTLWTKVANEANNLSSLGITALWLPPAYKGTSRSDVGYGVYDLYDLGEFNQKGTVRTKYGTKAQYLQAIQAAHAAGMQVYADVVFDHKGGADGTEWVDAVEVNPSDRNQEISGTYQIQAWTKFDFPGRGNTYSSFKWRWYHFDGVDWDESRKLSRIYKFRGIGKAWDWEVDTENGNYDYLMYADLDMDHPEVVTELKNWGKWYVNTTNIDGFRLDAVKHIKFSFFPDWLSYVRSQTGKPLFTVGEYWSYDINKLHNYITKTNGTMSLFDAPLHNKFYTASKSGGAFDMRTLMTNTLMKDEPTLAVTFVDNHDTEPGQALQSWVDPWFKPLAYAFILTRREGYPCVFYGDYYGIPQYNIPSLKSKIDPLLIARRDYAYGTQHDYLDHSDIIGWTREGVTEKPGSGLAALITDGPGGSKWMYVGKQHAGKVFYDLTGNRSDTVTINSDGWGEFKVNGGSVSVWVPRKTTVSTIARPITTRPWTGEFVRWTEPRLVAWP

SEQ ID NO: 17654 - protein, 515 aa, Geobacillus stearothermophilus
AAPFNGTMMQYFEWYLPDDGTLWTKVANEANNLSSLGITALWLPPAYKGTSRSDVGYGVYDLYDLGEFNQKGTVRTKYGTKAQYLQAIQAAHAAGMEVYADVVFDHKGGADGTEWVDAVEVNPSDRNQEISGTYQIQAWTKFDFPGRGNTYSSFKWRWYHFDGVDWDESRKLSRIYKFRGIGKAWDWEVDTENGNYDYLMYADLDMDHPEVVTELKNWGKWYVNTTNIDGFRLDAVKHIKFSFFPDWLSYVRSQTGKPLFTVGEYWSYDINKLHNYITKTNGTMSLFDAPLHNKFYTASKSGGAFDMRTLMTNTLMKDQPTLAVTFVDNHDTEPGQALQSWVDPWFKPLAYAFILTRQEGYPCVFYGDYYGIPQYNIPSLKSKIDPLLIARRDYAYGTQHDYLDHSDIIGWTREGVTEKPGSGLAALITDGPGGSKWMYVGKRHAGKVFYDLTGNRSDTVTINSDGWGEFKVNGGSVSVWVPRKTTVSTIARPITTRPWTGEFVRWTEPRLVAWP

SEQ ID NO: 17655 - protein, 491 aa, Geobacillus stearothermophilus
AAPFNGTMMQYFEWYLPDDGTLWTKVANEANNLSSLGITALWLPPAYKGTSRSDVGYGAYDLYDLGEFNQKGTVRTKYGTKAQYLQAIQAAHAAGMQVYADVVFDHKGGADGTEWVDAVEVNPSDRNQVISGTYQIQAWTKFDFPGRGNTYSSFKWRWYHFDGVDWDESRKLSRIYLFEGKAWDWPVDTEFGNYDYLMYADLDMDHPEVTTELKNWGKWYVNTTNIDGFRLDAVKHIKFSFFPDWLSYVRSSTGKPLFTVGEYWSGDINKLHNYITHTDGTVSLFDAPLHYKFYNASKSGGAFDMRTLMTNTLMKDQPTLAVTFVDNHDTEPGQALQSWVDPWFKPLAYAFILTRQEGYPCVFYGDYYGIPQYNIPSLKSKIDPLLIARRDYAYGTQHDYLDHSDIIGWTREGGTEKPGSGLAALITDGPGGSKWMYVGKQHAGKVFYDLTGNRSDTVTINSDGWGEFKVNGGSVSVWVPRKTTVSTIARP

SEQ ID NO: 17656 - protein, 491 aa, Geobacillus stearothermophilus
AAPFNGTMMQYFEWYLPDDGTLWTKVANEANNLSSLGITALWLPPAYKGTSRSDVGYGAYDLYDLGEFNQKGTVRTKYGTKAQYLQAIQAAHAAGMQVYADVVFDHKGGADGTEWVDAVEVNPSDRNQVISGTYQIQAWTKFDFPGRGNTYSSFKWRWYHFDGVDWDESRKLSRIYLFEGKAWDWPVDTEFGNYDYLMYADLDMDHPEVTTELKNWGKWYVNTTNIDGFRLDAVKHIKFSFFPDWLSYVRSSTGKPLFTVGEYWSGDINKLHNYITFTDGTVSLFDAPLHYKFYNASKSGGAFDMRTLMTNTLMKDQPTLAVTFVDNHDTEPGQALQSWVDPWFKPLAYAFILTRQEGYPCVFYGDYYGIPQYNIPSLKSKIDPLLIARRDYAYGTQHDYLDHSDIIGWTREGGTEKPGSGLAALITDGPGGSKWMYVGKQHAGKVFYDLTGNRSDTVTINSDGWGEFKVNGGSVSVWVPRKTTVSTIARP

SEQ ID NO: 17657 - protein, 491 aa, Geobacillus stearothermophilus
AAPFNGTMMQYFEWYLPDDGTLWTKVANEANNLSSLGITALWLPPAYKGTSRSDVGYGAYDLYDLGEFNQKGTVRTKYGTKAQYLQAIQAAHAAGMQVYADVVFDHKGGADGTEWVDAVEVNPSDRNQVISGTYQIQAWTKFDFPGRGNTYSSFKWRWYHFDGVDWDESRKLNRIYLFEGKAWDWPVDTEFGNYDYLMYADLDMDHPEVTTELKNWGKWYVNTTNIDGFRLDAVKHIKFYFFPDWLSYVRSSTGKPLFTVGEYWSGDINKLHNYITKTDGTVSLFDAPLHYKFYNASKSGGAFDMRTLMTNTLMKDQPTLAVTFVDNHDTEPGQALQSWVDPWFKPLAYAFILTRQEGYPCVFYGDYYGIPQYNIPSLKSKIDPLLIARRDYAYGTQHDYLDHSDIIGWTREGGTEKPGSGLAALITDGPGGSKWMYVGKQHAGKVFYDLTGNRSDTVTINSDGWGEFKVNGGSVSVWVPRKTTVSTIARP

SEQ ID NO: 17658 - protein, 491 aa, Geobacillus stearothermophilus
AAPFNGTMMQYFEWYLPDDGTLWTKVANEANNLSSLGITALWLPPAYKGTSRSDVGYGAYDLYDLGEFNQKGTVRTKYGTKAQYLQAIQAAHAAGMQVYADVVFDHKGGADGTEWVDAVEVNPSDRNQVISGTYQIQAWTKFDFPGRGNTYSSFKWRWYHFDGVDWDESRKLSRIYLFEGKAWDWPVDTEFGNYDYLMYADLDMDHPEVTTELKNWGKWYVNTTNIDGFRLDAVKHIKFSFFPDWLSYVRSSTGKPLFTVGEYWSGDINKLHNYITKTDGTVSLFDAPLHYKFYNASKSGGAFDMRTLMTNTLMKDQPTLAVTFVDNHDTEPGQALQSWVDPWFKPLAYAFILTRQEGYPCVFYGDYYGIPQYNIPSLKSKIDPLLIARRDYAYGTQHDYLDHSDIIGWTREGGTEKPGSGLAALITDGPGGSKWMYVGKQHAGKVFYDLTGNRSDTVTINSDGWGEFKVNGGSVSVWVPRKTTVSTIARP

SEQ ID NO: 17659 - protein, 491 aa, Geobacillus stearothermophilus
AAPFNGTMMQYFEWYLPDDGTLWTKVANEANNLSSLGITALWLPPAYKGTSRSDVGYGAYDLYDLGEFNQKGTVRTKYGTKAQYLQAIQAAHAAGMQVYADVVFDHKGGADGTEWVDAVEVNPSDRNQVISGTYQIQAWTKFDFPGRGNTYSSFKWRWYHFDGVDWDESRKLSRIYLFEGKAWDWPVDTEFGNYDYLMYADLDMDHPEVTTELKNWGKWYVNTTNIDGFRLDAVKHIKFSFFPDWLSYVRSSTGKPLFTVGEYWSGDINKLHNYITYTDGTVSLFDAPLHYKFYNASKSGGAFDMRTLMTNTLMKDQPTLAVTFVDNHDTEPGQALQSWVDPWFKPLAYAFILTRQEGYPCVFYGDYYGIPQYNIPSLKSKIDPLLIARRDYAYGTQHDYLDHSDIIGWTREGGTEKPGSGLAALITDGPGGSKWMYVGKQHAGKVFYDLTGNRSDTVTINSDGWGEFKVNGGSVSVWVPRKTTVSTIARP

SEQ ID NO: 17660 - protein, 491 aa, Geobacillus stearothermophilus
AAPFNGTMMQYFEWYLPDDGTLWTKVANEANNLSSLGITALWLPPAYKGTSRSDVGYGAYDLYDLGEFNQKGTVRTKYGTKAQYLQAIQAAHAAGMQVYADVVFDHKGGADGTEWVDAVEVNPSDRNQVISGTYQIQAWTKFDFPGRGNTYSSFKWRWYHFDGVDWDESRKLSRIYLFEGKAWDWPVDTEFGNYDYLMYADLDMDHPEVTTELKNWGKWYVNTTNIDGFRLDAVKHIKFYFFPDWLSYVRSSTGKPLFTVGEYWSGDINKLHNYITWTDGTVSLFDAPLHYKFYNASKSGGAFDMRTLMTNTLMKDQPTLAVTFVDNHDTEPGQALQSWVDPWFKPLAYAFILTRQEGYPCVFYGDYYGIPQYNIPSLKSKIDPLLIARRDYAYGTQHDYLDHSDIIGWTREGGTEKPGSGLAALITDGPGGSKWMYVGKQHAGKVLYDLTGNRSDTVTINSDGWGEFKVNGGSVSVWVPRKTTVSTIARP

SEQ ID NO: 17661 - protein, 491 aa, Geobacillus stearothermophilus
AAPFNGTMMQYFEWYLPDDGTLWTKVANEANNLSSLGITALWLPPAYKGTSRSDVGYGAYDLYDLGEFNQKGTVRTKYGTKAQYLQAIQAAHAAGMQVYADVVFDHKGGADGTEWVDAVEVNPSDRNQVISGTYQIQAWTKFDFPGRGNTYSSFKWRWYHFDGVDWDESRKLSRIYLFEGKAWDWPVDTEFGNYDYLMYADLDMDHPEVTTELKNWGKWYVNTTNIDGFRLDAVKHIKFSFFPDWLSYVRSSTGKPLFTVGEYWSGDINKLHNYITWTDGTVSLFDAPLHYKFYNASKSGGAFDMRTLMTNTLMKDQPTLAVTFVDNHDTEPGQALQSWVDPWFKPLAYAFILTRQEGYPCVFYGDYYGIPQYNIPSLKSKIDPLLIARRDYAYGTQHDYLDHSDIIGWTREGGTEKPGSGLAALITDGPGGSKWMYVGKQHAGKVFYDLTGNRSDTVTINSDGWGEFKVNGGSVSVWVPRKTTVSTIARP

SEQ ID NO: 17662 - protein, 488 aa, Geobacillus stearothermophilus
AAPFNGTMMQYFEWYLPDDGTLWTKVANEANNLSSLGITALWLPPAYKGTSRSDVGYGVYDLYDLGEFNQKGTVRTKYGTKAQYLQAIQAAHAAGMQVYADVVFDHKGGADGTEWVDAVEVNPSDRNQVISGTYQIQAWTKFDFPGRGNTYSSFKWRWYHFDGVDWDESRKLSRIYLFVGXXKAWDWEVDTEFGNYDYLMYADLDMDHPEVVTELKNWGKWYVNTTNIDGFRLDAVKHIKFSFFPDWLSYVRSQTGKPLFTVGEYWSYDINKLHNYITKTNGTMSLFDAPLHNKFYTASKSGGAFDMRTLMTNTLMKDQPTLAVTFVDNHDTEPGQALQSWVDPWFKPLAYAFILTRQEGYPCVFYGDYYGIPQYNIPSLKSKIDPLLIARRDYAYGTQHDYLDHSDIIGWTREGVTEKPGSGLAALITDGPGGSKWMYVGKQHAGKVFYDLTGNRSDTVTINSDGWGEFKVNGGSVSVWVPRKTTVS

SEQ ID NO: 17663 - protein, 488 aa, Geobacillus stearothermophilus
AAPFNGTMMQYFEWYLPDDGTLWTKVANEANNLSSLGITALWLPPAYKGTSRSDVGYGVYDLYDLGEFNQKGTVRTKYGTKAQYLQAIQAAHAAGMQVYADVVFDHKGGADGTEWVDAVEVNPSDRNQEISGTYQIQAWTKFDFPGRGNTYSSFKWRWYHFNGVDWDESRKLSRIYKFRGIGKKWNWEVDTENGNYDYLMYADLDMNHPEVVTELKNWGKWYVNTTNIDGFRLDAVKHIKFSFFPDWLSYVRSQTGKPLFTVGEYWSYDINKLHNYITKTDGTMSLFDAPLHNKFYTASKSGGAFDMRTLMTNTLMKDQPTLAVTFVDNHDTEPGQALQSWVDPWFKPLAYAFILTRQEGYPCVFYGDYYGIPQYNIPSLKSKIDPLLIARRDYAYGTQHDYLDHSDIIGWTREGGTEKPGSGLAALITDGPGGSKWMYVGKQHAGKVFYDLTGNRSDTVTINSDGWGEFKVNGGSVSVWVPRKTTVS

SEQ ID NO: 17664 - protein, 488 aa, Geobacillus stearothermophilus
AAPFNGTMMQYFEWYLPDDGTLWTKVANEANNLSSLGITALWLPPAYKGTSRSDVGYGVYDLYDLGEFNQKGTVRTKYGTKAQYLQAIQAAHAAGMQVYADVVFDHKGGADGTEWVDAVEVNPSDRNQEISGTYQIQAWTKFDFPGRGNTYSSFKWRWYHFDGVDWDESRKLSRIYKFRGIGKAWDWEVDTENGNYDYLMYADLDMDHPEVVTELKNWGKWYVNTTNIDGFRLDAVKHIKFSFFPDWLSYVRSQTGKPLFTVGEYWSYDINKLHNYITKTNGTMSLFDAPLHNKFYTASKSGGAFDMRTLMTNTLMKDQPTLAVTFVDNHDTEPGQALQSWVDPWFKPLAYAFILTRREGYPCVFYGDYYGIPQYNIPSLKSKIDPLLIARRDYAYGTQHDYLDHSDIIGWTREGVTEKPGSGLAALITDGPGGSKWMYVGKRHAGKVFYDLTGNRSDTVTINSDGWGEFKVNGGSVSVWVPRKTTVS

SEQ ID NO: 17665 - protein, 488 aa, Geobacillus stearothermophilus
AAPFNGTMMQYFEWYLPDDGTLWTKVANEANNLSSLGITALWLPPAYKGTSRSDVGYGVYDLYDLGEFNQKGTVRTKYGTKAQYLQAIQAAHAAGMQVYADVVFDHKGGADGTEWVDAVEVNPSDRNQEISGTYQIQAWTKFDFPGRGNTYSSFKWRWYHFDGVDWDESRKLSRIYKFRGIGKAWDWEVDTENGNYDYLMYADLDMDHPEVVTELKNWGKWYVNTTNIDGFRLDAVKHIKFQFFPDWLSYVRSQTGKPLFTVGEYWSYDINKLHNYITKTNGTMSLFDAPLHNKFYTASKSGGAFDMRTLMTNTLMKDQPTLAVTFVDNHDTEPGQALQSWVDPWFKPLAYAFILTRQEGYPCVFYGDYYGIPQYNIPSLKSKIDPLLIARRDYAYGTQHDYLDHSDIIGWTREGVTEKPGSGLAALITDGPGGSKWMYVGKRHAGKVFYDLTGNRSDTVTINSDGWGEFKVNGGSVSVWVPRKTTVS

SEQ ID NO: 17666 - protein, 488 aa, Geobacillus stearothermophilus
AAPFNGTMMQYFEWYLPDDGTLWTKVANEANNLSSLGITALWLPPAYKGTSRSDVGYGVYDLYDLGEFNQKGTVRTKYGTKAQYLQAIQAAHAAGMQVYADVVFDHKGGADGTEWVDAVEVNPSDRNQEISGTYQIQAWTKFDFPGRGNTYSSFKWRWYHFDGVDWDESRKLSRIYKFRGIGKAWDWEVDTENGNYDYLMYADLDMDHPEVVTELKNWGKWYVNTTNIDGFRLDAVKHIKFSFFPDWLSYVRSQTGKPLFTVGEYWSYDINKLHNYITKTNGTMSLFDAPLHNKFYTASKSGGAFDMRTLMTNTLMKDRPTLAVTFVDNHDTEPGQALQSWVDPWFKPLAYAFILTRQEGYPCVFYGDYYGIPQYNIPSLKSKIDPLLIARRDYAYGTQHDYLDHSDIIGWTREGVTEKPGSGLAALITDGPGGSKWMYVGKRHAGKVFYDLTGNRSDTVTINSDGWGEFKVNGGSVSVWVPRKTTVS

SEQ ID NO: 17667 - protein, 488 aa, Geobacillus stearothermophilus
AAPFNGTMMQYFEWYLPDDGTLWTKVANEANNLSSLGITALWLPPAYKGTSRSDVGYGVYDLYDLGEFNQKGTVRTKYGTKAQYLQAIQAAHAAGMRVYADVVFDHKGGADGTEWVDAVEVNPSDRNQEISGTYQIQAWTKFDFPGRGNTYSSFKWRWYHFDGVDWDESRKLSRIYKFRGIGKAWDWEVDTENGNYDYLMYADLDMDHPEVVTELKNWGKWYVNTTNIDGFRLDAVKHIKFSFFPDWLSYVRSQTGKPLFTVGEYWSYDINKLHNYITKTNGTMSLFDAPLHNKFYTASKSGGAFDMRTLMTNTLMKDQPTLAVTFVDNHDTEPGQALQSWVDPWFKPLAYAFILTRREGYPCVFYGDYYGIPQYNIPSLKSKIDPLLIARRDYAYGTQHDYLDHSDIIGWTREGVTEKPGSGLAALITDGPGGSKWMYVGKQHAGKVFYDLTGNRSDTVTINSDGWGEFKVNGGSVSVWVPRKTTVS

SEQ ID NO: 17668 - protein, 488 aa, Geobacillus stearothermophilus
AAPFNGTMMQYFEWYLPDDGTLWTKVANEANNLSSLGITALWLPPAYKGTSRSDVGYGVYDLYDLGEFNQKGTVRTKYGTKAQYLQAIQAAHAAGMRVYADVVFDHKGGADGTEWVDAVEVNPSDRNQEISGTYQIQAWTKFDFPGRGNTYSSFKWRWYHFDGVDWDESRKLSRIYKFRGIGKAWDWEVDTENGNYDYLMYADLDMDHPEVVTELKNWGKWYVNTTNIDGFRLDAVKHIKFQFFPDWLSYVRSQTGKPLFTVGEYWSYDINKLHNYITKTNGTMSLFDAPLHNKFYTASKSGGAFDMRTLMTNTLMKDQPTLAVTFVDNHDTEPGQALQSWVDPWFKPLAYAFILTRQEGYPCVFYGDYYGIPQYNIPSLKSKIDPLLIARRDYAYGTQHDYLDHSDIIGWTREGVTEKPGSGLAALITDGPGGSKWMYVGKQHAGKVFYDLTGNRSDTVTINSDGWGEFKVNGGSVSVWVPRKTTVS

SEQ ID NO: 17669 - protein, 488 aa, Geobacillus stearothermophilus
AAPFNGTMMQYFEWYLPDDGTLWTKVANEANNLSSLGITALWLPPAYKGTSRSDVGYGVYDLYDLGEFNQKGTVRTKYGTKAQYLQAIQAAHAAGMQVYADVVFDHKGGADGTEWVDAVEVNPSDRNQEISGTYQIQAWTKFDFPGRGNTYSSFKWRWYHFDGVDWDESRKLSRIYKFRGIGKAWDWEVDTENGNYDYLMYADLDMDHPEVVTELKNWGKWYVNTTNIDGFRLDAVKHIKFQFFPDWLSYVRSQTGKPLFTVGEYWSYDINKLHNYITKTNGTMSLFDAPLHNKFYTASKSGGAFDMRTLMTNTLMKDRPTLAVTFVDNHDTEPGQALQSWVDPWFKPLAYAFILTRQEGYPCVFYGDYYGIPQYNIPSLKSKIDPLLIARRDYAYGTQHDYLDHSDIIGWTREGVTEKPGSGLAALITDGPGGSKWMYVGKQHAGKVFYDLTGNRSDTVTINSDGWGEFKVNGGSVSVWVPRKTTVS

SEQ ID NO: 17670 - protein, 488 aa, Bacillus subtilis
AAPFNGTMMQYFEWYLPDDGTLWTKVANEANNLSSLGITALWLPPAYKGTSRSDVGYGVYDLYDLGEFNQKGTVRTKYGTKAQYLQAIQAAHAAGMQVYADVVFDHKGGADGTEGVDAVEVNPSDCNQEFSGTYQIQAWTKFDFPGRGNTYSSFKWRWYHFDGVDWDESRKLSRIYKFRGIGKAWDWEVDTENGNYDYLMYADLDMDHPEVVTELKNWGKWYVNTTNIDGFRLDAVKHIKFSFFPDWLSYVRSQTGKPLFTVGEYWSYDINKLHNYITKTDGTMSLFDAPLHNKFYTASKSGGAFDMRTLMTNTLMKDQPTLAVTFGDNHDTEPGQALQSWVDPWFKPLAYAFILTRQEGYPCVFYGDYYGIPQYNIPSLKSKIDPLLIARRDYAYGTQHDYLDHSDIIGWTREGGTEKPGSGLAALITDGPGGSKWMYVGKQHAGKVFYDLTGNRSDTVTINSDGWGEFKVNGGSVSVWVPRKTTVS

SEQ ID NO: 17671 - protein, 488 aa, Geobacillus stearothermophilus
AAPFNGTMMQYFEWYLPDDGTLWTKVANEANNLSSLGITALWLPPAYKGTSRSDVGYGVYDLYDLGEFNQKGTVRTKYGTKAQYLQAIQAAHAAGMRVYADVVFDHKGGADGTEWVDAVEVNPSDRNQEISGTYQIQAWTKFDFPGRGNTYSSFKWRWYHFDGVDWDESRKLSRIYKFRGIGKAWDWEVDTENGNYDYLMYADLDMDHPEVVTELKNWGKWYVNTTNIDGFRLDAVKHIKFSFFPDWLSYVRSQTGKPLFTVGEYWSYDINKLHNYITKTNGTMSLFDAPLHNKFYTASKSGGAFDMRTLMTNTLMKDQPTLAVTFVDNHDTEPGQALQSWVDPWFKPLAYAFILTRQEGYPCVFYGDYYGIPQYNIPSLKSKIDPLLIARRDYAYGTQHDYLDHSDIIGWTREGVTEKPGSGLAALITDGPGGSKWMYVGKRHAGKVFYDLTGNRSDTVTINSDGWGEFKVNGGSVSVWVPRKTTVS

SEQ ID NO: 17672 - protein, 488 aa, Geobacillus stearothermophilus
AAPFNGTMMQYFEWYLPDDGTLWTKVANEANNLSSLGITALWLPPAYKGTSRSDVGYGVYDLYDLGEFNQKGTVRTKYGTKAQYLQAIQAAHAAGMQVYADVVFDHKGGADGTEWVDAVEVNPSDRNQEISGTYQIQAWTKFDFPGRGNTYSSFKWRWYHFDGVDWDESRKLSRIYKFRGIGKAWDWEVDTENGNYDYLMYADLDMDHPEVVTELKNWGKWYVNTTNIDGFRLDAVKHIKFSFFPDWLSYVRSQTGKPLFTVGEYWSYDINKLHNYITKTNGTMSLFDAPLHNKFYTASKSGGAFDMRTLMTNTLMKDRPTLAVTFVDNHDTEPGQALQSWVDPWFKPLAYAFILTREEGYPCVFYGDYYGIPQYNIPSLKSKIDPLLIARRDYAYGTQHDYLDHSDIIGWTREGVTEKPGSGLAALITDGPGGSKWMYVGKQHAGKVFYDLTGNRSDTVTINSDGWGEFKVNGGSVSVWVPRKTTVS

SEQ ID NO: 17673 - protein, 488 aa, Geobacillus stearothermophilus
AAPFNGTMMQYFEWYLPDDGTLWTKVANEANNLSSLGITALWLPPAYKGTSRSDVGYGVYDLYDLGEFNQKGTVRTKYGTKAQYLQAIQAAHAAGMRVYADVVFDHKGGADGTEWVDAVEVNPSDRNQEISGTYQIQAWTKFDFPGRGNTYSSFKWRWYHFDGVDWDESRKLSRIYKFRGIGKAWDWEVDTENGNYDYLMYADLDMDHPEVVTELKNWGKWYVNTTNIDGFRLDAVKHIKFSFFPDWLSYVRSQTGKPLFTVGEYWSYDINKLHNYITKTNGTMSLFDAPLHNKFYTASKSGGAFDMRTLMTNTLMKDQPTLAVTFVDNHDTEPGQALQSWVDPWFKPLAYAFILTRQEGYPCVFYGDYYGIPQYNIPSLKSKIDPLLIARRDYAYGTQHDYLDHSDIIGWTREGVTEKPGSGLAALITDGPGGSKWMYVGKEHAGKVFYDLTGNRSDTVTINSDGWGEFKVNGGSVSVWVPRKTTVS

SEQ ID NO: 17674 - protein, 488 aa, Geobacillus stearothermophilus
AAPFNGTMMQYFEWYLPDDGTLWTKVANEANNLSSLGITALWLPPAYKGTSRSDVGYGVYDLYDLGEFNQKGTVRTKYGTKAQYLQAIQAAHAAGMQVYADVVFDHKGGADGTEWVDAVEVNPSDRNQEISGTYQIQAWTKFDFPGRGNTYSSFKWRWYHFNGVDWDESRKLSRIYKFRGIGKAWNWEVDTENGNYDYLMYANLDMNHPEVVTELKNWGKWYVNTTNIDGFRLDAVKHIKFSFFPDWLSYVRSQTGKPLFTVGEYWSYDINKLHNYITKTDGTMSLFDAPLHNKFYTASKSGGAFDMRTLMTNTLMKDQPTLAVTFVDNHDTEPGQALQSWVDPWFKPLAYAFILTRQEGYPCVFYGDYYGIPQYNIPSLKSKIDPLLIARRDYAYGTQHDYLDHSDIIGWTREGGTEKPGSGLAALITDGPGGSKWMYVGKQHAGKVFYDLTGNRSDTVTINSDGWGEFKVNGGSVSVWVPRKTTVS

SEQ ID NO: 17675 - protein, 488 aa, Geobacillus stearothermophilus
AAPFNGTMMQYFEWYLPDDGTLWTKVANEANNLSSLGITALWLPPAYKGTSRSDVGYGVYDLYDLGEFNQKGTVRTKYGTKAQYLQAIQAAHAAGMQVYADVVFDHKGGADGTEWVDAVEVNPSDRNQEISGTYQIQAWTKFDFPGRGNTYSSFKWRWYHFDGVDWDESRKLSRIYKFRGIGKAWDWEVDTENGNYDYLMYADLDMDHPEVVTELKNWGKWYVNTTNIDGFRLDAVKHIKFQFFPDWLSYVRSQTGKPLFTVGEYWSYDINKLHNYITKTNGTMSLFDAPLHNKFYTASKSGGAFDMRTLMTNTLMKDEPTLAVTFVDNHDTEPGQALQSWVDPWFKPLAYAFILTRQEGYPCVFYGDYYGIPQYNIPSLKSKIDPLLIARRDYAYGTQHDYLDHSDIIGWTREGVTEKPGSGLAALITDGPGGSKWMYVGKQHAGKVFYDLTGNRSDTVTINSDGWGEFKVNGGSVSVWVPRKTTVS

SEQ ID NO: 17676 - protein, 488 aa, Geobacillus stearothermophilus
AAPFNGTMMQYFEWYLPDDGTLWTKVANEANNLSSLGITALWLPPAYKGTSRSDVGYGVYDLYDLGEFNQKGTVRTKYGTKAQYLQAIQAAHAAGMQVYADVVFDHKGGADGTEWVDAVEVNPSDRNQEISGTYQIQAWTKFDFPGRGNTYSSFKWRWYHFDGVDWDESRKLSRIYKFRGIGKAWDWEVDTENGNYDYLMYADLDMDHPEVVTELKNWGKWYVDTTNIDGFRLDAVKHIKFQFFPDWLSYVRSQTGKPLFTVGEYWSYDINKLHNYITKTNGTMSLFDAPLHNKFYTASKSGGAFDMRTLMTNTLMKDQPTLAVTFVDNHDTEPGQALQSWVDPWFKPLAYAFILTRQEGYPCVFYGDYYGIPQYNIPSLKSKIDPLLIARRDYAYGTQHDYLDHSDIIGWTREGVTEKPGSGLAALITDGPGGSKWMYVGKQHAGKVFYDLTGNRSDTVTINSDGWGEFKVNGGSVSVWVPRKTTVS

SEQ ID NO: 17677 - protein, 488 aa, Geobacillus stearothermophilus
AAPFNGTMMQYFEWYLPDDGTLWTKVANEANNLSSLGITALWLPPAYKGTSRSDVGYGVYDLYDLGEFNQKGTVRTKYGTKAQYLQAIQAAHAAGMEVYADVVFDHKGGADGTEWVDAVEVNPSDRNQEISGTYQIQAWTKFDFPGRGNTYSSFKWRWYHFDGVDWDESRKLSRIYKFRGIGKAWDWEVDTENGNYDYLMYADLDMDHPEVVTELKNWGKWYVNTTNIDGFRLDAVKHIKFQFFPDWLSYVRSQTGKPLFTVGEYWSYDINKLHNYITKTNGTMSLFDAPLHNKFYTASKSGGAFDMRTLMTNTLMKDQPTLAVTFVDNHDTEPGQALQSWVDPWFKPLAYAFILTRQEGYPCVFYGDYYGIPQYNIPSLKSKIDPLLIARRDYAYGTQHDYLDHSDIIGWTREGVTEKPGSGLAALITDGPGGSKWMYVGKQHAGKVFYDLTGNRSDTVTINSDGWGEFKVNGGSVSVWVPRKTTVS

SEQ ID NO: 17678 - protein, 488 aa, Geobacillus stearothermophilus
AAPFNGTMMQYFEWYLPDDGTLWTKVANEANNLSSLGITALWLPPAYKGTSRSDVGYGVYDLYDLGEFNQKGTVRTKYGTKAQYLQAIQAAHAAGMEVYADVVFDHKGGADGTEWVDAVEVNPSDRNQEISGTYQIQAWTKFDFPGRGNTYSSFKWRWYHFDGVDWDESRKLSRIYKFRGIGKAWDWEVDTENGNYDYLMYADLDMDHPEVVTELKNWGKWYVNTTNIDGFRLDAVKHIKFSFFPDWLSYVRSQTGKPLFTVGEYWSYDINKLHNYITKTNGTMSLFDAPLHNKFYTASKSGGAFDMRTLMTNTLMKDQPTLAVTFVDNHDTEPGQALQSWVDPWFKPLAYAFILTRREGYPCVFYGDYYGIPQYNIPSLKSKIDPLLIARRDYAYGTQHDYLDHSDIIGWTREGVTEKPGSGLAALITDGPGGSKWMYVGKQHAGKVFYDLTGNRSDTVTINSDGWGEFKVNGGSVSVWVPRKTTVS

SEQ ID NO: 17679 - protein, 488 aa, Geobacillus stearothermophilus
AAPFNGTMMQYFEWYLPDDGTLWTKVANEANNLSSLGITALWLPPAYKGTSRSDVGYGVYDLYDLGEFNQKGTVRTKYGTKAQYLQAIQAAHAAGMQVYADVVFDHKGGADGTEWVDAVEVNPSDRNQEISGTYQIQAWTKFDFPGRGNTYSSFKWRWYHFDGVDWDESRKLSRIYKFRGIGKAWDWEVDTENGNYDYLMYADLDMDHPEVVTELKNWGKWYVNTTNIDGFRLDAVKHIKFSFFPDWLSYVRSQTGKPLFTVGEYWSYDINKLHNYITKTNGTMSLFDAPLHNKFYTASKSGGAFDMRTLMTNTLMKDEPTLAVTFVDNHDTEPGQALQSWVDPWFKPLAYAFILTREEGYPCVFYGDYYGIPQYNIPSLKSKIDPLLIARRDYAYGTQHDYLDHSDIIGWTREGVTEKPGSGLAALITDGPGGSKWMYVGKQHAGKVFYDLTGNRSDTVTINSDGWGEFKVNGGSVSVWVPRKTTVS

SEQ ID NO: 17680 - protein, 488 aa, Geobacillus stearothermophilus
AAPFNGTMMQYFEWYLPDDGTLWTKVANEANNLSSLGITALWLPPAYKGTSRSDVGYGVYDLYDLGEFNQKGTVRTKYGTKAQYLQAIQAAHAAGMEVYADVVFDHKGGADGTEWVDAVEVNPSDRNQEISGTYQIQAWTKFDFPGRGNTYSSFKWRWYHFDGVDWDESRKLSRIYKFRGIGKAWDWEVDTENGNYDYLMYADLDMDHPEVVTELKNWGKWYVNTTNIDGFRLDAVKHIKFSFFPDWLSYVRSQTGKPLFTVGEYWSYDINKLHNYITKTNGTMSLFDAPLHNKFYTASKSGGAFDMRTLMTNTLMKDQPTLAVTFVDNHDTEPGQALQSWVDPWFKPLAYAFILTRQEGYPCVFYGDYYGIPQYNIPSLKSKIDPLLIARRDYAYGTQHDYLDHSDIIGWTREGVTEKPGSGLAALITDGPGGSKWMYVGKEHAGKVFYDLTGNRSDTVTINSDGWGEFKVNGGSVSVWVPRKTTVS

SEQ ID NO: 17681 - protein, 488 aa, Geobacillus stearothermophilus
AAPFNGTMMQYFEWYLPDDGTLWTKVANEANNLSSLGITALWLPPAYKGTSRSDVGYGVYDLYDLGEFNQKGTVRTKYGTKAQYLQAIQAAHAAGMQVYADVVFDHKGGADGTEWVDAVEVNPSDRNQVISGTYQIQAWTKFDFPGRGNTYSSFKWRWYHFDGVDWDESRKLSRIYLFEGXXKAWDWEVDTEFGNYDYLMYADLDMDHPEVVTELKNWGKWYVNTTNIDGFRLDAVKHIKFSFFPDWLSYVRSQTGKPLFTVGEYWSYDINKLHNYITKTNGTMSLFDAPLHNKFYTASKSGGAFDMRTLMTNTLMKDQPTLAVTFVDNHDTEPGQALQSWVDPWFKPLAYAFILTRQEGYPCVFYGDYYGIPQYNIPSLKSKIDPLLIARRDYAYGTQHDYLDHSDIIGWTREGVTEKPGSGLAALITDGPGGSKWMYVGKQHAGKVFYDLTGNRSDTVTINSDGWGEFKVNGGSVSVWVPRKTTVS

SEQ ID NO: 17682 - protein, 488 aa, Geobacillus stearothermophilus
AAPFNGTMMQYFEWYLPDDGTLWTKVANEANNLSSLGITALWLPPAYKGTSRSDVGYGVYDLYDLGEFNQKGTVRTKYGTKAQYLQAIQAAHAAGMQVYADVVFDHKGGADGTEWVDAVEVNPSDRNQEISGTYQIQAWTKFDFPGRGNTYSSFKWRWYHFDGVDWDESRKLSRIYKFRGXXKAWDWEVDTEFGNYDYLMYADLDMDHPEVVTELKNWGPWYVLTTNIDGFRLDAVKHIKFSFFPDWLSYVRSSTGKPLFTVGEYWSYDINKLHNYITKTNGTMSLFDAPLHNKFYTASKSGGAFDMRTLMTNTLMKDQPTLAVTFVDNHDTEPGQALQSWVDPWFKPLAYAFILTRQEGYPCVFYGDYYGIPQYNIPSLKSKIDPLLIARRDYAYGTQHDYLDHSDIIGWTREGVTEKPGSGLAALITDGPGGSKWMYVGKQHAGKVFYDLTGNRSDTVTINSDGWGEFKVNGGSVSVWVPRKTTVS

SEQ ID NO: 17683 - protein, 488 aa, Geobacillus stearothermophilus
AAPFNGTMMQYFEWYLPDDGTLWTKVANEANNLSSLGITALWLPPAYKGTSRSDVGYGVYDLYDLGEFNQKGTVRTKYGTKAQYLQAIQAAHAAGMQVYADVVFDHKGGADGTEWVDAVEVNPSDRNQEISGTYQIQAWTKFDFPGRGNTYSSFKWRWYHFDGVDWDESRKLSRIYKFRGIGKAWDWEVDTENGNYDYLMYADLDMDHPEVVTELKNWGKWYVNTTNIDGFRLDAVKHIKFSFFPDWLSYVRSQTGKPLFTVGEYWSYDINKLHNYITKTNGTMSLFDAPLHNKFYTASKSGGAFDMRTLMTNTLMKDQPTLAVTFVDNHDTEPGQALQSWVDPWFKPLAYAFILTRQEGYPGVFYGDYYGIPQYNIPSLKSKIDPLLIARRDYAYGTQHDYLDHSDIIGWTREGVTEKPGSGLAALITDGPGGSKWMYVGKQHAGKVFYDLTGNRSDTVTITSDGWGEFKVNGGSVSVWVPRKTTVS

SEQ ID NO: 17684 - protein, 486 aa, Geobacillus stearothermophilus
AAPFNGTMMQYFEWYLPDDGTLWTKVANEANNLSSLGITALWLPPAYKGTSRSDVGYGVYDLYDLGEFNQKGTVRTKYGTKAQYLQAIQAAHAAGMQVYADVVFDHKGGADGTEWVDAVEVNPSDRNQEISGTYQIQAWTKFDFPGRGNTYSSFKWRWYHFDGVDWDESRKLSRIYKFRGKAWDWEVDTEFGNYDYLMYADLDMDHPEVVTELKNWGPWYVLTTNIDGFRLDAVKHIKFSFFPDWLSYVRSSTGKPLFTVGEYWSYDINKLHNYITKTNGTMSLFDAPLHNKFYTASKSGGAFDMRTLMTNTLMKDQPTLAVTFVDNHDTEPGQALQSWVDPWFKPLAYAFILTRQEGYPCVFYGDYYGIPQYNIPSLKSKIDPLLIARRDYAYGTQHDYLDHSDIIGWTREGVTEKPGSGLAALITDGPGGSKWMYVGKQHAGKVFYDLTGNRSDTVTINSDGWGEFKVNGGSVSVWVPRKTTVS

SEQ ID NO: 17685 - protein, 488 aa, Geobacillus stearothermophilus
AAPFNGTMMQYFEWYLPDDGTLWTKVANEANNLSSLGITALWLPPAYKGTSRSDVGYGVYDLYDLGEFNQKGTVRTKYGTKAQYLQAIQAAHAAGMRVYADVVFDHKGGADGTEWVDAVEVNPSDRNQEISGTYQIQAWTKFDFPGRGNTYSSFKWRWYHFDGVDWDESRKLSRIYKFRGIGKAWDWEVDTENGNYDYLMYADLDMDHPEVVTELKNWGKWYVNTTNIDGFRLDAVKHIKFSFFPDWLSYVRSQTGKPLFTVGEYWSYDINKLHNYITKTNGTMSLFDAPLHNKFYTASKSGGAFDMRTLMTNTLMKDRPTLAVTFVDNHDTEPGQALQSWVDPWFKPLAYAFILTRQEGYPCVFYGDYYGIPQYNIPSLKSKIDPLLIARRDYAYGTQHDYLDHSDIIGWTREGVTEKPGSGLAALITDGPGGSKWMYVGKQHAGKVFYDLTGNRSDTVTINSDGWGEFKVNGGSVSVWVPRKTTVS

SEQ ID NO: 17686 - protein, 488 aa, Geobacillus stearothermophilus
AAPFNGTMMQYFEWYLPDDGTLWTKVANEANNLSSLGITALWLPPAYKGTSRSDVGYGVYDLYDLGEFNQKGTVRTKYGTKAQYLQAIQAAHAAGMEVYADVVFDHKGGADGTEWVDAVEVNPSDRNQEISGTYQIQAWTKFDFPGRGNTYSSFKWRWYHFDGVDWDESRKLSRIYKFRGIGKAWDWEVDTENGNYDYLMYADLDMDHPEVVTELKNWGKWYVNTTNIDGFRLDAVKHIKFSFFPDWLSYVRSQTGKPLFTVGEYWSYDINKLHNYITKTNGTMSLFDAPLHNKFYTASKSGGAFDMRTLMTNTLMKDQPTLAVTFVDNHDTEPGQALQSWVDPWFKPLAYAFILTRQEGYPCVFYGDYYGIPQYNIPSLKSKIDPLLIARRDYAYGTQHDYLDHSDIIGWTREGVTEKPGSGLAALITDGPGGSKWMYVGKRHAGKVFYDLTGNRSDTVTINSDGWGEFKVNGGSVSVWVPRKTTVS

SEQ ID NO: 17687 - protein, 488 aa, Geobacillus stearothermophilus
AAPFNGTMMQYFEWYLPDDGTLWTKVANEANNLSSLGITALWLPPAYKGTSRSDVGYGVYDLYDLGEFNQKGTVRTKYGTKAQYLQAIQAAHAAGMRVYADVVFDHKGGADGTEWVDAVEVNPSDRNQEISGTYQIQAWTKFDFPGRGNTYSSFKWRWYHFDGVDWDESRKLSRIYKFRGIGKAWDWEVDTENGNYDYLMYADLDMDHPEVVTELKNWGKWYVNTTNIDGFRLDAVKHIKFSFFPDWLSYVRSQTGKPLFTVGEYWSYDINKLHNYITKTNGTMSLFDAPLHNKFYTASKSGGAFDMRTLMTNTLMKDEPTLAVTFVDNHDTEPGQALQSWVDPWFKPLAYAFILTRQEGYPCVFYGDYYGIPQYNIPSLKSKIDPLLIARRDYAYGTQHDYLDHSDIIGWTREGVTEKPGSGLAALITDGPGGSKWMYVGKQHAGKVFYDLTGNRSDTVTINSDGWGEFKVNGGSVSVWVPRKTTVS

SEQ ID NO: 17688 - protein, 488 aa, Geobacillus stearothermophilus
AAPFNGTMMQYFEWYLPDDGTLWTKVANEANNLSSLGITALWLPPAYKGTSRSDVGYGVYDLYDLGEFNQKGTVRTKYGTKAQYLQAIQAAHAAGMQVYADVVFDHKGGADGTEWVDAVEVNPSDRNQEISGTYQIQAWTKFDFPGRGNTYSSFKWRWYHFDGVDWDESRKLSRIYKFRGIGKAWDWEVDTENGNYDYLMYADLDMDHPEVVTELKNWGKWYVNTTNIDGFRLDAVKHIKFSFFPDWLSYVRSQTGKPLFTVGEYWSYDINKLHNYITKTNGTMSLFDAPLHNKFYTASKSGGAFDMRTLMTNTLMKDEPTLAVTFVDNHDTEPGQALQSWVDPWFKPLAYAFILTRQEGYPCVFYGDYYGIPQYNIPSLKSKIDPLLIARRDYAYGTQHDYLDHSDIIGWTREGVTEKPGSGLAALITDGPGGSKWMYVGKRHAGKVFYDLTGNRSDTVTINSDGWGEFKVNGGSVSVWVPRKTTVS

SEQ ID NO: 17689 - protein, 488 aa, Geobacillus stearothermophilus
AAPFNGTMMQYFEWYLPDDGTLWTKVANEANNLSSLGITALWLPPAYKGTSRSDVGYGVYDLYDLGEFNQKGTVRTKYGTKAQYLQAIQAAHAAGMQVYADVVFDHKGGADGTEWVDAVEVNPSDRNQEISGTYQIQAWTKFDFPGRGNTYSSFKWRWYHFDGVDWDESRKLSRIYKFRGIGKAWDWEVDTENGNYDYLMYADLDMDHPEVVTELKNWGKWYVNTTNIDGFRLDAVKHIKFSFFPDWLSYVRSQTGKPLFTVGEYWSYDINKLHNYITKTNGTMSLFDAPLHNKFYTASKSGGAFDMRTLMTNTLMKDEPTLAVTFVDNHDTEPGQALQSWVDPWFKPLAYAFILTRREGYPCVFYGDYYGIPQYNIPSLKSKIDPLLIARRDYAYGTQHDYLDHSDIIGWTREGVTEKPGSGLAALITDGPGGSKWMYVGKQHAGKVFYDLTGNRSDTVTINSDGWGEFKVNGGSVSVWVPRKTTVS

SEQ ID NO: 17690 - protein, 488 aa, Geobacillus stearothermophilus
AAPFNGTMMQYFEWYLPDDGTLWTKVANEANNLSSLGITALWLPPAYKGTSRSDVGYGVYDLYDLGEFNQKGTVRTKYGTKAQYLQAIQAAHAAGMQVYADVVFDHKGGADGTEWVDAVEVNPSDRNQEISGTYQIQAWTKFDFPGRGNTYSSFKWRWYHFDGVDWDESRKLSRIYKFRGIGKAWDWEVDTENGNYDYLMYADLDMDHPEVVTELKNWGKWYVNTTNIDGFRLDAVKHIKFQFFPDWLSYVRSQTGKPLFTVGEYWSYDINKLHNYITKTNGTMSLFDAPLHNKFYTASKSGGAFDMRTLMTNTLMKDQPTLAVTFVDNHDTEPGQALQSWVDPWFKPLAYAFILTRQEGYPCVFYGDYYGIPQYNIPSLKSKIDPLLIARRDYAYGTQHDYLDHSDIIGWTREGVTEKPGSGLAALITDGPGGSKWMYVGKEHAGKVFYDLTGNRSDTVTINSDGWGEFKVNGGSVSVWVPRKTTVS

SEQ ID NO: 17691 - protein, 488 aa, Geobacillus stearothermophilus
AAPFNGTMMQYFEWYLPDDGTLWTKVADEANNLSSLGITALWLPPAYKGTSRSDVGYGVYDLYDLGEFNQKGTVRTKYGTKAQYLQAIQAAHAAGMQVYADVVFDHKGGADGTEWVDAVEVNPSDRNQEISGTYQIQAWTKFDFPGRGNTYSSFKWRWYHFDGVDWDESRKLSRIYKFRGIGKAWDWEVDTENGNYDYLMYADLDMDHPEVVTELKNWGKWYVNTTNIDGFRLDAVKHIKFSFFPDWLSYVRSQTGKPLFTVGEYWSYDINKLHNYITKTNGTMSLFDAPLHNKFYTASKSGGAFDMQTLMTNTLMKDQPTLAVTFVDNHDTEPGQALQSWVDPWFKPLAYAFILTRQEGYPCVFYGDYYGIPQYNIPSLKSKIDPLLIARRDYAYGTQHDYLDHSDIIGWTREGVTEKPGSGLAALITDGPGGSKWMYVGKQHAGKVFYDLTGNRSDTVTINSDGWGEFKVNGGSVSVWVPRKTTVS

SEQ ID NO: 17692 - protein, 488 aa, Geobacillus stearothermophilus
AAPFNGTMMQYFEWYLPDDGTLWTKVANEANNLSSLGITALWLPPAYKGTSRSDVGYGVYDLYDLGEFNQKGTVRTKYGTKAQYLQAIQAAHAAGMQVYADVVFDHKGGADGTEWVDAVEVNPSDRNQEISGTYQIQAWTKFDFPGRGNTYSSFKWRWYHFDGVDWDESRKLSRIYKFRGIGKKWNEEVDTENGNYDYLMYADLDMNHPEVVTELKNWGKWYVNTTNIDGFRLDAVKHIKFSFFPDWLSYVRSQTGKPLFTVGEYWSYDINKLHNYITKTDGTMSLFDAPLHNKFYTASKSGGAFDMRTLMTNTLMKDQPTLAVTFVDNHDTEPGQALQSWVDPWFKPLAYAFILTRQEGYPCVFYGDYYGIPQYNIPSLKSKIDPLLIARRDYAYGTQHDYLDHSDIIGWTREGGTEKPGSGLAALITDGPGGSKWMYVGKQHAGKVFYDLTGNRSDTVTINSDGWGEFKVNGGSVSVWVPRKTTVS

SEQ ID NO: 17693 - protein, 488 aa, Geobacillus stearothermophilus
AAPFNGTMMQYFEWYLPDDGTLWTKVANEANNLSSLGITALWLPPAYKGTSRSDVGYGVYDLYDLGEFNQKGTVRTKYGTKAQYLQAIQAAHAAGMQVYADVVFDHKGGADGTEWVDAVEVNPSDRNQEISGTYQIQAWTKFDFPGRGNTYSSFKWRWYHFDGVDWDESRKLSRIYKFRGIGKAWDWEVDTENGNYDYLMYADLDMDHPEVVTELKNWGKWYVNTTNIDGFRLDAVKHIKFSFFPDWLSYVRSQTGKPLFTVGEYWSYDINKLHNYITKTNGTMSLFDAPLHNKFYTASKSGGAFDMRTLMTNTLMKDQPTLAVTFVDNHDTEPGQALQSWVDPWFKPLAYAFILTRREGYPCVFYGDYYGIPQYNIPSLKSKIDPLLIARRDYAYGTQHDYLDHSDIIGWTREGVTEKPGSGLAALITDGPGGSKWMYVGKEHAGKVFYDLTGNRSDTVTINSDGWGEFKVNGGSVSVWVPRKTTVS

SEQ ID NO: 17694 - protein, 488 aa, Geobacillus stearothermophilus
AAPFNGTMMQYFEWYLPDDGTLWTKVANEANNLSSLGITALWLPPAYKGTSRSDVGYGVYDLYDLGEFNQKGTVRTKYGTKAQYLQAIQAAHAAGMQVYADVVFDHKGGADGTEWVDAVEVNPSDRNQEISGTYQIQAWTKFDFPGRGNTYSSFKWRWYHFDGVDWDESRKLSRIYKFRGIGKAWDWEVDTENGNYDYLMYADLDMDHPEVVTELKNWGKWYVNTTNIDGFRLDAVKHIKFSFFPDWLSYVRSQTGKPLFTVGEYWSYDINKLHNYITKTNGTMSLFDAPLHNKFYTASKSGGAFDMRTLMTNTLMKDQPTLAVTFVDNHDTEPGQALQSWVDPWFKPLAYAFILTREEGYPCVFYGDYYGIPQYNIPSLKSKIDPLLIARRDYAYGTQHDYLDHSDIIGWTREGVTEKPGSGLAALITDGPGGSKWMYVGKRHAGKVFYDLTGNRSDTVTINSDGWGEFKVNGGSVSVWVPRKTTVS

SEQ ID NO: 17695 - protein, 488 aa, Geobacillus stearothermophilus
AAPFNGTMMQYFEWYLPDDGTLWTKVANEANNLSSLGITALWLPPAYKGTSRSDVGYGVYDLYDLGEFNQKGTVRTKYGTKAQYLQAIQAAHAAGMRVYADVVFDHKGGADGTEWVDAVEVNPSDRNQEISGTYQIQAWTKFDFPGRGNTYSSFKWRWYHFDGVDWDESRKLSRIYKFRGIGKAWDWEVDTENGNYDYLMYADLDMDHPEVVTELKNWGKWYVNTTNIDGFRLDAVKHIKFSFFPDWLSYVRSQTGKPLFTVGEYWSYDINKLHNYITKTNGTMSLFDAPLHNKFYTASKSGGAFDMRTLMTNTLMKDQPTLAVTFVDNHDTEPGQALQSWVDPWFKPLAYAFILTREEGYPCVFYGDYYGIPQYNIPSLKSKIDPLLIARRDYAYGTQHDYLDHSDIIGWTREGVTEKPGSGLAALITDGPGGSKWMYVGKQHAGKVFYDLTGNRSDTVTINSDGWGEFKVNGGSVSVWVPRKTTVS

SEQ ID NO: 17696 - protein, 487 aa, Geobacillus stearothermophilus
AAPFNGTMMQYFEWYLPDDGTLWTKVANEANNLSSLGITALWLPPAYKGTSRSDVGYGVYDLYDLGEFNQKGTVRTKYGTKAQYLQAIQAAHAAGMQVYADVVFDHKGGADGTEWVDAVEVNPSDRNQEISGTYQIQAWTKFDFPGRGNTYSSFKWRWYHFDGVDWDESRKLSRIYKRGIGKAWDWEVDTENGNYDYLMYADLDMDHPEVVTELKNWGKWYVNTTNIDGFRLDAVKHIKFSFFPDWLSYVRSQTGKPLFTVGEYWSYDINKLHNYITKTNGTMSLFDAPLHNKFYTASKSGGAFDMRTLMTNTLMKDQPTLAVTFVDNHDTEPGQALQSWVDPWFKPLAYAFILTRQEGYPCVFYGDYYGIPQYNIPSLKSKIDPLLIARRDYAYGTQHDYLDHSDIIGWTREGVTEKPGSGLAALITDGPGGSKWMYVGKQHAGKVFYDLTGNRSDTVTINSDGWGEFKVNGGSVSVWVPRKTTVS

SEQ ID NO: 17697 - protein, 488 aa, Geobacillus stearothermophilus
AAPFNGTMMQYFEWYLPDDGTLWTKVANEANNLSSLGITALWLPPAYKGTSRSDVGYGVYDLYDLGEFNQKGTVRTKYGTKAQYLQAIQAAHAAGMQVYADVVFDHKGGADGTEWVDAVEVNPSDRNQEISGTYQIQAWTKFDFPGRGNTYSSFKWRWYHFDGVDWDESRKLSRIYKFRGIGKAWDWEVDTENGNYDYLMYADLDMDHPEVVTELKNWGKWYVNTTNIDGFRLDAVKHIKFSFFPDWLSYVRSQTGKPLFTVGEYWSYDINKLHNYITKTNGTMSLFDAPLHNKFYTASKSGGAFDMRTLMTNTLMKDEPTLAVTFVDNHDTEPGQALQSWVDPWFKPLAYAFILTRQEGYPCVFYGDYYGIPQYNIPSLKSKIDPLLIARRDYAYGTQHDYLDHSDIIGWTREGVTEKPGSGLAALITDGPGGSKWMYVGKEHAGKVFYDLTGNRSDTVTINSDGWGEFKVNGGSVSVWVPRKTTVS

SEQ ID NO: 17698 - protein, 488 aa, Geobacillus stearothermophilus
AAPFNGTMMQYFEWYLPDDGTLWTKVANEANNLSSLGITALWLPPAYKGTSRSDVGYGVYDLYDLGEFNQKGTVRTKYGTKAQYLQAIQAAHAAGMQVYADVVFDHKGGADGTEWVDAVEVNPSDRNQEISGTYQIQAWTKFDFPGRGNTYSSFKWRWYHFDGVDWDESRKLSRIYKFRGIGKAWDWEVDTENGNYDYLMYADLDMDHPEVVTELKNWGKWYVNTTNIDGFRLDAVKHIKFSFFPDWLSYVRSQTGKPLFTVGEYWSYDINKLHNYITKTNGTMSLFDAPLHNKFYTASKSGGAFDMRTLMTNTLMKDRPTLAVTFVDNHDTEPGQALQSWVDPWFKPLAYAFILTRREGYPCVFYGDYYGIPQYNIPSLKSKIDPLLIARRDYAYGTQHDYLDHSDIIGWTREGVTEKPGSGLAALITDGPGGSKWMYVGKQHAGKVFYDLTGNRSDTVTINSDGWGEFKVNGGSVSVWVPRKTTVS

SEQ ID NO: 17699 - protein, 488 aa, Geobacillus stearothermophilus
AAPFNGTMMQYFEWYLPDDGTLWTKVANEANNLSSLGITALWLPPAYKGTSRSDVGYGVYDLYDLGEFNQKGTVRTKYGTKAQYLQAIQAAHAAGMEVYADVVFDHKGGADGTEWVDAVEVNPSDRNQEISGTYQIQAWTKFDFPGRGNTYSSFKWRWYHFDGVDWDESRKLSRIYKFRGIGKAWDWEVDTENGNYDYLMYADLDMDHPEVVTELKNWGKWYVNTTNIDGFRLDAVKHIKFSFFPDWLSYVRSQTGKPLFTVGEYWSYDINKLHNYITKTNGTMSLFDAPLHNKFYTASKSGGAFDMRTLMTNTLMKDEPTLAVTFVDNHDTEPGQALQSWVDPWFKPLAYAFILTRQEGYPCVFYGDYYGIPQYNIPSLKSKIDPLLIARRDYAYGTQHDYLDHSDIIGWTREGVTEKPGSGLAALITDGPGGSKWMYVGKQHAGKVFYDLTGNRSDTVTINSDGWGEFKVNGGSVSVWVPRKTTVS

SEQ ID NO: 17700 - protein, 488 aa, Geobacillus stearothermophilus
AAPFNGTMMQYFEWYLPDDGTLWTKVANEANNLSSLGITALWLPPAYKGTSRSDVGYGVYDLYDLGEFNQKGTVRTKYGTKAQYLQAIQAAHAAGMQVYADVVFDHKGGADGTEWVDAVEVNPSDRNQEISGTYQIQAWTKFDFPGRGNTYSSFKWRWYHFDGVDWDESRKLSRIYKFRGIGKAWDWEVDTENGNYDYLMYADLDMDHPEVVTELKNWGKWYVNTTNIDGFRLDAVKHIKFSFFPDWLSYVRSQTGKPLFTVGEYWSYDINKLHNYITKTNGTMSLFDAPLHNKFYTASKSGGAFDMRTLMTNTLMKDRPTLAVTFVDNHDTEPGQALQSWVDPWFKPLAYAFILTRQEGYPCVFYGDYYGIPQYNIPSLKSKIDPLLIARRDYAYGTQHDYLDHSDIIGWTREGVTEKPGSGLAALITDGPGGSKWMYVGKEHAGKVFYDLTGNRSDTVTINSDGWGEFKVNGGSVSVWVPRKTTVS

SEQ ID NO: 17701 - protein, 488 aa, Geobacillus stearothermophilus
AAPFNGTMMQYFEWYLPDDGTLWTKVANEANNLSSLGITALWLPPAYKGTSRSDVGYGVYDLYDLGEFNQKGTVRTKYGTKAQYLQAIQAAHAAGMEVYADVVFDHKGGADGTEWVDAVEVNPSDRNQEISGTYQIQAWTKFDFPGRGNTYSSFKWRWYHFDGVDWDESRKLSRIYKFRGIGKAWDWEVDTENGNYDYLMYADLDMDHPEVVTELKNWGKWYVNTTNIDGFRLDAVKHIKFSFFPDWLSYVRSQTGKPLFTVGEYWSYDINKLHNYITKTNGTMSLFDAPLHNKFYTASKSGGAFDMRTLMTNTLMKDRPTLAVTFVDNHDTEPGQALQSWVDPWFKPLAYAFILTRQEGYPCVFYGDYYGIPQYNIPSLKSKIDPLLIARRDYAYGTQHDYLDHSDIIGWTREGVTEKPGSGLAALITDGPGGSKWMYVGKQHAGKVFYDLTGNRSDTVTINSDGWGEFKVNGGSVSVWVPRKTTVS

SEQ ID NO: 17702 - protein, 488 aa, Geobacillus stearothermophilus
AAPFNGTMMQYFEWYLPDDGTLWTKVAREANNLSSLGITALWLPPAYKGTSRSDVGYGVYDLYDLGEFNQKGTVRTKYGTKAQYLQAIQAAHAAGMQVYADVVFDHKGGADGTEWVDAVEVNPSDRNQEISGTYQIQAWTKFDFPGRGNTYSSFKWRWYHFDGVDWDESRKLSRIYKFRGIGKAWDWEVDTENGNYDYLMYADLDMDHPEVVTELKNWGKWYVNTTNIDGFRLDAVKHIKFSFFPDWLSYVRSQTGKPLFTVGEYWSYDINKLHNYITKTNGTMSLFDAPLHNKFYTASKSGGAFDMRTLMTNTLMKNQPTLAVTFVDNHDTEPGQALQSWVDPWFKPLAYAFILTRQEGYPCVFYGDYYGIPQYNIPSLKSKIDPLLIARRDYAYGTQHDYLDHSDIIGWTREGVTEKPGSGLAALITDGPGGSKWMYVGKQHAGKVFYDLTGNRSDTVTINSDGWGEFKVNGGSVSVWVPRKTTVS

SEQ ID NO: 17703 - protein, 486 aa, Geobacillus stearothermophilus
AAPFNGTMMQYFEWYLPDDGTLWTKVANEANNLSSLGITALWLPPAYKGTSRSDVGYGVYDLYDLGEFNQKGTVRTKYGTKAQYLQAIQAAHAAGMQVYADVVFDHKGGADGTEWVDAVEVNPSDRNQVISGTYQIQAWTKFDFPGRGNTYSSFKWRWYHFDGVDWDESRKLSRIYLFVGKAWDWEVDTEFGNYDYLMYADLDMDHPEVVTELKNWGKWYVNTTNIDGFRLDAVKHIKFSFFPDWLSYVRSQTGKPLFTVGEYWSYDINKLHNYITKTNGTMSLFDAPLHNKFYTASKSGGAFDMRTLMTNTLMKDQPTLAVTFVDNHDTEPGQALQSWVDPWFKPLAYAFILTRQEGYPCVFYGDYYGIPQYNIPSLKSKIDPLLIARRDYAYGTQHDYLDHSDIIGWTREGVTEKPGSGLAALITDGPGGSKWMYVGKQHAGKVFYDLTGNRSDTVTINSDGWGEFKVNGGSVSVWVPRKTTVS

SEQ ID NO: 17704 - protein, 488 aa, Geobacillus stearothermophilus
AAPFNGTMMQYFEWYLPDDGTLWTKVANEANNLSSLGITALWLPPAYKGTSRSDVGYGVYDLYDLGEFNQKGTVRTKYGTKAQYLQAIQAAHAAGMQVYADVVFDHKGGADGTEWVDAVEVNPSDRNQEISGTYQIQAWTKFDFPGRGNTYSSFKWRWYHFDGVDWDESRKLSRIYKFRGIGKAWDWEVDTENGNYDYLMYADLDMDHPEVVTELKNWGKWYVNTTNIDGFRLDAVKHIKFQFFPDWLSYVRSQTGKPLFTVGEYWSYDINKLHNYITKTNGTMSLFDAPLHNKFYTASKSGGAFDMRTLMTNTLMKDQPTLAVTFVDNHDTEPGQALQSWVDPWFKPLAYAFILTREEGYPCVFYGDYYGIPQYNIPSLKSKIDPLLIARRDYAYGTQHDYLDHSDIIGWTREGVTEKPGSGLAALITDGPGGSKWMYVGKQHAGKVFYDLTGNRSDTVTINSDGWGEFKVNGGSVSVWVPRKTTVS

SEQ ID NO: 17705 - protein, 488 aa, Geobacillus thermoleovorans
AAPFNGTMMQYFEWYLPDDGTLWTKVANEANNLSSLGITALWLPPAYKGTSRSDVGYGVYDLYDLGEFNQKGTVRTKYGTKAQYLQAIQAAHAAGMQVYADVVFDHKGGADGTEWVDAVEVNPSDRNQEISGTYQIQAWTKFDFPGRGNTYSSFKWRWYHFDGVDWDESRKLSRIYKFRGIGKAWDWEVDTENGNYDYLMYADLDMDHPEVVTELKNWGKWYVNTTNIDGFRLDAVKHIKFSFFPDWLSYVRSQTGKPLFTVGEYWSYDINKLHNYITKTNGTMSLFDAPLHSKFYTASKSGGAFDMRTLMTNTLMKDQPTLAVTFVDNHDTEPVQALQSWVDPWFKPLAYAFILTRQEGYPCVFYGDYYGIPQYNIPSLKSKIDPLLIARRDYAYGTQHDYLDHSDIIGWTREGVTEKPGSGLAALITDGPGGSKWMYVGKQHAGKVFYDLTGNRSDTVTINSDGWGEFKVNGGSVSVWVPRKTTVS

SEQ ID NO: 17706 - protein, 488 aa, Geobacillus stearothermophilus
AAPFNGTMMQYFEWYLPDDGTLWTKVANEANNLSSLGITALWLPPAYKGTSRSDVGYGVYDLYDLGEFNQKGTVRTKYGTKAQYLQAIQAAHAAGMQVYADVVFDHKGGADGTEWVDAVEVNPSDRNQEISGTYQIQAWTKFDFPGRGNTYSSFKWRWYHFDGVDWDESRKLSRIYKFRGIGKAWDWEVDTENGNYDYLMYADLDMDHPEVVTELKNWGKWYVNTTNIDGFRLDAVKHIKFSFFPDWLSYVRSQTGKPLFTVGEYWSYDINKLHNYITKTNGTMSLFDAPLHNKFYTASKSGGAFDMRTLMTNTLMKDQPTLAVTFVDNHDTEPGQALQSWVDPWFKPLAYAFILTREEGYPCVFYGDYYGIPQYNIPSLKSKIDPLLIARRDYAYGTQHDYLDHSDIIGWTREGVTEKPGSGLAALITDGPGGSKWMYVGKEHAGKVFYDLTGNRSDTVTINSDGWGEFKVNGGSVSVWVPRKTTVS

SEQ ID NO: 17707 - protein, 486 aa, Geobacillus stearothermophilus
AAPFNGTMMQYFEWYLPDDGTLWTKVANEANNLSSLGITALWLPPAYKGTSRSDVGYGVYDLYDLGEFNQKGTVRTKYGTKAQYLQAIQAAHAAGMQVYADVVFDHKGGADGTEWVDAVEVNPSDRNQVISGTYQIQAWTKFDFPGRGNTYSSFKWRWYHFDGVDWDESRKLSRIYLFEGKAWDWEVDTEFGNYDYLMYADLDMDHPEVVTELKNWGKWYVNTTNIDGFRLDAVKHIKFSFFPDWLSYVRSQTGKPLFTVGEYWSYDINKLHNYITKTNGTMSLFDAPLHNKFYTASKSGGAFDMRTLMTNTLMKDQPTLAVTFVDNHDTEPGQALQSWVDPWFKPLAYAFILTRQEGYPCVFYGDYYGIPQYNIPSLKSKIDPLLIARRDYAYGTQHDYLDHSDIIGWTREGVTEKPGSGLAALITDGPGGSKWMYVGKQHAGKVFYDLTGNRSDTVTINSDGWGEFKVNGGSVSVWVPRKTTVS

SEQ ID NO: 17708 - protein, 488 aa, Geobacillus stearothermophilus
AAPFNGTMMQYFEWYLPDDGTLWTKVANEANNLSSLGITALWLPPAYKGTSRSDVGYGVYDLYDLGEFNQKGTVRTKYGTKAQYLQAIQAAHAAGMEVYADVVFDHKGGADGTEWVDAVEVNPSDRNQEISGTYQIQAWTKFDFPGRGNTYSSFKWRWYHFDGVDWDESRKLSRIYKFRGIGKAWDWEVDTENGNYDYLMYADLDMDHPEVVTELKNWGKWYVNTTNIDGFRLDAVKHIKFSFFPDWLSYVRSQTGKPLFTVGEYWSYDINKLHNYITKTNGTMSLFDAPLHNKFYTASKSGGAFDMRTLMTNTLMKDQPTLAVTFVDNHDTEPGQALQSWVDPWFKPLAYAFILTREEGYPCVFYGDYYGIPQYNIPSLKSKIDPLLIARRDYAYGTQHDYLDHSDIIGWTREGVTEKPGSGLAALITDGPGGSKWMYVGKQHAGKVFYDLTGNRSDTVTINSDGWGEFKVNGGSVSVWVPRKTTVS

SEQ ID NO: 17709 - protein, 483 aa, Bacillus sp.
HHNGTNGTMMQYFEWHLPNDGNHWNRLRDDASNLRNRGITAIWIPPAWKGTSQNDVGYGAYDLYDLGEFNQKGTVRTKYGTRSQLESAIHALKNNGVQVYGDVVMNHKGGADATENVLAVEVNPNNRNQEISGDYTIEAYTKFDFPGRGNTYSDFKWRWYHFDGVDWDQSRQFQNRIYKFRGKAWDWEVDSEFGNYDYLMYADYDMDHPEVVNELRRWGEWYTNTLNLDGFRIDAVKHIKFSFTRDWLTHVRNATGKGMFAVAEFWKNDLGALENYLNKTNWNHSVFDVPLHYNLYNASNSGGNYDMAKLLNGTVVQKHPMHAVTFVDNHDSQPGESLESFVQEWFKPLAYALILTREQGYPSVFYGDYYGIPTHSVPAMKAKIDPILEARQNFAYGTQHDYFDHHNIIGWTREGNTTHPNSGLATIMSDGPGGEKWMYVGQNKAGQVWHDITGNKPGTVTINADGWANFSVNGGSVSIWVKR

SEQ ID NO: 17710 - protein, 483 aa, Bacillus sp.
HHNGTNGTMMQYFEWHLPNDGNHWNRLRDDASNLRNRGITAIWIPPAWKGTSQNDVGYGAYDLYDLGEFNQKGTVRTKYGTRSQLESAIHALKNNGVQVYGDVVMNHKGGADATENVLAVEVNPNNRNQEISEDYTIEAWTKFDFPGRRNTYSDFKWRWYHFDGVDWDQSRQFQNRIYKFRGKAWDWEVDSENGYYDYLMYAFVDLDHPEVVNELRRWGEWYTNTLNLDGFRIDAVKHIKYSFTRDWLTHVRNATGKEMFAVAEFWKNDLGALENYLNKTNWNHSVFDVPLHYNLYNASNSGGNYDMAKLLNGTVVQKHPMHAVTFVDNHDSQPGESLESFVQEWFKPLAYALILTREQGYPSVFYGDYYGIPTHSVPAMKAKIDPILEARQNFAYGTQHDYFDHHNIIGWTREGNTTHPNSGLATIMSDGPGGEKWMYVGQNKAGQVWHDITGNKPGTVTINADGWANFSVNGGSVSIWVKR

SEQ ID NO: 17711 - protein, 485 aa, Bacillus sp.
HHNGTNGTMMQYFEWHLPNDGNHWNRLRDDASNLRNRGITAIWIPPAWKGTSQNDVGYGAYDLYDLGEFNQKGTVRTKYGTRSQLESAIHALKNNGVQVYGDVVMNHKGGADATENVLAVEVNPNNRNQEISGDYTIEAWTKFDFPERRNTYSDFKWRWYHFDGVDWDQSRQFQNRIYKFRGXXKAWDWEVDSEFGNNDYLMYADLDMDHPEVVNELRRWGEWYTNTLNLDGFRIDAVKHIKYSFTRDWLTHVRNATGKEMFAVAEFWKNDLGALENYLNKTNWNHSVFDVPLHYNLYNASNSGGNYDMAKLLNGTVVQKHPMHAVTFVDNHDSQPGESLESFVQEWFKPLAYALILTREQGYPSVFYGDYYGIPTHSVPAMKAKIDPILEARQNFAYGTQHDYFDHHNIIGWTREGNTTHPNSGLATIMSDGPGGEKWMYVGQNKAGQVWHDITGNKPGTVTINADGWANFSVNGGSVSIWVKR

SEQ ID NO: 17712 - protein, 485 aa, Bacillus sp.
HHNGTNGTMMQYFEWHLPNDGNHWNRLRDDASNLRNRGITAIWIPPAWKGTSQNDVGYGAYDLYDLGEFNQKGTVRTKYGTRSQLESAIHALKNNGVQVYGDVVMNHKGGADATENVLAVEVNPNNRNQEISGDYTIEAWTKFDFPGRGNTYSDFKWRWYHFDGVDWDQSRQFQNRIYKFRGDGKAWDWEVDSEFGNYDYLMYADYDMDHPEVVNELRRWGEWYTNTLNLDGFRIDAVKHIKFSFTRDWLTHVRNATGKGMFAVAEFWKNDLGALENYLNKTNDNHSVFDVPLHYNLYNASNSGGNYDMAKLLNGTVVQKHPMHAVTFVDNHDSQPGESLESFVQEWFKPLAYALILTREQGYPSVFYGDYYGIPTHSVPAMKAKIDPILEARQNFAYGTQHDYFDHHNIIGWTREGNTTHPNSGLATIMSDGPGGEKWMYVGQNKAGQVWHDITGNKPGTVTINADGWANFSVNGGSVSIWVKR

SEQ ID NO: 17713 - protein, 483 aa, Bacillus sp.
HHNGTNGTMMQYFEWHLPNDGNHWNRLRDDASNLRNRGITAIWIPPAWKGTSQNDVGYGAYDLYDLGEFNQKGTVRTKYGTRSQLESAIHALKNNGVQVYGDVVMNHKGGADATETVLAVEVNPNNRNQEISEDYTIEAWTRFDFPGRGNTYSDFKWRWYHFDGVDWDQSRQFQNRIYKFRGKAWDWEVDSENGNYDNLMYADVDLDHPEVVNELRRWGEWYTNTLNLDGFRIDAVKHIKYSFTRDWLTHVRNATGKEMFAVAEFWKNDLGALENYLNKTNWNHSVFDVPLHYNLYNASNSGGNYDMAKLLNGTVVQKHPMHAVTFVDNHDSQPGESLESFVQEWFKPLAYALILTREQGYPSVFYGDYYGIPTHSVPAMKAKIDPILEARQNFAYGTQHDYFDHHNIIGWTREGNTTHPNSGLATIMSDGPGGEKWMYVGQNKAGQVWHDITGNKPGTVTINADGWANFSVNGGSVSIWVKR

SEQ ID NO: 17714 - protein, 483 aa, Bacillus sp.
HHNGTNGTMMQYFEWHLPNDGNHWNRLRDDASNLRNRGITAIWIPPAWKGTSQNDVGYGAYDLYDLGEFNQKGTVRTKYGTRSQLESAIHALKNNGVQVYGDVVMNHKGGADATENVLAVEVNPNNRNQEISGDYTIEAWTKFDFPERGNTHSDFKWRWYHFDGVDWDESRQFQNRIYKFRGKAWDWEVDSENGNYDNLMYADVDLDHPEVVNELRRWGEWYTNTLNLDGFRIDAVKHIKYSFTRDWLTHVRNATGKEMFAVAEFWKNDLGALENYLNKTNWNHSVFDVPLHYNLYNASNSGGNYDMAKLLNGTVVQKHPMHAVTFVDNHDSQPGESLESFVQEWFKPLAYALILTREQGYPSVFYGDYYGIPTHSVPAMKAKIDPILEARQNFAYGTQHDYFDHHNIIGWTREGNTTHPNSGLATIMSDGPGGEKWMYVGQNKAGQVWHDITGNKPGTVTINADGWANFSVNGGSVSIWVKR

SEQ ID NO: 17715 - protein, 483 aa, Bacillus sp.
HHNGTNGTMMQYFEWHLPNDGNHWNRLRDDASNLRNRGITAIWIPPAWKGTSQNDVGYGAYDLYDLGEFNQKGTVRTKYGTRSQLESAIHALKNNGVQVYGDVVMNHKGGADATENVLAVEVNPNNRNQEISGDYTIEAWTKFDFPGRGNRYSDFKWRWYHFDGVDWDQSRQFQNRIYKFRGKAWDWEVDSENGNYDYLMYADVDMDYPEVVNELRRWGEWYTNTLNLDGFRIDAVKHIKYSFTRDWLTHVRNATGKEMFAVAEFWKNDLGALENYLNKTNWNHSVFDVPLHYNLYNASNSGGNYDMAKLLNGTVVQNHPMHAVTFVDNHDSQPGESLESFVQEWFKPLAYALILTIEQGYPSVFYGDYYGIPTHSVPAMKAKIDPILEARQNFAYGTQHDYFDHHNIIGWTREGDTTHPNSGLATIMSDGPGGEKWMYVGQNKAGQVWHDITGNKPGTVTINADGWANFSVNGGSVSIWVKR

SEQ ID NO: 17716 - protein, 483 aa, Bacillus sp.
HHNGTNGTMMQYFEWHLPNDGNHWNRLRDDASNLRNRGITAIWIPPAWKGTSQNDVGYGAYDLYDLGEFNQKGTVRTKYGTRSQLESAIHALKNNGVQVYGDVVMNHKGGADATENVLAVEVNPNNRNQEISGDYTIEAWTKFDFPERRNTYSDFKWRWYHFDGVDWDQSRQFQNRIYKFRGKAWDWEVDSEFGNNDYLMYADLDMDHPEVVNELRRWGEWYTNTLNLDGFRIDAVKHIKYSFTRDWLTHVRNATGKEMFAVAEFWKNDLGALENYLNKTNWNHSVFDVPLHYNLYNASNSGGNYDMAKLLNGTVVQKHPMHAVTFVDNHDSQPGESLESFVQEWFKPLAYALILTREQGYPSVFYGDYYGIPTHSVPAMKAKIDPILEARQNFAYGTQHDYFDHHNIIGWTREGNTTHPNSGLATIMSDGPGGEKWMYVGQNKAGQVWHDITGNKPGTVTINADGWANFSVNGGSVSIWVKR

SEQ ID NO: 17717 - protein, 485 aa, Bacillus sp.
HHNGTNGTMMQYFEWHLPNDGNHWNRLRDDASNLRNRGITAIWIPPAWKGTSQNDVGYGAYDLYDLGEFNQKGTVRTKYGTRSQLESAIHALKNNGVQVYGDVVMNHKGGADATENVLAVEVNPNNRNQEISGDYTIEAWTKFDFPGRGNRYSDFKWRWYHFDGVDWDQSRQFQNRIYKFRGXXKAWDWEVDSENGNYDYLMYADVDMDYPEVVNELRRWGEWYTNTLNLDGFRIDAVKHIKYSFTRDWLTHVRNATGKEMFAVAEFWKNDLGALENYLNKTNWNHSVFDVPLHYNLYNASNSGGNYDMAKLLNGTVVQNHPMHAVTFVDNHDSQPGESLESFVQEWFKPLAYALILTIEQGYPSVFYGDYYGIPTHSVPAMKAKIDPILEARQNFAYGTQHDYFDHHNIIGWTREGDTTHPNSGLATIMSDGPGGEKWMYVGQNKAGQVWHDITGNKPGTVTINADGWANFSVNGGSVSIWVKR

SEQ ID NO: 17718 - protein, 485 aa, Bacillus sp.
HHNGTNGTMMQYFEWHLPNDGNHWNRLRDDASNLRNRGITAIWIPPAWKGTSQNDVGYGAYDLYDLGEFNQKGTVRTKYGTRSQLESAIHALKNNGVQVYGDVVMNHKGGADATENVLAVEVNPNNRNQEISGDYTIEAYTKFDFPGRGNTYSDFKWRWYHFDGVDWDQSRQFQNRIYKFRGDGKAWDWEVDSEFGNYDYLMYADYDMDHPEVVNELRRWGEWYTNTLNLDGFRIDAVKHIKFSFTRDWLTHVRNATGKEMFAVAEFWKNDLGALENYLNKTNDNHSVFDVPLHYNLYNASNSGGNYDMAKLLNGTVVQKHPMHAVTFVDNHDSQPGESLESFVQEWFKPLAYALILTREQGYPSVFYGDYYGIPTHSVPAMKAKIDPILEARQNFAYGTQHDYFDHHNIIGWTREGNTTHPNSGLATIMSDGPGGEKWMYVGQNKAGQVWHDITGNKPGTVTINADGWANFSVNGGSVSIWVKR

SEQ ID NO: 17719 - protein, 483 aa, Bacillus sp.
HHNGTNGTMMQYFEWHLPNDGNHWNRLRDDASNLRNRGITAIWIPPAWKGTSQNDVGYGAYDLYDLGEFNQKGTVRTKYGTRSQLESAIHALKNNGVQVYGDVVMNHKGGADATENVLAVEVNPNNRNQEISGDYTIEAWTKFDFPGRGNTYSDFKWRWYHFDGVDWDQSRQFQNRIYKFRGKAWDWEVDSEFGNYDYLMYADYDMDHPEVVNELRRWGEWYTNTLNLDGFRIDAVKHIKFSFTRDWLTHVRNATGKEMFAVAEFWKNDLGALENYLNKTNWNHSVFDVPLHYNLYNASNSGGNYDMAKLLNGTVVQKHPMHAVTFVDNHDSQPGESLESFVQEWFKPLAYALILTREQGYPSVFYGDYYGIPTHSVPAMKAKIDPILEARQNFAYGTQHDYFDHHNIIGWTREGNTTHPNSGLATIMSDGPGGEKWMYVGQNKAGQVWHDITGNKPGTVTINADGWANFTVNRGSVSIWVKR

SEQ ID NO: 17720 - protein, 483 aa, Bacillus sp.
HHNGTNGTMMQYFEWHLPNDGNHWNRLRDDASNLRNRGITAIWIPPAWKGTSQNDVGYGAYDLYDLGEFNQKGTVRTKYGTRSQLESAIHALKNNGVQVYGDVVMNHKGGADATENVLAVEVNPNNRNQEISGDYTIEAWTKFDFPGRGNTYSDFKWRWYHFDGVDWDQSRQFQNRIYKFRGKAWDWEVDSEFGNYDYLMYADYDMDHPEVVNELRRWGEWYTNTLNLDGFRIDAVKHIKFSFTRDWLTHVRNATGKNMFAVAEFWKNDLVALENYLNKTNWNHSVFDVPLHYNLYNASNSGGNYDMAKLLNGTVVQKHPMHAVTFVDNHDSQPGESLESFVQEWFKPLAYALILTREQGYPSVFYGDYYGIPTHSVPAMKAKIDPILEARQNFAYGTQHDYFDHHNIIGWTREGNTTHPNSGLATIMSDGPGGEKWMYVGQNKAGQVWHDITGNKPGTVTINADGWANFSVNGGSVSIWVKR

SEQ ID NO: 17721 - protein, 485 aa, Bacillus sp.
HHNGTNGTMMQYFEWHLPNDGNHWNRLRDDASNLRNRGITAIWIPPAWKGTSQNDVGYGAYDLYDLGEFNQKGTVRTKYGTRSQLESAIHALKNNGVQVYGDVVMNHKGGADATENVLAVEVNPNNRNQEISEDYTIEAWTKFDFPGRRNTYSDFKWRWYHFDGVDWDQSRQFQNRIYKFRGXXKAWDWEVDSEYGNYDYLMFADLDMDHPEVVNELRRWGEWYTNTLNLDGFRIDAVKHIKYSFTRDWLTHVRNATGKEMFAVAEFWKNDLGALENYLNKTNWNHSVFDVPLHYNLYNASNSGGNYDMAKLLNGTVVQKHPMHAVTFVDNHDSQPGESLESFVQEWFKPLAYALILTREQGYPSVFYGDYYGIPTHSVPAMKAKIDPILEARQNFAYGTQHDYFDHHNIIGWTREGNTTHPNSGLATIMSDGPGGEKWMYVGQNKAGQVWHDITGNKPGTVTINADGWANFSVNGGSVSIWVKR

SEQ ID NO: 17722 - protein, 483 aa, Bacillus sp.
HHNGTNGTMMQYFEWHLPNDGNHWNRLRDDASNLRNRGITAIWIPPAWKGTSQNDVGYGAYDLYDLGEFNQKGTVRTKYGTRSQLESAIHALKNNGVQVYGDVVMNHKGGADATENVLAVEVNPNNRNQEISGDYTIEAWTKFDFPGRGNTYSDFKWRWYHFDGVDWDQSRQFQNRIYKFRGKAWDWEVDSEFGNYDYLMYADYDMDHPEVVNELRRWGEWYTNTLNLDGFRIDAVKHIKFSFTRDWLTHVRNATGKKMFAVAEFWKNDLDALENYLNKTNWNHSVFDVPLHYNLYNASNSGGNYDMAKLLNGTVVQKHPMHAVTFVDNHDSQPGESLESFVQEWFKPLAYALILTREQGYPSVFYGDYYGIPTHSVPAMKAKIDPILEARQNFAYGTQHDYFDHHNIIGWTREGNTTHPNSGLATIMSDGPGGEKWMYVGQNKAGQVWHDITGNKPGTVTINADGWANFSVNGGSVSIWVKR

SEQ ID NO: 17723 - protein, 483 aa, Bacillus sp.
HHNGTNGTMMQYFEWHLPNDGNHWNRLRDDASNLRNRGITAIWIPPAWKGTSQNDVGYGAYDLYDLGEFNQKGTVRTKYGTRSQLESAIHALKNNGVQVYGDVVMNHKGGADATENVLAVEVNPNNRNQEISGDYTIEAWTKFDFPERGNTHSDFKWRWYHFDGVDWDESRQFQNRIYKFRGKAWDWEVDSENGNNDYLMYADLDMDHPEVVNELRRWGEWYTNTLNLDGFRIDAVKHIKYSFTRDWLTHVRNATGKEMFAVAEFWKNDLGALENYLNKTNWNHSVFDVPLHYNLYNASNSGGNYDMAKLLNGTVVQKHPMHAVTFVDNHDSQPGESLESFVQEWFKPLAYALILTREQGYPSVFYGDYYGIPTHSVPAMKAKIDPILEARQNFAYGTQHDYFDHHNIIGWTREGNTTHPNSGLATIMSDGPGGEKWMYVGQNKAGQVWHDITGNKPGTVTINADGWANFSVNGGSVSIWVKR

SEQ ID NO: 17724 - protein, 483 aa, Bacillus sp.
HHNGTNGTMMQYFEWHLPNDGNHWNRLRDDASNLRNRGITAIWIPPAWKGTSQNDVGYGAYDLYDLGEFNQKGTVRTKYGTRSQLESAIHALKNNGVQVYGDVVMNHKGGADATENVLAVEVNPNNRNQEISEDYTIEAWTKFDFPGRRNTYSDFKWRWYHFDGVDWDQSRQFQNRIYKFRGKAWDWEVDSEYGNYDYLMFADLDMDHPEVVNELRRWGEWYTNTLNLDGFRIDAVKHIKYSFTRDWLTHVRNATGKEMFAVAEFWKNDLGALENYLNKTNWNHSVFDVPLHYNLYNASNSGGNYDMAKLLNGTVVQKHPMHAVTFVDNHDSQPGESLESFVQEWFKPLAYALILTREQGYPSVFYGDYYGIPTHSVPAMKAKIDPILEARQNFAYGTQHDYFDHHNIIGWTREGNTTHPNSGLATIMSDGPGGEKWMYVGQNKAGQVWHDITGNKPGTVTINADGWANFSVNGGSVSIWVKR

SEQ ID NO: 17725 - protein, 483 aa, Bacillus sp.
HHNGTNGTMMQYFEWHLPNDGNHWNRLRDDASNLRNRGITAIWIPPAWKGTSQNDVGYGAYDLYDLGEFNQKGTVRTKYGTRSQLESAIHALKNNGVQVYGDVVMNHKGGADATETVLAVEVNPNNRNQEISEDYTIEAWTRFDFPGRGNTYSDFKWRWYHFDGVDWDQSRQFQNRIYKFRGKAWDWEVDSENGNNDYLMYADLDMDHPEVVNELRRWGEWYTNTLNLDGFRIDAVKHIKYSFTRDWLTHVRNATGKEMFAVAEFWKNDLGALENYLNKTNWNHSVFDVPLHYNLYNASNSGGNYDMAKLLNGTVVQKHPMHAVTFVDNHDSQPGESLESFVQEWFKPLAYALILTREQGYPSVFYGDYYGIPTHSVPAMKAKIDPILEARQNFAYGTQHDYFDHHNIIGWTREGNTTHPNSGLATIMSDGPGGEKWMYVGQNKAGQVWHDITGNKPGTVTINADGWANFSVNGGSVSIWVKR

SEQ ID NO: 17726 - protein, 483 aa, Bacillus sp.
HHNGTNGTMMQYFEWHLPNDGNHWNRLRDDASNLRNRGITAIWIPPAWKGTSQNDVGYGAYDLYDLGEFNQKGTVRTKYGTRSQLESAIHALKNNGVQVYGDVVMNHKGGADATENVLAVEVNPNNRNQEISGDYTIEAYTKFDFPGRGNTYSDFKWRWYHFDGVDWDQSRQFQNRIYKFRGKAWDWEVDSEFGNYDYLMYADYDMDHPEVVNELRRWGEWYTNTLNLDGFRIDAVKHIKFSFTRDWLTHVRNATGKEMFAVAEFWKNDLGALENYLNKTNDNHSVFDVPLHYNLYNASNSGGNYDMAKLLNGTVVQKHPMHAVTFVDNHDSQPGESLESFVQEWFKPLAYALILTREQGYPSVFYGDYYGIPTHSVPAMKAKIDPILEARQNFAYGTQHDYFDHHNIIGWTREGNTTHPNSGLATIMSDGPGGEKWMYVGQNKAGQVWHDITGNKPGTVTINADGWANFSVNGGSVSIWVKR

SEQ ID NO: 17727 - protein, 483 aa, Bacillus sp.
HHNGTNGTMMQYFEWHLPNDGNHWNRLRDDASNLRNRGITAIWIPPAWKGTSQNDVGYGAYDLYDLGEFNQKGTVRTKYGTRSQLESAIHALKNNGVQVYGDVVMNHKGGADATENVLAVEVNPNNRNQEISGDYTIEAWTKFDFPERRNTYSDFKWRWYHFDGVDWDQSRQFQNRIYKFRGKAWDWEVDSENGFYDNLMYADVDLDHPEVVNELRRWGEWYTNTLNLDGFRIDAVKHIKYSFTRDWLTHVRNATGKEMFAVAEFWKNDLGALENYLNKTNWNHSVFDVPLHYNLYNASNSGGNYDMAKLLNGTVVQKHPMHAVTFVDNHDSQPGESLESFVQEWFKPLAYALILTREQGYPSVFYGDYYGIPTHSVPAMKAKIDPILEARQNFAYGTQHDYFDHHNIIGWTREGNTTHPNSGLATIMSDGPGGEKWMYVGQNKAGQVWHDITGNKPGTVTINADGWANFSVNGGSVSIWVKR

SEQ ID NO: 17728 - protein, 485 aa, Bacillus sp.
HHNGTNGTMMQYFEWHLPNDGNHWNRLRDDASNLRNRGITAIWIPPAWKGTSQNDVGYGAYDLYDLGEFNQKGTVRTKYGTRSQLESAIHALKNNGVQVYGDVVMNHKGGADATENVLAVEVNPNNRNQEISGDYTIEAWTKFDFPERGNTHSDFKWRWYHFDGVDWDESRQFQNRIYKFRGXXKAWDWEVDSENGNNDYLMYADLDMDHPEVVNELRRWGEWYTNTLNLDGFRIDAVKHIKYSFTRDWLTHVRNATGKEMFAVAEFWKNDLGALENYLNKTNWNHSVFDVPLHYNLYNASNSGGNYDMAKLLNGTVVQKHPMHAVTFVDNHDSQPGESLESFVQEWFKPLAYALILTREQGYPSVFYGDYYGIPTHSVPAMKAKIDPILEARQNFAYGTQHDYFDHHNIIGWTREGNTTHPNSGLATIMSDGPGGEKWMYVGQNKAGQVWHDITGNKPGTVTINADGWANFSVNGGSVSIWVKR

SEQ ID NO: 17729 - protein, 485 aa, Bacillus sp.
HHNGTNGTMMQYFEWHLPNDGNHWNRLRDDASNLRNRGITAIWIPPAWKGTSQNDVGYGAYDLYDLGEFNQKGTVRTKYGTRSQLESAIHALKNNGVQVYGDVVMNHKGGADATENVLAVEVNPNNRNQEISGDYTIEAWTKFDFPGRGNTYSDFKWRWYHFDGVDWDQSRQFQNRIYKFRGDGKAWDWEVDSEFGNYDYLMYADYDMDHPEVVNELRRWGEWYTNTLNLDGFRIDAVKHIKFSFTRDWLTHVRNATGKKMFAVAEFWKNDLGALENYLNKTNDNHSVFDVPLHYNLYNASNSGGNYDMAKLLNGTVVQKHPMHAVTFVDNHDSQPGESLESFVQEWFKPLAYALILTREQGYPSVFYGDYYGIPTHSVPAMKAKIDPILEARQNFAYGTQHDYFDHHNIIGWTREGNTTHPNSGLATIMSDGPGGEKWMYVGQNKAGQVWHDITGNKPGTVTINADGWANFSVNGGSVSIWVKR

SEQ ID NO: 17730 - protein, 483 aa, Bacillus sp.
HHNGTNGTMMQYFEWHLPNDGNHWNRLRDDASNLRNRGITAIWIPPAWKGTSQNDVGYGAYDLYDLGEFNQKGTVRTKYGTRSQLESAIHALKNNGVQVYGDVVMNHKGGADATENVLAVEVNPNNRNQEISGDYTIEAWTKFDFPGRGNRYSDFKWRWYHFDGVDWDQSRQFQNRIYKFRGKAWDWEVDSENGNYDYLMYADVDMDHPYVVNELRRWGEWYTNTLNLDGFRIDAVKHIKYSFTRDWLTHVRNATGKEMFAVAEFWKNDLGALENYLNKTNWNHSVFDVPLHYNLYNASNSGGNYDMAKLLNGTVVQKHNMHAVTFVDNHDSQPGESLESFVQEWFKPLAYALILTREIGYPSVFYGDYYGIPTHSVPAMKAKIDPILEARQNFAYGTQHDYFDHHNIIGWTREGNTDHPNSGLATIMSDGPGGEKWMYVGQNKAGQVWHDITGNKPGTVTINADGWANFSVNGGSVSIWVKR

SEQ ID NO: 17731 - protein, 485 aa, Bacillus sp.
HHNGTNGTMMQYFEWHLPNDGNHWNRLRDDASNLRNRGITAIWIPPAWKGTSQNDVGYGAYDLYDLGEFNQKGTVRTKYGTRSQLESAIHALKNNGVQVYGDVVMNHKGGADATENVLAVEVNPNNRNQEISGDYTIEAYTKFDFPGRGNTYSDFKWRWYHFDGVDWDQSRQFQNRIYKFRGDGKAWDWEVDSEFGNYDYLMYADYDMDHPEVVNELRRWGEWYTNTLNLDGFRIDAVKHIKFSFTRDWLTHVRNATGKGMFAVAEFWKNDLGALENYLNKTNWNHSVFDVPLHYNLYNASNSGGNYDMAKLLNGTVVQKHPMHAVTFVDNHDSQPGESLESFVQEWFKPLAYALILTREQGYPSVFYGDYYGIPTHSVPAMKAKIDPILEARQNFAYGTQHDYFDHHNIIGWTREGNTTHPNSGLATIMSDGPGGEKWMYVGQNKAGQVWHDITGNKPGTVTINADGWANFSVNGGSVSIWVKR

SEQ ID NO: 17732 - protein, 483 aa, Bacillus sp.
HHNGTNGTMMQYFEWHLPNDGNHWNRLRDDASNLRNRGITAIWIPPAWKGTSQNDVGYGAYDLYDLGEFNQKGTVRTKYGTRSQLESAIHALKNNGVQVYGDVVMNHKGGADATENVLAVEVNPNNRNQEISGDYTIEAWTKFDFPGRGNTYSDFKWRWYHFDGVDWDQSRQFQNRIYKFRGKAWDWEVDSEFGNYDYLMYADYDMDHPEVVNELRRWGEWYTNTLNLDGFRIDAVKHIKFSFTRDWLTHVRNATGKGMFAVAEFWKNDLGALENYLNKTNDNHSVFDVPLHYNLYNASNSGGNYDMAKLLNGTVVQKHPMHAVTFVDNHDSQPGESLESFVQEWFKPLAYALILTREQGYPSVFYGDYYGIPTHSVPAMKAKIDPILEARQNFAYGTQHDYFDHHNIIGWTREGNTTHPNSGLATIMSDGPGGEKWMYVGQNKAGQVWHDITGNKPGTVTINADGWANFSVNGGSVSIWVKR

SEQ ID NO: 17733 - protein, 483 aa, Bacillus sp.
HHNGTNGTMMQYFEWHLPNDGNHWNRLRDDASNLRNRGITAIWIPPAWKGTSQNDVGYGAYDLYDLGEFNQKGTVRTKYGTRSQLESAIHALKNNGVQVYGDVVMNHKGGADATENVLAVEVNPNNRNQEISGDYTIEAWTKFDFPGRGNTYSDFKWRWYHFDGVDWDQSRQFQNRIYKFRGKAWDWEVDSEFGNYDYLMYADYDMDHPEVVNELRRWGEWYTNTLNLDGFRIDAVKHIKFSFTRDWLTHVRNATGKKMFAVAEFWKNDLGALENYLNKTNDNHSVFDVPLHYNLYNASNSGGNYDMAKLLNGTVVQKHPMHAVTFVDNHDSQPGESLESFVQEWFKPLAYALILTREQGYPSVFYGDYYGIPTHSVPAMKAKIDPILEARQNFAYGTQHDYFDHHNIIGWTREGNTTHPNSGLATIMSDGPGGEKWMYVGQNKAGQVWHDITGNKPGTVTINADGWANFSVNGGSVSIWVKR

SEQ ID NO: 17734 - protein, 483 aa, Bacillus amyloliquefaciens
VNGTLMQYFEWYTPNDGQHWKRLQNDAEHLSDIGITAVWIPPAYKGLSQSDNGYGPYDLYDLGEFQQKGTVRTKYGTKSELQDAIGSLHSRNVQVYGDVVLNHKAGADATEDVTAVEVNPANRNQETSEEYQIKAWTDFRFPGRGNTYSDFKWHWYHFDGADRDEPRKISRIFKFRGEGKAWDWEVSSENGNYDYLMYADVDYDHPDVVAETKKWGIWYANELSLDGFRIDAAKHIKFSFLRDWVQAVRQATGKEMFTVAEYWQNNAGKLENYLNKTSFNQSVFDVPLHFNLQAASSQGGGYDMRRLLDGTVVSRHPEKAVTFVDNHDTQPGQSLESTVQTWFKPLAYAFILTRESGYPQVFYGDMYGTKGTSPKGIPSLKDSIEPILKARKEYAYGPQHDYIDHPDVIGWTREGDSSAAKSGLAALITDGPGGSKRMYAGLKNAGETWYDITGNRSDTVKIGSDGWGEFHVNDGSVSIYVQK

SEQ ID NO: 17735 - protein, 483 aa, Bacillus amyloliquefaciens
VNGTLMQYFEWYTPNDGQHWKRLQNDADHLSDIGITAVWIPPAYKGLSQSDNGYGPYDLYDLGEFQQKGTVRTKYGTKSELQDAIGSLHSRNVQVYGDVVLNHKAGADATEDVTAVEVNPANRNQETSEEYQIKAWTDFRFPGRGNTYSDFKWHWYHFDGADWDESRKISRIFKFRGEGKAWDWEVDSEFGNYDYLMYADVDYDHPDVVAETKKWGIWYANELSLDGFRIDAAKHIKFSFLRDWVQAVRQATGKEMFTVAEYWQNNAGKLENYLNKTSFNQSVFDIPLHENLQAASSQGGGYDMRRLLDGTVVSRHPEKAVTFVENHDTQPGQSLESTVQTWFKPLAYAFILTRESGYPQVFYGDMYGTKGTSPKEIPSLKDNIEPILKARKEYAYGPQHDYIDHPDVIGWTREGDSSAAKSGLAALITDGPGGSKRMYAGLKNAGETWYDITGNRSDTVKIGSDGWGEFHVNDGSVSIYVQK

SEQ ID NO: 17736 - protein, 482 aa, Bacillus amyloliquefaciens
NGTLMQYFEWYTPNDGQHWKRLQNDAEHLSDIGITAVWIPPAYKGLSQSDNGYGPYDLYDLGEFQQKGTVRTKYGTKSELQDAIGSLHSRNVQVYGDVVLNHKAGADATEDVTAVEVNPANRNQETSEEYQIKAWTDFRFPGRGNTYSDFKWHWYHFDGADWDEPRKISRIFKFRGEGKAWDWEVSSENGNYDYLMYVDVDYDHPDVVAETKKWGIWYANELSLDGFRIDAAKHIKFSFLRDWVQAVRQATGKEMFTVAEYWQNDAGKLENYLNKTSFNQSVFDVPLHFNLQAASSQGGGYDMRRLLDGTVVSRHPEKAVTFVENHDTQPGQSLESTVQTWFKPLAYAFILTRESGYPQVFYGDMYGTKGTSPREIPSLKDSIEPILKARKEYAYGPQHDYIDHPDVIGWTREGDSSAAKSGLAALITDGPGGSKRMYAGLKNAGETWYDITGNRSDTVKIGSDGWGEFHVNDGSVSIYVQK

SEQ ID NO: 17737 - protein, 478 aa, Bacillus amyloliquefaciens
VNGTLMQYFEWYTPNDGQHWKRLQNDAEHLSDIGITAVWIPPAYKGLSQSDNGYGPYDLYDLGEFQQKGTVRTKYGTKSELQDAIGSLHSRNVQVYGDVVLNHKAGADATEDVTAVEVNPANRNQETSEEYQIKAWTDFRFPGRGNTYSDFKWYWYHFDGADWDESRKISRIFKFRGKTWDWEVSSEFGNYDYLMYADVDYDHPDVVVETKKWGIWYANELSLDGFRIDAAKHIKFSFLRDWVQAVRQATGKEMFTVAEYWSNNAGKLENYLNKTSFNQSVFDVPLHFNLQAASSQGGGYDMRRLLDGTVVSRHPEKAVTFVENHDTQPGQSLESTVQTWFKPLAYAFILTRESGYPQVFYGDMYGTKGTSPKEIPSLKDNIEPILKARKEYAYGPQHDYIDHPDVIGWTREGDSSAAKSGLAALITDGPGGSKRMYAGLKNAGETWYDITGNRSDTVKIGSDGWGEFHVNDGSVSIY

SEQ ID NO: 17738 - protein, 479 aa, Aspergillus oryzae
ATPADWRSQSIYFLLTDRFARTDGSTTATCNTADQKYCGGTWQGIIDKLDYIQGMGFTAIWITPVTAQLPQTTAYGDAYHGYWQQDIYSLNENYGTADDLKALSSALHERGMYLMVDVVANHMGYDGAGSSVDYSVFKPFSSQDYFHPFCFIQNYEDQTQVEDCWFTDPAGFSLPDLDTTKDVVKNEWYDWVGSLVSNYSIDGLRIDTVKHVQKDFWPGYNKAAGVYCIGEVLDGDPAYTCPYQNVMDGVLNYPIYYPLLNAFKSTSGSMDDLYNMINTVKSDCPDSTLLGTFVENHDNPRFASYTNDIALAKNVAAFIILNDGIPIIYAGQEQHYAGGNDPANREATWLSGYPTDSELYKLIASANAIRNYAISKDTGFVTYKNWPIYKDDTTIAMRKGTDGSQIVTILSNKGASGDSYTLSLSGAGYTAGQQLTEVIGCTTVTVGSDGNVPVPMAGGLPRVLYPTEKLAGSKICSSS

SEQ ID NO: 17739 - protein, 479 aa, Aspergillus oryzae
ATPADWRSQSIYFLLTDRFARTDGSTTATCNTADKKYCGGTWQGIIDKLDYIQGMGFTAIWITPVTAQLPQTTAAGDAYHGYWQQDIYSLNENYGTADDLKALSSALHERGMYLMVDVVANHMGYDGAGSSVDYSVFKPFSSQDYFHPFCFIQNYEDQTQVEDCWLGDPAGFSLPDLDTTKDVVKNEWYDWVGSLVSNYSIDGLRIDTVKHVQKDFWPGYNKAAGVYCIGEVLDGDPAYTCPYQNVMDGVLNYPIYYPLLNAFKSTSGSMDDLYNMINTVKSDCPDSTLLGTFVENHDNPRFASYTNDIALAKNVAAFIILNDGIPIIYAGQEQHYAGGNDPANREATWLSGYPTDSELYKLIASANAIRNYAISKDTGFVTYKNWPIYKDDTTIAMRKGTDGSQIVTILSNKGASGDSYTLSLSGAGYTAGQQLTEVIGCTTVTVGSDGNVPVPMAGGLPRVLYPTEKLAGSKICSSS

SEQ ID NO: 17740 - protein, 479 aa, Aspergillus oryzae
ATPADWRSQSIYFLLTDRFARTDGSTTATCNTADQKYCGGTWQGIIDKLDYIQGMGFTAIWITPVTAQLPQTTAAGDAYHGYWQQDIYSLNENYGTADDLKALSSALHERGMYLMVDVVANHMGYDGAGSSVDYSVFKPFSSQDYFHPFCFIQNYEDQTQVEDCWLGDPAGFSLPDLDTTKDVVKNEWYDWVGSLVSNYSIDGLRIDTVKHVQKDFWPGYNKAAGVYCIGEVLDDDPAYTCPYQNVMDGVLNYPIYYPLLNAFKSTSGSMDDLYNMINTVKSDCPDSTLLGTFVENHDNPRFASYTNDIALAKNVAAFIILNDGIPIIYAGQEQHYAGGNDPANREATWLSGYPTDSELYKLIASANAIRNYAISKDTGFVTYKNWPIYKDDTTIAMRKGTDGSQIVTILSNKGASGDSYTLSLSGAGYTAGQQLTEVIGCTTVTVGSDGNVPVPMAGGLPRVLYPTEKLAGSKICSSS

SEQ ID NO: 17741 - protein, 516 aa, Geobacillus thermoleovorans
AAAPFNGTMMQYFEWYLPDDGTLWTKVANEANNLSSLGITALWLPPAYKGTSRSDVGYGVYDLYDLGEFNQKGTVRTKYGTKAQYLQAIQAAHAAGMQVYADVVFDHKGGADGTEWVDAVEVNPSDRNQEISGTYQIQAWTKFDFPGRGNTYSSFKWRWYHFDGVDWDESRKLSRIYKFRGIGKAWDWEVDTENGNYDYLMYADLDMDHPEVVTELKNWGKWYVNTTNIDGFRLDAVKHIKFSFFPDWLSYVRSQTGKPLFTVGEYWSYDINKLHNYITKTNGTMSLFDAPLHSKFYTASKSGGAFDMRTLMTNTLMKDQPTLAVTFVDNHDTEPVQALQSWVDPWFKPLAYAFILTRQEGYPCVFYGDYYGIPQYNIPSLKSKIDPLLIARRDYAYGTQHDYLDHSDIIGWTREGVTEKPGSGLAALITDGPGGSKWMYVGKQHAGKVFYDLTGNRSDTVTINSDGWGEFKVNGGSVSVWVPRKTTVSTIAWPITTRPWTGEFVRWTEPRLVAWP

SEQ ID NO: 17742 - protein, 516 aa, unidentified
AAAPFNGTMMQYFEWYLPDDGTLWTKVANEANNLSSLGITALWLPPAYKGTSRSDVGYGVYDLYDLGEFNQKGTVRTKYGTKAQYLQAIQAAHAAGMQVYADVVFDHKGGADGTEWVDAVEVNPSDRNQEISGTYQIQAWTKFDFPGRGNTYSSFKWRWYHFDGVDWDESRKLSRIYKFRGIGKAWDWEVDTENGNYDYLMYADLDMDHPEVVTELKNWGKWYVNTTNIDGFRLDAVKHIKFSFFPDWLSYVRSQTGKPLFTVGEYWSYDINKLHNYITKTNGTMSLFDAPLHNKFYTASKSGGAFDMRTLMTNTLMKDQPTLAVTFVDNHDTEPGQALQSWVDPWFKPLAYAFILTRQEGYPGVFYGDYYGIPQYNIPSLKSKIDPLLIARRDYAYGTQHDYLDHSDIIGWTREGVTEKPGSGLAALITDGPGGSKWMYVGKQHAGKVFYDLTGNRSDTVTITSDGWGEFKVNGGSVSVWVPRKTTVSTITRPITTRPWTGEFVRWTEPRLVAWP

SEQ ID NO: 17743 - protein, 516 aa, Bacillus subtilis
AAAPFNGTMMQYFEWYLPDDGTLWTKVANEANNLSSLGITALWLPPAYKGTSRSDVGYGVYDLYDLGEFNQKGTVRTKYGTKAQYLQAIQAAHAAGMQVYADVVFDHKGGADGTEGVDAVEVNPSDCNQEFSGTYQIQAWTKFDFPGRGNTYSSFKWRWYHFDGVDWDESRKLSRIYKFRGIGKAWDWEVDTENGNYDYLMYADLDMDHPEVVTELKNWGKWYVNTTNIDGFRLDAVKHIKFSFFPDWLSYVRSQTGKPLFTVGEYWSYDINKLHNYITKTDGTMSLFDAPLHNKFYTASKSGGAFDMRTLMTNTLMKDQPTLAVTFGDNHDTEPGQALQSWVDPWFKPLAYAFILTRQEGYPCVFYGDYYGIPQYNIPSLKSKIDPLLIARRDYAYGTQHDYLDHSDIIGWTREGGTEKPGSGLAALITDGPGGSKWMYVGKQHAGKVFYDLTGNRSDTVTINSDGWGEFKVNGGSVSVWVPRKTTVSTITRPITTRPWTGEFVRWTEPRLVAWP

SEQ ID NO: 17744 - protein, 513 aa, Geobacillus stearothermophilus
AAPFNGTMMQYFEWYLPDDGTLWTKVANEANNLSSLGITALWLPPAYKGTSRSDVGYGVYDLYDLGEFNQKGTVRTKYGTKAQYLQAIQAAHAAGMQVYADVVFDHKGGADGTEWVDAVEVNPSDRNQEISGTYQIQAWTKFDFPGRGNTYSSFKWRWYHFDGVDWDESRKLSRIYKFRGKAWDWEVDTEFGNYDYLMYADLDMDHPEVVTELKNWGPWYVLTTNIDGFRLDAVKHIKFQFFPDWLSYVRSSTGKPLFTVGEYWSYDINKLHNYITKTNGTMSLFDAPLHNKFYTASKSGGAFDMRTLMTNTLMKDQPTLAVTFVDNHDTEPGQALQSWVDPWFKPLAYAFILTRQEGYPCVFYGDYYGIPQYNIPSLKSKIDPLLIARRDYAYGTQHDYLDHSDIIGWTREGVTEKPGSGLAALITDGPGGSKWMYVGKQHAGKVFYDLTGNRSDTVTINSDGWGEFKVNGGSVSVWVPRKTTVSTIARPITTRPWTGEFVRWTEPRLVAWP

SEQ ID NO: 17745 - protein, 513 aa, Geobacillus stearothermophilus
AAPFNGTMMQYFEWYLPDDGTLWTKVANEANNLSSLGITALWLPPAYKGTSRSDVGYGVYDLYDLGEFNQKGTVRTKYGTKAQYLQAIQAAHAAGMQVYADVVFDHKGGADGTEWVDAVEVNPSDRNQVISGTYQIQAWTKFDFPGRGNTYSSFKWRWYHFDGVDWDESRKLSRIYLFEGKAWDWEVDTEFGNYDYLMYADLDMDHPEVVTELKNWGKWYVNTTNIDGFRLDAVKHIKFQFFPDWLSYVRSQTGKPLFTVGEYWSYDINKLHNYITKTNGTMSLFDAPLHNKFYTASKSGGAFDMRTLMTNTLMKDQPTLAVTFVDNHDTEPGQALQSWVDPWFKPLAYAFILTRQEGYPCVFYGDYYGIPQYNIPSLKSKIDPLLIARRDYAYGTQHDYLDHSDIIGWTREGVTEKPGSGLAALITDGPGGSKWMYVGKQHAGKVFYDLTGNRSDTVTINSDGWGEFKVNGGSVSVWVPRKTTVSTIARPITTRPWTGEFVRWTEPRLVAWP

SEQ ID NO: 17746 - protein, 515 aa, Geobacillus stearothermophilus
AAPFNGTMMQYFEWYLPDDGTLWTKVANEANNLSSLGITALWLPPAYKGTSRSDVGYGVYDLYDLGEFNQKGTVRTKYGTKAQYLQAIQAAHAAGMQVYADVVFDHKGGADGTEWVDAVEVNPSDRNQEISGTYQIQAWTKFDFPGRGNTYSSFKWRWYHFDGVDWDESRKLSRIYKFRGIGKAWDWEVDTENGNYDYLMYADLDMDHPEVVTELKNWGKWYVNTTNIDGFRLDAVKHIKFQFFPDWLSYVRSQTGKPLFTVGEYWSYDINKLHNYITKTNGTMSLFDAPLHNKFYTASKSGGAFDMRTLMTNTLMKDEPTLAVTFVDNHDTEPGQALQSWVDPWFKPLAYAFILTREEGYPCVFYGDYYGIPQYNIPSLKSKIDPLLIARRDYAYGTQHDYLDHSDIIGWTREGVTEKPGSGLAALITDGPGGSKWMYVGKQHAGKVFYDLTGNRSDTVTINSDGWGEFKVNGGSVSVWVPRKTTVSTIARPITTRPWTGEFVRWTEPRLVAWP

SEQ ID NO: 17747 - protein, 515 aa, Geobacillus stearothermophilus
AAPFNGTMMQYFEWYLPDDGTLWTKVANEANNLSSLGITALWLPPAYKGTSRSDVGYGVYDLYDLGEFNQKGTVRTKYGTKAQYLQAIQAAHAAGMQVYADVVFDHKGGADGTEWVDAVEVNPSDRNQEISGTYQIQAWTKFDFPGRGNTYSSFKWRWYHFDGVDWDESRKLSRIYKFRGIGKAWDWEVDTENGNYDYLMYADLDMDHPEVVTELKNWGKWYVNTTNIDGFRLDAVKHIKFSFFPDWLSYVRSQTGKPLFTVGEYWSYDINKLHNYITKTNGTMSLFDAPLHNKFYTASKSGGAFDMRTLMTNTLMKDEPTLAVTFVDNHDTEPGQALQSWVDPWFKPLAYAFILTREEGYPCVFYGDYYGIPQYNIPSLKSKIDPLLIARRDYAYGTQHDYLDHSDIIGWTREGVTEKPGSGLAALITDGPGGSKWMYVGKEHAGKVFYDLTGNRSDTVTINSDGWGEFKVNGGSVSVWVPRKTTVSTIARPITTRPWTGEFVRWTEPRLVAWP

SEQ ID NO: 17748 - protein, 515 aa, Geobacillus stearothermophilus
AAPFNGTMMQYFEWYLPDDGTLWTKVANEANNLSSLGITALWLPPAYKGTSRSDVGYGVYDLYDLGEFNQKGTVRTKYGTKAQYLQAIQAAHAAGMQVYADVVFDHKGGADGTEWVDAVEVNPSDRNQEISGTYQIQAWTKFDFPGRGNTYSSFKWRWYHFDGVDWDESRKLSRIYKFRGIGKAWDWEVDTENGNYDYLMYADLDMDHPEVVTELKNWGKWYVNTTNIDGFRLDAVKHIKFQFFPDWLSYVRSQTGKPLFTVGEYWSYDINKLHNYITKTNGTMSLFDAPLHNKFYTASKSGGAFDMRTLMTNTLMKDQPTLAVTFVDNHDTEPGQALQSWVDPWFKPLAYAFILTREEGYPCVFYGDYYGIPQYNIPSLKSKIDPLLIARRDYAYGTQHDYLDHSDIIGWTREGVTEKPGSGLAALITDGPGGSKWMYVGKEHAGKVFYDLTGNRSDTVTINSDGWGEFKVNGGSVSVWVPRKTTVSTIARPITTRPWTGEFVRWTEPRLVAWP

SEQ ID NO: 17749 - protein, 515 aa, Geobacillus stearothermophilus
AAPFNGTMMQYFEWYLPDDGTLWTKVANEANNLSSLGITALWLPPAYKGTSRSDVGYGVYDLYDLGEFNQKGTVRTKYGTKAQYLQAIQAAHAAGMQVYADVVFDHKGGADGTEWVDAVEVNPSDRNQEISGTYQIQAWTKFDFPGRGNTYSSFKWRWYHFDGVDWDESRKLSRIYKFRGIGKAWDWEVDTENGNYDYLMYADLDMDHPEVVTELKNWGKWYVNTTNIDGFRLDAVKHIKFSFFPDWLSYVRSQTGKPLFTVGEYWSYDINKLHNYITKTNGTMSLFDAPLHNKFYTASKSGGAFDMRTLMTNTLMKDRPTLAVTFVDNHDTEPGQALQSWVDPWFKPLAYAFILTREEGYPCVFYGDYYGIPQYNIPSLKSKIDPLLIARRDYAYGTQHDYLDHSDIIGWTREGVTEKPGSGLAALITDGPGGSKWMYVGKRHAGKVFYDLTGNRSDTVTINSDGWGEFKVNGGSVSVWVPRKTTVSTIARPITTRPWTGEFVRWTEPRLVAWP

SEQ ID NO: 17750 - protein, 515 aa, Geobacillus stearothermophilus
AAPFNGTMMQYFEWYLPDDGTLWTKVANEANNLSSLGITALWLPPAYKGTSRSDVGYGVYDLYDLGEFNQKGTVRTKYGTKAQYLQAIQAAHAAGMEVYADVVFDHKGGADGTEWVDAVEVNPSDRNQEISGTYQIQAWTKFDFPGRGNTYSSFKWRWYHFDGVDWDESRKLSRIYKFRGIGKAWDWEVDTENGNYDYLMYADLDMDHPEVVTELKNWGKWYVNTTNIDGFRLDAVKHIKFSFFPDWLSYVRSQTGKPLFTVGEYWSYDINKLHNYITKTNGTMSLFDAPLHNKFYTASKSGGAFDMRTLMTNTLMKDRPTLAVTFVDNHDTEPGQALQSWVDPWFKPLAYAFILTRQEGYPCVFYGDYYGIPQYNIPSLKSKIDPLLIARRDYAYGTQHDYLDHSDIIGWTREGVTEKPGSGLAALITDGPGGSKWMYVGKEHAGKVFYDLTGNRSDTVTINSDGWGEFKVNGGSVSVWVPRKTTVSTIARPITTRPWTGEFVRWTEPRLVAWP

SEQ ID NO: 17751 - protein, 515 aa, Geobacillus stearothermophilus
AAPFNGTMMQYFEWYLPDDGTLWTKVANEANNLSSLGITALWLPPAYKGTSRSDVGYGVYDLYDLGEFNQKGTVRTKYGTKAQYLQAIQAAHAAGMEVYADVVFDHKGGADGTEWVDAVEVNPSDRNQEISGTYQIQAWTKFDFPGRGNTYSSFKWRWYHFDGVDWDESRKLSRIYKFRGIGKAWDWEVDTENGNYDYLMYADLDMDHPEVVTELKNWGKWYVNTTNIDGFRLDAVKHIKFQFFPDWLSYVRSQTGKPLFTVGEYWSYDINKLHNYITKTNGTMSLFDAPLHNKFYTASKSGGAFDMRTLMTNTLMKDQPTLAVTFVDNHDTEPGQALQSWVDPWFKPLAYAFILTRREGYPCVFYGDYYGIPQYNIPSLKSKIDPLLIARRDYAYGTQHDYLDHSDIIGWTREGVTEKPGSGLAALITDGPGGSKWMYVGKQHAGKVFYDLTGNRSDTVTINSDGWGEFKVNGGSVSVWVPRKTTVSTIARPITTRPWTGEFVRWTEPRLVAWP

SEQ ID NO: 17752 - protein, 515 aa, Geobacillus stearothermophilus
AAPFNGTMMQYFEWYLPDDGTLWTKVANEANNLSSLGITALWLPPAYKGTSRSDVGYGVYDLYDLGEFNQKGTVRTKYGTKAQYLQAIQAAHAAGMQVYADVVFDHKGGADGTEWVDAVEVNPSDRNQEISGTYQIQAWTKFDFPGRGNTYSSFKWRWYHFDGVDWDESRKLSRIYKFRGIGKAWDWEVDTENGNYDYLMYADLDMDHPEVVTELKNWGKWYVNTTNIDGFRLDAVKHIKFSFFPDWLSYVRSQTGKPLFTVGEYWSYDINKLHNYITKTNGTMSLFDAPLHNKFYTASKSGGAFDMRTLMTNTLMKDEPTLAVTFVDNHDTEPGQALQSWVDPWFKPLAYAFILTRREGYPCVFYGDYYGIPQYNIPSLKSKIDPLLIARRDYAYGTQHDYLDHSDIIGWTREGVTEKPGSGLAALITDGPGGSKWMYVGKRHAGKVFYDLTGNRSDTVTINSDGWGEFKVNGGSVSVWVPRKTTVSTIARPITTRPWTGEFVRWTEPRLVAWP

SEQ ID NO: 17753 - protein, 515 aa, Geobacillus stearothermophilus
AAPFNGTMMQYFEWYLPDDGTLWTKVANEANNLSSLGITALWLPPAYKGTSRSDVGYGVYDLYDLGEFNQKGTVRTKYGTKAQYLQAIQAAHAAGMQVYADVVFDHKGGADGTEWVDAVEVNPSDRNQEISGTYQIQAWTKFDFPGRGNTYSSFKWRWYHFDGVDWDESRKLSRIYKFRGIGKAWDWEVDTENGNYDYLMYADLDMDHPEVVTELKNWGKWYVNTTNIDGFRLDAVKHIKFSFFPDWLSYVRSQTGKPLFTVGEYWSYDINKLHNYITKTNGTMSLFDAPLHNKFYTASKSGGAFDMRTLMTNTLMKDEPTLAVTFVDNHDTEPGQALQSWVDPWFKPLAYAFILTRREGYPCVFYGDYYGIPQYNIPSLKSKIDPLLIARRDYAYGTQHDYLDHSDIIGWTREGVTEKPGSGLAALITDGPGGSKWMYVGKEHAGKVFYDLTGNRSDTVTINSDGWGEFKVNGGSVSVWVPRKTTVSTIARPITTRPWTGEFVRWTEPRLVAWP

SEQ ID NO: 17754 - protein, 515 aa, Geobacillus stearothermophilus
AAPFNGTMMQYFEWYLPDDGTLWTKVANEANNLSSLGITALWLPPAYKGTSRSDVGYGVYDLYDLGEFNQKGTVRTKYGTKAQYLQAIQAAHAAGMQVYADVVFDHKGGADGTEWVDAVEVNPSDRNQEISGTYQIQAWTKFDFPGRGNTYSSFKWRWYHFDGVDWDESRKLSRIYKFRGIGKAWDWEVDTENGNYDYLMYADLDMDHPEVVTELKNWGKWYVNTTNIDGFRLDAVKHIKFSFFPDWLSYVRSQTGKPLFTVGEYWSYDINKLHNYITKTNGTMSLFDAPLHNKFYTASKSGGAFDMRTLMTNTLMKDRPTLAVTFVDNHDTEPGQALQSWVDPWFKPLAYAFILTRREGYPCVFYGDYYGIPQYNIPSLKSKIDPLLIARRDYAYGTQHDYLDHSDIIGWTREGVTEKPGSGLAALITDGPGGSKWMYVGKEHAGKVFYDLTGNRSDTVTINSDGWGEFKVNGGSVSVWVPRKTTVSTIARPITTRPWTGEFVRWTEPRLVAWP

SEQ ID NO: 17755 - protein, 515 aa, Geobacillus stearothermophilus
AAPFNGTMMQYFEWYLPDDGTLWTKVANEANNLSSLGITALWLPPAYKGTSRSDVGYGVYDLYDLGEFNQKGTVRTKYGTKAQYLQAIQAAHAAGMEVYADVVFDHKGGADGTEWVDAVEVNPSDRNQEISGTYQIQAWTKFDFPGRGNTYSSFKWRWYHFDGVDWDESRKLSRIYKFRGIGKAWDWEVDTENGNYDYLMYADLDMDHPEVVTELKNWGKWYVNTTNIDGFRLDAVKHIKFSFFPDWLSYVRSQTGKPLFTVGEYWSYDINKLHNYITKTNGTMSLFDAPLHNKFYTASKSGGAFDMRTLMTNTLMKDRPTLAVTFVDNHDTEPGQALQSWVDPWFKPLAYAFILTREEGYPCVFYGDYYGIPQYNIPSLKSKIDPLLIARRDYAYGTQHDYLDHSDIIGWTREGVTEKPGSGLAALITDGPGGSKWMYVGKQHAGKVFYDLTGNRSDTVTINSDGWGEFKVNGGSVSVWVPRKTTVSTIARPITTRPWTGEFVRWTEPRLVAWP

SEQ ID NO: 17756 - protein, 515 aa, Geobacillus stearothermophilus
AAPFNGTMMQYFEWYLPDDGTLWTKVANEANNLSSLGITALWLPPAYKGTSRSDVGYGVYDLYDLGEFNQKGTVRTKYGTKAQYLQAIQAAHAAGMQVYADVVFDHKGGADGTEWVDAVEVNPSDRNQEISGTYQIQAWTKFDFPGRGNTYSSFKWRWYHFDGVDWDESRKLSRIYKFRGIGKAWDWEVDTENGNYDYLMYADLDMDHPEVVTELKNWGKWYVNTTNIDGFRLDAVKHIKFQFFPDWLSYVRSQTGKPLFTVGEYWSYDINKLHNYITKTNGTMSLFDAPLHNKFYTASKSGGAFDMRTLMTNTLMKDQPTLAVTFVDNHDTEPGQALQSWVDPWFKPLAYAFILTRREGYPCVFYGDYYGIPQYNIPSLKSKIDPLLIARRDYAYGTQHDYLDHSDIIGWTREGVTEKPGSGLAALITDGPGGSKWMYVGKRHAGKVFYDLTGNRSDTVTINSDGWGEFKVNGGSVSVWVPRKTTVSTIARPITTRPWTGEFVRWTEPRLVAWP

SEQ ID NO: 17757 - protein, 515 aa, Geobacillus stearothermophilus
AAPFNGTMMQYFEWYLPDDGTLWTKVANEANNLSSLGITALWLPPAYKGTSRSDVGYGVYDLYDLGEFNQKGTVRTKYGTKAQYLQAIQAAHAAGMEVYADVVFDHKGGADGTEWVDAVEVNPSDRNQEISGTYQIQAWTKFDFPGRGNTYSSFKWRWYHFDGVDWDESRKLSRIYKFRGIGKAWDWEVDTENGNYDYLMYADLDMDHPEVVTELKNWGKWYVNTTNIDGFRLDAVKHIKFQFFPDWLSYVRSQTGKPLFTVGEYWSYDINKLHNYITKTNGTMSLFDAPLHNKFYTASKSGGAFDMRTLMTNTLMKDEPTLAVTFVDNHDTEPGQALQSWVDPWFKPLAYAFILTRQEGYPCVFYGDYYGIPQYNIPSLKSKIDPLLIARRDYAYGTQHDYLDHSDIIGWTREGVTEKPGSGLAALITDGPGGSKWMYVGKQHAGKVFYDLTGNRSDTVTINSDGWGEFKVNGGSVSVWVPRKTTVSTIARPITTRPWTGEFVRWTEPRLVAWP

SEQ ID NO: 17758 - protein, 515 aa, Geobacillus stearothermophilus
AAPFNGTMMQYFEWYLPDDGTLWTKVANEANNLSSLGITALWLPPAYKGTSRSDVGYGVYDLYDLGEFNQKGTVRTKYGTKAQYLQAIQAAHAAGMEVYADVVFDHKGGADGTEWVDAVEVNPSDRNQEISGTYQIQAWTKFDFPGRGNTYSSFKWRWYHFDGVDWDESRKLSRIYKFRGIGKAWDWEVDTENGNYDYLMYADLDMDHPEVVTELKNWGKWYVNTTNIDGFRLDAVKHIKFSFFPDWLSYVRSQTGKPLFTVGEYWSYDINKLHNYITKTNGTMSLFDAPLHNKFYTASKSGGAFDMRTLMTNTLMKDQPTLAVTFVDNHDTEPGQALQSWVDPWFKPLAYAFILTREEGYPCVFYGDYYGIPQYNIPSLKSKIDPLLIARRDYAYGTQHDYLDHSDIIGWTREGVTEKPGSGLAALITDGPGGSKWMYVGKEHAGKVFYDLTGNRSDTVTINSDGWGEFKVNGGSVSVWVPRKTTVSTIARPITTRPWTGEFVRWTEPRLVAWP

SEQ ID NO: 17759 - protein, 515 aa, Geobacillus stearothermophilus
AAPFNGTMMQYFEWYLPDDGTLWTKVANEANNLSSLGITALWLPPAYKGTSRSDVGYGVYDLYDLGEFNQKGTVRTKYGTKAQYLQAIQAAHAAGMRVYADVVFDHKGGADGTEWVDAVEVNPSDRNQEISGTYQIQAWTKFDFPGRGNTYSSFKWRWYHFDGVDWDESRKLSRIYKFRGIGKAWDWEVDTENGNYDYLMYADLDMDHPEVVTELKNWGKWYVNTTNIDGFRLDAVKHIKFSFFPDWLSYVRSQTGKPLFTVGEYWSYDINKLHNYITKTNGTMSLFDAPLHNKFYTASKSGGAFDMRTLMTNTLMKDRPTLAVTFVDNHDTEPGQALQSWVDPWFKPLAYAFILTRQEGYPCVFYGDYYGIPQYNIPSLKSKIDPLLIARRDYAYGTQHDYLDHSDIIGWTREGVTEKPGSGLAALITDGPGGSKWMYVGKRHAGKVFYDLTGNRSDTVTINSDGWGEFKVNGGSVSVWVPRKTTVSTIARPITTRPWTGEFVRWTEPRLVAWP

SEQ ID NO: 17760 - protein, 515 aa, Geobacillus stearothermophilus
AAPFNGTMMQYFEWYLPDDGTLWTKVANEANNLSSLGITALWLPPAYKGTSRSDVGYGVYDLYDLGEFNQKGTVRTKYGTKAQYLQAIQAAHAAGMQVYADVVFDHKGGADGTEWVDAVEVNPSDRNQEISGTYQIQAWTKFDFPGRGNTYSSFKWRWYHFDGVDWDESRKLSRIYKFRGIGKAWDWEVDTENGNYDYLMYADLDMDHPEVVTELKNWGKWYVNTTNIDGFRLDAVKHIKFQFFPDWLSYVRSQTGKPLFTVGEYWSYDINKLHNYITKTNGTMSLFDAPLHNKFYTASKSGGAFDMRTLMTNTLMKDRPTLAVTFVDNHDTEPGQALQSWVDPWFKPLAYAFILTRREGYPCVFYGDYYGIPQYNIPSLKSKIDPLLIARRDYAYGTQHDYLDHSDIIGWTREGVTEKPGSGLAALITDGPGGSKWMYVGKQHAGKVFYDLTGNRSDTVTINSDGWGEFKVNGGSVSVWVPRKTTVSTIARPITTRPWTGEFVRWTEPRLVAWP

SEQ ID NO: 17761 - protein, 515 aa, Geobacillus stearothermophilus
AAPFNGTMMQYFEWYLPDDGTLWTKVANEANNLSSLGITALWLPPAYKGTSRSDVGYGVYDLYDLGEFNQKGTVRTKYGTKAQYLQAIQAAHAAGMQVYADVVFDHKGGADGTEWVDAVEVNPSDRNQEISGTYQIQAWTKFDFPGRGNTYSSFKWRWYHFDGVDWDESRKLSRIYKFRGIGKAWDWEVDTENGNYDYLMYADLDMDHPEVVTELKNWGKWYVNTTNIDGFRLDAVKHIKFSFFPDWLSYVRSQTGKPLFTVGEYWSYDINKLHNYITKTNGTMSLFDAPLHNKFYTASKSGGAFDMRTLMTNTLMKDQPTLAVTFVDNHDTEPGQALQSWVDPWFKPLAYAFILTRQEGYPGVFYGDYYGIPQYNIPSLKSKIDPLLIARRDYAYGTQHDYLDHSDIIGWTREGVTEKPGSGLAALITDGPGGSKWMYVGKQHAGKVFYDLTGNRSDTVTITSDGWGEFKVNGGSVSVWVPRKTTVSTITRPITTRPWTGEFVRWTEPRLVAWP

SEQ ID NO: 17762 - protein, 515 aa, Geobacillus stearothermophilus
AAPFNGTMMQYFEWYLPDDGTLWTKVANEANNLSSLGITALWLPPAYKGTSRSDVGYGVYDLYDLGEFNQKGTVRTKYGTKAQYLQAIQAAHAAGMRVYADVVFDHKGGADGTEWVDAVEVNPSDRNQEISGTYQIQAWTKFDFPGRGNTYSSFKWRWYHFDGVDWDESRKLSRIYKFRGIGKAWDWEVDTENGNYDYLMYADLDMDHPEVVTELKNWGKWYVNTTNIDGFRLDAVKHIKFSFFPDWLSYVRSQTGKPLFTVGEYWSYDINKLHNYITKTNGTMSLFDAPLHNKFYTASKSGGAFDMRTLMTNTLMKDQPTLAVTFVDNHDTEPGQALQSWVDPWFKPLAYAFILTRREGYPCVFYGDYYGIPQYNIPSLKSKIDPLLIARRDYAYGTQHDYLDHSDIIGWTREGVTEKPGSGLAALITDGPGGSKWMYVGKRHAGKVFYDLTGNRSDTVTINSDGWGEFKVNGGSVSVWVPRKTTVSTIARPITTRPWTGEFVRWTEPRLVAWP

SEQ ID NO: 17763 - protein, 515 aa, Geobacillus stearothermophilus
AAPFNGTMMQYFEWYLPDDGTLWTKVANEANNLSSLGITALWLPPAYKGTSRSDVGYGVYDLYDLGEFNQKGTVRTKYGTKAQYLQAIQAAHAAGMRVYADVVFDHKGGADGTEWVDAVEVNPSDRNQEISGTYQIQAWTKFDFPGRGNTYSSFKWRWYHFDGVDWDESRKLSRIYKFRGIGKAWDWEVDTENGNYDYLMYADLDMDHPEVVTELKNWGKWYVNTTNIDGFRLDAVKHIKFSFFPDWLSYVRSQTGKPLFTVGEYWSYDINKLHNYITKTNGTMSLFDAPLHNKFYTASKSGGAFDMRTLMTNTLMKDEPTLAVTFVDNHDTEPGQALQSWVDPWFKPLAYAFILTREEGYPCVFYGDYYGIPQYNIPSLKSKIDPLLIARRDYAYGTQHDYLDHSDIIGWTREGVTEKPGSGLAALITDGPGGSKWMYVGKQHAGKVFYDLTGNRSDTVTINSDGWGEFKVNGGSVSVWVPRKTTVSTIARPITTRPWTGEFVRWTEPRLVAWP

SEQ ID NO: 17764 - protein, 515 aa, Geobacillus stearothermophilus
AAPFNGTMMQYFEWYLPDDGTLWTKVANEANNLSSLGITALWLPPAYKGTSRSDVGYGVYDLYDLGEFNQKGTVRTKYGTKAQYLQAIQAAHAAGMRVYADVVFDHKGGADGTEWVDAVEVNPSDRNQEISGTYQIQAWTKFDFPGRGNTYSSFKWRWYHFDGVDWDESRKLSRIYKFRGIGKAWDWEVDTENGNYDYLMYADLDMDHPEVVTELKNWGKWYVNTTNIDGFRLDAVKHIKFSFFPDWLSYVRSQTGKPLFTVGEYWSYDINKLHNYITKTNGTMSLFDAPLHNKFYTASKSGGAFDMRTLMTNTLMKDEPTLAVTFVDNHDTEPGQALQSWVDPWFKPLAYAFILTRQEGYPCVFYGDYYGIPQYNIPSLKSKIDPLLIARRDYAYGTQHDYLDHSDIIGWTREGVTEKPGSGLAALITDGPGGSKWMYVGKEHAGKVFYDLTGNRSDTVTINSDGWGEFKVNGGSVSVWVPRKTTVSTIARPITTRPWTGEFVRWTEPRLVAWP

SEQ ID NO: 17765 - protein, 515 aa, Geobacillus stearothermophilus
AAPFNGTMMQYFEWYLPDDGTLWTKVANEANNLSSLGITALWLPPAYKGTSRSDVGYGVYDLYDLGEFNQKGTVRTKYGTKAQYLQAIQAAHAAGMRVYADVVFDHKGGADGTEWVDAVEVNPSDRNQEISGTYQIQAWTKFDFPGRGNTYSSFKWRWYHFDGVDWDESRKLSRIYKFRGIGKAWDWEVDTENGNYDYLMYADLDMDHPEVVTELKNWGKWYVNTTNIDGFRLDAVKHIKFSFFPDWLSYVRSQTGKPLFTVGEYWSYDINKLHNYITKTNGTMSLFDAPLHNKFYTASKSGGAFDMRTLMTNTLMKDQPTLAVTFVDNHDTEPGQALQSWVDPWFKPLAYAFILTREEGYPCVFYGDYYGIPQYNIPSLKSKIDPLLIARRDYAYGTQHDYLDHSDIIGWTREGVTEKPGSGLAALITDGPGGSKWMYVGKRHAGKVFYDLTGNRSDTVTINSDGWGEFKVNGGSVSVWVPRKTTVSTIARPITTRPWTGEFVRWTEPRLVAWP

SEQ ID NO: 17766 - protein, 515 aa, Geobacillus stearothermophilus
AAPFNGTMMQYFEWYLPDDGTLWTKVANEANNLSSLGITALWLPPAYKGTSRSDVGYGVYDLYDLGEFNQKGTVRTKYGTKAQYLQAIQAAHAAGMQVYADVVFDHKGGADGTEWVDAVEVNPSDRNQEISGTYQIQAWTKFDFPGRGNTYSSFKWRWYHFDGVDWDESRKLSRIYKFRGIGKAWDWEVDTENGNYDYLMYADLDMDHPEVVTELKNWGKWYVNTTNIDGFRLDAVKHIKFQFFPDWLSYVRSQTGKPLFTVGEYWSYDINKLHNYITKTNGTMSLFDAPLHNKFYTASKSGGAFDMRTLMTNTLMKDRPTLAVTFVDNHDTEPGQALQSWVDPWFKPLAYAFILTRQEGYPCVFYGDYYGIPQYNIPSLKSKIDPLLIARRDYAYGTQHDYLDHSDIIGWTREGVTEKPGSGLAALITDGPGGSKWMYVGKEHAGKVFYDLTGNRSDTVTINSDGWGEFKVNGGSVSVWVPRKTTVSTIARPITTRPWTGEFVRWTEPRLVAWP

SEQ ID NO: 17767 - protein, 515 aa, Geobacillus stearothermophilus
AAPFNGTMMQYFEWYLPDDGTLWTKVANEANNLSSLGITALWLPPAYKGTSRSDVGYGVYDLYDLGEFNQKGTVRTKYGTKAQYLQAIQAAHAAGMRVYADVVFDHKGGADGTEWVDAVEVNPSDRNQEISGTYQIQAWTKFDFPGRGNTYSSFKWRWYHFDGVDWDESRKLSRIYKFRGIGKAWDWEVDTENGNYDYLMYADLDMDHPEVVTELKNWGKWYVNTTNIDGFRLDAVKHIKFQFFPDWLSYVRSQTGKPLFTVGEYWSYDINKLHNYITKTNGTMSLFDAPLHNKFYTASKSGGAFDMRTLMTNTLMKDQPTLAVTFVDNHDTEPGQALQSWVDPWFKPLAYAFILTRQEGYPCVFYGDYYGIPQYNIPSLKSKIDPLLIARRDYAYGTQHDYLDHSDIIGWTREGVTEKPGSGLAALITDGPGGSKWMYVGKRHAGKVFYDLTGNRSDTVTINSDGWGEFKVNGGSVSVWVPRKTTVSTIARPITTRPWTGEFVRWTEPRLVAWP

SEQ ID NO: 17768 - protein, 515 aa, Geobacillus stearothermophilus
AAPFNGTMMQYFEWYLPDDGTLWTKVANEANNLSSLGITALWLPPAYKGTSRSDVGYGVYDLYDLGEFNQKGTVRTKYGTKAQYLQAIQAAHAAGMQVYADVVFDHKGGADGTEWVDAVEVNPSDRNQEISGTYQIQAWTKFDFPGRGNTYSSFKWRWYHFNGVDWDESRKLSRIYKFRGIGKAWNWEVDTENGNYDYLMYANLDYNHPEVVTELKNWGKWYVNTTNIDGFRLDAVKHIKFSFFPDWLSYVRSQTGKPLFTVGEYWSYDINKLHNYITKTDGTMSLFDAPLHNKFYTASKSGGAFDMRTLMTNTLMKDQPTLAVTFVDNHDTEPGQALQSWVDPWFKPLAYAFILTRQEGYPCVFYGDYYGIPQYNIPSLKSKIDPLLIARRDYAYGTQHDYLDHSDIIGWTREGGTEKPGSGLAALITDGPGGSKWMYVGKQHAGKVFYDLTGNRSDTVTINSDGWGEFKVNGGSVSVWVPRKTTVSTIARPITTRPWTGEFVRWTEPRLVAWP

SEQ ID NO: 17769 - protein, 515 aa, Geobacillus stearothermophilus
AAPFNGTMMQYFEWYLPDDGTLWTKVANEANNLSSLGITALWLPPAYKGTSRSDVGYGVYDLYDLGEFNQKGTVRTKYGTKAQYLQAIQAAHAAGMEVYADVVFDHKGGADGTEWVDAVEVNPSDRNQEISGTYQIQAWTKFDFPGRGNTYSSFKWRWYHFDGVDWDESRKLSRIYKFRGIGKAWDWEVDTENGNYDYLMYADLDMDHPEVVTELKNWGKWYVNTTNIDGFRLDAVKHIKFQFFPDWLSYVRSQTGKPLFTVGEYWSYDINKLHNYITKTNGTMSLFDAPLHNKFYTASKSGGAFDMRTLMTNTLMKDQPTLAVTFVDNHDTEPGQALQSWVDPWFKPLAYAFILTRQEGYPCVFYGDYYGIPQYNIPSLKSKIDPLLIARRDYAYGTQHDYLDHSDIIGWTREGVTEKPGSGLAALITDGPGGSKWMYVGKEHAGKVFYDLTGNRSDTVTINSDGWGEFKVNGGSVSVWVPRKTTVSTIARPITTRPWTGEFVRWTEPRLVAWP

SEQ ID NO: 17770 - protein, 515 aa, Geobacillus stearothermophilus
AAPFNGTMMQYFEWYLPDDGTLWTKVANEANNLSSLGITALWLPPAYKGTSRSDVGYGVYDLYDLGEFNQKGTVRTKYGTKAQYLQAIQAAHAAGMRVYADVVFDHKGGADGTEWVDAVEVNPSDRNQEISGTYQIQAWTKFDFPGRGNTYSSFKWRWYHFDGVDWDESRKLSRIYKFRGIGKAWDWEVDTENGNYDYLMYADLDMDHPEVVTELKNWGKWYVNTTNIDGFRLDAVKHIKFSFFPDWLSYVRSQTGKPLFTVGEYWSYDINKLHNYITKTNGTMSLFDAPLHNKFYTASKSGGAFDMRTLMTNTLMKDEPTLAVTFVDNHDTEPGQALQSWVDPWFKPLAYAFILTRREGYPCVFYGDYYGIPQYNIPSLKSKIDPLLIARRDYAYGTQHDYLDHSDIIGWTREGVTEKPGSGLAALITDGPGGSKWMYVGKQHAGKVFYDLTGNRSDTVTINSDGWGEFKVNGGSVSVWVPRKTTVSTIARPITTRPWTGEFVRWTEPRLVAWP

SEQ ID NO: 17771 - protein, 515 aa, Geobacillus stearothermophilus
AAPFNGTMMQYFEWYLPDDGTLWTKVANEANNLSSLGITALWLPPAYKGTSRSDVGYGVYDLYDLGEFNQKGTVRTKYGTKAQYLQAIQAAHAAGMRVYADVVFDHKGGADGTEWVDAVEVNPSDRNQEISGTYQIQAWTKFDFPGRGNTYSSFKWRWYHFDGVDWDESRKLSRIYKFRGIGKAWDWEVDTENGNYDYLMYADLDMDHPEVVTELKNWGKWYVNTTNIDGFRLDAVKHIKFSFFPDWLSYVRSQTGKPLFTVGEYWSYDINKLHNYITKTNGTMSLFDAPLHNKFYTASKSGGAFDMRTLMTNTLMKDRPTLAVTFVDNHDTEPGQALQSWVDPWFKPLAYAFILTREEGYPCVFYGDYYGIPQYNIPSLKSKIDPLLIARRDYAYGTQHDYLDHSDIIGWTREGVTEKPGSGLAALITDGPGGSKWMYVGKQHAGKVFYDLTGNRSDTVTINSDGWGEFKVNGGSVSVWVPRKTTVSTIARPITTRPWTGEFVRWTEPRLVAWP

SEQ ID NO: 17772 - protein, 515 aa, Geobacillus stearothermophilus
AAPFNGTMMQYFEWYLPDDGTLWTKVANEANNLSSLGITALWLPPAYKGTSRSDVGYGVYDLYDLGEFNQKGTVRTKYGTKAQYLQAIQAAHAAGMEVYADVVFDHKGGADGTEWVDAVEVNPSDRNQEISGTYQIQAWTKFDFPGRGNTYSSFKWRWYHFDGVDWDESRKLSRIYKFRGIGKAWDWEVDTENGNYDYLMYADLDMDHPEVVTELKNWGKWYVNTTNIDGFRLDAVKHIKFSFFPDWLSYVRSQTGKPLFTVGEYWSYDINKLHNYITKTNGTMSLFDAPLHNKFYTASKSGGAFDMRTLMTNTLMKDEPTLAVTFVDNHDTEPGQALQSWVDPWFKPLAYAFILTRREGYPCVFYGDYYGIPQYNIPSLKSKIDPLLIARRDYAYGTQHDYLDHSDIIGWTREGVTEKPGSGLAALITDGPGGSKWMYVGKQHAGKVFYDLTGNRSDTVTINSDGWGEFKVNGGSVSVWVPRKTTVSTIARPITTRPWTGEFVRWTEPRLVAWP

SEQ ID NO: 17773 - protein, 515 aa, Geobacillus stearothermophilus
AAPFNGTMMQYFEWYLPDDGTLWTKVANEANNLSSLGITALWLPPAYKGTSRSDVGYGVYDLYDLGEFNQKGTVRTKYGTKAQYLQAIQAAHAAGMRVYADVVFDHKGGADGTEWVDAVEVNPSDRNQEISGTYQIQAWTKFDFPGRGNTYSSFKWRWYHFDGVDWDESRKLSRIYKFRGIGKAWDWEVDTENGNYDYLMYADLDMDHPEVVTELKNWGKWYVNTTNIDGFRLDAVKHIKFQFFPDWLSYVRSQTGKPLFTVGEYWSYDINKLHNYITKTNGTMSLFDAPLHNKFYTASKSGGAFDMRTLMTNTLMKDQPTLAVTFVDNHDTEPGQALQSWVDPWFKPLAYAFILTRQEGYPCVFYGDYYGIPQYNIPSLKSKIDPLLIARRDYAYGTQHDYLDHSDIIGWTREGVTEKPGSGLAALITDGPGGSKWMYVGKEHAGKVFYDLTGNRSDTVTINSDGWGEFKVNGGSVSVWVPRKTTVSTIARPITTRPWTGEFVRWTEPRLVAWP

SEQ ID NO: 17774 - protein, 515 aa, Geobacillus stearothermophilus
AAPFNGTMMQYFEWYLPDDGTLWTKVANEANNLSSLGITALWLPPAYKGTSRSDVGYGVYDLYDLGEFNQKGTVRTKYGTKAQYLQAIQAAHAAGMQVYADVVFDHKGGADGTEWVDAVEVNPSDRNQEISGTYQIQAWTKFDFPGRGNTYSSFKWRWYHFDGVDWDESRKLSRIYKFRGIGKAWDWEVDTENGNYDYLMYADLDMDHPEVVTELKNWGKWYVNTTNIDGFRLDAVKHIKFQFFPDWLSYVRSQTGKPLFTVGEYWSYDINKLHNYITKTNGTMSLFDAPLHNKFYTASKSGGAFDMRTLMTNTLMKDEPTLAVTFVDNHDTEPGQALQSWVDPWFKPLAYAFILTRQEGYPCVFYGDYYGIPQYNIPSLKSKIDPLLIARRDYAYGTQHDYLDHSDIIGWTREGVTEKPGSGLAALITDGPGGSKWMYVGKEHAGKVFYDLTGNRSDTVTINSDGWGEFKVNGGSVSVWVPRKTTVSTIARPITTRPWTGEFVRWTEPRLVAWP

SEQ ID NO: 17775 - protein, 515 aa, Geobacillus stearothermophilus
AAPFNGTMMQYFEWYLPDDGTLWTKVANEANNLSSLGITALWLPPAYKGTSRSDVGYGVYDLYDLGEFNQKGTVRTKYGTKAQYLQAIQAAHAAGMQVYADVVFDHKGGADGTEWVDAVEVNPSDRNQEISGTYQIQAWTKFDFPGRGNTYSSFKWRWYHFDGVDWDESRKLSRIYKFRGIGKAWDWEVDTENGNYDYLMYADLDMDHPEVVTELKNWGKWYVNTTNIDGFRLDAVKHIKFQFFPDWLSYVRSQTGKPLFTVGEYWSYDINKLHNYITKTNGTMSLFDAPLHNKFYTASKSGGAFDMRTLMTNTLMKDRPTLAVTFVDNHDTEPGQALQSWVDPWFKPLAYAFILTREEGYPCVFYGDYYGIPQYNIPSLKSKIDPLLIARRDYAYGTQHDYLDHSDIIGWTREGVTEKPGSGLAALITDGPGGSKWMYVGKQHAGKVFYDLTGNRSDTVTINSDGWGEFKVNGGSVSVWVPRKTTVSTIARPITTRPWTGEFVRWTEPRLVAWP

SEQ ID NO: 17776 - protein, 515 aa, Geobacillus stearothermophilus
AAPFNGTMMQYFEWYLPDDGTLWTKVANEANNLSSLGITALWLPPAYKGTSRSDVGYGVYDLYDLGEFNQKGTVRTKYGTKAQYLQAIQAAHAAGMQVYADVVFDHKGGADGTEWVDAVEVNPSDRNQEISGTYQIQAWTKFDFPGRGNTYSSFKWRWYHFDGVDWDESRKLSRIYKFRGIGKAWDWEVDTENGNYDYLMYADLDMDHPEVVTELKNWGKWYVNTTNIDGFRLDAVKHIKFSFFPDWLSYVRSQTGKPLFTVGEYWSYDINKLHNYITKTNGTMSLFDAPLHNKFYTASKSGGAFDMRTLMTNTLMKDRPTLAVTFVDNHDTEPGQALQSWVDPWFKPLAYAFILTRREGYPCVFYGDYYGIPQYNIPSLKSKIDPLLIARRDYAYGTQHDYLDHSDIIGWTREGVTEKPGSGLAALITDGPGGSKWMYVGKRHAGKVFYDLTGNRSDTVTINSDGWGEFKVNGGSVSVWVPRKTTVSTIARPITTRPWTGEFVRWTEPRLVAWP

SEQ ID NO: 17777 - protein, 515 aa, Geobacillus stearothermophilus
AAPFNGTMMQYFEWYLPDDGTLWTKVANEANNLSSLGITALWLPPAYKGTSRSDVGYGVYDLYDLGEFNQKGTVRTKYGTKAQYLQAIQAAHAAGMQVYADVVFDHKGGADGTEWVDAVEVNPSDRNQEISGTYQIQAWTKFDFPGRGNTYSSFKWRWYHFDGVDWDESRKLSRIYKFRGIGKAWDWEVDTENGNYDYLMYADLDMDHPEVVTELKNWGKWYVNTTNIDGFRLDAVKHIKFQFFPDWLSYVRSQTGKPLFTVGEYWSYDINKLHNYITKTNGTMSLFDAPLHNKFYTASKSGGAFDMRTLMTNTLMKDEPTLAVTFVDNHDTEPGQALQSWVDPWFKPLAYAFILTRREGYPCVFYGDYYGIPQYNIPSLKSKIDPLLIARRDYAYGTQHDYLDHSDIIGWTREGVTEKPGSGLAALITDGPGGSKWMYVGKQHAGKVFYDLTGNRSDTVTINSDGWGEFKVNGGSVSVWVPRKTTVSTIARPITTRPWTGEFVRWTEPRLVAWP

SEQ ID NO: 17778 - protein, 515 aa, Geobacillus stearothermophilus
AAPFNGTMMQYFEWYLPDDGTLWTKVANEANNLSSLGITALWLPPAYKGTSRSDVGYGVYDLYDLGEFNQKGTVRTKYGTKAQYLQAIQAAHAAGMQVYADVVFDHKGGADGTEWVDAVEVNPSDRNQEISGTYQIQAWTKFDFPGRGNTYSSFKWRWYHFDGVDWDESRKLSRIYKFRGIGKAWDWEVDTENGNYDYLMYADLDMDHPEVVTELKNWGKWYVNTTNIDGFRLDAVKHIKFQFFPDWLSYVRSQTGKPLFTVGEYWSYDINKLHNYITKTNGTMSLFDAPLHNKFYTASKSGGAFDMRTLMTNTLMKDEPTLAVTFVDNHDTEPGQALQSWVDPWFKPLAYAFILTRQEGYPCVFYGDYYGIPQYNIPSLKSKIDPLLIARRDYAYGTQHDYLDHSDIIGWTREGVTEKPGSGLAALITDGPGGSKWMYVGKRHAGKVFYDLTGNRSDTVTINSDGWGEFKVNGGSVSVWVPRKTTVSTIARPITTRPWTGEFVRWTEPRLVAWP

SEQ ID NO: 17779 - protein, 515 aa, Geobacillus stearothermophilus
AAPFNGTMMQYFEWYLPDDGTLWTKVANEANNLSSLGITALWLPPAYKGTSRSDVGYGVYDLYDLGEFNQKGTVRTKYGTKAQYLQAIQAAHAAGMEVYADVVFDHKGGADGTEWVDAVEVNPSDRNQEISGTYQIQAWTKFDFPGRGNTYSSFKWRWYHFDGVDWDESRKLSRIYKFRGIGKAWDWEVDTENGNYDYLMYADLDMDHPEVVTELKNWGKWYVNTTNIDGFRLDAVKHIKFQFFPDWLSYVRSQTGKPLFTVGEYWSYDINKLHNYITKTNGTMSLFDAPLHNKFYTASKSGGAFDMRTLMTNTLMKDRPTLAVTFVDNHDTEPGQALQSWVDPWFKPLAYAFILTRQEGYPCVFYGDYYGIPQYNIPSLKSKIDPLLIARRDYAYGTQHDYLDHSDIIGWTREGVTEKPGSGLAALITDGPGGSKWMYVGKQHAGKVFYDLTGNRSDTVTINSDGWGEFKVNGGSVSVWVPRKTTVSTIARPITTRPWTGEFVRWTEPRLVAWP

SEQ ID NO: 17780 - protein, 515 aa, Geobacillus stearothermophilus
AAPFNGTMMQYFEWYLPDDGTLWTKVANEANNLSSLGITALWLPPAYKGTSRSDVGYGVYDLYDLGEFNQKGTVRTKYGTKAQYLQAIQAAHAAGMEVYADVVFDHKGGADGTEWVDAVEVNPSDRNQEISGTYQIQAWTKFDFPGRGNTYSSFKWRWYHFDGVDWDESRKLSRIYKFRGIGKAWDWEVDTENGNYDYLMYADLDMDHPEVVTELKNWGKWYVNTTNIDGFRLDAVKHIKFSFFPDWLSYVRSQTGKPLFTVGEYWSYDINKLHNYITKTNGTMSLFDAPLHNKFYTASKSGGAFDMRTLMTNTLMKDQPTLAVTFVDNHDTEPGQALQSWVDPWFKPLAYAFILTRREGYPCVFYGDYYGIPQYNIPSLKSKIDPLLIARRDYAYGTQHDYLDHSDIIGWTREGVTEKPGSGLAALITDGPGGSKWMYVGKRHAGKVFYDLTGNRSDTVTINSDGWGEFKVNGGSVSVWVPRKTTVSTIARPITTRPWTGEFVRWTEPRLVAWP

SEQ ID NO: 17781 - protein, 515 aa, Geobacillus stearothermophilus
AAPFNGTMMQYFEWYLPDDGTLWTKVANEANNLSSLGITALWLPPAYKGTSRSDVGYGVYDLYDLGEFNQKGTVRTKYGTKAQYLQAIQAAHAAGMRVYADVVFDHKGGADGTEWVDAVEVNPSDRNQEISGTYQIQAWTKFDFPGRGNTYSSFKWRWYHFDGVDWDESRKLSRIYKFRGIGKAWDWEVDTENGNYDYLMYADLDMDHPEVVTELKNWGKWYVNTTNIDGFRLDAVKHIKFSFFPDWLSYVRSQTGKPLFTVGEYWSYDINKLHNYITKTNGTMSLFDAPLHNKFYTASKSGGAFDMRTLMTNTLMKDRPTLAVTFVDNHDTEPGQALQSWVDPWFKPLAYAFILTRREGYPCVFYGDYYGIPQYNIPSLKSKIDPLLIARRDYAYGTQHDYLDHSDIIGWTREGVTEKPGSGLAALITDGPGGSKWMYVGKQHAGKVFYDLTGNRSDTVTINSDGWGEFKVNGGSVSVWVPRKTTVSTIARPITTRPWTGEFVRWTEPRLVAWP

SEQ ID NO: 17782 - protein, 515 aa, Geobacillus stearothermophilus
AAPFNGTMMQYFEWYLPDDGTLWTKVANEANNLSSLGITALWLPPAYKGTSRSDVGYGVYDLYDLGEFNQKGTVRTKYGTKAQYLQAIQAAHAAGMRVYADVVFDHKGGADGTEWVDAVEVNPSDRNQEISGTYQIQAWTKFDFPGRGNTYSSFKWRWYHFDGVDWDESRKLSRIYKFRGIGKAWDWEVDTENGNYDYLMYADLDMDHPEVVTELKNWGKWYVNTTNIDGFRLDAVKHIKFSFFPDWLSYVRSQTGKPLFTVGEYWSYDINKLHNYITKTNGTMSLFDAPLHNKFYTASKSGGAFDMRTLMTNTLMKDEPTLAVTFVDNHDTEPGQALQSWVDPWFKPLAYAFILTRQEGYPCVFYGDYYGIPQYNIPSLKSKIDPLLIARRDYAYGTQHDYLDHSDIIGWTREGVTEKPGSGLAALITDGPGGSKWMYVGKRHAGKVFYDLTGNRSDTVTINSDGWGEFKVNGGSVSVWVPRKTTVSTIARPITTRPWTGEFVRWTEPRLVAWP

SEQ ID NO: 17783 - protein, 515 aa, Geobacillus stearothermophilus
AAPFNGTMMQYFEWYLPDDGTLWTKVANEANNLSSLGITALWLPPAYKGTSRSDVGYGVYDLYDLGEFNQKGTVRTKYGTKAQYLQAIQAAHAAGMRVYADVVFDHKGGADGTEWVDAVEVNPSDRNQEISGTYQIQAWTKFDFPGRGNTYSSFKWRWYHFDGVDWDESRKLSRIYKFRGIGKAWDWEVDTENGNYDYLMYADLDMDHPEVVTELKNWGKWYVNTTNIDGFRLDAVKHIKFQFFPDWLSYVRSQTGKPLFTVGEYWSYDINKLHNYITKTNGTMSLFDAPLHNKFYTASKSGGAFDMRTLMTNTLMKDRPTLAVTFVDNHDTEPGQALQSWVDPWFKPLAYAFILTRQEGYPCVFYGDYYGIPQYNIPSLKSKIDPLLIARRDYAYGTQHDYLDHSDIIGWTREGVTEKPGSGLAALITDGPGGSKWMYVGKQHAGKVFYDLTGNRSDTVTINSDGWGEFKVNGGSVSVWVPRKTTVSTIARPITTRPWTGEFVRWTEPRLVAWP

SEQ ID NO: 17784 - protein, 515 aa, Geobacillus stearothermophilus
AAPFNGTMMQYFEWYLPDDGTLWTKVANEANNLSSLGITALWLPPAYKGTSRSDVGYGVYDLYDLGEFNQKGTVRTKYGTKAQYLQAIQAAHAAGMEVYADVVFDHKGGADGTEWVDAVEVNPSDRNQEISGTYQIQAWTKFDFPGRGNTYSSFKWRWYHFDGVDWDESRKLSRIYKFRGIGKAWDWEVDTENGNYDYLMYADLDMDHPEVVTELKNWGKWYVNTTNIDGFRLDAVKHIKFSFFPDWLSYVRSQTGKPLFTVGEYWSYDINKLHNYITKTNGTMSLFDAPLHNKFYTASKSGGAFDMRTLMTNTLMKDQPTLAVTFVDNHDTEPGQALQSWVDPWFKPLAYAFILTRREGYPCVFYGDYYGIPQYNIPSLKSKIDPLLIARRDYAYGTQHDYLDHSDIIGWTREGVTEKPGSGLAALITDGPGGSKWMYVGKEHAGKVFYDLTGNRSDTVTINSDGWGEFKVNGGSVSVWVPRKTTVSTIARPITTRPWTGEFVRWTEPRLVAWP

SEQ ID NO: 17785 - protein, 515 aa, Geobacillus stearothermophilus
AAPFNGTMMQYFEWYLPDDGTLWTKVANEANNLSSLGITALWLPPAYKGTSRSDVGYGVYDLYDLGEFNQKGTVRTKYGTKAQYLQAIQAAHAAGMEVYADVVFDHKGGADGTEWVDAVEVNPSDRNQEISGTYQIQAWTKFDFPGRGNTYSSFKWRWYHFDGVDWDESRKLSRIYKFRGIGKAWDWEVDTENGNYDYLMYADLDMDHPEVVTELKNWGKWYVNTTNIDGFRLDAVKHIKFSFFPDWLSYVRSQTGKPLFTVGEYWSYDINKLHNYITKTNGTMSLFDAPLHNKFYTASKSGGAFDMRTLMTNTLMKDEPTLAVTFVDNHDTEPGQALQSWVDPWFKPLAYAFILTRQEGYPCVFYGDYYGIPQYNIPSLKSKIDPLLIARRDYAYGTQHDYLDHSDIIGWTREGVTEKPGSGLAALITDGPGGSKWMYVGKRHAGKVFYDLTGNRSDTVTINSDGWGEFKVNGGSVSVWVPRKTTVSTIARPITTRPWTGEFVRWTEPRLVAWP

SEQ ID NO: 17786 - protein, 515 aa, Geobacillus stearothermophilus
AAPFNGTMMQYFEWYLPDDGTLWTKVANEANNLSSLGITALWLPPAYKGTSRSDVGYGVYDLYDLGEFNQKGTVRTKYGTKAQYLQAIQAAHAAGMRVYADVVFDHKGGADGTEWVDAVEVNPSDRNQEISGTYQIQAWTKFDFPGRGNTYSSFKWRWYHFDGVDWDESRKLSRIYKFRGIGKAWDWEVDTENGNYDYLMYADLDMDHPEVVTELKNWGKWYVNTTNIDGFRLDAVKHIKFQFFPDWLSYVRSQTGKPLFTVGEYWSYDINKLHNYITKTNGTMSLFDAPLHNKFYTASKSGGAFDMRTLMTNTLMKDQPTLAVTFVDNHDTEPGQALQSWVDPWFKPLAYAFILTRREGYPCVFYGDYYGIPQYNIPSLKSKIDPLLIARRDYAYGTQHDYLDHSDIIGWTREGVTEKPGSGLAALITDGPGGSKWMYVGKQHAGKVFYDLTGNRSDTVTINSDGWGEFKVNGGSVSVWVPRKTTVSTIARPITTRPWTGEFVRWTEPRLVAWP

SEQ ID NO: 17787 - protein, 515 aa, Geobacillus stearothermophilus
AAPFNGTMMQYFEWYLPDDGTLWTKVANEANNLSSLGITALWLPPAYKGTSRSDVGYGVYDLYDLGEFNQKGTVRTKYGTKAQYLQAIQAAHAAGMQVYADVVFDHKGGADGTEWVDAVEVNPSDRNQEISGTYQIQAWTKFDFPGRGNTYSSFKWRWYHFDGVDWDESRKLSRIYKFRGIGKAWDWEVDTENGNYDYLMYADLDMDHPEVVTELKNWGKWYVNTTNIDGFRLDAVKHIKFQFFPDWLSYVRSQTGKPLFTVGEYWSYDINKLHNYITKTNGTMSLFDAPLHNKFYTASKSGGAFDMRTLMTNTLMKDRPTLAVTFVDNHDTEPGQALQSWVDPWFKPLAYAFILTRQEGYPCVFYGDYYGIPQYNIPSLKSKIDPLLIARRDYAYGTQHDYLDHSDIIGWTREGVTEKPGSGLAALITDGPGGSKWMYVGKRHAGKVFYDLTGNRSDTVTINSDGWGEFKVNGGSVSVWVPRKTTVSTIARPITTRPWTGEFVRWTEPRLVAWP

SEQ ID NO: 17788 - protein, 515 aa, Geobacillus stearothermophilus
AAPFNGTMMQYFEWYLPDDGTLWTKVANEANNLSSLGITALWLPPAYKGTSRSDVGYGVYDLYDLGEFNQKGTVRTKYGTKAQYLQAIQAAHAAGMEVYADVVFDHKGGADGTEWVDAVEVNPSDRNQEISGTYQIQAWTKFDFPGRGNTYSSFKWRWYHFDGVDWDESRKLSRIYKFRGIGKAWDWEVDTENGNYDYLMYADLDMDHPEVVTELKNWGKWYVNTTNIDGFRLDAVKHIKFQFFPDWLSYVRSQTGKPLFTVGEYWSYDINKLHNYITKTNGTMSLFDAPLHNKFYTASKSGGAFDMRTLMTNTLMKDQPTLAVTFVDNHDTEPGQALQSWVDPWFKPLAYAFILTRQEGYPCVFYGDYYGIPQYNIPSLKSKIDPLLIARRDYAYGTQHDYLDHSDIIGWTREGVTEKPGSGLAALITDGPGGSKWMYVGKRHAGKVFYDLTGNRSDTVTINSDGWGEFKVNGGSVSVWVPRKTTVSTIARPITTRPWTGEFVRWTEPRLVAWP

SEQ ID NO: 17789 - protein, 515 aa, Geobacillus stearothermophilus
AAPFNGTMMQYFEWYLPDDGTLWTKVANEANNLSSLGITALWLPPAYKGTSRSDVGYGVYDLYDLGEFNQKGTVRTKYGTKAQYLQAIQAAHAAGMQVYADVVFDHKGGADGTEWVDAVEVNPSDRNQEISGTYQIQAWTKFDFPGRGNTYSSFKWRWYHFNGVDWDESRKLSRIYKFRGIGKKWNEEVDTENGNYDYLMYADLDMNHPEVVTELKNWGKWYVNTTNIDGFRLDAVKHIKFSFFPDWLSYVRSQTGKPLFTVGEYWSYDINKLHNYITKTDGTMSLFDAPLHNKFYTASKSGGAFDMRTLMTNTLMKDQPTLAVTFVDNHDTEPGQALQSWVDPWFKPLAYAFILTRQEGYPCVFYGDYYGIPQYNIPSLKSKIDPLLIARRDYAYGTQHDYLDHSDIIGWTREGGTEKPGSGLAALITDGPGGSKWMYVGKQHAGKVFYDLTGNRSDTVTINSDGWGEFKVNGGSVSVWVPRKTTVSTIARPITTRPWTGEFVRWTEPRLVAWP

SEQ ID NO: 17790 - protein, 515 aa, Geobacillus stearothermophilus
AAPFNGTMMQYFEWYLPDDGTLWTKVANEANNLSSLGITALWLPPAYKGTSRSDVGYGVYDLYDLGEFNQKGTVRTKYGTKAQYLQAIQAAHAAGMQVYADVVFDHKGGADGTEWVDAVEVNPSDRNQEISGTYQIQAWTKFDFPGRGNTYSSFKWRWYHFDGVDWDESRKLSRIYKFRGIGKAWDWEVDTENGNYDYLMYADLDMDHPEVVTELKNWGKWYVNTTNIDGFRLDAVKHIKFSFFPDWLSYVRSQTGKPLFTVGEYWSYDINKLHNYITKTNGTMSLFDAPLHNKFYTASKSGGAFDMRTLMTNTLMKDRPTLAVTFVDNHDTEPGQALQSWVDPWFKPLAYAFILTREEGYPCVFYGDYYGIPQYNIPSLKSKIDPLLIARRDYAYGTQHDYLDHSDIIGWTREGVTEKPGSGLAALITDGPGGSKWMYVGKEHAGKVFYDLTGNRSDTVTINSDGWGEFKVNGGSVSVWVPRKTTVSTIARPITTRPWTGEFVRWTEPRLVAWP

SEQ ID NO: 17791 - protein, 515 aa, Geobacillus stearothermophilus
AAPFNGTMMQYFEWYLPDDGTLWTKVANEANNLSSLGITALWLPPAYKGTSRSDVGYGVYDLYDLGEFNQKGTVRTKYGTKAQYLQAIQAAHAAGMRVYADVVFDHKGGADGTEWVDAVEVNPSDRNQEISGTYQIQAWTKFDFPGRGNTYSSFKWRWYHFDGVDWDESRKLSRIYKFRGIGKAWDWEVDTENGNYDYLMYADLDMDHPEVVTELKNWGKWYVNTTNIDGFRLDAVKHIKFSFFPDWLSYVRSQTGKPLFTVGEYWSYDINKLHNYITKTNGTMSLFDAPLHNKFYTASKSGGAFDMRTLMTNTLMKDQPTLAVTFVDNHDTEPGQALQSWVDPWFKPLAYAFILTREEGYPCVFYGDYYGIPQYNIPSLKSKIDPLLIARRDYAYGTQHDYLDHSDIIGWTREGVTEKPGSGLAALITDGPGGSKWMYVGKEHAGKVFYDLTGNRSDTVTINSDGWGEFKVNGGSVSVWVPRKTTVSTIARPITTRPWTGEFVRWTEPRLVAWP

SEQ ID NO: 17792 - protein, 515 aa, Geobacillus stearothermophilus
AAPFNGTMMQYFEWYLPDDGTLWTKVANEANNLSSLGITALWLPPAYKGTSRSDVGYGVYDLYDLGEFNQKGTVRTKYGTKAQYLQAIQAAHAAGMEVYADVVFDHKGGADGTEWVDAVEVNPSDRNQEISGTYQIQAWTKFDFPGRGNTYSSFKWRWYHFDGVDWDESRKLSRIYKFRGIGKAWDWEVDTENGNYDYLMYADLDMDHPEVVTELKNWGKWYVNTTNIDGFRLDAVKHIKFQFFPDWLSYVRSQTGKPLFTVGEYWSYDINKLHNYITKTNGTMSLFDAPLHNKFYTASKSGGAFDMRTLMTNTLMKDQPTLAVTFVDNHDTEPGQALQSWVDPWFKPLAYAFILTREEGYPCVFYGDYYGIPQYNIPSLKSKIDPLLIARRDYAYGTQHDYLDHSDIIGWTREGVTEKPGSGLAALITDGPGGSKWMYVGKQHAGKVFYDLTGNRSDTVTINSDGWGEFKVNGGSVSVWVPRKTTVSTIARPITTRPWTGEFVRWTEPRLVAWP

SEQ ID NO: 17793 - protein, 515 aa, Geobacillus stearothermophilus
AAPFNGTMMQYFEWYLPDDGTLWTKVANEANNLSSLGITALWLPPAYKGTSRSDVGYGVYDLYDLGEFNQKGTVRTKYGTKAQYLQAIQAAHAAGMEVYADVVFDHKGGADGTEWVDAVEVNPSDRNQEISGTYQIQAWTKFDFPGRGNTYSSFKWRWYHFDGVDWDESRKLSRIYKFRGIGKAWDWEVDTENGNYDYLMYADLDMDHPEVVTELKNWGKWYVNTTNIDGFRLDAVKHIKFSFFPDWLSYVRSQTGKPLFTVGEYWSYDINKLHNYITKTNGTMSLFDAPLHNKFYTASKSGGAFDMRTLMTNTLMKDRPTLAVTFVDNHDTEPGQALQSWVDPWFKPLAYAFILTRREGYPCVFYGDYYGIPQYNIPSLKSKIDPLLIARRDYAYGTQHDYLDHSDIIGWTREGVTEKPGSGLAALITDGPGGSKWMYVGKQHAGKVFYDLTGNRSDTVTINSDGWGEFKVNGGSVSVWVPRKTTVSTIARPITTRPWTGEFVRWTEPRLVAWP

SEQ ID NO: 17794 - protein, 515 aa, Geobacillus stearothermophilus
AAPFNGTMMQYFEWYLPDDGTLWTKVANEANNLSSLGITALWLPPAYKGTSRSDVGYGVYDLYDLGEFNQKGTVRTKYGTKAQYLQAIQAAHAAGMRVYADVVFDHKGGADGTEWVDAVEVNPSDRNQEISGTYQIQAWTKFDFPGRGNTYSSFKWRWYHFDGVDWDESRKLSRIYKFRGIGKAWDWEVDTENGNYDYLMYADLDMDHPEVVTELKNWGKWYVNTTNIDGFRLDAVKHIKFSFFPDWLSYVRSQTGKPLFTVGEYWSYDINKLHNYITKTNGTMSLFDAPLHNKFYTASKSGGAFDMRTLMTNTLMKDRPTLAVTFVDNHDTEPGQALQSWVDPWFKPLAYAFILTRQEGYPCVFYGDYYGIPQYNIPSLKSKIDPLLIARRDYAYGTQHDYLDHSDIIGWTREGVTEKPGSGLAALITDGPGGSKWMYVGKEHAGKVFYDLTGNRSDTVTINSDGWGEFKVNGGSVSVWVPRKTTVSTIARPITTRPWTGEFVRWTEPRLVAWP

SEQ ID NO: 17795 - protein, 515 aa, Geobacillus stearothermophilus
AAPFNGTMMQYFEWYLPDDGTLWTKVANEANNLSSLGITALWLPPAYKGTSRSDVGYGVYDLYDLGEFNQKGTVRTKYGTKAQYLQAIQAAHAAGMRVYADVVFDHKGGADGTEWVDAVEVNPSDRNQEISGTYQIQAWTKFDFPGRGNTYSSFKWRWYHFDGVDWDESRKLSRIYKFRGIGKAWDWEVDTENGNYDYLMYADLDMDHPEVVTELKNWGKWYVNTTNIDGFRLDAVKHIKFQFFPDWLSYVRSQTGKPLFTVGEYWSYDINKLHNYITKTNGTMSLFDAPLHNKFYTASKSGGAFDMRTLMTNTLMKDQPTLAVTFVDNHDTEPGQALQSWVDPWFKPLAYAFILTREEGYPCVFYGDYYGIPQYNIPSLKSKIDPLLIARRDYAYGTQHDYLDHSDIIGWTREGVTEKPGSGLAALITDGPGGSKWMYVGKQHAGKVFYDLTGNRSDTVTINSDGWGEFKVNGGSVSVWVPRKTTVSTIARPITTRPWTGEFVRWTEPRLVAWP

SEQ ID NO: 17796 - protein, 515 aa, Geobacillus stearothermophilus
AAPFNGTMMQYFEWYLPDDGTLWTKVANEANNLSSLGITALWLPPAYKGTSRSDVGYGVYDLYDLGEFNQKGTVRTKYGTKAQYLQAIQAAHAAGMRVYADVVFDHKGGADGTEWVDAVEVNPSDRNQEISGTYQIQAWTKFDFPGRGNTYSSFKWRWYHFDGVDWDESRKLSRIYKFRGIGKAWDWEVDTENGNYDYLMYADLDMDHPEVVTELKNWGKWYVNTTNIDGFRLDAVKHIKFSFFPDWLSYVRSQTGKPLFTVGEYWSYDINKLHNYITKTNGTMSLFDAPLHNKFYTASKSGGAFDMRTLMTNTLMKDQPTLAVTFVDNHDTEPGQALQSWVDPWFKPLAYAFILTRREGYPCVFYGDYYGIPQYNIPSLKSKIDPLLIARRDYAYGTQHDYLDHSDIIGWTREGVTEKPGSGLAALITDGPGGSKWMYVGKEHAGKVFYDLTGNRSDTVTINSDGWGEFKVNGGSVSVWVPRKTTVSTIARPITTRPWTGEFVRWTEPRLVAWP

SEQ ID NO: 17797 - protein, 515 aa, Geobacillus stearothermophilus
AAPFNGTMMQYFEWYLPDDGTLWTKVANEANNLSSLGITALWLPPAYKGTSRSDVGYGVYDLYDLGEFNQKGTVRTKYGTKAQYLQAIQAAHAAGMQVYADVVFDHKGGADGTEWVDAVEVNPSDRNQEISGTYQIQAWTKFDFPGRGNTYSSFKWRWYHFDGVDWDESRKLSRIYKFRGIGKAWDWEVDTENGNYDYLMYADLDMDHPEVVTELKNWGPWYVLTTNIDGFRLDAVKHIKFSFFPDWLSYVRSSTGKPLFTVGEYWSYDINKLHNYITKTNGTMSLFDAPLHNKFYTASKSGGAFDMRTLMTNTLMKDQPTLAVTFVDNHDTEPGQALQSWVDPWFKPLAYAFILTRQEGYPCVFYGDYYGIPQYNIPSLKSKIDPLLIARRDYAYGTQHDYLDHSDIIGWTREGVTEKPGSGLAALITDGPGGSKWMYVGKQHAGKVFYDLTGNRSDTVTINSDGWGEFKVNGGSVSVWVPRKTTVSTIARPITTRPWTGEFVRWTEPRLVAWP

SEQ ID NO: 17798 - protein, 515 aa, Geobacillus stearothermophilus
AAPFNGTMMQYFEWYLPDDGTLWTKVANEANNLSSLGITALWLPPAYKGTSRSDVGYGVYDLYDLGEFNQKGTVRTKYGTKAQYLQAIQAAHAAGMQVYADVVFDHKGGADGTEWVDAVEVNPSDRNQVISGTYQIQAWTKFDFPGRGNTYSSFKWRWYHFDGVDWDESRKLSRIYLFVGIGKAWDWEVDTENGNYDYLMYADLDMDHPEVVTELKNWGKWYVNTTNIDGFRLDAVKHIKFSFFPDWLSYVRSQTGKPLFTVGEYWSYDINKLHNYITKTNGTMSLFDAPLHNKFYTASKSGGAFDMRTLMTNTLMKDQPTLAVTFVDNHDTEPGQALQSWVDPWFKPLAYAFILTRQEGYPCVFYGDYYGIPQYNIPSLKSKIDPLLIARRDYAYGTQHDYLDHSDIIGWTREGVTEKPGSGLAALITDGPGGSKWMYVGKQHAGKVFYDLTGNRSDTVTINSDGWGEFKVNGGSVSVWVPRKTTVSTIARPITTRPWTGEFVRWTEPRLVAWP

SEQ ID NO: 17799 - protein, 515 aa, Geobacillus stearothermophilus
AAPFNGTMMQYFEWYLPDDGTLWTKVANEANNLSSLGITALWLPPAYKGTSRSDVGYGVYDLYDLGEFNQKGTVRTKYGTKAQYLQAIQAAHAAGMRVYADVVFDHKGGADGTEWVDAVEVNPSDRNQEISGTYQIQAWTKFDFPGRGNTYSSFKWRWYHFDGVDWDESRKLSRIYKFRGIGKAWDWEVDTENGNYDYLMYADLDMDHPEVVTELKNWGKWYVNTTNIDGFRLDAVKHIKFQFFPDWLSYVRSQTGKPLFTVGEYWSYDINKLHNYITKTNGTMSLFDAPLHNKFYTASKSGGAFDMRTLMTNTLMKDEPTLAVTFVDNHDTEPGQALQSWVDPWFKPLAYAFILTRQEGYPCVFYGDYYGIPQYNIPSLKSKIDPLLIARRDYAYGTQHDYLDHSDIIGWTREGVTEKPGSGLAALITDGPGGSKWMYVGKQHAGKVFYDLTGNRSDTVTINSDGWGEFKVNGGSVSVWVPRKTTVSTIARPITTRPWTGEFVRWTEPRLVAWP

SEQ ID NO: 17800 - protein, 515 aa, Geobacillus stearothermophilus
AAPFNGTMMQYFEWYLPDDGTLWTKVANEANNLSSLGITALWLPPAYKGTSRSDVGYGVYDLYDLGEFNQKGTVRTKYGTKAQYLQAIQAAHAAGMQVYADVVFDHKGGADGTEWVDAVEVNPSDRNQEISGTYQIQAWTKFDFPGRGNTYSSFKWRWYHFDGVDWDESRKLSRIYKFRGIGKAWDWEVDTENGNYDYLMYADLDMDHPEVVTELKNWGKWYVNTTNIDGFRLDAVKHIKFQFFPDWLSYVRSQTGKPLFTVGEYWSYDINKLHNYITKTNGTMSLFDAPLHNKFYTASKSGGAFDMRTLMTNTLMKDQPTLAVTFVDNHDTEPGQALQSWVDPWFKPLAYAFILTRREGYPCVFYGDYYGIPQYNIPSLKSKIDPLLIARRDYAYGTQHDYLDHSDIIGWTREGVTEKPGSGLAALITDGPGGSKWMYVGKEHAGKVFYDLTGNRSDTVTINSDGWGEFKVNGGSVSVWVPRKTTVSTIARPITTRPWTGEFVRWTEPRLVAWP

SEQ ID NO: 17801 - protein, 515 aa, Geobacillus stearothermophilus
AAPFNGTMMQYFEWYLPDDGTLWTKVANEANNLSSLGITALWLPPAYKGTSRSDVGYGVYDLYDLGEFNQKGTVRTKYGTKAQYLQAIQAAHAAGMEVYADVVFDHKGGADGTEWVDAVEVNPSDRNQEISGTYQIQAWTKFDFPGRGNTYSSFKWRWYHFDGVDWDESRKLSRIYKFRGIGKAWDWEVDTENGNYDYLMYADLDMDHPEVVTELKNWGKWYVNTTNIDGFRLDAVKHIKFSFFPDWLSYVRSQTGKPLFTVGEYWSYDINKLHNYITKTNGTMSLFDAPLHNKFYTASKSGGAFDMRTLMTNTLMKDEPTLAVTFVDNHDTEPGQALQSWVDPWFKPLAYAFILTRQEGYPCVFYGDYYGIPQYNIPSLKSKIDPLLIARRDYAYGTQHDYLDHSDIIGWTREGVTEKPGSGLAALITDGPGGSKWMYVGKEHAGKVFYDLTGNRSDTVTINSDGWGEFKVNGGSVSVWVPRKTTVSTIARPITTRPWTGEFVRWTEPRLVAWP

SEQ ID NO: 17802 - protein, 515 aa, Geobacillus stearothermophilus
AAPFNGTMMQYFEWYLPDDGTLWTKVANEANNLSSLGITALWLPPAYKGTSRSDVGYGVYDLYDLGEFNQKGTVRTKYGTKAQYLQAIQAAHAAGMQVYADVVFDHKGGADGTEWVDAVEVNPSDRNQEISGTYQIQAWTKFDFPGRGNTYSSFKWRWYHFDGVDWDESRKLSRIYKFRGIGKAWDWEVDTENGNYDYLMYADLDMDHPEVVTELKNWGKWYVNTTNIDGFRLDAVKHIKFQFFPDWLSYVRSQTGKPLFTVGEYWSYDINKLHNYITKTNGTMSLFDAPLHNKFYTASKSGGAFDMRTLMTNTLMKDQPTLAVTFVDNHDTEPGQALQSWVDPWFKPLAYAFILTREEGYPCVFYGDYYGIPQYNIPSLKSKIDPLLIARRDYAYGTQHDYLDHSDIIGWTREGVTEKPGSGLAALITDGPGGSKWMYVGKRHAGKVFYDLTGNRSDTVTINSDGWGEFKVNGGSVSVWVPRKTTVSTIARPITTRPWTGEFVRWTEPRLVAWP

SEQ ID NO: 17803 - protein, 515 aa, Geobacillus stearothermophilus
AAPFNGTMMQYFEWYLPDDGTLWTKVANEANNLSSLGITALWLPPAYKGTSRSDVGYGVYDLYDLGEFNQKGTVRTKYGTKAQYLQAIQAAHAAGMQVYADVVFDHKGGADGTEWVDAVEVNPSDRNQEISGTYQIQAWTKFDFPGRGNTYSSFKWRWYHFDGVDWDESRKLSRIYKFRGIGKAWDWEVDTENGNYDYLMYADLDMDHPEVVTELKNWGKWYVNTTNIDGFRLDAVKHIKFSFFPDWLSYVRSQTGKPLFTVGEYWSYDINKLHNYITKTNGTMSLFDAPLHNKFYTASKSGGAFDMRTLMTNTLMKDEPTLAVTFVDNHDTEPGQALQSWVDPWFKPLAYAFILTREEGYPCVFYGDYYGIPQYNIPSLKSKIDPLLIARRDYAYGTQHDYLDHSDIIGWTREGVTEKPGSGLAALITDGPGGSKWMYVGKRHAGKVFYDLTGNRSDTVTINSDGWGEFKVNGGSVSVWVPRKTTVSTIARPITTRPWTGEFVRWTEPRLVAWP

SEQ ID NO: 17804 - protein, 515 aa, Geobacillus stearothermophilus
AAPFNGTMMQYFEWYLPDDGTLWTKVANEANNLSSLGITALWLPPAYKGTSRSDVGYGVYDLYDLGEFNQKGTVRTKYGTKAQYLQAIQAAHAAGMEVYADVVFDHKGGADGTEWVDAVEVNPSDRNQEISGTYQIQAWTKFDFPGRGNTYSSFKWRWYHFDGVDWDESRKLSRIYKFRGIGKAWDWEVDTENGNYDYLMYADLDMDHPEVVTELKNWGKWYVNTTNIDGFRLDAVKHIKFSFFPDWLSYVRSQTGKPLFTVGEYWSYDINKLHNYITKTNGTMSLFDAPLHNKFYTASKSGGAFDMRTLMTNTLMKDEPTLAVTFVDNHDTEPGQALQSWVDPWFKPLAYAFILTREEGYPCVFYGDYYGIPQYNIPSLKSKIDPLLIARRDYAYGTQHDYLDHSDIIGWTREGVTEKPGSGLAALITDGPGGSKWMYVGKQHAGKVFYDLTGNRSDTVTINSDGWGEFKVNGGSVSVWVPRKTTVSTIARPITTRPWTGEFVRWTEPRLVAWP

SEQ ID NO: 17805 - protein, 515 aa, Geobacillus stearothermophilus
AAPFNGTMMQYFEWYLPDDGTLWTKVANEANNLSSLGITALWLPPAYKGTSRSDVGYGVYDLYDLGEFNQKGTVRTKYGTKAQYLQAIQAAHAAGMQVYADVVFDHKGGADGTEWVDAVEVNPSDRNQVISGTYQIQAWTKFDFPGRGNTYSSFKWRWYHFDGVDWDESRKLSRIYLFEGIGKAWDWEVDTENGNYDYLMYADLDMDHPEVVTELKNWGKWYVNTTNIDGFRLDAVKHIKFSFFPDWLSYVRSQTGKPLFTVGEYWSYDINKLHNYITKTNGTMSLFDAPLHNKFYTASKSGGAFDMRTLMTNTLMKDQPTLAVTFVDNHDTEPGQALQSWVDPWFKPLAYAFILTRQEGYPCVFYGDYYGIPQYNIPSLKSKIDPLLIARRDYAYGTQHDYLDHSDIIGWTREGVTEKPGSGLAALITDGPGGSKWMYVGKQHAGKVFYDLTGNRSDTVTINSDGWGEFKVNGGSVSVWVPRKTTVSTIARPITTRPWTGEFVRWTEPRLVAWP

SEQ ID NO: 17806 - protein, 515 aa, Geobacillus stearothermophilus
AAPFNGTMMQYFEWYLPDDGTLWTKVANEANNLSSLGITALWLPPAYKGTSRSDVGYGVYDLYDLGEFNQKGTVRTKYGTKAQYLQAIQAAHAAGMEVYADVVFDHKGGADGTEWVDAVEVNPSDRNQEISGTYQIQAWTKFDFPGRGNTYSSFKWRWYHFDGVDWDESRKLSRIYKFRGIGKAWDWEVDTENGNYDYLMYADLDMDHPEVVTELKNWGKWYVNTTNIDGFRLDAVKHIKFSFFPDWLSYVRSQTGKPLFTVGEYWSYDINKLHNYITKTNGTMSLFDAPLHNKFYTASKSGGAFDMRTLMTNTLMKDRPTLAVTFVDNHDTEPGQALQSWVDPWFKPLAYAFILTRQEGYPCVFYGDYYGIPQYNIPSLKSKIDPLLIARRDYAYGTQHDYLDHSDIIGWTREGVTEKPGSGLAALITDGPGGSKWMYVGKRHAGKVFYDLTGNRSDTVTINSDGWGEFKVNGGSVSVWVPRKTTVSTIARPITTRPWTGEFVRWTEPRLVAWP

SEQ ID NO: 17807 - protein, 515 aa, Geobacillus stearothermophilus
AAPFNGTMMQYFEWYLPDDGTLWTKVANEANNLSSLGITALWLPPAYKGTSRSDVGYGVYDLYDLGEFNQKGTVRTKYGTKAQYLQAIQAAHAAGMEVYADVVFDHKGGADGTEWVDAVEVNPSDRNQEISGTYQIQAWTKFDFPGRGNTYSSFKWRWYHFDGVDWDESRKLSRIYKFRGIGKAWDWEVDTENGNYDYLMYADLDMDHPEVVTELKNWGKWYVNTTNIDGFRLDAVKHIKFSFFPDWLSYVRSQTGKPLFTVGEYWSYDINKLHNYITKTNGTMSLFDAPLHNKFYTASKSGGAFDMRTLMTNTLMKDQPTLAVTFVDNHDTEPGQALQSWVDPWFKPLAYAFILTREEGYPCVFYGDYYGIPQYNIPSLKSKIDPLLIARRDYAYGTQHDYLDHSDIIGWTREGVTEKPGSGLAALITDGPGGSKWMYVGKRHAGKVFYDLTGNRSDTVTINSDGWGEFKVNGGSVSVWVPRKTTVSTIARPITTRPWTGEFVRWTEPRLVAWP

SEQ ID NO: 17808 - protein, 491 aa, Geobacillus stearothermophilus
AAPFNGTMMQYFEWYLPDDGTLWTKVANEANNLSSLGITALWLPPAYKGTSRSDVGYGAYDLYDLGEFNQKGTVRTKYGTKAQYLQAIQAAHAAGMQVYADVVFDHKGGADGTEWVDAVEVNPSDRNQVISGTYQIQAWTKFDFPGRGNTYSSFKWRWYHFDGVDWDESRKLSRIYLFEGKAWDWPVDTEFGNYDYLMYADLDMDHPEVTTELKNWGKWYVNTTNIDGFRLDAVKHIKFSFFPDWLSYVRSSTGKPLFTVGEYWSGDINKLHHYITKTDGTVSLFDAPLHYKFYNASKSGGAFDMRTLMTNTLMKDQPTLAVTFVDNHDTEPGQALQSWVDPWFKPLAYAFILTRQEGYPCVFYGDYYGIPQYNIPSLKSKIDPLLIARRDYAYGTQHDYLDHSDIIGWTREGGTEKPGSGLAALITDGPGGSKWMYVGKQHAGKVFYDLTGNRSDTVTINSDGWGEFKVNGGSVSVWVPRKTTVSTIARP

SEQ ID NO: 17809 - protein, 491 aa, Geobacillus stearothermophilus
AAPFNGTMMQYFEWYLPDDGTLWTKVANEANNLSSLGITALWLPPAYKGTSRSDVGYGAYDLYDLGEFNQKGTVRTKYGTKAQYLQAIQAAHAAGMQVYADVVFDHKGGADGTEWVDAVEVNPSDRNQVISGTYQIQAWTKFDFPGRGNTYSSFKWRWYHFDGVDWDESRKLSRIYLFGGKAWDWEVDTEFGNYDYLMYADLDMDHPEVTTELKNWGKWYVNTTNIDGFRLDAVKHIKFSFFPDWLSYVRSSTGKPLFTVGEYWSGDINKLHNYITKTDGTVSLFDAPLHYKFYNASKSGGAFDMRTLMTNTLMKDQPTLAVTFVDNHDTEPGQALQSWVDPWFKPLAYAFILTRQEGYPCVFYGDYYGIPQYNIPSLKSKIDPLLIARRDYAYGTQHDYLDHSDIIGWTREGGTEKPGSGLAALITDGPGGSKWMYVGKQHAGKVFYDLTGNRSDTVTINSDGWGEFKVNGGSVSVWVPRKTTVSTIARP

SEQ ID NO: 17810 - protein, 491 aa, Geobacillus stearothermophilus
AAPFNGTMMQYFEWYLPDDGTLWTKVANEANNLSSLGITALWLPPAYKGTSRSDVGYGAYDLYDLGEFNQKGTVRTKYGTKAQYLQAIQAAHAAGMQVYADVVFDHKGGADGTEWVDAVEVNPSDRNQVISGTYQIQAWTKFDFPGRGNTYSSFKWRWYHFDGVDWDESRKLSRIYLFEGKAWDWPVDTEFGNYDYLMYADLDMDHPEVTTELKNWGKWYVNTTNIDGFRLDAVKHIKFSFFPDWLSYVRSSTGKPLFTVGEYWSGDINKLHFYITKTDGTVSLFDAPLHYKFYNASKSGGAFDMRTLMTNTLMKDQPTLAVTFVDNHDTEPGQALQSWVDPWFKPLAYAFILTRQEGYPCVFYGDYYGIPQYNIPSLKSKIDPLLIARRDYAYGTQHDYLDHSDIIGWTREGGTEKPGSGLAALITDGPGGSKWMYVGKQHAGKVFYDLTGNRSDTVTINSDGWGEFKVNGGSVSVWVPRKTTVSTIARP

SEQ ID NO: 17811 - protein, 491 aa, Geobacillus stearothermophilus
AAPFNGTMMQYFEWYLPDDGTLWTKVANEANNLSSLGITALWLPPAYKGTSRSDVGYGAYDLYDLGEFNQKGTVRTKYGTKAQYLQAIQAAHAAGMQVYADVVFDHKGGADGTEWVDAVEVNPSDRNQVISGTYQIQAWTKFDFPGRGNTYSSFKWRWYHFDGVDWDESRKLSRIYLFEGKAWDWPVDTEFGNYDYLMYADLDMDHPEVTTELKNWGKWYVNTTNIDGFRLDAVKHIKFSFFPDWLSYVRSSTGKPLFTVGEYWSGDINKLHYYITKTDGTVSLFDAPLHYKFYNASKSGGAFDMRTLMTNTLMKDQPTLAVTFVDNHDTEPGQALQSWVDPWFKPLAYAFILTRQEGYPCVFYGDYYGIPQYNIPSLKSKIDPLLIARRDYAYGTQHDYLDHSDIIGWTREGGTEKPGSGLAALITDGPGGSKWMYVGKQHAGKVFYDLTGNRSDTVTINSDGWGEFKVNGGSVSVWVPRKTTVSTIARP

SEQ ID NO: 17812 - protein, 491 aa, Geobacillus stearothermophilus
AAPFNGTMMQYFEWYLPDDGTLWTKVANEANNLSSLGITALWLPPAYKGTSRSDVGYGAYDLYDLGEFNQKGTVRTKYGTKAQYLQAIQAAHAAGMQVYADVVFDHKGGADGTEWVDAVEVNPSDRNQVISGTYQIQAWTKFDFPGRGNTYSSFKWRWYHFDGVDWDESRKLSRIYLFEGKAWDWPVDTEFGNYDYLMYADLDMDHPEVTTELKNWGKWYVNTTNIDGFRLDAVKHIKFSFFPDWLSYVRSSTGKPLFTVGEYWSGDINKLHWYITKTDGTVSLFDAPLHYKFYNASKSGGAFDMRTLMTNTLMKDQPTLAVTFVDNHDTEPGQALQSWVDPWFKPLAYAFILTRQEGYPCVFYGDYYGIPQYNIPSLKSKIDPLLIARRDYAYGTQHDYLDHSDIIGWTREGGTEKPGSGLAALITDGPGGSKWMYVGKQHAGKVFYDLTGNRSDTVTINSDGWGEFKVNGGSVSVWVPRKTTVSTIARP

SEQ ID NO: 17813 - protein, 491 aa, Geobacillus stearothermophilus
AAPFNGTMMQYFEWYLPDDGTLWTKVANEANNLSSLGITALWLPPAYKGTSRSDVGYGAYDLYDLGEFNQKGTVRTKYGTKAQYLQAIQAAHAAGMQVYADVVFDHKGGADGTEWVDAVEVNPSDRYQVISGTYQIQAWTKFDFPGRGNTYSSFKWRWYHFDGVDWDESRKLSRIYLFEGKAWDWPVDTEFGNYDYLMYADLDMDHPEVTTELKNWGKWYVNTTNIDGFRLDAVKHIKFSFFPDWLSYVRSSTGKPLFTVGEYWSGDINKLHNYITKTDGTVSLFDAPLHYKFYNASKSGGAFDMRTLMTNTLMKDQPTLAVTFVDNHDTEPGQALQSWVDPWFKPLAYAFILTRQEGYPCVFYGDYYGIPQYNIPSLKSKIDPLLIARRDYAYGTQHDYLDHSDIIGWTREGGTEKPGSGLAALITDGPGGSKWMYVGKQHAGKVFYDLTGNRSDTVTINSDGWGEFKVNGGSVSVWVPRKTTVSTIARP

SEQ ID NO: 17814 - protein, 491 aa, Geobacillus stearothermophilus
AAPFNGTMMQYFEWYLPDDGTLWTKVANEANNLSSLGITALWLPPAYKGTSRSDVGYGAYDLYDLGEFNQKGTVRTKYGTKAQYLQAIQAAHAAGMQVYADVVFDHKGGADGTEWVDAVEVNPSDRNQVISGTYQIQAWTKFDFPGRGNTYSSFKWRWYHFDGVDWDESRKLSRIYLFEGKAWDWEVDTEFGNYDYLMYADLDMDHPEVTTELKNWGKWYVNTTNIDGFRLDAVKHIKFSFFPDWLSYVRSSTGKPLFTVGEYWSGDINKLHNYITKTDGTVSLFDAPLHYKFYNASKSGGAFDMRTLMTNTLMKDQPTLAVTFVDNHDTEPGQALQSWVDPWFKPLAYAFILTRQEGYPCVFYGDYYGIPQYNIPSLKSKIDPLLIARRDYAYGTQHDYLDHSDIIGWTREGGTEKPGSGLAALITDGPGGSKWMYVGKQHAGKVFYDLTGNRSDTVTINSDGWGEFKVNGGSVSVWVPRKTTVSTIARP

SEQ ID NO: 17815 - protein, 490 aa, Aspergillus niger CBS 513.88
LALSGLVCTGLAATPADWRSQSIYFLLTDRFARTDGSTTATCNTADQKYCGGTWQGIIDKLDYIQGMGFTAIWITPVTAQLPQTTAYGDAYHGYWQQDIYSLNENYGTADDLKALSSALHERGMYLMVDVVANHMGYDGAGSSVDYSVFKPFSSQDYFHPFCFIQNYEDQTQVEDCWLGDNTVSLPDLDTTKDVVKNEWYDWVGSLVSNYSIDGLRIDTVKHVQKDFWPGYNKAAGVYCIGEVLDGDPAYTCPYQNVMDGVLNYPIYYPLLNAFKSTSGSMDDLYNMINTVKSDCPDSTLLGTFVENHDNPRFASYTNDIALAKNVAAFIILNDGIPIIYAGQEQHYAGGNDPANREATWLSGYPTDSELYKLIASANAIRNYAISKDTGFVTYKNWPIYKDDTTIAMRKGTDGSQIVTILSNKGASGDSYTLSLSGAGYTAGQQLTEVIGCTTVTVGSDGNVPVPMAGGLPRVLYPTEKLAGSKICSSS

SEQ ID NO: 17816 - protein, 488 aa, Geobacillus stearothermophilus
AAPFNGTMMQYFEWYLPDDGTLWTKVANEANNLSSLGITALWLPPAYKGTSRSDVGYGVYDLYDLGEFNQKGTVRTKYGTKAQYLQAIQAAHAAGMEVYADVVFDHKGGADGTEWVDAVEVNPSDRNQEISGTYQIQAWTKFDFPGRGNTYSSFKWRWYHFDGVDWDESRKLSRIYKFRGIGKAWDWEVDTENGNYDYLMYADLDMDHPEVVTELKNWGKWYVNTTNIDGFRLDAVKHIKFQFFPDWLSYVRSQTGKPLFTVGEYWSYDINKLHNYITKTNGTMSLFDAPLHNKFYTASKSGGAFDMRTLMTNTLMKDQPTLAVTFVDNHDTEPGQALQSWVDPWFKPLAYAFILTRQEGYPCVFYGDYYGIPQYNIPSLKSKIDPLLIARRDYAYGTQHDYLDHSDIIGWTREGVTEKPGSGLAALITDGPGGSKWMYVGKEHAGKVFYDLTGNRSDTVTINSDGWGEFKVNGGSVSVWVPRKTTVS

SEQ ID NO: 17817 - protein, 488 aa, Geobacillus stearothermophilus
AAPFNGTMMQYFEWYLPDDGTLWTKVANEANNLSSLGITALWLPPAYKGTSRSDVGYGVYDLYDLGEFNQKGTVRTKYGTKAQYLQAIQAAHAAGMQVYADVVFDHKGDADGTEWVDAVEVNPSDRNQEISGTYQIQAWTKFDFPGRGNTYSSFKWRWYHFDGVDWDESRKLSRIYKFRGIGKAWDWEVDTENGNYDYLMYADLDMDHPEVVTELKNWGKWYVNTTNIDGFRLDAVKHIKFSFFPDWLSYVRSQTGKPLFTVGEYWSYDINKLHNYITKTNGTMSLFDAPLHNKFYTASKSGGAFDMRTLMTNTLMKDQPTLAVTFVDNHDTEPGQALQSWVDPWFKPLAYAFILTRQEGYPGVFYGDYYGIPQYNIPSLKSKIDPLLIARRDYAYGTQHDYLDHSDIIGWTREGVTEKPGSGLAALITDGPGGSKWMYVGKQHAGKVFYDLTGNRSDTVTITSDGWGEFKVNGGSVSVWVPRKTTVS

SEQ ID NO: 17818 - protein, 488 aa, Geobacillus stearothermophilus
AAPFNGTMMQYFEWYLPDDGTLWTKVANEANNLSSLGITALWLPPAYKGTSRSDVGYGVYDLYDLGEFNQKGTVRTKYGTKAQYLQAIQAAHAAGMRVYADVVFDHKGGADGTEWVDAVEVNPSDRNQEISGTYQIQAWTKFDFPGRGNTYSSFKWRWYHFDGVDWDESRKLSRIYKFRGIGKAWDWEVDTENGNYDYLMYADLDMDHPEVVTELKNWGKWYVNTTNIDGFRLDAVKHIKFQFFPDWLSYVRSQTGKPLFTVGEYWSYDINKLHNYITKTNGTMSLFDAPLHNKFYTASKSGGAFDMRTLMTNTLMKDQPTLAVTFVDNHDTEPGQALQSWVDPWFKPLAYAFILTRREGYPCVFYGDYYGIPQYNIPSLKSKIDPLLIARRDYAYGTQHDYLDHSDIIGWTREGVTEKPGSGLAALITDGPGGSKWMYVGKQHAGKVFYDLTGNRSDTVTINSDGWGEFKVNGGSVSVWVPRKTTVS

SEQ ID NO: 17819 - protein, 488 aa, Geobacillus stearothermophilus
AAPFNGTMMQYFEWYLPDDGTLWTKVANEANNLSSLGITALWLPPAYKGTSRSDVGYGVYDLYDLGEFNQKGTVRTKYGTKAQYLQAIQAAHAAGMRVYADVVFDHKGGADGTEWVDAVEVNPSDRNQEISGTYQIQAWTKFDFPGRGNTYSSFKWRWYHFDGVDWDESRKLSRIYKFRGIGKAWDWEVDTENGNYDYLMYADLDMDHPEVVTELKNWGKWYVNTTNIDGFRLDAVKHIKFSFFPDWLSYVRSQTGKPLFTVGEYWSYDINKLHNYITKTNGTMSLFDAPLHNKFYTASKSGGAFDMRTLMTNTLMKDEPTLAVTFVDNHDTEPGQALQSWVDPWFKPLAYAFILTRQEGYPCVFYGDYYGIPQYNIPSLKSKIDPLLIARRDYAYGTQHDYLDHSDIIGWTREGVTEKPGSGLAALITDGPGGSKWMYVGKRHAGKVFYDLTGNRSDTVTINSDGWGEFKVNGGSVSVWVPRKTTVS

SEQ ID NO: 17820 - protein, 488 aa, Geobacillus stearothermophilus
AAPFNGTMMQYFEWYLPDDGTLWTKVANEANNLSSLGITALWLPPAYKGTSRSDVGYGVYDLYDLGEFNQKGTVRTKYGTKAQYLQAIQAAHAAGMQVYADVVFDHKGGADGTEWVDAVEVNPSDRNQEISGTYQIQAATKFDFPGRGNTYSSFKWRWYHFDGVDWDESRKLSRIYKFRGIGKAWDWEVDTENGNYDYLMYADLDMDHPEVVTELKNWGKWYVNTTNIDGFRLDAVKHIKFSFFPDWLSYVRSQTGKPLFTVGEYWSYDINKLHNYITKTNGTMSLFDAPLHNKFYTASKSGGAFDMRTLMTNTLMKDQPTLAVTFVDNHDTEPGQALQSWVDPWFKPLAYAFILTRQEGYPGVFYGDYYGIPQYNIPSLKSKIDPLLIARRDYAYGTQHDYLDHSDIIGWTREGVTEKPGSGLAALITDGPGGSKWMYVGKQHAGKVFYDLTGNRSDTVTITSDGWGEFKVNGGSVSVWVPRKTTVS

SEQ ID NO: 17821 - protein, 488 aa, Geobacillus stearothermophilus
AAPFNGTMMQYFEWYLPDDGTLWTKVANEANNLSSLGITALWLPPAYKGTSRSDVGYGVYDLYDLGEFNQKGTVRTKYGTKAQYLQAIQAAHAAGMRVYADVVFDHKGGADGTEWVDAVEVNPSDRNQEISGTYQIQAWTKFDFPGRGNTYSSFKWRWYHFDGVDWDESRKLSRIYKFRGIGKAWDWEVDTENGNYDYLMYADLDMDHPEVVTELKNWGKWYVNTTNIDGFRLDAVKHIKFQFFPDWLSYVRSQTGKPLFTVGEYWSYDINKLHNYITKTNGTMSLFDAPLHNKFYTASKSGGAFDMRTLMTNTLMKDRPTLAVTFVDNHDTEPGQALQSWVDPWFKPLAYAFILTRQEGYPCVFYGDYYGIPQYNIPSLKSKIDPLLIARRDYAYGTQHDYLDHSDIIGWTREGVTEKPGSGLAALITDGPGGSKWMYVGKQHAGKVFYDLTGNRSDTVTINSDGWGEFKVNGGSVSVWVPRKTTVS

SEQ ID NO: 17822 - protein, 488 aa, Geobacillus stearothermophilus
AAPFNGTMMQYFEWYLPDDGTLWTKVANEANNLSSLGITALWLPPAYKGTSRSDVGYGVYDLYDLGEFNQKGTVRTKYGTKAQYLQAIQAAHAAGMRVYADVVFDHKGGADGTEWVDAVEVNPSDRNQEISGTYQIQAWTKFDFPGRGNTYSSFKWRWYHFDGVDWDESRKLSRIYKFRGIGKAWDWEVDTENGNYDYLMYADLDMDHPEVVTELKNWGKWYVNTTNIDGFRLDAVKHIKFSFFPDWLSYVRSQTGKPLFTVGEYWSYDINKLHNYITKTNGTMSLFDAPLHNKFYTASKSGGAFDMRTLMTNTLMKDRPTLAVTFVDNHDTEPGQALQSWVDPWFKPLAYAFILTRQEGYPCVFYGDYYGIPQYNIPSLKSKIDPLLIARRDYAYGTQHDYLDHSDIIGWTREGVTEKPGSGLAALITDGPGGSKWMYVGKRHAGKVFYDLTGNRSDTVTINSDGWGEFKVNGGSVSVWVPRKTTVS

SEQ ID NO: 17823 - protein, 488 aa, Geobacillus stearothermophilus
AAPFNGTMMQYFEWYLPDDGTLWTKVANEANNLSSLGITALWLPPAYKGTSRSDVGYGVYDLYDLGEFNQKGTVRTKYGTKAQYLQAIQAAHAAGMQVYADVVFDHKGGADGTEWVDAVEVNPSDRNQEISGTYQIQAWTKFDFPGRGNTYSSFKWRWYHFDGVDWDESRKLSRIYKFRGIGKAWDWEVDTENGNYDYLMYADLDMDHPEVVTELKNWGKWYVNTTNIDGFRLDAVKHIKFSFFPDWLSYVRSQTGKPLFTVGEYWSYDINKLHNYITKTNGTMSLFDAPLHNKFYTASKSGGAFDMRTLMTNTLMKDRPTLAVTFVDNHDTEPGQALQSWVDPWFKPLAYAFILTREEGYPCVFYGDYYGIPQYNIPSLKSKIDPLLIARRDYAYGTQHDYLDHSDIIGWTREGVTEKPGSGLAALITDGPGGSKWMYVGKRHAGKVFYDLTGNRSDTVTINSDGWGEFKVNGGSVSVWVPRKTTVS

SEQ ID NO: 17824 - protein, 488 aa, Geobacillus stearothermophilus
AAPFNGTMMQYFEWYLPDDGTLWTKVANEANNLSSLGITALWLPPAYKGTSRSDVGYGVYDLYDLGEFNQKGTVRTKYGTKAQYLQAIQAAHAAGMQVYADVVFDHKGGADGTEWVDAVEVNPSDRNQEISGTYQIQAWTKFDFPGRGNTYSSFKWRWYHFDGVDWDESRKLSRIYKFRGIGKAWDWEVDTENGNYDYLMYADLDMDHPEVVTELKNWGKWYVNTTNIDGFRLDAVKHIKFQFFPDWLSYVRSQTGKPLFTVGEYWSYDINKLHNYITKTNGTMSLFDAPLHNKFYTASKSGGAFDMRTLMTNTLMKDRPTLAVTFVDNHDTEPGQALQSWVDPWFKPLAYAFILTRREGYPCVFYGDYYGIPQYNIPSLKSKIDPLLIARRDYAYGTQHDYLDHSDIIGWTREGVTEKPGSGLAALITDGPGGSKWMYVGKQHAGKVFYDLTGNRSDTVTINSDGWGEFKVNGGSVSVWVPRKTTVS

SEQ ID NO: 17825 - protein, 488 aa, Geobacillus stearothermophilus
AAPFNGTMMQYFEWYLPDDGTLWTKVANEANNLSSLGITALWLPPAYKGTSRSDVGYGVYDLYDLGEFNQKGTVRTKYGTKAQYLQAIQAAHAAGMQVYADVVFDHKGGADGTEWVDAVEVNPSDRNQEISGTYQIQAWTKFDFPGRGNTYSSFKWRWYHFDGVDWDESRKLSRIYKFRGIGKAWDWEVDTENGNYDYLMYADLDMDHPEVVTELKNWGKWYVNTTNIDGFRLDAVKHIKFQFFPDWLSYVRSQTGKPLFTVGEYWSYDINKLHNYITKTNGTMSLFDAPLHNKFYTASKSGGAFDMRTLMTNTLMKDQPTLAVTFVDNHDTEPGQALQSWVDPWFKPLAYAFILTRREGYPCVFYGDYYGIPQYNIPSLKSKIDPLLIARRDYAYGTQHDYLDHSDIIGWTREGVTEKPGSGLAALITDGPGGSKWMYVGKRHAGKVFYDLTGNRSDTVTINSDGWGEFKVNGGSVSVWVPRKTTVS

SEQ ID NO: 17826 - protein, 488 aa, Geobacillus stearothermophilus
AAPFNGTMMQYFEWYLPDDGTLWTKVANEANNLSSLGITALWLPPAYKGTSRSDVGYGVYDLYDLGEFNQKGTVRTKYGTKAQYLQAIQAAHAAGMEVYADVVFDHKGGADGTEWVDAVEVNPSDRNQEISGTYQIQAWTKFDFPGRGNTYSSFKWRWYHFDGVDWDESRKLSRIYKFRGIGKAWDWEVDTENGNYDYLMYADLDMDHPEVVTELKNWGKWYVNTTNIDGFRLDAVKHIKFSFFPDWLSYVRSQTGKPLFTVGEYWSYDINKLHNYITKTNGTMSLFDAPLHNKFYTASKSGGAFDMRTLMTNTLMKDEPTLAVTFVDNHDTEPGQALQSWVDPWFKPLAYAFILTRQEGYPCVFYGDYYGIPQYNIPSLKSKIDPLLIARRDYAYGTQHDYLDHSDIIGWTREGVTEKPGSGLAALITDGPGGSKWMYVGKRHAGKVFYDLTGNRSDTVTINSDGWGEFKVNGGSVSVWVPRKTTVS

SEQ ID NO: 17827 - protein, 488 aa, Geobacillus stearothermophilus
AAPFNGTMMQYFEWYLPDDGTLWTKVANEANNLSSLGITALWLPPAYKGTSRSDVGYGVYDLYDLGEFNQKGTVRTKYGTKAQYLQAIQAAHAAGMEVYADVVFDHKGGADGTEWVDAVEVNPSDRNQEISGTYQIQAWTKFDFPGRGNTYSSFKWRWYHFDGVDWDESRKLSRIYKFRGIGKAWDWEVDTENGNYDYLMYADLDMDHPEVVTELKNWGKWYVNTTNIDGFRLDAVKHIKFSFFPDWLSYVRSQTGKPLFTVGEYWSYDINKLHNYITKTNGTMSLFDAPLHNKFYTASKSGGAFDMRTLMTNTLMKDQPTLAVTFVDNHDTEPGQALQSWVDPWFKPLAYAFILTRREGYPCVFYGDYYGIPQYNIPSLKSKIDPLLIARRDYAYGTQHDYLDHSDIIGWTREGVTEKPGSGLAALITDGPGGSKWMYVGKRHAGKVFYDLTGNRSDTVTINSDGWGEFKVNGGSVSVWVPRKTTVS

SEQ ID NO: 17828 - protein, 488 aa, Geobacillus stearothermophilus
AAPFNGTMMQYFEWYLPDDGTLWTKVANEANNLSSLGITALWLPPAYKGTSRSDVGYGVYDLYDLGEFNQKGTVRTKYGTKAQYLQAIQAAHAAGMQVYADVVFDHKGGADGTEWVDAVEVNPSDRNQEISGTYQIQAWTKFDFPGRGNTYSSFKWRWYHFDGVDWDESRKLSRIYKFRGIGKAWDWEVDTENGNYDYLMYADLDMDHPEVVTELKNWGKWYVNTTNIDGFRLDAVKHIKFSFFPDWLSYVRSQTGKPLFTVGEYWSYDINKLHNYITKTNGTMSLFDAPLHNKFYTASKSGGAFDMRTLMTNTLMKDEPTLAVTFVDNHDTEPGQALQSWVDPWFKPLAYAFILTRREGYPCVFYGDYYGIPQYNIPSLKSKIDPLLIARRDYAYGTQHDYLDHSDIIGWTREGVTEKPGSGLAALITDGPGGSKWMYVGKEHAGKVFYDLTGNRSDTVTINSDGWGEFKVNGGSVSVWVPRKTTVS

SEQ ID NO: 17829 - protein, 488 aa, Geobacillus stearothermophilus
AAPFNGTMMQYFEWYLPDDGTLWTKVANEANNLSSLGITALWLPPAYKGTSRSDVGYGVYDLYDLGEFNQKGTVRTKYGTKAQYLQAIQAAHAAGMQVYADVVFDHKGGADGTEWVDAVEVNPSDRNQEISGTYQIQAWTKFDFPGRGNTYSSFKWRWYHFDGVDWDESRKLSRIYKFRGIGKAWDWEVDTENGNYDYLMYADLDMDHPEVVTELKNWGKWYVNTTNIDGFRLDAVKHIKFQFFPDWLSYVRSQTGKPLFTVGEYWSYDINKLHNYITKTNGTMSLFDAPLHNKFYTASKSGGAFDMRTLMTNTLMKDEPTLAVTFVDNHDTEPGQALQSWVDPWFKPLAYAFILTREEGYPCVFYGDYYGIPQYNIPSLKSKIDPLLIARRDYAYGTQHDYLDHSDIIGWTREGVTEKPGSGLAALITDGPGGSKWMYVGKQHAGKVFYDLTGNRSDTVTINSDGWGEFKVNGGSVSVWVPRKTTVS

SEQ ID NO: 17830 - protein, 488 aa, Geobacillus stearothermophilus
AAPFNGTMMQYFEWYLPDDGTLWTKVANEANNLSSLGITALWLPPAYKGTSRSDVGYGVYDLYDLGEFNQKGTVRTKYGTKAQYLQAIQAAHAAGMQVYADVVFDHKGGADGTEWVDAVEVNPSDRNQEISGTYQIQALTKFDFPGRGNTYSSFKWRWYHFDGVDWDESRKLSRIYKFRGIGKAWDWEVDTENGNYDYLMYADLDMDHPEVVTELKNWGKWYVNTTNIDGFRLDAVKHIKFSFFPDWLSYVRSQTGKPLFTVGEYWSYDINKLHNYITKTNGTMSLFDAPLHNKFYTASKSGGAFDMRTLMTNTLMKDQPTLAVTFVDNHDTEPGQALQSWVDPWFKPLAYAFILTRQEGYPGVFYGDYYGIPQYNIPSLKSKIDPLLIARRDYAYGTQHDYLDHSDIIGWTREGVTEKPGSGLAALITDGPGGSKWMYVGKQHAGKVFYDLTGNRSDTVTITSDGWGEFKVNGGSVSVWVPRKTTVS

SEQ ID NO: 17831 - protein, 488 aa, Geobacillus stearothermophilus
AAPFNGTMMQYFEWYLPDDGTLWTKVANEANNLSSLGITALWLPPAYKGTSRSDVGYGVYDLYDLGEFNQKGTVRTKYGTKAQYLQAIQAAHAAGMRVYADVVFDHKGGADGTEWVDAVEVNPSDRNQEISGTYQIQAWTKFDFPGRGNTYSSFKWRWYHFDGVDWDESRKLSRIYKFRGIGKAWDWEVDTENGNYDYLMYADLDMDHPEVVTELKNWGKWYVNTTNIDGFRLDAVKHIKFQFFPDWLSYVRSQTGKPLFTVGEYWSYDINKLHNYITKTNGTMSLFDAPLHNKFYTASKSGGAFDMRTLMTNTLMKDQPTLAVTFVDNHDTEPGQALQSWVDPWFKPLAYAFILTRQEGYPCVFYGDYYGIPQYNIPSLKSKIDPLLIARRDYAYGTQHDYLDHSDIIGWTREGVTEKPGSGLAALITDGPGGSKWMYVGKEHAGKVFYDLTGNRSDTVTINSDGWGEFKVNGGSVSVWVPRKTTVS

SEQ ID NO: 17832 - protein, 488 aa, Geobacillus stearothermophilus
AAPFNGTMMQYFEWYLPDDGTLWTKVANEANNLSSLGITALWLPPAYKGTSRSDVGYGVYDLYDLGEFNQKGTVRTKYGTKAQYLQAIQAAHAAGMRVYADVVFDHKGGADGTEWVDAVEVNPSDRNQEISGTYQIQAWTKFDFPGRGNTYSSFKWRWYHFDGVDWDESRKLSRIYKFRGIGKAWDWEVDTENGNYDYLMYADLDMDHPEVVTELKNWGKWYVNTTNIDGFRLDAVKHIKFSFFPDWLSYVRSQTGKPLFTVGEYWSYDINKLHNYITKTNGTMSLFDAPLHNKFYTASKSGGAFDMRTLMTNTLMKDRPTLAVTFVDNHDTEPGQALQSWVDPWFKPLAYAFILTREEGYPCVFYGDYYGIPQYNIPSLKSKIDPLLIARRDYAYGTQHDYLDHSDIIGWTREGVTEKPGSGLAALITDGPGGSKWMYVGKQHAGKVFYDLTGNRSDTVTINSDGWGEFKVNGGSVSVWVPRKTTVS

SEQ ID NO: 17833 - protein, 488 aa, Geobacillus stearothermophilus
AAPFNGTMMQYFEWYLPDDGTLWTKVANEANNLSSLGITALWLPPAYKGTSRSDVGYGVYDLYDLGEFNQKGTVRTKYGTKAQYLQAIQAAHAAGMRVYADVVFDHKGGADGTEWVDAVEVNPSDRNQEISGTYQIQAWTKFDFPGRGNTYSSFKWRWYHFDGVDWDESRKLSRIYKFRGIGKAWDWEVDTENGNYDYLMYADLDMDHPEVVTELKNWGKWYVNTTNIDGFRLDAVKHIKFSFFPDWLSYVRSQTGKPLFTVGEYWSYDINKLHNYITKTNGTMSLFDAPLHNKFYTASKSGGAFDMRTLMTNTLMKDRPTLAVTFVDNHDTEPGQALQSWVDPWFKPLAYAFILTRQEGYPCVFYGDYYGIPQYNIPSLKSKIDPLLIARRDYAYGTQHDYLDHSDIIGWTREGVTEKPGSGLAALITDGPGGSKWMYVGKEHAGKVFYDLTGNRSDTVTINSDGWGEFKVNGGSVSVWVPRKTTVS

SEQ ID NO: 17834 - protein, 488 aa, Geobacillus stearothermophilus
AAPFNGTMMQYFEWYLPDDGTLWTKVANEANNLSSLGITALWLPPAYKGTSRSDVGYGVYDLYDLGEFNQKGTVRTKYGTKAQYLQAIQAAHAAGMEVYADVVFDHKGGADGTEWVDAVEVNPSDRNQEISGTYQIQAWTKFDFPGRGNTYSSFKWRWYHFDGVDWDESRKLSRIYKFRGIGKAWDWEVDTENGNYDYLMYADLDMDHPEVVTELKNWGKWYVNTTNIDGFRLDAVKHIKFSFFPDWLSYVRSQTGKPLFTVGEYWSYDINKLHNYITKTNGTMSLFDAPLHNKFYTASKSGGAFDMRTLMTNTLMKDRPTLAVTFVDNHDTEPGQALQSWVDPWFKPLAYAFILTREEGYPCVFYGDYYGIPQYNIPSLKSKIDPLLIARRDYAYGTQHDYLDHSDIIGWTREGVTEKPGSGLAALITDGPGGSKWMYVGKQHAGKVFYDLTGNRSDTVTINSDGWGEFKVNGGSVSVWVPRKTTVS

SEQ ID NO: 17835 - protein, 488 aa, Geobacillus stearothermophilus
AAPFNGTMMQYFEWYLPDDGTLWTKVANEANNLSSLGITALWLPPAYKGTSRSDVGYGVYDLYDLGEFNQKGTVRTKYGTKAQYLQAIQAAHAAGMQVYADVVFDHKGGADGTEWVDAVEVNPSDRNQEISGTYQIQAWTKFDFPGRGNTYSSFKWRWYHFDGVDWDESRKLSRIYKFRGIGKAWDWEVDTENGNYDYLMYADLDMDHPEVVTELKNWGKWYVNTTNIDGFRLDAVKHIKFQFFPDWLSYVRSQTGKPLFTVGEYWSYDINKLHNYITKTNGTMSLFDAPLHNKFYTASKSGGAFDMRTLMTNTLMKDQPTLAVTFVDNHDTEPGQALQSWVDPWFKPLAYAFILTREEGYPCVFYGDYYGIPQYNIPSLKSKIDPLLIARRDYAYGTQHDYLDHSDIIGWTREGVTEKPGSGLAALITDGPGGSKWMYVGKRHAGKVFYDLTGNRSDTVTINSDGWGEFKVNGGSVSVWVPRKTTVS

SEQ ID NO: 17836 - protein, 488 aa, Geobacillus stearothermophilus
AAPFNGTMMQYFEWYLPDDGTLWTKVANEANNLSSLGITALWLPPAYKGTSRSDVGYGVYDLYDLGEFNQKGTVRTKYGTKAQYLQAIQAAHAAGMEVYADVVFDHKGGADGTEWVDAVEVNPSDRNQEISGTYQIQAWTKFDFPGRGNTYSSFKWRWYHFDGVDWDESRKLSRIYKFRGIGKAWDWEVDTENGNYDYLMYADLDMDHPEVVTELKNWGKWYVNTTNIDGFRLDAVKHIKFQFFPDWLSYVRSQTGKPLFTVGEYWSYDINKLHNYITKTNGTMSLFDAPLHNKFYTASKSGGAFDMRTLMTNTLMKDQPTLAVTFVDNHDTEPGQALQSWVDPWFKPLAYAFILTRREGYPCVFYGDYYGIPQYNIPSLKSKIDPLLIARRDYAYGTQHDYLDHSDIIGWTREGVTEKPGSGLAALITDGPGGSKWMYVGKQHAGKVFYDLTGNRSDTVTINSDGWGEFKVNGGSVSVWVPRKTTVS

SEQ ID NO: 17837 - protein, 488 aa, Geobacillus stearothermophilus
AAPFNGTMMQYFEWYLPDDGTLWTKVANEANNLSSLGITALWLPPAYKGTSRSDVGYGVYDLYDLGEFNQKGTVRTKYGTKAQYLQAIQAAHAAGMRVYADVVFDHKGGADGTEWVDAVEVNPSDRNQEISGTYQIQAWTKFDFPGRGNTYSSFKWRWYHFDGVDWDESRKLSRIYKFRGIGKAWDWEVDTENGNYDYLMYADLDMDHPEVVTELKNWGKWYVNTTNIDGFRLDAVKHIKFQFFPDWLSYVRSQTGKPLFTVGEYWSYDINKLHNYITKTNGTMSLFDAPLHNKFYTASKSGGAFDMRTLMTNTLMKDEPTLAVTFVDNHDTEPGQALQSWVDPWFKPLAYAFILTRQEGYPCVFYGDYYGIPQYNIPSLKSKIDPLLIARRDYAYGTQHDYLDHSDIIGWTREGVTEKPGSGLAALITDGPGGSKWMYVGKQHAGKVFYDLTGNRSDTVTINSDGWGEFKVNGGSVSVWVPRKTTVS

SEQ ID NO: 17838 - protein, 488 aa, Geobacillus stearothermophilus
AAPFNGTMMQYFEWYLPDDGTLWTKVANEANNLSSLGITALWLPPAYKGTSRSDVGYGVYDLYDLGEFNQKGTVRTKYGTKAQYLQAIQAAHAAGMRVYADVVFDHKGGADGTEWVDAVEVNPSDRNQEISGTYQIQAWTKFDFPGRGNTYSSFKWRWYHFDGVDWDESRKLSRIYKFRGIGKAWDWEVDTENGNYDYLMYADLDMDHPEVVTELKNWGKWYVNTTNIDGFRLDAVKHIKFSFFPDWLSYVRSQTGKPLFTVGEYWSYDINKLHNYITKTNGTMSLFDAPLHNKFYTASKSGGAFDMRTLMTNTLMKDRPTLAVTFVDNHDTEPGQALQSWVDPWFKPLAYAFILTRREGYPCVFYGDYYGIPQYNIPSLKSKIDPLLIARRDYAYGTQHDYLDHSDIIGWTREGVTEKPGSGLAALITDGPGGSKWMYVGKQHAGKVFYDLTGNRSDTVTINSDGWGEFKVNGGSVSVWVPRKTTVS

SEQ ID NO: 17839 - protein, 488 aa, Geobacillus stearothermophilus
AAPFNGTMMQYFEWYLPDDGTLWTKVANEANNLSSLGITALWLPPAYKGTSRSDVGYGVYDLYDLGEFNQKGTVRTKYGTKAQYLQAIQAAHAAGMQVYADVVFDHKGGADGTEWVDAVEVNPSDRNQEISGTYQIQAWTKFDFPGRGNTYSSFKWRWYHFDGVDWDESRKLSRIYKFRGIGKAWDWEVDTENGNYDYLMYADLDMDHPEVVTELKNWGKWYVNTTNIDGFRLDAVKHIKFQFFPDWLSYVRSQTGKPLFTVGEYWSYDINKLHNYITKTNGTMSLFDAPLHNKFYTASKSGGAFDMRTLMTNTLMKDQPTLAVTFVDNHDTEPGQALQSWVDPWFKPLAYAFILTREEGYPCVFYGDYYGIPQYNIPSLKSKIDPLLIARRDYAYGTQHDYLDHSDIIGWTREGVTEKPGSGLAALITDGPGGSKWMYVGKEHAGKVFYDLTGNRSDTVTINSDGWGEFKVNGGSVSVWVPRKTTVS

SEQ ID NO: 17840 - protein, 488 aa, Geobacillus stearothermophilus
AAPFNGTMMQYFEWYLPDDGTLWTKVANEANNLSSLGITALWLPPAYKGTSRSDVGYGVYDLYDLGEFNQKGTVRTKYGTKAQYLQAIQAAHAAGMRVYADVVFDHKGGADGTEWVDAVEVNPSDRNQEISGTYQIQAWTKFDFPGRGNTYSSFKWRWYHFDGVDWDESRKLSRIYKFRGIGKAWDWEVDTENGNYDYLMYADLDMDHPEVVTELKNWGKWYVNTTNIDGFRLDAVKHIKFSFFPDWLSYVRSQTGKPLFTVGEYWSYDINKLHNYITKTNGTMSLFDAPLHNKFYTASKSGGAFDMRTLMTNTLMKDEPTLAVTFVDNHDTEPGQALQSWVDPWFKPLAYAFILTRQEGYPCVFYGDYYGIPQYNIPSLKSKIDPLLIARRDYAYGTQHDYLDHSDIIGWTREGVTEKPGSGLAALITDGPGGSKWMYVGKEHAGKVFYDLTGNRSDTVTINSDGWGEFKVNGGSVSVWVPRKTTVS

SEQ ID NO: 17841 - protein, 488 aa, Geobacillus stearothermophilus
AAPFNGTMMQYFEWYLPDDGTLWTKVANEANNLSSLGITALWLPPAYKGTSRSDVGYGVYDLYDLGEFNQKGTVRTKYGTKAQYLQAIQAAHAAGMRVYADVVFDHKGGADGTEWVDAVEVNPSDRNQEISGTYQIQAWTKFDFPGRGNTYSSFKWRWYHFDGVDWDESRKLSRIYKFRGIGKAWDWEVDTENGNYDYLMYADLDMDHPEVVTELKNWGKWYVNTTNIDGFRLDAVKHIKFSFFPDWLSYVRSQTGKPLFTVGEYWSYDINKLHNYITKTNGTMSLFDAPLHNKFYTASKSGGAFDMRTLMTNTLMKDQPTLAVTFVDNHDTEPGQALQSWVDPWFKPLAYAFILTREEGYPCVFYGDYYGIPQYNIPSLKSKIDPLLIARRDYAYGTQHDYLDHSDIIGWTREGVTEKPGSGLAALITDGPGGSKWMYVGKEHAGKVFYDLTGNRSDTVTINSDGWGEFKVNGGSVSVWVPRKTTVS

SEQ ID NO: 17842 - protein, 488 aa, Geobacillus stearothermophilus
AAPFNGTMMQYFEWYLPDDGTLWTKVANEANNLSSLGITALWLPPAYKGTSRSDVGYGVYDLYDLGEFNQKGTVRTKYGTKAQYLQAIQAAHAAGMQVYADVVFDHKGGADGTEWVDAVEVNPSDRNQEISGTYQIQAWTKFDFPGRGNTYSSFKWRWYHFDGVDWDESRKLSRIYKFRGIGKAWDWEVDTENGNYDYLMYADLDMDHPEVVTELKNWGKWYVNTTNIDGFRLDAVKHIKFSFFPDWLSYVRSQTGKPLFTVGEYWSYDINKLHNYITKTNGTMSLFDAPLHNKFYTASKSGGAFDMRTLMTNTLMKDEPTLAVTFVDNHDTEPGQALQSWVDPWFKPLAYAFILTRREGYPCVFYGDYYGIPQYNIPSLKSKIDPLLIARRDYAYGTQHDYLDHSDIIGWTREGVTEKPGSGLAALITDGPGGSKWMYVGKRHAGKVFYDLTGNRSDTVTINSDGWGEFKVNGGSVSVWVPRKTTVS

SEQ ID NO: 17843 - protein, 488 aa, Geobacillus stearothermophilus
AAPFNGTMMQYFEWYLPDDGTLWTKVANEANNLSSLGITALWLPPAYKGTSRSDVGYGVYDLYDLGEFNQKGTVRTKYGTKAQYLQAIQAAHAAGMRVYADVVFDHKGGADGTEWVDAVEVNPSDRNQEISGTYQIQAWTKFDFPGRGNTYSSFKWRWYHFDGVDWDESRKLSRIYKFRGIGKAWDWEVDTENGNYDYLMYADLDMDHPEVVTELKNWGKWYVNTTNIDGFRLDAVKHIKFSFFPDWLSYVRSQTGKPLFTVGEYWSYDINKLHNYITKTNGTMSLFDAPLHNKFYTASKSGGAFDMRTLMTNTLMKDQPTLAVTFVDNHDTEPGQALQSWVDPWFKPLAYAFILTRREGYPCVFYGDYYGIPQYNIPSLKSKIDPLLIARRDYAYGTQHDYLDHSDIIGWTREGVTEKPGSGLAALITDGPGGSKWMYVGKRHAGKVFYDLTGNRSDTVTINSDGWGEFKVNGGSVSVWVPRKTTVS

SEQ ID NO: 17844 - protein, 486 aa, Geobacillus stearothermophilus
AAPFNGTMMQYFEWYLPDDGTLWTKVANEANNLSSLGITALWLPPAYKGTSRSDVGYGVYDLYDLGEFNQKGTVRTKYGTKAQYLQAIQAAHAAGMQVYADVVFDHKGGADGTEWVDAVEVNPSDRNQEISGTYQIQAWTKFDFPGRGNTYSSFKWRWYHFDGVDWDESRKLSRIYKFRGKAWDWEVDTEFGNYDYLMYADLDMDHPEVVTELKNWGPWYVLTTNIDGFRLDAVKHIKFQFFPDWLSYVRSSTGKPLFTVGEYWSYDINKLHNYITKTNGTMSLFDAPLHNKFYTASKSGGAFDMRTLMTNTLMKDQPTLAVTFVDNHDTEPGQALQSWVDPWFKPLAYAFILTRQEGYPCVFYGDYYGIPQYNIPSLKSKIDPLLIARRDYAYGTQHDYLDHSDIIGWTREGVTEKPGSGLAALITDGPGGSKWMYVGKQHAGKVFYDLTGNRSDTVTINSDGWGEFKVNGGSVSVWVPRKTTVS

SEQ ID NO: 17845 - protein, 486 aa, Geobacillus stearothermophilus
AAPFNGTMMQYFEWYLPDDGTLWTKVANEANNLSSLGITALWLPPAYKGTSRSDVGYGVYDLYDLGEFNQKGTVRTKYGTKAQYLQAIQAAHAAGMQVYADVVFDHKGGADGTEWVDAVEVNPSDRNQVISGTYQIQAWTKFDFPGRGNTYSSFKWRWYHFDGVDWDESRKLSRIYLFEGKAWDWEVDTEFGNYDYLMYADLDMDHPEVVTELKNWGKWYVNTTNIDGFRLDAVKHIKFQFFPDWLSYVRSQTGKPLFTVGEYWSYDINKLHNYITKTNGTMSLFDAPLHNKFYTASKSGGAFDMRTLMTNTLMKDQPTLAVTFVDNHDTEPGQALQSWVDPWFKPLAYAFILTRQEGYPCVFYGDYYGIPQYNIPSLKSKIDPLLIARRDYAYGTQHDYLDHSDIIGWTREGVTEKPGSGLAALITDGPGGSKWMYVGKQHAGKVFYDLTGNRSDTVTINSDGWGEFKVNGGSVSVWVPRKTTVS

SEQ ID NO: 17846 - protein, 488 aa, Geobacillus stearothermophilus
AAPFNGTMMQYFEWYLPDDGTLWTKVANEANNLSSLGITALWLPPAYKGTSRSDVGYGVYDLYDLGEFNQKGTVRTKYGTKAQYLQAIQAAHAAGMQVYADVVFDHKGGADGTEWVDAVEVNPSDRNQEISGTYQIQAWTKFDFPGRGNTYSSFKWRWYHFDGVDWDESRKLSRIYKFRGIGKAWDWEVDTENGNYDYLMYADLDMDHPEVVTELKNWGKWYVNTTNIDGFRLDAVKHIKFSFFPDWLSYVRSQTGKPLFTVGEYWSYDINKLHNYITKTNGTMSLFDAPLHNKFYTASKSGGAFDMRTLMTNTLMKDRPTLAVTFVDNHDTEPGQALQSWVDPWFKPLAYAFILTRREGYPCVFYGDYYGIPQYNIPSLKSKIDPLLIARRDYAYGTQHDYLDHSDIIGWTREGVTEKPGSGLAALITDGPGGSKWMYVGKRHAGKVFYDLTGNRSDTVTINSDGWGEFKVNGGSVSVWVPRKTTVS

SEQ ID NO: 17847 - protein, 488 aa, Geobacillus stearothermophilus
AAPFNGTMMQYFEWYLPDDGTLWTKVANEANNLSSLGITALWLPPAYKGTSRSDVGYGVYDLYDLGEFNQKGTVRTKYGTKAQYLQAIQAAHAAGMQVYADVVFDHKGGADGTEWVDAVEVNPSDRNQEISGTYQIQAWTKFDFPGRGNTYSSFKWRWYHFDGVDWDESRKLSRIYKFRGXXKAWDWEVDTEFGNYDYLMYADLDMDHPEVVTELKNWGPWYVLTTNIDGFRLDAVKHIKFQFFPDWLSYVRSSTGKPLFTVGEYWSYDINKLHNYITKTNGTMSLFDAPLHNKFYTASKSGGAFDMRTLMTNTLMKDQPTLAVTFVDNHDTEPGQALQSWVDPWFKPLAYAFILTRQEGYPCVFYGDYYGIPQYNIPSLKSKIDPLLIARRDYAYGTQHDYLDHSDIIGWTREGVTEKPGSGLAALITDGPGGSKWMYVGKQHAGKVFYDLTGNRSDTVTINSDGWGEFKVNGGSVSVWVPRKTTVS

SEQ ID NO: 17848 - protein, 488 aa, Geobacillus stearothermophilus
AAPFNGTMMQYFEWYLPDDGTLWTKVANEANNLSSLGITALWLPPAYKGTSRSDVGYGVYDLYDLGEFNQKGTVRTKYGTKAQYLQAIQAAHAAGMQVYADVVFDHKGGADGTEWVDAVEVNPSDRNQEISGTYQIQAWTKFDFPGRGNTYSSFKWRWYHFDGVDWDESRKLSRIYKFRGIGKAWDWEVDTENGNYDYLMYADLDMDHPEVVTELKNWGKWYVNTTNIDGFRLDAVKHIKFQFFPDWLSYVRSQTGKPLFTVGEYWSYDINKLHNYITKTNGTMSLFDAPLHNKFYTASKSGGAFDMRTLMTNTLMKDRPTLAVTFVDNHDTEPGQALQSWVDPWFKPLAYAFILTRQEGYPCVFYGDYYGIPQYNIPSLKSKIDPLLIARRDYAYGTQHDYLDHSDIIGWTREGVTEKPGSGLAALITDGPGGSKWMYVGKEHAGKVFYDLTGNRSDTVTINSDGWGEFKVNGGSVSVWVPRKTTVS

SEQ ID NO: 17849 - protein, 488 aa, Geobacillus stearothermophilus
AAPFNGTMMQYFEWYLPDDGTLWTKVANEANNLSSLGITALWLPPAYKGTSRSDVGYGVYDLYDLGEFNQKGTVRTKYGTKAQYLQAIQAAHAAGMEVYADVVFDHKGGADGTEWVDAVEVNPSDRNQEISGTYQIQAWTKFDFPGRGNTYSSFKWRWYHFDGVDWDESRKLSRIYKFRGIGKAWDWEVDTENGNYDYLMYADLDMDHPEVVTELKNWGKWYVNTTNIDGFRLDAVKHIKFSFFPDWLSYVRSQTGKPLFTVGEYWSYDINKLHNYITKTNGTMSLFDAPLHNKFYTASKSGGAFDMRTLMTNTLMKDRPTLAVTFVDNHDTEPGQALQSWVDPWFKPLAYAFILTRQEGYPCVFYGDYYGIPQYNIPSLKSKIDPLLIARRDYAYGTQHDYLDHSDIIGWTREGVTEKPGSGLAALITDGPGGSKWMYVGKRHAGKVFYDLTGNRSDTVTINSDGWGEFKVNGGSVSVWVPRKTTVS

SEQ ID NO: 17850 - protein, 488 aa, Geobacillus stearothermophilus
AAPFNGTMMQYFEWYLPDDGTLWTKVANEANNLSSLGITALWLPPAYKGTSRSDVGYGVYDLYDLGEFNQKGTVRTKYGTKAQYLQAIQAAHAAGMEVYADVVFDHKGGADGTEWVDAVEVNPSDRNQEISGTYQIQAWTKFDFPGRGNTYSSFKWRWYHFDGVDWDESRKLSRIYKFRGIGKAWDWEVDTENGNYDYLMYADLDMDHPEVVTELKNWGKWYVNTTNIDGFRLDAVKHIKFQFFPDWLSYVRSQTGKPLFTVGEYWSYDINKLHNYITKTNGTMSLFDAPLHNKFYTASKSGGAFDMRTLMTNTLMKDQPTLAVTFVDNHDTEPGQALQSWVDPWFKPLAYAFILTRQEGYPCVFYGDYYGIPQYNIPSLKSKIDPLLIARRDYAYGTQHDYLDHSDIIGWTREGVTEKPGSGLAALITDGPGGSKWMYVGKRHAGKVFYDLTGNRSDTVTINSDGWGEFKVNGGSVSVWVPRKTTVS

SEQ ID NO: 17851 - protein, 488 aa, Geobacillus stearothermophilus
AAPFNGTMMQYFEWYLPDDGTLWTKVANEANNLSSLGITALWLPPAYKGTSRSDVGYGVYDLYDLGEFNQKGTVRTKYGTKAQYLQAIQAAHAAGMQVYADVVFDHKGNADGTEWVDAVEVNPSDRNQEISGTYQIQAWTKFDFPGRGNTYSSFKWRWYHFDGVDWDESRKLSRIYKFRGIGKAWDWEVDTENGNYDYLMYADLDMDHPEVVTELKNWGKWYVNTTNIDGFRLDAVKHIKFSFFPDWLSYVRSQTGKPLFTVGEYWSYDINKLHNYITKTNGTMSLFDAPLHNKFYTASKSGGAFDMRTLMTNTLMKDQPTLAVTFVDNHDTEPGQALQSWVDPWFKPLAYAFILTRQEGYPGVFYGDYYGIPQYNIPSLKSKIDPLLIARRDYAYGTQHDYLDHSDIIGWTREGVTEKPGSGLAALITDGPGGSKWMYVGKQHAGKVFYDLTGNRSDTVTITSDGWGEFKVNGGSVSVWVPRKTTVS

SEQ ID NO: 17852 - protein, 488 aa, Geobacillus stearothermophilus
AAPFNGTMMQYFEWYLPDDGTLWTKVANEANNLSSLGITALWLPPAYKGTSRSDVGYGVYDLYDLGEFNQKGTVRTKYGTKAQYLQAIQAAHAAGMQVYADVVFDHKGGADGTEWVDAVEVNPSDRNQEISGTYQIQAWTKFDFPGRGNTYSSFKWRWYHFDGVDWDESRKLSRIYKFRGIGKAWDWEVDTENGNYDYLMYADLDMDHPEVVTELKNWGKWYVNTTNIDGFRLDAVKHIKFQFFPDWLSYVRSQTGKPLFTVGEYWSYDINKLHNYITKTNGTMSLFDAPLHNKFYTASKSGGAFDMRTLMTNTLMKDEPTLAVTFVDNHDTEPGQALQSWVDPWFKPLAYAFILTRQEGYPCVFYGDYYGIPQYNIPSLKSKIDPLLIARRDYAYGTQHDYLDHSDIIGWTREGVTEKPGSGLAALITDGPGGSKWMYVGKRHAGKVFYDLTGNRSDTVTINSDGWGEFKVNGGSVSVWVPRKTTVS

SEQ ID NO: 17853 - protein, 488 aa, Geobacillus stearothermophilus
AAPFNGTMMQYFEWYLPDDGTLWTKVANEANNLSSLGITALWLPPAYKGTSRSDVGYGVYDLYDLGEFNQKGTVRTKYGTKAQYLQAIQAAHAAGMRVYADVVFDHKGGADGTEWVDAVEVNPSDRNQEISGTYQIQAWTKFDFPGRGNTYSSFKWRWYHFDGVDWDESRKLSRIYKFRGIGKAWDWEVDTENGNYDYLMYADLDMDHPEVVTELKNWGKWYVNTTNIDGFRLDAVKHIKFQFFPDWLSYVRSQTGKPLFTVGEYWSYDINKLHNYITKTNGTMSLFDAPLHNKFYTASKSGGAFDMRTLMTNTLMKDQPTLAVTFVDNHDTEPGQALQSWVDPWFKPLAYAFILTREEGYPCVFYGDYYGIPQYNIPSLKSKIDPLLIARRDYAYGTQHDYLDHSDIIGWTREGVTEKPGSGLAALITDGPGGSKWMYVGKQHAGKVFYDLTGNRSDTVTINSDGWGEFKVNGGSVSVWVPRKTTVS

SEQ ID NO: 17854 - protein, 488 aa, Geobacillus stearothermophilus
AAPFNGTMMQYFEWYLPDDGTLWTKVANEANNLSSLGITALWLPPAYKGTSRSDVGYGVYDLYDLGEFNQKGTVRTKYGTKAQYLQAIQAAHAAGMQVYADVVFDHKGGADGTEWVDAVEVNPSDRNQEISGTYQIQAYTKFDFPGRGNTYSSFKWRWYHFDGVDWDESRKLSRIYKFRGIGKAWDWEVDTENGNYDYLMYADLDMDHPEVVTELKNWGKWYVNTTNIDGFRLDAVKHIKFSFFPDWLSYVRSQTGKPLFTVGEYWSYDINKLHNYITKTNGTMSLFDAPLHNKFYTASKSGGAFDMRTLMTNTLMKDQPTLAVTFVDNHDTEPGQALQSWVDPWFKPLAYAFILTRQEGYPGVFYGDYYGIPQYNIPSLKSKIDPLLIARRDYAYGTQHDYLDHSDIIGWTREGVTEKPGSGLAALITDGPGGSKWMYVGKQHAGKVFYDLTGNRSDTVTITSDGWGEFKVNGGSVSVWVPRKTTVS

SEQ ID NO: 17855 - protein, 488 aa, Geobacillus stearothermophilus
AAPFNGTMMQYFEWYLPDDGTLWTKVANEANNLSSLGITALWLPPAYKGTSRSDVGYGVYDLYDLGEFNQKGTVRTKYGTKAQYLQAIQAAHAAGMQVYADVVFDHKGGADGTEWVDAVEVNPSDRNQEISGTYQIQAWTKFDFPGRGNTYSSFKWRWYHFDGVDWDESRKLSRIYKFRGIGKAWDWEVDTENGNYDYLMYADLDMDHPEVVTELKNWGKWYVNTTNIDGFRLDAVKHIKFQFFPDWLSYVRSQTGKPLFTVGEYWSYDINKLHNYITKTNGTMSLFDAPLHNKFYTASKSGGAFDMRTLMTNTLMKDEPTLAVTFVDNHDTEPGQALQSWVDPWFKPLAYAFILTRQEGYPCVFYGDYYGIPQYNIPSLKSKIDPLLIARRDYAYGTQHDYLDHSDIIGWTREGVTEKPGSGLAALITDGPGGSKWMYVGKEHAGKVFYDLTGNRSDTVTINSDGWGEFKVNGGSVSVWVPRKTTVS

SEQ ID NO: 17856 - protein, 488 aa, Geobacillus stearothermophilus
AAPFNGTMMQYFEWYLPDDGTLWTKVANEANNLSSLGITALWLPPAYKGTSRSDVGYGVYDLYDLGEFNQKGTVRTKYGTKAQYLQAIQAAHAAGMEVYADVVFDHKGGADGTEWVDAVEVNPSDRNQEISGTYQIQAWTKFDFPGRGNTYSSFKWRWYHFDGVDWDESRKLSRIYKFRGIGKAWDWEVDTENGNYDYLMYADLDMDHPEVVTELKNWGKWYVNTTNIDGFRLDAVKHIKFSFFPDWLSYVRSQTGKPLFTVGEYWSYDINKLHNYITKTNGTMSLFDAPLHNKFYTASKSGGAFDMRTLMTNTLMKDQPTLAVTFVDNHDTEPGQALQSWVDPWFKPLAYAFILTREEGYPCVFYGDYYGIPQYNIPSLKSKIDPLLIARRDYAYGTQHDYLDHSDIIGWTREGVTEKPGSGLAALITDGPGGSKWMYVGKEHAGKVFYDLTGNRSDTVTINSDGWGEFKVNGGSVSVWVPRKTTVS

SEQ ID NO: 17857 - protein, 488 aa, Geobacillus stearothermophilus
AAPFNGTMMQYFEWYLPDDGTLWTKVANEANNLSSLGITALWLPPAYKGTSRSDVGYGVYDLYDLGEFNQKGTVRTKYGTKAQYLQAIQAAHAAGMRVYADVVFDHKGGADGTEWVDAVEVNPSDRNQEISGTYQIQAWTKFDFPGRGNTYSSFKWRWYHFDGVDWDESRKLSRIYKFRGIGKAWDWEVDTENGNYDYLMYADLDMDHPEVVTELKNWGKWYVNTTNIDGFRLDAVKHIKFSFFPDWLSYVRSQTGKPLFTVGEYWSYDINKLHNYITKTNGTMSLFDAPLHNKFYTASKSGGAFDMRTLMTNTLMKDQPTLAVTFVDNHDTEPGQALQSWVDPWFKPLAYAFILTRREGYPCVFYGDYYGIPQYNIPSLKSKIDPLLIARRDYAYGTQHDYLDHSDIIGWTREGVTEKPGSGLAALITDGPGGSKWMYVGKEHAGKVFYDLTGNRSDTVTINSDGWGEFKVNGGSVSVWVPRKTTVS

SEQ ID NO: 17858 - protein, 488 aa, Geobacillus stearothermophilus
AAPFNGTMMQYFEWYLPDDGTLWTKVANEANNLSSLGITALWLPPAYKGTSRSDVGYGVYDLYDLGEFNQKGTVRTKYGTKAQYLQAIQAAHAAGMQVYADVVFDHKGGADGTEWVDAVEVNPSDRNQEISGTYQIQAWTKFDFPGRGNTYSSFKWRWYHFDGVDWDESRKLSRIYKFRGIGKAWDWEVDTENGNYDYLMYADLDMDHPEVVTELKNWGKWYVNTTNIDGFRLDAVKHIKFSFFPDWLSYVRSQTGKPLFTVGEYWSYDINKLHNYITKTNGTMSLFDAPLHNKFYTASKSGGAFDMRTLMTNTLMKDEPTLAVTFVDNHDTEPGQALQSWVDPWFKPLAYAFILTREEGYPCVFYGDYYGIPQYNIPSLKSKIDPLLIARRDYAYGTQHDYLDHSDIIGWTREGVTEKPGSGLAALITDGPGGSKWMYVGKEHAGKVFYDLTGNRSDTVTINSDGWGEFKVNGGSVSVWVPRKTTVS

SEQ ID NO: 17859 - protein, 488 aa, Geobacillus stearothermophilus
AAPFNGTMMQYFEWYLPDDGTLWTKVANEANNLSSLGITALWLPPAYKGTSRSDVGYGVYDLYDLGEFNQKGTVRTKYGTKAQYLQAIQAAHAAGMEVYADVVFDHKGGADGTEWVDAVEVNPSDRNQEISGTYQIQAWTKFDFPGRGNTYSSFKWRWYHFDGVDWDESRKLSRIYKFRGIGKAWDWEVDTENGNYDYLMYADLDMDHPEVVTELKNWGKWYVNTTNIDGFRLDAVKHIKFSFFPDWLSYVRSQTGKPLFTVGEYWSYDINKLHNYITKTNGTMSLFDAPLHNKFYTASKSGGAFDMRTLMTNTLMKDRPTLAVTFVDNHDTEPGQALQSWVDPWFKPLAYAFILTRQEGYPCVFYGDYYGIPQYNIPSLKSKIDPLLIARRDYAYGTQHDYLDHSDIIGWTREGVTEKPGSGLAALITDGPGGSKWMYVGKEHAGKVFYDLTGNRSDTVTINSDGWGEFKVNGGSVSVWVPRKTTVS

SEQ ID NO: 17860 - protein, 488 aa, Geobacillus stearothermophilus
AAPFNGTMMQYFEWYLPDDGTLWTKVANEANNLSSLGITALWLPPAYKGTSRSDVGYGVYDLYDLGEFNQKGTVRTKYGTKAQYLQAIQAAHAAGMQVYADVVFDHKGGADGTEWVDAVEVNPSDRNQVISGTYQIQAWTKFDFPGRGNTYSSFKWRWYHFDGVDWDESRKLSRIYLFVGIGKAWDWEVDTENGNYDYLMYADLDMDHPEVVTELKNWGKWYVNTTNIDGFRLDAVKHIKFSFFPDWLSYVRSQTGKPLFTVGEYWSYDINKLHNYITKTNGTMSLFDAPLHNKFYTASKSGGAFDMRTLMTNTLMKDQPTLAVTFVDNHDTEPGQALQSWVDPWFKPLAYAFILTRQEGYPCVFYGDYYGIPQYNIPSLKSKIDPLLIARRDYAYGTQHDYLDHSDIIGWTREGVTEKPGSGLAALITDGPGGSKWMYVGKQHAGKVFYDLTGNRSDTVTINSDGWGEFKVNGGSVSVWVPRKTTVS

SEQ ID NO: 17861 - protein, 488 aa, Geobacillus stearothermophilus
AAPFNGTMMQYFEWYLPDDGTLWTKVANEANNLSSLGITALWLPPAYKGTSRSDVGYGVYDLYDLGEFNQKGTVRTKYGTKAQYLQAIQAAHAAGMEVYADVVFDHKGGADGTEWVDAVEVNPSDRNQEISGTYQIQAWTKFDFPGRGNTYSSFKWRWYHFDGVDWDESRKLSRIYKFRGIGKAWDWEVDTENGNYDYLMYADLDMDHPEVVTELKNWGKWYVNTTNIDGFRLDAVKHIKFQFFPDWLSYVRSQTGKPLFTVGEYWSYDINKLHNYITKTNGTMSLFDAPLHNKFYTASKSGGAFDMRTLMTNTLMKDRPTLAVTFVDNHDTEPGQALQSWVDPWFKPLAYAFILTRQEGYPCVFYGDYYGIPQYNIPSLKSKIDPLLIARRDYAYGTQHDYLDHSDIIGWTREGVTEKPGSGLAALITDGPGGSKWMYVGKQHAGKVFYDLTGNRSDTVTINSDGWGEFKVNGGSVSVWVPRKTTVS

SEQ ID NO: 17862 - protein, 488 aa, Geobacillus stearothermophilus
AAPFNGTMMQYFEWYLPDDGTLWTKVANEANNLSSLGITALWLPPAYKGTSRSDVGYGVYDLYDLGEFNQKGTVRTKYGTKAQYLQAIQAAHAAGMRVYADVVFDHKGGADGTEWVDAVEVNPSDRNQEISGTYQIQAWTKFDFPGRGNTYSSFKWRWYHFDGVDWDESRKLSRIYKFRGIGKAWDWEVDTENGNYDYLMYADLDMDHPEVVTELKNWGKWYVNTTNIDGFRLDAVKHIKFSFFPDWLSYVRSQTGKPLFTVGEYWSYDINKLHNYITKTNGTMSLFDAPLHNKFYTASKSGGAFDMRTLMTNTLMKDEPTLAVTFVDNHDTEPGQALQSWVDPWFKPLAYAFILTREEGYPCVFYGDYYGIPQYNIPSLKSKIDPLLIARRDYAYGTQHDYLDHSDIIGWTREGVTEKPGSGLAALITDGPGGSKWMYVGKQHAGKVFYDLTGNRSDTVTINSDGWGEFKVNGGSVSVWVPRKTTVS

SEQ ID NO: 17863 - protein, 488 aa, Geobacillus stearothermophilus
AAPFNGTMMQYFEWYLPDDGTLWTKVANEANNLSSLGITALWLPPAYKGTSRSDVGYGVYDLYDLGEFNQKGTVRTKYGTKAQYLQAIQAAHAAGMQVYADVVFDHKGGADGTEWVDAVEVNPSDRNQEISGTYQIQAWTKFDFPGRGNTYSSFKWRWYHFDGVDWDESRKLSRIYKFRGIGKAWDWEVDTENGNYDYLMYADLDMDHPEVVTELKNWGKWYVNTTNIDGFRLDAVKHIKFSFFPDWLSYVRSQTGKPLFTVGEYWSYDINKLHNYITKTNGTMSLFDAPLHNKFYTASKSGGAFDMRTLMTNTLMKDEPTLAVTFVDNHDTEPGQALQSWVDPWFKPLAYAFILTREEGYPCVFYGDYYGIPQYNIPSLKSKIDPLLIARRDYAYGTQHDYLDHSDIIGWTREGVTEKPGSGLAALITDGPGGSKWMYVGKRHAGKVFYDLTGNRSDTVTINSDGWGEFKVNGGSVSVWVPRKTTVS

SEQ ID NO: 17864 - protein, 488 aa, Geobacillus stearothermophilus
AAPFNGTMMQYFEWYLPDDGTLWTKVANEANNLSSLGITALWLPPAYKGTSRSDVGYGVYDLYDLGEFNQKGTVRTKYGTKAQYLQAIQAAHAAGMQVYADVVFDHKGGADGTEWVDAVEVNPSDRNQEISGTYQIQAWTKFDFPGRGNTYSSFKWRWYHFNGVDWDESRKLSRIYKFRGIGKKWNEEVDTENGNYDYLMYADLDMNHPEVVTELKNWGKWYVNTTNIDGFRLDAVKHIKFSFFPDWLSYVRSQTGKPLFTVGEYWSYDINKLHNYITKTDGTMSLFDAPLHNKFYTASKSGGAFDMRTLMTNTLMKDQPTLAVTFVDNHDTEPGQALQSWVDPWFKPLAYAFILTRQEGYPCVFYGDYYGIPQYNIPSLKSKIDPLLIARRDYAYGTQHDYLDHSDIIGWTREGGTEKPGSGLAALITDGPGGSKWMYVGKQHAGKVFYDLTGNRSDTVTINSDGWGEFKVNGGSVSVWVPRKTTVS

SEQ ID NO: 17865 - protein, 488 aa, Geobacillus stearothermophilus
AAPFNGTMMQYFEWYLPDDGTLWTKVANEANNLSSLGITALWLPPAYKGTSRSDVGYGVYDLYDLGEFNQKGTVRTKYGTKAQYLQAIQAAHAAGMEVYADVVFDHKGGADGTEWVDAVEVNPSDRNQEISGTYQIQAWTKFDFPGRGNTYSSFKWRWYHFDGVDWDESRKLSRIYKFRGIGKAWDWEVDTENGNYDYLMYADLDMDHPEVVTELKNWGKWYVNTTNIDGFRLDAVKHIKFSFFPDWLSYVRSQTGKPLFTVGEYWSYDINKLHNYITKTNGTMSLFDAPLHNKFYTASKSGGAFDMRTLMTNTLMKDQPTLAVTFVDNHDTEPGQALQSWVDPWFKPLAYAFILTRREGYPCVFYGDYYGIPQYNIPSLKSKIDPLLIARRDYAYGTQHDYLDHSDIIGWTREGVTEKPGSGLAALITDGPGGSKWMYVGKEHAGKVFYDLTGNRSDTVTINSDGWGEFKVNGGSVSVWVPRKTTVS

SEQ ID NO: 17866 - protein, 488 aa, Geobacillus stearothermophilus
AAPFNGTMMQYFEWYLPDDGTLWTKVANEANNLSSLGITALWLPPAYKGTSRSDVGYGVYDLYDLGEFNQKGTVRTKYGTKAQYLQAIQAAHAAGMQVYADVVFDHKGGADGTEWVDAVEVNPSDRNQEISGTYQIQAWTKFDFPGRGNTYSSFKWRWYHFDGVDWDESRKLSRIYKFRGIGKAWDWEVDTENGNYDYLMYADLDMDHPEVVTELKNWGKWYVNTTNIDGFRLDAVKHIKFQFFPDWLSYVRSQTGKPLFTVGEYWSYDINKLHNYITKTNGTMSLFDAPLHNKFYTASKSGGAFDMRTLMTNTLMKDEPTLAVTFVDNHDTEPGQALQSWVDPWFKPLAYAFILTRREGYPCVFYGDYYGIPQYNIPSLKSKIDPLLIARRDYAYGTQHDYLDHSDIIGWTREGVTEKPGSGLAALITDGPGGSKWMYVGKQHAGKVFYDLTGNRSDTVTINSDGWGEFKVNGGSVSVWVPRKTTVS

SEQ ID NO: 17867 - protein, 488 aa, Geobacillus stearothermophilus
AAPFNGTMMQYFEWYLPDDGTLWTKVANEANNLSSLGITALWLPPAYKGTSRSDVGYGVYDLYDLGEFNQKGTVRTKYGTKAQYLQAIQAAHAAGMEVYADVVFDHKGGADGTEWVDAVEVNPSDRNQEISGTYQIQAWTKFDFPGRGNTYSSFKWRWYHFDGVDWDESRKLSRIYKFRGIGKAWDWEVDTENGNYDYLMYADLDMDHPEVVTELKNWGKWYVNTTNIDGFRLDAVKHIKFSFFPDWLSYVRSQTGKPLFTVGEYWSYDINKLHNYITKTNGTMSLFDAPLHNKFYTASKSGGAFDMRTLMTNTLMKDQPTLAVTFVDNHDTEPGQALQSWVDPWFKPLAYAFILTREEGYPCVFYGDYYGIPQYNIPSLKSKIDPLLIARRDYAYGTQHDYLDHSDIIGWTREGVTEKPGSGLAALITDGPGGSKWMYVGKRHAGKVFYDLTGNRSDTVTINSDGWGEFKVNGGSVSVWVPRKTTVS

SEQ ID NO: 17868 - protein, 486 aa, Geobacillus stearothermophilus
AAPFNGTMMQYFEWYLPDDGTLWTKVANEANNLSSLGITALWLPPAYKGTSRSDVGYGVYDLYDLGEFNQKGTVRTKYGTKAQYLQAIQAAHAAGMQVYADVVFDHKGGADGTEWVDAVEVNPSDRNQVISGTYQIQAWTKFDFPGRGNTYSSFKWRWYHFDGVDWDESRKLSRIYLFEGKAWDWEVDTEFGNYDYLMYADLDMDHPEVVTELKNWGPWYVLTTNIDGFRLDAVKHIKFSFFPDWLSYVRSSTGKPLFTVGEYWSYDINKLHNYITKTDGTMSLFDAPLHNKFYTASKSGGAFDMRTLMTNTLMKDQPTLAVTFVDNHDTEPGQALQSWVDPWFKPLAYAFILTRQEGYPCVFYGDYYGIPQYNIPSLKSKIDPLLIARRDYAYGTQHDYLDHSDIIGWTREGGTEKPGSGLAALITDGPGGSKWMYVGKQHAGKVFYDLTGNRSDTVTINSDGWGEFKVNGGSVSVWVPRKTTVS

SEQ ID NO: 17869 - protein, 488 aa, Geobacillus stearothermophilus
AAPFNGTMMQYFEWYLPDDGTLWTKVANEANNLSSLGITALWLPPAYKGTSRSDVGYGVYDLYDLGEFNQKGTVRTKYGTKAQYLQAIQAAHAAGMQVYADVVFDHKGGADGTEWVDAVEVNPSDRNQEISGTYQIQAWTKFDFPGRGNTYSSFKWRWYHFDGVDWDESRKLSRIYKFRGIGKAWDWEVDTENGNYDYLMYADLDMDHPEVVTELKNWGKWYVNTTNIDGFRLDAVKHIKFQFFPDWLSYVRSQTGKPLFTVGEYWSYDINKLHNYITKTNGTMSLFDAPLHNKFYTASKSGGAFDMRTLMTNTLMKDRPTLAVTFVDNHDTEPGQALQSWVDPWFKPLAYAFILTREEGYPCVFYGDYYGIPQYNIPSLKSKIDPLLIARRDYAYGTQHDYLDHSDIIGWTREGVTEKPGSGLAALITDGPGGSKWMYVGKQHAGKVFYDLTGNRSDTVTINSDGWGEFKVNGGSVSVWVPRKTTVS

SEQ ID NO: 17870 - protein, 488 aa, Geobacillus stearothermophilus
AAPFNGTMMQYFEWYLPDDGTLWTKVANEANNLSSLGITALWLPPAYKGTSRSDVGYGVYDLYDLGEFNQKGTVRTKYGTKAQYLQAIQAAHAAGMEVYADVVFDHKGGADGTEWVDAVEVNPSDRNQEISGTYQIQAWTKFDFPGRGNTYSSFKWRWYHFDGVDWDESRKLSRIYKFRGIGKAWDWEVDTENGNYDYLMYADLDMDHPEVVTELKNWGKWYVNTTNIDGFRLDAVKHIKFSFFPDWLSYVRSQTGKPLFTVGEYWSYDINKLHNYITKTNGTMSLFDAPLHNKFYTASKSGGAFDMRTLMTNTLMKDRPTLAVTFVDNHDTEPGQALQSWVDPWFKPLAYAFILTRREGYPCVFYGDYYGIPQYNIPSLKSKIDPLLIARRDYAYGTQHDYLDHSDIIGWTREGVTEKPGSGLAALITDGPGGSKWMYVGKQHAGKVFYDLTGNRSDTVTINSDGWGEFKVNGGSVSVWVPRKTTVS

SEQ ID NO: 17871 - protein, 488 aa, Geobacillus stearothermophilus
AAPFNGTMMQYFEWYLPDDGTLWTKVANEANNLSSLGITALWLPPAYKGTSRSDVGYGVYDLYDLGEFNQKGTVRTKYGTKAQYLQAIQAAHAAGMEVYADVVFDHKGGADGTEWVDAVEVNPSDRNQEISGTYQIQAWTKFDFPGRGNTYSSFKWRWYHFDGVDWDESRKLSRIYKFRGIGKAWDWEVDTENGNYDYLMYADLDMDHPEVVTELKNWGKWYVNTTNIDGFRLDAVKHIKFQFFPDWLSYVRSQTGKPLFTVGEYWSYDINKLHNYITKTNGTMSLFDAPLHNKFYTASKSGGAFDMRTLMTNTLMKDQPTLAVTFVDNHDTEPGQALQSWVDPWFKPLAYAFILTREEGYPCVFYGDYYGIPQYNIPSLKSKIDPLLIARRDYAYGTQHDYLDHSDIIGWTREGVTEKPGSGLAALITDGPGGSKWMYVGKQHAGKVFYDLTGNRSDTVTINSDGWGEFKVNGGSVSVWVPRKTTVS

SEQ ID NO: 17872 - protein, 488 aa, Geobacillus stearothermophilus
AAPFNGTMMQYFEWYLPDDGTLWTKVANEANNLSSLGITALWLPPAYKGTSRSDVGYGVYDLYDLGEFNQKGTVRTKYGTKAQYLQAIQAAHAAGMQVYADVVFDHKGGADGTEWVDAVEVNPSDRNQVISGTYQIQAWTKFDFPGRGNTYSSFKWRWYHFDGVDWDESRKLSRIYLFEGXXKAWDWEVDTEFGNYDYLMYADLDMDHPEVVTELKNWGKWYVNTTNIDGFRLDAVKHIKFQFFPDWLSYVRSQTGKPLFTVGEYWSYDINKLHNYITKTNGTMSLFDAPLHNKFYTASKSGGAFDMRTLMTNTLMKDQPTLAVTFVDNHDTEPGQALQSWVDPWFKPLAYAFILTRQEGYPCVFYGDYYGIPQYNIPSLKSKIDPLLIARRDYAYGTQHDYLDHSDIIGWTREGVTEKPGSGLAALITDGPGGSKWMYVGKQHAGKVFYDLTGNRSDTVTINSDGWGEFKVNGGSVSVWVPRKTTVS

SEQ ID NO: 17873 - protein, 488 aa, Geobacillus stearothermophilus
AAPFNGTMMQYFEWYLPDDGTLWTKVANEANNLSSLGITALWLPPAYKGTSRSDVGYGVYDLYDLGEFNQKGTVRTKYGTKAQYLQAIQAAHAAGMQVYADVVFDHKGFADGTEWVDAVEVNPSDRNQEISGTYQIQAWTKFDFPGRGNTYSSFKWRWYHFDGVDWDESRKLSRIYKFRGIGKAWDWEVDTENGNYDYLMYADLDMDHPEVVTELKNWGKWYVNTTNIDGFRLDAVKHIKFSFFPDWLSYVRSQTGKPLFTVGEYWSYDINKLHNYITKTNGTMSLFDAPLHNKFYTASKSGGAFDMRTLMTNTLMKDQPTLAVTFVDNHDTEPGQALQSWVDPWFKPLAYAFILTRQEGYPGVFYGDYYGIPQYNIPSLKSKIDPLLIARRDYAYGTQHDYLDHSDIIGWTREGVTEKPGSGLAALITDGPGGSKWMYVGKQHAGKVFYDLTGNRSDTVTITSDGWGEFKVNGGSVSVWVPRKTTVS

SEQ ID NO: 17874 - protein, 488 aa, Geobacillus stearothermophilus
AAPFNGTMMQYFEWYLPDDGTLWTKVANEANNLSSLGITALWLPPAYKGTSRSDVGYGVYDLYDLGEFNQKGTVRTKYGTKAQYLQAIQAAHAAGMRVYADVVFDHKGGADGTEWVDAVEVNPSDRNQEISGTYQIQAWTKFDFPGRGNTYSSFKWRWYHFDGVDWDESRKLSRIYKFRGIGKAWDWEVDTENGNYDYLMYADLDMDHPEVVTELKNWGKWYVNTTNIDGFRLDAVKHIKFQFFPDWLSYVRSQTGKPLFTVGEYWSYDINKLHNYITKTNGTMSLFDAPLHNKFYTASKSGGAFDMRTLMTNTLMKDQPTLAVTFVDNHDTEPGQALQSWVDPWFKPLAYAFILTRQEGYPCVFYGDYYGIPQYNIPSLKSKIDPLLIARRDYAYGTQHDYLDHSDIIGWTREGVTEKPGSGLAALITDGPGGSKWMYVGKRHAGKVFYDLTGNRSDTVTINSDGWGEFKVNGGSVSVWVPRKTTVS

SEQ ID NO: 17875 - protein, 488 aa, Geobacillus stearothermophilus
AAPFNGTMMQYFEWYLPDDGTLWTKVANEANNLSSLGITALWLPPAYKGTSRSDVGYGVYDLYDLGEFNQKGTVRTKYGTKAQYLQAIQAAHAAGMQVYADVVFDHKGGADGTEWVDAVEVNPSDRNQEISGTYQIQAWTKFDFPGRGNTYSSFKWRWYHFDGVDWDESRKLSRIYKFRGIGKAWDWEVDTENGNYDYLMYADLDMDHPEVVTELKNWGKWYVNTTNIDGFRLDAVKHIKFQFFPDWLSYVRSQTGKPLFTVGEYWSYDINKLHNYITKTNGTMSLFDAPLHNKFYTASKSGGAFDMRTLMTNTLMKDRPTLAVTFVDNHDTEPGQALQSWVDPWFKPLAYAFILTRQEGYPCVFYGDYYGIPQYNIPSLKSKIDPLLIARRDYAYGTQHDYLDHSDIIGWTREGVTEKPGSGLAALITDGPGGSKWMYVGKRHAGKVFYDLTGNRSDTVTINSDGWGEFKVNGGSVSVWVPRKTTVS

SEQ ID NO: 17876 - protein, 488 aa, Geobacillus stearothermophilus
AAPFNGTMMQYFEWYLPDDGTLWTKVANEANNLSSLGITALWLPPAYKGTSRSDVGYGVYDLYDLGEFNQKGTVRTKYGTKAQYLQAIQAAHAAGMRVYADVVFDHKGGADGTEWVDAVEVNPSDRNQEISGTYQIQAWTKFDFPGRGNTYSSFKWRWYHFDGVDWDESRKLSRIYKFRGIGKAWDWEVDTENGNYDYLMYADLDMDHPEVVTELKNWGKWYVNTTNIDGFRLDAVKHIKFSFFPDWLSYVRSQTGKPLFTVGEYWSYDINKLHNYITKTNGTMSLFDAPLHNKFYTASKSGGAFDMRTLMTNTLMKDQPTLAVTFVDNHDTEPGQALQSWVDPWFKPLAYAFILTREEGYPCVFYGDYYGIPQYNIPSLKSKIDPLLIARRDYAYGTQHDYLDHSDIIGWTREGVTEKPGSGLAALITDGPGGSKWMYVGKRHAGKVFYDLTGNRSDTVTINSDGWGEFKVNGGSVSVWVPRKTTVS

SEQ ID NO: 17877 - protein, 488 aa, Geobacillus stearothermophilus
AAPFNGTMMQYFEWYLPDDGTLWTKVANEANNLSSLGITALWLPPAYKGTSRSDVGYGVYDLYDLGEFNQKGTVRTKYGTKAQYLQAIQAAHAAGMQVYADVVFDHKGGADGTEWVDAVEVNPSDRNQVISGTYQIQAWTKFDFPGRGNTYSSFKWRWYHFDGVDWDESRKLSRIYLFEGIGKAWDWEVDTENGNYDYLMYADLDMDHPEVVTELKNWGKWYVNTTNIDGFRLDAVKHIKFSFFPDWLSYVRSQTGKPLFTVGEYWSYDINKLHNYITKTNGTMSLFDAPLHNKFYTASKSGGAFDMRTLMTNTLMKDQPTLAVTFVDNHDTEPGQALQSWVDPWFKPLAYAFILTRQEGYPCVFYGDYYGIPQYNIPSLKSKIDPLLIARRDYAYGTQHDYLDHSDIIGWTREGVTEKPGSGLAALITDGPGGSKWMYVGKQHAGKVFYDLTGNRSDTVTINSDGWGEFKVNGGSVSVWVPRKTTVS

SEQ ID NO: 17878 - protein, 488 aa, Geobacillus stearothermophilus
AAPFNGTMMQYFEWYLPDDGTLWTKVANEANNLSSLGITALWLPPAYKGTSRSDVGYGVYDLYDLGEFNQKGTVRTKYGTKAQYLQAIQAAHAAGMEVYADVVFDHKGGADGTEWVDAVEVNPSDRNQEISGTYQIQAWTKFDFPGRGNTYSSFKWRWYHFDGVDWDESRKLSRIYKFRGIGKAWDWEVDTENGNYDYLMYADLDMDHPEVVTELKNWGKWYVNTTNIDGFRLDAVKHIKFSFFPDWLSYVRSQTGKPLFTVGEYWSYDINKLHNYITKTNGTMSLFDAPLHNKFYTASKSGGAFDMRTLMTNTLMKDEPTLAVTFVDNHDTEPGQALQSWVDPWFKPLAYAFILTREEGYPCVFYGDYYGIPQYNIPSLKSKIDPLLIARRDYAYGTQHDYLDHSDIIGWTREGVTEKPGSGLAALITDGPGGSKWMYVGKQHAGKVFYDLTGNRSDTVTINSDGWGEFKVNGGSVSVWVPRKTTVS

SEQ ID NO: 17879 - protein, 488 aa, Geobacillus stearothermophilus
AAPFNGTMMQYFEWYLPDDGTLWTKVANEANNLSSLGITALWLPPAYKGTSRSDVGYGVYDLYDLGEFNQKGTVRTKYGTKAQYLQAIQAAHAAGMQVYADVVFDHKGGADGTEWVDAVEVNPSDRNQEISGTYQIQAWTKFDFPGRGNTYSSFKWRWYHFDGVDWDESRKLSRIYKFRGIGKAWDWEVDTENGNYDYLMYADLDMDHPEVVTELKNWGKWYVNTTNIDGFRLDAVKHIKFQFFPDWLSYVRSQTGKPLFTVGEYWSYDINKLHNYITKTNGTMSLFDAPLHNKFYTASKSGGAFDMRTLMTNTLMKDQPTLAVTFVDNHDTEPGQALQSWVDPWFKPLAYAFILTRREGYPCVFYGDYYGIPQYNIPSLKSKIDPLLIARRDYAYGTQHDYLDHSDIIGWTREGVTEKPGSGLAALITDGPGGSKWMYVGKEHAGKVFYDLTGNRSDTVTINSDGWGEFKVNGGSVSVWVPRKTTVS

SEQ ID NO: 17880 - protein, 486 aa, Geobacillus stearothermophilus
AAPFNGTMMQYFEWYLPDDGTLWTKVANEANNLSSLGITALWLPPAYKGTSRSDVGYGVYDLYDLGEFNQKGTVRTKYGTKAQYLQAIQAAHAAGMQVYADVVFDHKGGADGTEWVDAVEVNPSDRNQVISGTYQIQAWTKFDFPGRGNTYSSFKWRWYHFDGVDWDESRKLSRIYLFEGKAWDWEVDTEFGNYDYLMYADLDMDHPEVVTELKNWGPWYVNTTNIDGFRLDAVKHIKFSFFPDWLSYVRSQTGKPLFTVGEYWSYDINKLHNYITKTNGTMSLFDAPLHNKFYTASKSGGAFDMRTLMTNTLMKDQPTLAVTFVDNHDTEPGQALQSWVDPWFKPLAYAFILTRQEGYPCVFYGDYYGIPQYNIPSLKSKIDPLLIARRDYAYGTQHDYLDHSDIIGWTREGVTEKPGSGLAALITDGPGGSKWMYVGKQHAGKVFYDLTGNRSDTVTINSDGWGEFKVNGGSVSVWVPRKTTVS

SEQ ID NO: 17881 - protein, 488 aa, Geobacillus stearothermophilus
AAPFNGTMMQYFEWYLPDDGTLWTKVANEANNLSSLGITALWLPPAYKGTSRSDVGYGVYDLYDLGEFNQKGTVRTKYGTKAQYLQAIQAAHAAGMQVYADVVFDHKGGADGTEWVDAVEVNPSDRNQEISGTYQIQAWTKFDFPGRGNTYSSFKWRWYHFDGVDWDESRKLSRIYKFRGIGKAWDWEVDTENGNYDYLMYADLDMDHPEVVTELKNWGKWYVNTTNIDGFRLDAVKHIKFSFFPDWLSYVRSQTGKPLFTVGEYWSYDINKLHNYITKTNGTMSLFDAPLHNKFYTASKSGGAFDMRTLMTNTLMKDRPTLAVTFVDNHDTEPGQALQSWVDPWFKPLAYAFILTREEGYPCVFYGDYYGIPQYNIPSLKSKIDPLLIARRDYAYGTQHDYLDHSDIIGWTREGVTEKPGSGLAALITDGPGGSKWMYVGKEHAGKVFYDLTGNRSDTVTINSDGWGEFKVNGGSVSVWVPRKTTVS

SEQ ID NO: 17882 - protein, 488 aa, Geobacillus stearothermophilus
AAPFNGTMMQYFEWYLPDDGTLWTKVANEANNLSSLGITALWLPPAYKGTSRSDVGYGVYDLYDLGEFNQKGTVRTKYGTKAQYLQAIQAAHAAGMEVYADVVFDHKGGADGTEWVDAVEVNPSDRNQEISGTYQIQAWTKFDFPGRGNTYSSFKWRWYHFDGVDWDESRKLSRIYKFRGIGKAWDWEVDTENGNYDYLMYADLDMDHPEVVTELKNWGKWYVNTTNIDGFRLDAVKHIKFQFFPDWLSYVRSQTGKPLFTVGEYWSYDINKLHNYITKTNGTMSLFDAPLHNKFYTASKSGGAFDMRTLMTNTLMKDEPTLAVTFVDNHDTEPGQALQSWVDPWFKPLAYAFILTRQEGYPCVFYGDYYGIPQYNIPSLKSKIDPLLIARRDYAYGTQHDYLDHSDIIGWTREGVTEKPGSGLAALITDGPGGSKWMYVGKQHAGKVFYDLTGNRSDTVTINSDGWGEFKVNGGSVSVWVPRKTTVS

SEQ ID NO: 17883 - protein, 488 aa, Geobacillus stearothermophilus
AAPFNGTMMQYFEWYLPDDGTLWTKVANEANNLSSLGITALWLPPAYKGTSRSDVGYGVYDLYDLGEFNQKGTVRTKYGTKAQYLQAIQAAHAAGMEVYADVVFDHKGGADGTEWVDAVEVNPSDRNQEISGTYQIQAWTKFDFPGRGNTYSSFKWRWYHFDGVDWDESRKLSRIYKFRGIGKAWDWEVDTENGNYDYLMYADLDMDHPEVVTELKNWGKWYVNTTNIDGFRLDAVKHIKFSFFPDWLSYVRSQTGKPLFTVGEYWSYDINKLHNYITKTNGTMSLFDAPLHNKFYTASKSGGAFDMRTLMTNTLMKDEPTLAVTFVDNHDTEPGQALQSWVDPWFKPLAYAFILTRREGYPCVFYGDYYGIPQYNIPSLKSKIDPLLIARRDYAYGTQHDYLDHSDIIGWTREGVTEKPGSGLAALITDGPGGSKWMYVGKQHAGKVFYDLTGNRSDTVTINSDGWGEFKVNGGSVSVWVPRKTTVS

SEQ ID NO: 17884 - protein, 488 aa, Geobacillus stearothermophilus
AAPFNGTMMQYFEWYLPDDGTLWTKVANEANNLSSLGITALWLPPAYKGTSRSDVGYGVYDLYDLGEFNQKGTVRTKYGTKAQYLQAIQAAHAAGMQVYADVVFDHKGGADGTEWVDAVEVNPSDRNQEISGTYQIQAWTKFDFPGRGNTYSSFKWRWYHFDGVDWDESRKLSRIYKFRGIGKAWDWEVDTENGNYDYLMYADLDMDHPEVVTELKNWGPWYVLTTNIDGFRLDAVKHIKFSFFPDWLSYVRSSTGKPLFTVGEYWSYDINKLHNYITKTNGTMSLFDAPLHNKFYTASKSGGAFDMRTLMTNTLMKDQPTLAVTFVDNHDTEPGQALQSWVDPWFKPLAYAFILTRQEGYPCVFYGDYYGIPQYNIPSLKSKIDPLLIARRDYAYGTQHDYLDHSDIIGWTREGVTEKPGSGLAALITDGPGGSKWMYVGKQHAGKVFYDLTGNRSDTVTINSDGWGEFKVNGGSVSVWVPRKTTVS

SEQ ID NO: 17885 - protein, 488 aa, Geobacillus stearothermophilus
AAPFNGTMMQYFEWYLPDDGTLWTKVANEANNLSSLGITALWLPPAYKGTSRSDVGYGVYDLYDLGEFNQKGTVRTKYGTKAQYLQAIQAAHAAGMQVYADVVFDHKGGADGTEWVDAVEVNPSDRNQEISGTYQIQAWTKFDFPGRGNTYSSFKWRWYHFNGVDWDESRKLSRIYKFRGIGKAWNWEVDTENGNYDYLMYANLDYNHPEVVTELKNWGKWYVNTTNIDGFRLDAVKHIKFSFFPDWLSYVRSQTGKPLFTVGEYWSYDINKLHNYITKTDGTMSLFDAPLHNKFYTASKSGGAFDMRTLMTNTLMKDQPTLAVTFVDNHDTEPGQALQSWVDPWFKPLAYAFILTRQEGYPCVFYGDYYGIPQYNIPSLKSKIDPLLIARRDYAYGTQHDYLDHSDIIGWTREGGTEKPGSGLAALITDGPGGSKWMYVGKQHAGKVFYDLTGNRSDTVTINSDGWGEFKVNGGSVSVWVPRKTTVS

SEQ ID NO: 17886 - protein, 488 aa, Geobacillus stearothermophilus
AAPFNGTMMQYFEWYLPDDGTLWTKVANEANNLSSLGITALWLPPAYKGTSRSDVGYGVYDLYDLGEFNQKGTVRTKYGTKAQYLQAIQAAHAAGMEVYADVVFDHKGGADGTEWVDAVEVNPSDRNQEISGTYQIQAWTKFDFPGRGNTYSSFKWRWYHFDGVDWDESRKLSRIYKFRGIGKAWDWEVDTENGNYDYLMYADLDMDHPEVVTELKNWGKWYVNTTNIDGFRLDAVKHIKFSFFPDWLSYVRSQTGKPLFTVGEYWSYDINKLHNYITKTNGTMSLFDAPLHNKFYTASKSGGAFDMRTLMTNTLMKDEPTLAVTFVDNHDTEPGQALQSWVDPWFKPLAYAFILTRQEGYPCVFYGDYYGIPQYNIPSLKSKIDPLLIARRDYAYGTQHDYLDHSDIIGWTREGVTEKPGSGLAALITDGPGGSKWMYVGKEHAGKVFYDLTGNRSDTVTINSDGWGEFKVNGGSVSVWVPRKTTVS

SEQ ID NO: 17887 - protein, 488 aa, unidentified
AAPFNGTMMQYFEWYLPDDGTLWTKVANEANNLSSLGITALWLPPAYKGTSRSDVGYGVYDLYDLGEFNQKGTVRTKYGTKAQYLQAIQAAHAAGMQVYADVVFDHKGGADGTEWVDAVEVNPSDRNQEISGTYQIQAWTKFDFNGRGNTYSSFKWRWYHFDGVDWDESRKLSRIYKFRGIGKAWDWEVDTENGNYDYLMYADLDMDHPEVVTELKNWGKWYVNTTNIDGFRLDAVKHIKFSFFPDWLSYVRSQTGKPLFTVGEYWSYDINKLHNYITKTNGTMSLFDAPLHNKFYTASKSGGAFDMSTLMNNTLMKDQPTLAVTFVDNHDTEPGQALQSWVDPWFKPLAYAFILTRQEGYPCVFYGDYYGIPQYNIPSLKSKIDPLLIARRDYAYGTQHDYLDHSDIIGWTREGVTEKPGSGLAALITDGPGGSKWMYVGKQHAGKVFYDLTGNRSDTVTINSDGWGEFKVNGGSVSVWVPRKTTVS

SEQ ID NO: 17888 - protein, 488 aa, Geobacillus stearothermophilus
AAPFNGTMMQYFEWYLPDDGTLWTKVANEANNLSSLGITALWLPPAYKGTSRSDVGYGVYDLYDLGEFNQKGTVRTKYGTKAQYLQAIQAAHAAGMRVYADVVFDHKGGADGTEWVDAVEVNPSDRNQEISGTYQIQAWTKFDFPGRGNTYSSFKWRWYHFDGVDWDESRKLSRIYKFRGIGKAWDWEVDTENGNYDYLMYADLDMDHPEVVTELKNWGKWYVNTTNIDGFRLDAVKHIKFSFFPDWLSYVRSQTGKPLFTVGEYWSYDINKLHNYITKTNGTMSLFDAPLHNKFYTASKSGGAFDMRTLMTNTLMKDEPTLAVTFVDNHDTEPGQALQSWVDPWFKPLAYAFILTRREGYPCVFYGDYYGIPQYNIPSLKSKIDPLLIARRDYAYGTQHDYLDHSDIIGWTREGVTEKPGSGLAALITDGPGGSKWMYVGKQHAGKVFYDLTGNRSDTVTINSDGWGEFKVNGGSVSVWVPRKTTVS

SEQ ID NO: 17889 - protein, 488 aa, Geobacillus stearothermophilus
AAPFNGTMMQYFEWYLPDDGTLWTKVANEANNLSSLGITALWLPPAYKGTSRSDVGYGVYDLYDLGEFNQKGTVRTKYGTKAQYLQAIQAAHAAGMQVYADVVFDHKGGADGTEWVDAVEVNPSDRNQEISGTYQIQAWTKFDFPGRGNTYSSFKWRWYHFDGVDWDESRKLSRIYKFRGIGKAWDWEVDTENGNYDYLMYADLDMDHPEVVTELKNWGKWYVNTTNIDGFRLDAVKHIKFSFFPDWLSYVRSQTGKPLFTVGEYWSYDINKLHNYITKTNGTMSLFDAPLHNKFYTASKSGGAFDMRTLMTNTLMKDRPTLAVTFVDNHDTEPGQALQSWVDPWFKPLAYAFILTRREGYPCVFYGDYYGIPQYNIPSLKSKIDPLLIARRDYAYGTQHDYLDHSDIIGWTREGVTEKPGSGLAALITDGPGGSKWMYVGKEHAGKVFYDLTGNRSDTVTINSDGWGEFKVNGGSVSVWVPRKTTVS

SEQ ID NO: 17890 - protein, 484 aa, Aspergillus niger
AATALAATPADWRSQSIYFLLTDRFARTDGSTTATCNTADQKYCGGTWQGIIDKLDYIQGLGFTAIWITPVTAQLPQTTAYGDAYHGYWQQDIYSLNENYGTADDLKALSSALHERGMYLMVDVVANHFGYDGAGSSVDYSVFKPFSSQDYFHPFCFIQNYEDQTQVEDCWLGDNTVSLPDLDTTKDVVKNEWYDWVGSLVSNYSIDGLRIDTVKHVQKDFWPGYNKAAGVYCIGEVLDGDPAYTCPYQNVLDGVLNYPIYYPLLNAFKSTSGSIDDLYNEINTVKSDCPDSTLLGTFVENHDNPRFASYTNDIALAKNVAAFIILNDGIPIIYAGQEQHYAGGNDPANREATWLSGYPTDSELYKLIASANAIRNYAISKDTGFVTYKNWPIYKDDTTIAMRKGTDGSQIVTILSNKGASGDSYTLSLSGAGYTAGQQLTEVIGCTTVTVGSDGNVPVPMAGGLPRVLYPTEKLAGSKICSSS

SEQ ID NO: 17891 - protein, 484 aa, Aspergillus niger
AATALAATPADWRSQSIYFLLTDRFARTDGSTTATCNTADQKYCGGTWQGIIDKLDYIQGLGFTAIWITPVTAQLPQTTAYGDAYHGYWQQDIYSLNENYGTADDLKALSSALHERGMYLMVDVVANHFGYDGAGSSVDYSVFKPFSSQDYFHPFCFIQNYEDQTQVEDCWLGDNTVSLPDLDTTKDVVKNEWYDWVGSLVSNYSIDGLRIDTVKHVQKDFWPGYNKAAGVYCIGEVLDGDPAYTCPYQNVLDGVLNYPIYYPLLNAFKSTSGSMDDLYNMINTVKSDCPDSTLLGTFVENHDNPRFASYTNDIALAKNVAAFIILNDGIPIIYAGQEQHYAGGNDPANREATWLSGYPTDSELYKLIASANAIRNYAISKDTGFVTYKNWPIYKDDTTIALRKGTDGSQIVTILSNKGASGDSYTLSLSGAGYTAGQQLTEVIGCTTVTVGSDGNVPVPLAGGLPRVLYPTEKLAGSKICSSS

SEQ ID NO: 17892 - protein, 484 aa, Aspergillus niger
AATALAATPADWRSQSIYFLLTDRFARTDGSTTATCNTADQKYCGGTWQGIIDKLDYIQGMGFTAIWITPVTKQLPQTTAYGDAYHGYWQQDIYSLNENYGTADDLKALSSALHERGMYLMVDVVANHMGYDGAGSSVDYSVFKPFSSQDYFHPFCFIQNYEDQTQVEDCWLGDNTVSLPDLDTTKDVVKNEWYDWVKSLVSNYSIDGLRIDTVKHVQKDFWPGYNKAAGVYCIGEVLDGDPAYTCPYQNVMDGVLNYPIYYPLLNAFKSTSGSMDDLYNMINTVKSDCKDSTLLGTFVENHDNPRFASYTNDIALAKNVAAFIILNDGIPIIYAGQEQHYAGGNDPANREATWLSGYPTDSELYKLIASANKIRNYAISKDTGFVTYKNWPIYKDDTTIAMRKGTDGSQIVTILSNKGASGDSYTLSLSGAGYTAGQKLTEVIGCTTVTVGSDGNVPVPMAGGLPRVLYPTEKLAGSKICSSS

SEQ ID NO: 17893 - protein, 484 aa, Aspergillus niger
AATALAATPADWRSQSIYFLLTDRFARTDGSTTATCNTADQKYCGGTWQGIIDKLDYIQGMGFTAIWITPVTAQLPQTTAYGDAYHGYWQQDIYSLNENYGTADDLKALSSALHERGMYLMVDVVANHFGYDGAGSSVDYSVFKPFSSQDYFHPFCFIQNYEDQTQVEDCWLGDNTVSLPDLDTTKDVVKNEWYDWVGSLVSNYSIDGLRIDTVKHVQKDFWPGYNKAAGVYCIGEVLDGDPAYTCPYQNVMDGVLNYPIYYPLLNAFKSTSGSIDDLYNEINTVKSDCPDSTLLGTFVENHDNPRFASYTNDIALAKNVAAFIILNDGIPIIYAGQEQHYAGGNDPANREATWLSGYPTDSELYKLIASANAIRNYAISKDTGFVTYKNWPIYKDDTTIALRKGTDGSQIVTILSNKGASGDSYTLSLSGAGYTAGQQLTEVIGCTTVTVGSDGNVPVPLAGGLPRVLYPTEKLAGSKICSSS

SEQ ID NO: 17894 - protein, 484 aa, Aspergillus niger
AATALAATPADWRSQSIYFLLTDRFARTDGSTTATCNTADQKYCGGTWQGIIDKLDYIQGMGFTAIWITPVTAQLPQTTAYGDAYHGYWQQDIYSLNENYGTADDLKALSSALHERGMYLMVDVVANHMGYDGAGSSVDYSVFKPFSSQDYFHPFCFIQNYEDQTQVEDCWLGDNTVSLPDLDTTKDVVKNEWYDWVGSLVSNYSIDGLRIDTVKHVQKDFWPGYNKAAGVYCIGEVLDGDPAYTCPYQNVLDGVLNYPIYYPLLNAFKSTSGSIDDLYNEINTVKSDCPDSTLLGTFVENHDNPRFASYTNDIALAKNVAAFIILNDGIPIIYAGQEQHYAGGNDPANREATWLSGYPTDSELYKLIASANAIRNYAISKDTGFVTYKNWPIYKDDTTIALRKGTDGSQIVTILSNKGASGDSYTLSLSGAGYTAGQQLTEVIGCTTVTVGSDGNVPVPLAGGLPRVLYPTEKLAGSKICSSS

SEQ ID NO: 17895 - protein, 485 aa, Bacillus sp.
HHNGTNGTMMQYFEWHLPNDGNHWNRLRDDASNLRNRGITAIWIPPAWKGTSQNDVGYGAYDLYDLGEFNQKGTVRTKYGTRSQLESAIHALKNNGVQVIGDVVMNHKGGADATENVLAVEVNPNNRNQEISGDYTIEAYTKFDFPGRGNTYSDFKWRWYHFDGVDWDQSRQFQNRIYKFRGDGKAWDWEVDSEFGNYDYLMYADYDMDHPEVVNELRRWGEWYTNTLNLDGFRIDAVKHIKFSFTRDWLTHVRNATGKGMFAVAEFWKNDLGALENYLNKTNWNHSVFDVPLHYNLYNASNSGGNYDMAKLLNGTVVQKHPMHAVTFVDNHDSQPGESLESFVQEWFKPLAYALILTREQGYPSVFYGDYYGIPTHSVPAMKAKIDPILEARQNFAYGTQHDYFDHHNIIGWTREGNTTHPNSGLATIMSDGPGGEKWMYVGQNKAGQVWHDITGNKPGTVTINADGWANFSVNGGSVSIWVKR

SEQ ID NO: 17896 - protein, 483 aa, Bacillus sp.
HHNGTNGTMMQYFEWHLPNDGNHWNRLRDDASNLRNRGITAIWIPPAWKGTSQNDVGYGAYDLYDLGEFNQKGTVRTKYGTRSQLESAIHALKNNGVQVYGDVVMNHKGGADATENVLAVEVNPNNRNQEISEDYTIEAWTKFDFPGRRNTHSDFKWRWYHFDGVDWDQSRQFQNRIYKFRGKAWDWEVDSEYGNNDYLMYADLDMDHPEVVNELRRWGEWYTNTLNLDGFRIDAVKHIKYSFTRDWLTHVRNATGKEMFAVAEFWKNDLGALENYLNKTNWNHSVFDVPLHYNLYNASNSGGNYDMAKLLNGTVVQKHPMHAVTFVDNHDSQPGESLESFVQEWFKPLAYALILTREQGYPSVFYGDYYGIPTHSVPAMKAKIDPILEARQNFAYGTQHDYFDHHNIIGWTREGNTTHPNSGLATIMSDGPGGEKWMYVGQNKAGQVWHDITGNKPGTVTINADGWANFSVNGGSVSIWVKR

SEQ ID NO: 17897 - protein, 485 aa, Bacillus sp.
HHNGTNGTMMQYFEWHLPNDGNHWNRLRDDASNLRNRGITAIWIPPAWKGTSQNDVGYGAYDLYDLGEFNQKGTVRTKYGTRSQLESAIHALKNNGVQVYGDVVMNHKGGADATETVLAVEVNPNNRNQEISEDYTIEAWTKFDFPGRRNTYSDFKWRWYHFDGVDWDQSRQFQNRIYKFRGXXKAWDWEVDSENGNNDYLMFADLDMDHPEVVNELRRWGEWYTNTLNLDGFRIDAVKHIKYSFTRDWLTHVRNATGKEMFAVAEFWKNDLGALENYLNKTNWNHSVFDVPLHYNLYNASNSGGNYDMAKLLNGTVVQKHPMHAVTFVDNHDSQPGESLESFVQEWFKPLAYALILTREQGYPSVFYGDYYGIPTHSVPAMKAKIDPILEARQNFAYGTQHDYFDHHNIIGWTREGNTTHPNSGLATIMSDGPGGEKWMYVGQNKAGQVWHDITGNKPGTVTINADGWANFSVNGGSVSIWVKR

SEQ ID NO: 17898 - protein, 483 aa, Bacillus sp.
HHNGTNGTMMQYFEWHLPNDGNHWNRLRDDASNLRNRGITAIWIPPAWKGTSQNDVGYGAYDLYDLGEFNQKGTVRTKYGTRSQLESAIHALKNNGVQVYGDVVMNHKGGADATENVLAVEVNPNNRNQEISGDYTIEAYTKFDFPGRGNTYSDFKWRWYHFDGVDWDQSRQFQNRIYKFRGKAWDWEVDSEFGNYDYLMYADYDMDHPEVVNELRRWGEWYTNTLNLDGFRIDAVKHIKFSFTRDWLTHVRNATGKGMFAVAEFWKNDLGALENYLNKTNWNHSVFDVPLHYNLYNASNSGGNYDMAKLLNGTVVQKHPMHAVTFVDNHDSQPGESLESFVQEWFKPLAYALILTREQGYPSVFYGDYYGIPTHSVPAMKAKIDPILEARQNFAYGTQHDYFDHHNIIGWTREGNTTHPNSGLATIMSDGPGGEKWMYVGQNKAGQVWHDITGNKPGTVTINADGWANFSVNGESVSIWVKR

SEQ ID NO: 17899 - protein, 485 aa, Bacillus sp.
HHNGTNGTMMQYFEWHLPNDGNHWNRLRDDASNLRNRGITAIWIPPAWKGTSQNDVGYGAYDLYDLGEFNQKGTVRTKYGTRSQLESAIHALKNNGVQVYGDVVMNHKGGADATENVLAVEVNPNNRNQEISGDYTIEAYTKFDFPGRGNTYSDFKWRWYHFDGVDWDQSRQFQNRIYKFRGDGKAWDWEVDSEFGNYDYLMYADYDMDHPEVVNELRRWGEWYTNTLNLDGFRIDAVKHIKFSFTRDWLTHVRNATGKGMFAVAEFWKNDLGALENYLNKTNWNHSVFDVPLHYNLYNASNSGGNYDMAKLLNGTVVQKHPMHAVTFVDNHDSQPNESLESFVQEWFKPLAYALILTREQGYPSVFYGDYYGIPTHSVPAMKAKIDPILEARQNFAYGTQHDYFDHHNIIGWTREGNTTHPNSGLATIMSDGPGGEKWMYVGQNKAGQVWHDITGNKPGTVTINADGWANFSVNGGSVSIWVKR

SEQ ID NO: 17900 - protein, 483 aa, Bacillus sp.
HHNGTNGTMMQYFEWHLPNDGNHWNRLRDDASNLRNRGITAIWIPPAWKGTSQNDVGYGAYDLYDLGEFNQKGTVRTKYGTRSQLESAIHALKNNGVQVYGDVVMNHKGGADATENVLAVEVNPNNRNQEISEDYTIEAWTKFDFPGRRNTYSDFKWRWYHFDGVDWDQSRQFQNRIYKFRGKAWDWEVDSEYGNNDYLMFADLDMDHPEVVNELRRWGEWYTNTLNLDGFRIDAVKHIKYSFTRDWLTHVRNATGKEMFAVAEFWKNDLGALENYLNKTNWNHSVFDVPLHYNLYNASNSGGNYDMAKLLNGTVVQKHPMHAVTFVDNHDSQPGESLESFVQEWFKPLAYALILTREQGYPSVFYGDYYGIPTHSVPAMKAKIDPILEARQNFAYGTQHDYFDHHNIIGWTREGNTTHPNSGLATIMSDGPGGEKWMYVGQNKAGQVWHDITGNKPGTVTINADGWANFSVNGGSVSIWVKR

SEQ ID NO: 17901 - protein, 483 aa, Bacillus sp.
HHNGTNGTMMQYFEWHLPNDGNHWNRLRDDASNLRNRGITAIWIPPAWKGTSQNDVGYGAYDLYDLGEFNQKGTVRTKYGTRSQLESAIHALKNNGVQVYGDVVMNHKGGADATENVLAVEVNPNNRNQEISGDYTIEAWTRFDFSGRKNTYSDFKWRWYHFDGVDWDQSRQFQNRIYKFRGKAWDWEVDSEYGNNDYLMYADIDMDHPEVVNELRRWGEWYTNTLNLDGFRIDAVKHIKYSFTRDWLTHVRNATGKEMFAVAEFWKNDLGALENYLNKTNWNHSVFDVPLHYNLYNASNSGGNYDMAKLLNGTVVQKHPMHAVTFVDNHDSQPGESLESFVQEWFKPLAYALILTREQGYPSVFYGDYYGIPTHSVPAMKAKIDPILEARQNFAYGTQHDYFDHHNIIGWTREGNTTHPNSGLATIMSDGPGGEKWMYVGQNKAGQVWHDITGNKPGTVTINADGWANFSVNGGSVSIWVKR

SEQ ID NO: 17902 - protein, 483 aa, Bacillus sp.
HHNGTNGTMMQYFEWHLPNDGNHWNRLRDDASNLRNRGITAIWIPPAWKGTSQNDVGYGAYDLYDLGEFNQKGTVRTKYGTRSQLESAIHALKNNGVQVIGDVVMNHKGGADATENVLAVEVNPNNRNQEISGDYTIEAYTKFDFPGRGNTYSDFKWRWYHFDGVDWDQSRQFQNRIYKFRGKAWDWEVDSEFGNYDYLMYADYDMDHPEVVNELRRWGEWYTNTLNLDGFRIDAVKHIKFSFTRDWLTHVRNATGKGMFAVAEFWKNDLGALENYLNKTNWNHSVFDVPLHYNLYNASNSGGNYDMAKLLNGTVVQKHPMHAVTFVDNHDSQPGESLESFVQEWFKPLAYALILTREQGYPSVFYGDYYGIPTHSVPAMKAKIDPILEARQNFAYGTQHDYFDHHNIIGWTREGNTTHPNSGLATIMSDGPGGEKWMYVGQNKAGQVWHDITGNKPGTVTINADGWANFSVNGGSVSIWVKR

SEQ ID NO: 17903 - protein, 483 aa, Bacillus sp.
HHNGTNGTMMQYFEWHLPNDGNHWNRLRDDASNLRNRGITAIWIPPAWKGTSQNDVGYGAYDLYDLGEFNQRGTVRTKYGTRSQLESAIHALKNNGVQVYGDVVMNHKGGADATENVLAVEVNPNNRNQEISGDYTIEAWTKFDFPGRGNTYSDFKWRWYHFDGVDWDQSRQFQNRIYKFRGKAWDWEVDSEFGNYDYLMYADYDMDHPEVVNELRRWGEWYTNTLNLDGFRIDAVKHIKFSFTRDWLTHVRNATGKHMFAVAEFWKNDLVALENYLNKTNWNHSVFDVPLHYNLYNASNSGGNYDMAKLLNGTVVQKHPMHAVTFVDNHDSQPGESLESFVQEWFKPLAYALILTREQGYPSVFYGDYYGIPTHSVPAMKAKIDPILEARQNFAYGTQHDYFDHHNIIGWTREGNTTHPNSGLATIMSDGPGGEKWMYVGQNKAGQVWHDITGNKPGTVTINADGWANFSVNGGSVSIWVKR

SEQ ID NO: 17904 - protein, 485 aa, Bacillus sp.
HHNGTNGTMMQYFEWHLPNDGNHWNRLRDDASNLRNRGITAIWIPPAWKGTSQNDVGYGAYDLYDLGEFNQKGTVRTKYGTRSQLESAIHALKNNGVQVYGDVVMNHKGGADATENVLAVEVNPNNRNQEISGDYTIEAYTKFDFPGRGNTYSDFKWRWYHFDGVDWDQSRQFQNRIYKFRGDGKAWDGEVDSEFGNYDYLMYADYDMDHPEVVNELRRWGEWYTNTLNLDGFRIDAVKHIKFSFTRDWLTHVRNATGKGMFAVAEFWKNDLGALENYLNKTNWNHSVFDVPLHYNLYNASNSGGNYDMAKLLNGTVVQKHPMHAVTFVDNHDSQPGESLESFVQEWFKPLAYALILTREQGYPSVFYGDYYGIPTHSVPAMKAKIDPILEARQNFAYGTQHDYFDHHNIIGWTREGNTTHPNSGLATIMSDGPGGEKWMYVGQNKAGQVWHDITGNKPGTVTINADGWANFSVNGGSVSIWVKR

SEQ ID NO: 17905 - protein, 483 aa, Bacillus sp.
HHNGTNGTMMQYFEWHLPNDGNHWNRLRDDASNLRNRGITAIWIPPAWKGTSQNDVGYGAYDLYDLGEFNQKGTVRTKYGTRSQLESAIHALKNNGVQVYGDVVMNHKGGADATETVLAVEVNPNNRNQEISEDYTIEAWTKFDFPGRRNTYSDFKWRWYHFDGVDWDQSRQFQNRIYKFRGKAWDWEVDSENGNYDNLMYAFVDLDHPEVVNELRRWGEWYTNTLNLDGFRIDAVKHIKYSFTRDWLTHVRNATGKEMFAVAEFWKNDLGALENYLNKTNWNHSVFDVPLHYNLYNASNSGGNYDMAKLLNGTVVQKHPMHAVTFVDNHDSQPGESLESFVQEWFKPLAYALILTREQGYPSVFYGDYYGIPTHSVPAMKAKIDPILEARQNFAYGTQHDYFDHHNIIGWTREGNTTHPNSGLATIMSDGPGGEKWMYVGQNKAGQVWHDITGNKPGTVTINADGWANFSVNGGSVSIWVKR

SEQ ID NO: 17906 - protein, 483 aa, Bacillus sp.
HHNGTNGTMMQYFEWHLPNDGNHWNRLRDDASNLRNRGITAIWIPPAWKGTSQNDVGYGAYDLYDLGEFNQKGTVRTKYGTRSQLESAIHALKNNGVQVYGDVVMNHKGGADATENVLAVEVNPNNRNQEISGDYTIEAYTKFDFPGRGNTYSDFKWRWYHFDGVDWDQSRQFQNRIYKFRGKAWDTEVDSEFGNYDYLMYADYDMDHPEVVNELRRWGEWYTNTLNLDGFRIDAVKHIKFSFTRDWLTHVRNATGKGMFAVAEFWKNDLGALENYLNKTNWNHSVFDVPLHYNLYNASNSGGNYDMAKLLNGTVVQKHPMHAVTFVDNHDSQPGESLESFVQEWFKPLAYALILTREQGYPSVFYGDYYGIPTHSVPAMKAKIDPILEARQNFAYGTQHDYFDHHNIIGWTREGNTTHPNSGLATIMSDGPGGEKWMYVGQNKAGQVWHDITGNKPGTVTINADGWANFSVNGGSVSIWVKR

SEQ ID NO: 17907 - protein, 485 aa, Bacillus sp.
HHNGTNGTMMQYFEWHLPNDGNHWNRLRDDASNLRNRGITAIWIPPAWKGTSQNDVGYGAYDLYDLGEFNQKGTVRTKYGTRSQLESAIHALKNNGVQVYGDVVMNHKGGADATENVLAVEVNPNNRNQEISEDYTIEAWTKFDFPGRRNTHSDFKWRWYHFDGVDWDQSRQFQNRIYKFRGXXKAWDWEVDSEYGNNDYLMYADLDMDHPEVVNELRRWGEWYTNTLNLDGFRIDAVKHIKYSFTRDWLTHVRNATGKEMFAVAEFWKNDLGALENYLNKTNWNHSVFDVPLHYNLYNASNSGGNYDMAKLLNGTVVQKHPMHAVTFVDNHDSQPGESLESFVQEWFKPLAYALILTREQGYPSVFYGDYYGIPTHSVPAMKAKIDPILEARQNFAYGTQHDYFDHHNIIGWTREGNTTHPNSGLATIMSDGPGGEKWMYVGQNKAGQVWHDITGNKPGTVTINADGWANFSVNGGSVSIWVKR

SEQ ID NO: 17908 - protein, 485 aa, Bacillus sp.
HHNGTNGTMMQYFEWHLPNDGNHWNRLRDDASNLRNRGITAIWIPPAWKGTSQNDVGYGAYDLYDLGEFNQKGTVRTKYGTRSQLESAIHALKNNGVQVYGDVVMNHKGGADATENVLAVEVNPNNRNQEISGDYTIEAYTKFDFPGRGNTYSDFKWRWYHFDGVDWDQSRQFQNRIYKFRGDGKAWDWEVDSEFGNYDYLMYADYDMDHPEVVNELRRWGEWYTNTLNLDGFRIDAVKHIKFSFTRDWLTHVRNATGKGMFAVAEFWKNDLGALENYLNKTNDNHSVFDVPLHYNLYNASNSGGNYDMAKLLNGTVVQKHPMHAVTFVDNHDSQPGESLESFVQEWFKPLAYALILTREQGYPSVFYGDYYGIPTHSVPAMKAKIDPILEARQNFAYGTQHDYFDHHNIIGWTREGNTTHPNSGLATIMSDGPGGEKWMYVGQNKAGQVWHDITGNKPGTVTINADGWANFSVNGGSVSIWVKR

SEQ ID NO: 17909 - protein, 485 aa, Bacillus sp.
HHNGTNGTMMQYFEWHLPNDGNHWNRLRDDASNLRNRGITAIWIPPAWKGTSQNDVGYGAYDLYDLGEFNQKGTVRTKYGTRSQLESAIHALKNNGVQVYGDVVMNHKGGADATENVLAVEVNPNNRNQEISGDYTIEAYTKFDFPGRGNTYSDFKWRWYHFDGVDWDQSRQFQNRIYKFRGDGKAWDWEVDSEFGNYDYLMYADYDMDHPEVVNELRRWGEWYTNTLNLDGFRIDAVKHIKFSFTRDWLTHVRNATGKGMFAVAEFWKNDLGALENYLNKTNWNHSVFDVPLHYNLYNASNSGGNYDMAKLLNGTVVQKHPMHAVTFVDNHDSQPGESLESFVQEWFKPLAYALILTREQGYPSVFYGDYYGIPTHSVPAMKAKIDPILEARQNFAYGTQHDYFDHHNIIGWTREGNTTHPNSGLATIMSDGPGGEKWMYVGQNKAGQVWHDITGNKPGTVTINADGWANFSVNGESVSIWVKR

SEQ ID NO: 17910 - protein, 485 aa, Bacillus sp.
HHNGTNGTMMQYFEWHLPNDGNHWNRLRDDASNLRNRGITAIWIPPAWKGTSQNDVGYGAYDLYDLGEFNQKGTVRTKYGTRSQLESAIHALKNNGVQVYGDVVMNHKAGADATENVLAVEVNPNNRNQEISGDYTIEAYTKFDFPGRGNTYSDFKWRWYHFDGVDWDQSRQFQNRIYKFRGDGKAWDWEVDSEFGNYDYLMYADYDMDHPEVVNELRRWGEWYTNTLNLDGFRIDAVKHIKFSFTRDWLTHVRNATGKGMFAVAEFWKNDLGALENYLNKTNWNHSVFDVPLHYNLYNASNSGGNYDMAKLLNGTVVQKHPMHAVTFVDNHDSQPGESLESFVQEWFKPLAYALILTREQGYPSVFYGDYYGIPTHSVPAMKAKIDPILEARQNFAYGTQHDYFDHHNIIGWTREGNTTHPNSGLATIMSDGPGGEKWMYVGQNKAGQVWHDITGNKPGTVTINADGWANFSVNGGSVSIWVKR

SEQ ID NO: 17911 - protein, 485 aa, Bacillus sp.
HHNGTNGTMMQYFEWHLPNDGNHWNRLRDDASNLRNRGITAIWIPPAWKGTSQNDVGYGAYDLYDLGEFNQKGTVRTKYGTRSQLESAIHALKNNGVQVYGDVVMNHKGGADATENVLAVEVNPNNRNQEISGDYTIEAYTKFDFPGRGNTYSDFKWRWYHFDGVDWDQSRQFQNRIYKFRGDGKAWDWEVDSEFGNYDYLMYADYDMDHPEVVNELRRWGEWYTNTLNLDGFRIDAVKHIKFSFTRDWLTHVRNATGKGMFAVAEFWKNDLGALENYLNKTNWNHSVFDVPLHYNLYNASNGGGNYDMAKLLNGTVVQKHPMHAVTFVDNHDSQPGESLESFVQEWFKPLAYALILTREQGYPSVFYGDYYGIPTHSVPAMKAKIDPILEARQNFAYGTQHDYFDHHNIIGWTREGNTTHPNSGLATIMSDGPGGEKWMYVGQNKAGQVWHDITGNKPGTVTINADGWANFSVNGGSVSIWVKR

SEQ ID NO: 17912 - protein, 483 aa, Bacillus sp.
HHNGTNGTMMQYFEWHLPNDGNHWNRLRDDASNLRNRGITAIWIPPAWKGTSQNDVGYGAYDLYDLGEFNQKGTVRTKYGTRSQLESAIHALKNNGVQVYGDVVMNHKGGADATENVLAVEVNPNNRNQEISGDYTIEAWTKFDFPERRNTYSDFKWRWYHFDGVDWDESRQFQNRIYKFRGKAWDWEVDSENGNNDYLMFADLDMDHPEVVNELRRWGEWYTNTLNLDGFRIDAVKHIKYSFTRDWLTHVRNATGKEMFAVAEFWKNDLGALENYLNKTNWNHSVFDVPLHYNLYNASNSGGNYDMAKLLNGTVVQKHPMHAVTFVDNHDSQPGESLESFVQEWFKPLAYALILTREQGYPSVFYGDYYGIPTHSVPAMKAKIDPILEARQNFAYGTQHDYFDHHNIIGWTREGNTTHPNSGLATIMSDGPGGEKWMYVGQNKAGQVWHDITGNKPGTVTINADGWANFSVNGGSVSIWVKR

SEQ ID NO: 17913 - protein, 483 aa, Bacillus sp.
HHNGTNGTMMQYFEWHLPNDGNHWNRLRDDASNLRNRGITAIWIPPAWKGTSQNDVGYGAYDLYDLGEFNQKGTVRTKYGTRSQLESAIHALKNNGVQVYGDVVMNHKGGADATENVLAVEVNPNNRNQEISGDYTIEAYTKFDFPGRGNTYSDFKWRWYHFDGVDWDQSRQFQNRIYKFRGKAWDWEVDSEFGNYDYLMYADYDMDHPEVVNELRRWGEWYTNTLNLDGFRIDAVKHIKFSFTRDWLTHVRNATGKGMFAVAEFWKNDLGALENYLNKTNWNHSVFDVPLHYNLYNASNSGGNYDMAKLLNGTVVQKHPMHAVTFVDNHDSQPGESLESFVQEWFKPLAYALILTREQGYPSVFYGDYYGIPTHSVPAMKAKIDPILEARQNFAYGTQHDYFDHHNIIGWTREGNTTHPNSGLATIMSDGPGGEKWMYVGQNKAGQVWHDITGNKPGTVTINADGWANFSVNEGSVSIWVKR

SEQ ID NO: 17914 - protein, 485 aa, Bacillus sp.
HHNGTNGTMMQYFEWHLPNDGNHWNRLRDDASNLRNRGITAIWIPPAWKGTSQNDVGYGAYDLYDLGEFNQKGTVRTKYGTRSQLESAIHALKNNGVQVYGDVVMNHKGGADATENVLAVEVNPNNRNQEISGDYTIEAWTKFDFPERRNTYSDFKWRWYHFDGVDWDESRQFQNRIYKFRGXXKAWDWEVDSENGNNDYLMFADLDMDHPEVVNELRRWGEWYTNTLNLDGFRIDAVKHIKYSFTRDWLTHVRNATGKEMFAVAEFWKNDLGALENYLNKTNWNHSVFDVPLHYNLYNASNSGGNYDMAKLLNGTVVQKHPMHAVTFVDNHDSQPGESLESFVQEWFKPLAYALILTREQGYPSVFYGDYYGIPTHSVPAMKAKIDPILEARQNFAYGTQHDYFDHHNIIGWTREGNTTHPNSGLATIMSDGPGGEKWMYVGQNKAGQVWHDITGNKPGTVTINADGWANFSVNGGSVSIWVKR

SEQ ID NO: 17915 - protein, 485 aa, Bacillus sp.
HHNGTNGTMMQYFEWHLPNDGNHWNRLRDDASNLRNRGITAIWIPPAWKGTSQNDVGYGAYDLYDLGEFNQKGTVRTKYGTRSQLESAIHALKNNGVQVYGDVVMNHKGGADATENVLAVEVNPNNRNQEISGDYTIEAYTKFDFPGRGNTYSDFKWRWYHFDGVDWDQSRQFQNRIYKFRGDGKAWDWEVDSEFGNYDYLMYADYDMDHPEVVNELRRWGEWYTNTLNLDGFRIDAVKHIKFSFTRDWLTHVRNATGKTMFAVAEFWKNDLGALENYLNKTNDNHSVFDVPLHYNLYNASNSGGNYDMAKLLNGTVVQKHPMHAVTFVDNHDSQPGESLESFVQEWFKPLAYALILTREQGYPSVFYGDYYGIPTHSVPAMKAKIDPILEARQNFAYGTQHDYFDHHNIIGWTREGNTTHPNSGLATIMSDGPGGEKWMYVGQNKAGQVWHDITGNKPGTVTINADGWANFSVNGGSVSIWVKR

SEQ ID NO: 17916 - protein, 485 aa, Bacillus sp.
HHNGTNGTMMQYFEWHLPNDGNHWNRLRDDASNLRNRGITAIWIPPAWKGTSQNDVGYGAYDLYDLGEFNQKGTVRTKYGTRSQLESAIHALKNNGVQVYGDVVMNHKGGADATENVLAVEVNPNNRNQEISEDYTIEAWTKFDFPGRRNTYSDFKWRWYHFDGVDWDQSRQFQNRIYKFRGXXKAWDWEVDSEYGNNDYLMFADLDMDHPEVVNELRRWGEWYTNTLNLDGFRIDAVKHIKYSFTRDWLTHVRNATGKEMFAVAEFWKNDLGALENYLNKTNWNHSVFDVPLHYNLYNASNSGGNYDMAKLLNGTVVQKHPMHAVTFVDNHDSQPGESLESFVQEWFKPLAYALILTREQGYPSVFYGDYYGIPTHSVPAMKAKIDPILEARQNFAYGTQHDYFDHHNIIGWTREGNTTHPNSGLATIMSDGPGGEKWMYVGQNKAGQVWHDITGNKPGTVTINADGWANFSVNGGSVSIWVKR

SEQ ID NO: 17917 - protein, 483 aa, Bacillus sp.
HHNGTNGTMMQYFEWHLPNDGNHWNRLRDDASNLRNRGITAIWIPPAWKGTSQNDVGYGAYDLYDLGEFNQKGTVRTKYGTRSQLESAIHALKNNGVQVYGDVVMNHKGGADATENVLAVEVNPNNRNQEISGDYTIEAWTKFDFPERRNTYSDFKWRWYHFDGVDWDESRQFQNRIYKFRGKAWDWEVDSENGNYDNLMYAFVDLDHPEVVNELRRWGEWYTNTLNLDGFRIDAVKHIKYSFTRDWLTHVRNATGKEMFAVAEFWKNDLGALENYLNKTNWNHSVFDVPLHYNLYNASNSGGNYDMAKLLNGTVVQKHPMHAVTFVDNHDSQPGESLESFVQEWFKPLAYALILTREQGYPSVFYGDYYGIPTHSVPAMKAKIDPILEARQNFAYGTQHDYFDHHNIIGWTREGNTTHPNSGLATIMSDGPGGEKWMYVGQNKAGQVWHDITGNKPGTVTINADGWANFSVNGGSVSIWVKR

SEQ ID NO: 17918 - protein, 483 aa, Bacillus sp.
HHNGTNGTMMQYFEWHLPNDGNHWNRLRDDASNLRNRGITAIWIPPAWKGTSQNDVGYGAYDLYDLGEFNQKGTVRTKYGTRSQLESAIHALKNNGVQVYGDVVMNHKGGADATENVLAVEVNPNNRNQEISGDYTIEAYTKFDFPGRGNTYSDFKWRWYHFDGVDWDQSRQFQNRIYKFRGKAWDWEVDSEFGNYDYLMYADYDMDHPEVVNELRRWGEWYTNTLNLDGFRIDAVKHIKFSFTRDWLTHVRNATGKGMFAVAEFWKNDLGALENYLNKTNWNHSVFDVPLHYNLYNASNSGGNYDMAKLLNGTVVQKHPMHAVTFVDNHDSQPGESLESFVQEWFKPLAYALILTREQGYPSVFYGDYYGIPTHSVPAMKAKIDPILEARQNFAYGTQHDYFDHHNIIGWTREGNTTHPNSGLATIMSDGPGGEKRMYVGQNKAGQVWHDITGNKPGTVTINADGWANFSVNGGSVSIWVKR

SEQ ID NO: 17919 - protein, 483 aa, Bacillus sp.
HHNGTNGTMMQYFEWHLPNDGNHWNRLRDDASNLRNRGITAIWIPPAWKGTSQNDVGYGAYDLYDLGEFNQKGTVRTKYGTRSQLESAIHALKNNGVQVYGDVVMNHKGGADATENVLAVEVNPNNRNQEISGDYTIEAYTKFDFPGRGNTYSDFKWRWYHFDGVDWDQSRQFQNRIYKFRGKAWDGEVDSEFGNYDYLMYADYDMDHPEVVNELRRWGEWYTNTLNLDGFRIDAVKHIKFSFTRDWLTHVRNATGKGMFAVAEFWKNDLGALENYLNKTNWNHSVFDVPLHYNLYNASNSGGNYDMAKLLNGTVVQKHPMHAVTFVDNHDSQPGESLESFVQEWFKPLAYALILTREQGYPSVFYGDYYGIPTHSVPAMKAKIDPILEARQNFAYGTQHDYFDHHNIIGWTREGNTTHPNSGLATIMSDGPGGEKWMYVGQNKAGQVWHDITGNKPGTVTINADGWANFSVNGGSVSIWVKR

SEQ ID NO: 17920 - protein, 483 aa, Bacillus sp.
HHNGTNGTMMQYFEWHLPNDGNHWNRLRDDASNLRNRGITAIWIPPAWKGTSQNDVGYGAYDLYDLGEFNQKGTVRTKYGTRSQLESAIHALKNNGVQVYGDVVMNHKGGADATENVLAVEVNPNNRNQEISGDYTIEAYTKFDFPGRGNTYSDFKWRWYHFDGVDWDQSRQFQNRIYKFRGKAWDWEVDSEFGNYDYLMYADYDMDHPEVVNELRRWGEWYTNTLNLDGFRIDAVKHIKFSFTRDWLTHVRNATGKGMFAVAEFWKNDLGALENYLNKTNWNHSVFDVPLHYNLYNASNGGGNYDMAKLLNGTVVQKHPMHAVTFVDNHDSQPGESLESFVQEWFKPLAYALILTREQGYPSVFYGDYYGIPTHSVPAMKAKIDPILEARQNFAYGTQHDYFDHHNIIGWTREGNTTHPNSGLATIMSDGPGGEKWMYVGQNKAGQVWHDITGNKPGTVTINADGWANFSVNGGSVSIWVKR

SEQ ID NO: 17921 - protein, 483 aa, Bacillus sp.
HHNGTNGTMMQYFEWHLPNDGNHWNRLRDDASNLRNRGITAIWIPPAWKGTSQNDVGYGAYDLYDLGEFNQKGTVRTKYGTRSQLESAIHALKNNGVQVYGDVVMNHKGGADATENVLAVEVNPNNRNQEISGDYTIEAYTKFDFPGRGNTYSDFKWRWYHFDGVDWDQSRQFQNRIYKFRGKAWDWEVDSEFGNYDYLMYADYDMDHPEVVNELRRWGEWYTNTLNLDGFRIDAVKHIKFSFTRDWLTHVRNATGKTMFAVAEFWKNDLGALENYLNKTNDNHSVFDVPLHYNLYNASNSGGNYDMAKLLNGTVVQKHPMHAVTFVDNHDSQPGESLESFVQEWFKPLAYALILTREQGYPSVFYGDYYGIPTHSVPAMKAKIDPILEARQNFAYGTQHDYFDHHNIIGWTREGNTTHPNSGLATIMSDGPGGEKWMYVGQNKAGQVWHDITGNKPGTVTINADGWANFSVNGGSVSIWVKR

SEQ ID NO: 17922 - protein, 485 aa, Bacillus sp.
HHNGTNGTMMQYFEWHLPNDGNHWNRLRDDASNLRNRGITAIWIPPAWKGTSQNDVGYGAYDLYDLGEFNQKGTVRTKYGTRSQLESAIHALKNNGVQVYGDVVMNHKGGADATENVLAVEVNPNNRNQEISGDYTIEAYTKFDFPGRGNTYSDFKWRWYHFDGVDWDQSRQFQNRIYKFRGDGKAWDWEVDSEFGNYDYLMYADYDMDHPEVVNELRRWGEWYTNTLNLDGFRIDAVKHIKFSFTRDWLTHVRNATGKGMFAVAEFWKNDLGALENYLNKTNWNHSVFDVPLHYNLYNASNSGGNYDMAKLLNGTVVQKHPMHAVTFVDNHDSQPGESLESFVQEWFKPLAYALILTREQGYPSVFYGDYYGIPTHSVPAMKAKIDPILEARQNFAYGTQHDYFDHHNIIGWTREGNTTHPNSGLATIMSDGPGGEKWMYVGQNKAGQVWHDITGNKPGTVTINADGWANFSVNEGSVSIWVKR

SEQ ID NO: 17923 - protein, 485 aa, Bacillus sp.
HHNGTNGTMMQYFEWHLPNDGNHWNRLRDDASNLRNRGITAIWIPPAWKGTSQNDVGYGAYDLYDLGEFNQKGTVRTKYGTRSQLESAIHALKNNGVQVYGDVVMNHKGGADATENVLAVEVNPNNRNQEISGDYTIEAYTKFDFPGRGNTYSDFKWRWYHFDGVDWDQSRQFQNRIYKFRGDGKAWDTEVDSEFGNYDYLMYADYDMDHPEVVNELRRWGEWYTNTLNLDGFRIDAVKHIKFSFTRDWLTHVRNATGKGMFAVAEFWKNDLGALENYLNKTNWNHSVFDVPLHYNLYNASNSGGNYDMAKLLNGTVVQKHPMHAVTFVDNHDSQPGESLESFVQEWFKPLAYALILTREQGYPSVFYGDYYGIPTHSVPAMKAKIDPILEARQNFAYGTQHDYFDHHNIIGWTREGNTTHPNSGLATIMSDGPGGEKWMYVGQNKAGQVWHDITGNKPGTVTINADGWANFSVNGGSVSIWVKR

SEQ ID NO: 17924 - protein, 483 aa, Bacillus sp.
HHNGTNGTMMQYFEWHLPNDGNHWNRLRDDASNLRNRGITAIWIPPAWKGTSQNDVGYGAYDLYDLGEFNQKGTVRTKYGTRSQLESAIHALKNNGVQVYGDVVMNHKGGADATETVLAVEVNPNNRNQEISEDYTIEAWTKFDFPGRRNTYSDFKWRWYHFDGVDWDQSRQFQNRIYKFRGKAWDWEVDSENGNNDYLMFADLDMDHPEVVNELRRWGEWYTNTLNLDGFRIDAVKHIKYSFTRDWLTHVRNATGKEMFAVAEFWKNDLGALENYLNKTNWNHSVFDVPLHYNLYNASNSGGNYDMAKLLNGTVVQKHPMHAVTFVDNHDSQPGESLESFVQEWFKPLAYALILTREQGYPSVFYGDYYGIPTHSVPAMKAKIDPILEARQNFAYGTQHDYFDHHNIIGWTREGNTTHPNSGLATIMSDGPGGEKWMYVGQNKAGQVWHDITGNKPGTVTINADGWANFSVNGGSVSIWVKR

SEQ ID NO: 17925 - protein, 483 aa, Bacillus sp.
HHNGTNGTMMQYFEWHLPNDGNHWNRLRDDASNLRNRGITAIWIPPAWKGTSQNDVGYGAYDLYDLGEFNQKGTVRTKYGTRSQLESAIHALKNNGVQVYGDVVMNHKGGADATENVLAVEVNPNNRNQEISEDYTIEAWTKFDFPGRRNTYSDFKWRWYHFDGVDWDQSRQFQNRIYKFRGKAWDWEVDSENGYYDNLMYAFVDLDHPEVVNELRRWGEWYTNTLNLDGFRIDAVKHIKYSFTRDWLTHVRNATGKEMFAVAEFWKNDLGALENYLNKTNWNHSVFDVPLHYNLYNASNSGGNYDMAKLLNGTVVQKHPMHAVTFVDNHDSQPGESLESFVQEWFKPLAYALILTREQGYPSVFYGDYYGIPTHSVPAMKAKIDPILEARQNFAYGTQHDYFDHHNIIGWTREGNTTHPNSGLATIMSDGPGGEKWMYVGQNKAGQVWHDITGNKPGTVTINADGWANFSVNGGSVSIWVKR

SEQ ID NO: 17926 - protein, 485 aa, Bacillus sp.
HHNGTNGTMMQYFEWHLPNDGNHWNRLRDDASNLRNRGITAIWIPPAWKGTSQNDVGYGAYDLYDLGEFNQKGTVRTKYGTRSQLESAIHALKNNGVQVYGDVVMNHKGGADATENVLAVEVNPNNRNQEISGDYTIEAYTKFDFPGRGNTYSDFKWRWYHFDGVDWDQSRQFQNRIYKFRGDGKAWDWEVDSEFGNYDYLMYADYDMDHPEVVNELRRWGEWYTNTLNLDGFRIDAVKHIKFSFTRDWLTHVRNATGKGMFAVAEFWKNDLGALENYLNKTNWNHSVFDVPLHYNLYNASNSGGNYDMAKLLNGTVVQKHPMHAVTFVDNHDSQPGESLESFVQEWFKPLAYALILTREQGYPSVFYGDYYGIPTHSVPAMKAKIDPILEARQNFAYGTQHDYFDHHNIIGWTREGNTTHPNSGLATIMSDGPGGEKRMYVGQNKAGQVWHDITGNKPGTVTINADGWANFSVNGGSVSIWVKR

SEQ ID NO: 17927 - protein, 483 aa, Bacillus sp.
HHNGTNGTMMQYFEWHLPNDGNHWNRLRDDASNLRNRGITAIWIPPAWKGTSQNDVGYGAYDLYDLGEFNQKGTVRTKYGTRSQLESAIHALKNNGVQVYGDVVMNHKGGADATENVLAVEVNPNNRNQEISGDYTIEAYTKFDFPGRGNTYSDFKWRWYHFDGVDWDQSRQFQNRIYKFRGKAWDWEVDSEFGNYDYLMYADYDMDHPEVVNELRRWGEWYTNTLNLDGFRIDAVKHIKFSFTRDWLTHVRNATGKGMFAVAEFWKNDLGALENYLNKTNWNHSVFDVPLHYNLYNASNSGGNYDMAKLLNGTVVQKHPMHAVTFVDNHDSQPNESLESFVQEWFKPLAYALILTREQGYPSVFYGDYYGIPTHSVPAMKAKIDPILEARQNFAYGTQHDYFDHHNIIGWTREGNTTHPNSGLATIMSDGPGGEKWMYVGQNKAGQVWHDITGNKPGTVTINADGWANFSVNGGSVSIWVKR

SEQ ID NO: 17928 - protein, 485 aa, Bacillus sp.
HHNGTNGTMMQYFEWHLPNDGNHWNRLRDDASNLRNRGITAIWIPPAWKGTSQNDVGYGAYDLYDLGEFNQKGTVRTKYGTRSQLESAIHALKNNGVQVYGDVVMNHKGGADATENVLAVEVNPNNRNQEISGDYTIEAWTRFDFSGRKNTYSDFKWRWYHFDGVDWDQSRQFQNRIYKFRGXXKAWDWEVDSEYGNNDYLMYADIDMDHPEVVNELRRWGEWYTNTLNLDGFRIDAVKHIKYSFTRDWLTHVRNATGKEMFAVAEFWKNDLGALENYLNKTNWNHSVFDVPLHYNLYNASNSGGNYDMAKLLNGTVVQKHPMHAVTFVDNHDSQPGESLESFVQEWFKPLAYALILTREQGYPSVFYGDYYGIPTHSVPAMKAKIDPILEARQNFAYGTQHDYFDHHNIIGWTREGNTTHPNSGLATIMSDGPGGEKWMYVGQNKAGQVWHDITGNKPGTVTINADGWANFSVNGGSVSIWVKR

SEQ ID NO: 17929 - protein, 483 aa, Bacillus sp.
HHNGTNGTMMQYFEWHLPNDGNHWNRLRDDASNLRNRGITAIWIPPAWKGTSQNDVGYGAYDLYDLGEFNQKGTVRTKYGTRSQLESAIHALKNNGVQVYGDVVMNHKGGADATENVLAVEVNPNNRNQEISEDYTIEAWTKFDFPGRRNTHSDFKWRWYHFDGVDWDQSRQFQNRIYKFRGKAWDWEVDSENGYYDNLMYADVDLDHPEVVNELRRWGEWYTNTLNLDGFRIDAVKHIKYSFTRDWLTHVRNATGKEMFAVAEFWKNDLGALENYLNKTNWNHSVFDVPLHYNLYNASNSGGNYDMAKLLNGTVVQKHPMHAVTFVDNHDSQPGESLESFVQEWFKPLAYALILTREQGYPSVFYGDYYGIPTHSVPAMKAKIDPILEARQNFAYGTQHDYFDHHNIIGWTREGNTTHPNSGLATIMSDGPGGEKWMYVGQNKAGQVWHDITGNKPGTVTINADGWANFSVNGGSVSIWVKR

SEQ ID NO: 17930 - protein, 483 aa, Bacillus sp.
HHNGTNGTMMQYFEWHLPNDGNHWNRLRDDASNLRNRGITAIWIPPAWKGTSQNDVGYGAYDLYDLGEFNQKGTVRTKYGTRSQLESAIHALKNNGVQVYGDVVMNHKGGADATENVLAVEVNPNNRNQEISGDYTIEAYTKFDFPGRGNTYSDFKWRWYHFDGVDWDQSRQFQNRIYKFRGKAWDWEVDSEFGNYDYLMYADYDMDHPEVVNELRRWGEWYTNTLNLDGFRIDAVKHIKFSFTRDWLTHVRNATGKGMFAVAEFWKNDLGALENYLNKTNDNHSVFDVPLHYNLYNASNSGGNYDMAKLLNGTVVQKHPMHAVTFVDNHDSQPGESLESFVQEWFKPLAYALILTREQGYPSVFYGDYYGIPTHSVPAMKAKIDPILEARQNFAYGTQHDYFDHHNIIGWTREGNTTHPNSGLATIMSDGPGGEKWMYVGQNKAGQVWHDITGNKPGTVTINADGWANFSVNGGSVSIWVKR

SEQ ID NO: 17931 - protein, 483 aa, Bacillus sp.
HHNGTNGTMMQYFEWHLPNDGNHWNRLRDDASNLRNRGITAIWIPPAWKGTSQNDVGYGAYDLYDLGEFNQKGTVRTKYGTRSQLESAIHALKNNGVQVYGDVVMNHKGGADATENVLAVEVNPNNRNQEISGDYTIEAWTRFDFSGRKNTYSDFKWRWYHFDGVDWDQSRQFQNRIYKFRGKAWDWEVDSENGYYDNLMYADVDIDHPEVVNELRRWGEWYTNTLNLDGFRIDAVKHIKYSFTRDWLTHVRNATGKEMFAVAEFWKNDLGALENYLNKTNWNHSVFDVPLHYNLYNASNSGGNYDMAKLLNGTVVQKHPMHAVTFVDNHDSQPGESLESFVQEWFKPLAYALILTREQGYPSVFYGDYYGIPTHSVPAMKAKIDPILEARQNFAYGTQHDYFDHHNIIGWTREGNTTHPNSGLATIMSDGPGGEKWMYVGQNKAGQVWHDITGNKPGTVTINADGWANFSVNGGSVSIWVKR

SEQ ID NO: 17932 - protein, 483 aa, Bacillus sp.
HHNGTNGTMMQYFEWHLPNDGNHWNRLRDDASNLRNRGITAIWIPPAWKGTSQNDVGYGAYDLYDLGEFNQKGTVRTKYGTRSQLESAIHALKNNGVQVYGDVVMNHKAGADATENVLAVEVNPNNRNQEISGDYTIEAYTKFDFPGRGNTYSDFKWRWYHFDGVDWDQSRQFQNRIYKFRGKAWDWEVDSEFGNYDYLMYADYDMDHPEVVNELRRWGEWYTNTLNLDGFRIDAVKHIKFSFTRDWLTHVRNATGKGMFAVAEFWKNDLGALENYLNKTNWNHSVFDVPLHYNLYNASNSGGNYDMAKLLNGTVVQKHPMHAVTFVDNHDSQPGESLESFVQEWFKPLAYALILTREQGYPSVFYGDYYGIPTHSVPAMKAKIDPILEARQNFAYGTQHDYFDHHNIIGWTREGNTTHPNSGLATIMSDGPGGEKWMYVGQNKAGQVWHDITGNKPGTVTINADGWANFSVNGGSVSIWVKR

SEQ ID NO: 17933 - protein, 483 aa, Bacillus subtilis
VNGTLMQYFEWYTPNDGQHWKRLQNDAEHLAEHGITAVWIPPAYKGLSQSDNGYGPYDLYDLGEFQQKGTVRTKYGTKSELQDAIGSLHSRNVQVYGDVVLNHKAGADATEDVTAVEVNPANRNQETSEEYQIKAWTDFRFPGRGNTYSDFKWHWYHFDGADWDESRKISRIFKFRGEGKAWDWEVSSENGNYDYLMYADVDYDHPDVVAETKKWGIWYANELSLDGFRIDAAKHIKFSFLRDWVQAVRQATGKEMFTVAEYWQNNAGKLENYLNKTSFNQSVFDVPLHFNLQAASSQGGGYDMRRLLDGTVVSRHPEKAVTFVENHDTQPGQSLESTVQTWFKPLAYAFILTRESGYPQVFYGDMYGTKGTSPKEIPSLKDNIEPILKARKEYAYGPQHDYIDHPDVIGWTREGDSSAAKSGLAALITDGPGGSKRMYAGKHKAGETWYDITGNRSDTVKIGSDGWGEFHVNDGSVSIYVQK

SEQ ID NO: 17934 - protein, 482 aa, Bacillus amyloliquefaciens
NGTLMQYFEWYTPNDGQHWKRLQNDAEHLSDIGITAVWIPPAYKGLSQSDNGYGPYDLYDLGEFQQKGTVRTKYGTKSELQDAIGSLHSRNVQVYGDVVLNHKAGADATEDVTAVEVNPANRNQETSEEYQIKAWTDFRFPGRGNTYSDFKWHWYHFDGADWDESRKISRLFKFRGEGKAWDWEVSSENGNYDYLMYVDVDYDHPDVVAETKKWGIWYANELSLDGFRIDAAKHIKFSFLRDWVQAVRQATGKEMFTVAEYWQNDAGKLENYLNKTSFNQSVFDVPLHFNLQAASSQGGGYDMRRLLDGTVVSRHPEKAVTFVENHDTQPGQSLESTVQTWFKPLAYAFILTRESGYPQVFYGDMYGTKGTSPREIPSLKDSIEPILKARKEYAYGPQHDYIDHPDVIGWTREGDSSAAKSGLAALITDGPGGSKRMYAGLQNAGETWYDITGNRSDTVKIGSDGWGEFHVNDGSVSIYVQK

SEQ ID NO: 17935 - protein, 482 aa, Bacillus amyloliquefaciens
NGTLMQYFEWYTPNDGQHWKRLQNDAEHLSDIGITAVWIPPAYKGLSQSDNGYGPYDLYDLGEFQQKGTVRTKYGTKSELQDAIGSLHSRNVQVYGDVVLNHKAGADATEDVTAVEVNPANRNQETSEEYQIKAWTDFRFPGRGNTYSDFKWHWYHFDGADWDESRKISRLFKFRGEGKAWDWEVSSENGNYDYLMYVDVDYDHPDVVAETKKWGIWYANELSLDGFRIDAAKHIKFSFLRDWVQAVRQATGKEMFTVAEYWQNSAGKLENYLNKTSFNQSVFDVPLHFNLQAASSQGGGYDMRRLLDGTVVSRHPEKAVTFVENHDTQPGQSLESTVQTWFKPLAYAFILTRESGYPQVFYGDMYGTKGTSPREIPSLKDSIEPILKARKEYAYGPQHDYIDHPDVIGWTREGDSSAAKSGLAALITDGPGGSKRMYAGLQNAGETWYDITGNRSDTVKIGSDGWGEFHVNDGSVSIYVQK

SEQ ID NO: 17936 - protein, 479 aa, Aspergillus oryzae
ATPADWRSQSIYFLLTDRFARTDGSTTATCNTADQKYCGGTWQGIIDKLDYIQGMGFTAIWITPVTAQLPQTTAAGDAYHGYWQQDIYSLNENYGTADDLKALSSALHERGMYLMVDVVANHMGYDGAGSSVDYSVFKPFSSQDYFHPFCFIQNYEDQTQVEDCWLGDPAGFSLPDLDTTKDVVKNEWYDWVGSLVSNYSIDGLRIDTVKHVQKDFWPGYNKAAGVYCIGEVLGDDPAYTCPYQNVMDGVLNYPIYYPLLNAFKSTSGSMDDLYNMINTVKSDCPDSTLLGTFVENHDNPRFASYTNDIALAKNVAAFIILNDGIPIIYAGQEQHYAGGNDPANREATWLSGYPTDSELYKLIASANAIRNYAISKDTGFVTYKNWPIYKDDTTIAMRKGTDGSQIVTILSNKGASGDSYTLSLSGAGYTAGQQLTEVIGCTTVTVGSDGNVPVPMAGGLPRVLYPTEKLAGSKICSSS

SEQ ID NO: 17937 - protein, 479 aa, Aspergillus oryzae
ATPADWRSQSIYFLLTDRFARTDGSTTATCNTADQKYCGGTWQGIIDKLDYIQGMGFTAIWITPVTAQLPQTTAAGDAYHGYWQQDIYSLNENYGTADDLKALSSALHERGMYLMVDVVANHMGYDGAGSSVDYSVFKPFSSQDYFHPFCFIQNYEDQTQVEDCWFTDPAGFSLPDLDTTKDVVKNEWYDWVGSLVSNYSIDGLRIDTVKHVQKDFWPGYNKAAGVYCIGEVLDGDPAYTCPYQNVMDGVLNYPIYYPLLNAFKSTSGSMDDLYNMINTVKSDCPDSTLLGTFVENHDNPRFASYTNDIALAKNVAAFIILNDGIPIIYAGQEQHYAGGNDPANREATWLSGYPTDSELYKLIASANAIRNYAISKDTGFVTYKNWPIYKDDTTIAMRKGTDGSQIVTILSNKGASGDSYTLSLSGAGYTAGQQLTEVIGCTTVTVGSDGNVPVPMAGGLPRVLYPTEKLAGSKICSSS

SEQ ID NO: 17938 - protein, 516 aa, Synthetic construct
AAAPFNGTMMQYFEWYLPDDGTLWTKVANEANNLSSLGITALWLPPAYKGTSRSDVGYGVYDLYDLGEFNQKGTVRTKYGTKAQYLQAIQAAHAAGMQVYADVVFDHKGGADGTEWVDAVEVNPSDRNQEISGTYQIQAWTKFDFNGRGNTYSSFKWRWYHFDGVDWDESRKLSRIYKFRGIGKAWDWEVDTENGNYDYLMYADLDMDHPEVVTELKNWGKWYVNTTNIDGFRLDAVKHIKFSFFPDWLSYVRSQTGKPLFTVGEYWSYDINKLHNYITKTNGTMSLFDAPLHNKFYTASKSGGAFDMSTLMNNTLMKDQPTLAVTFVDNHDTEPGQALQSWVDPWFKPLAYAFILTRQEGYPCVFYGDYYGIPQYNIPSLKSKIDPLLIARRDYAYGTQHDYLDHSDIIGWTREGVTEKPGSGLAALITDGPGGSKWMYVGKQHAGKVFYDLTGNRSDTVTINSDGWGEFKVNGGSVSVWVPRKTTVSTIAWPITTRPWTGEFVRWTEPRLVAWP

SEQ ID NO: 17939 - protein, 515 aa, Geobacillus stearothermophilus
AAPFNGTMMQYFEWYLPDDGTLWTKVANEANNLSSLGITALWLPPAYKGTSRSDVGYGVYDLYDLGEFNQKGTVRTKYGTKAQYLQAIQAAHAAGMEVYADVVFDHKGGADGTEWVDAVEVNPSDRNQEISGTYQIQAWTKFDFPGRGNTYSSFKWRWYHFDGVDWDESRKLSRIYKFRGIGKAWDWEVDTENGNYDYLMYADLDMDHPEVVTELKNWGKWYVNTTNIDGFRLDAVKHIKFQFFPDWLSYVRSQTGKPLFTVGEYWSYDINKLHNYITKTNGTMSLFDAPLHNKFYTASKSGGAFDMRTLMTNTLMKDRPTLAVTFVDNHDTEPGQALQSWVDPWFKPLAYAFILTRREGYPCVFYGDYYGIPQYNIPSLKSKIDPLLIARRDYAYGTQHDYLDHSDIIGWTREGVTEKPGSGLAALITDGPGGSKWMYVGKQHAGKVFYDLTGNRSDTVTINSDGWGEFKVNGGSVSVWVPRKTTVSTIARPITTRPWTGEFVRWTEPRLVAWP

SEQ ID NO: 17940 - protein, 515 aa, Geobacillus stearothermophilus
AAPFNGTMMQYFEWYLPDDGTLWTKVANEANNLSSLGITALWLPPAYKGTSRSDVGYGVYDLYDLGEFNQKGTVRTKYGTKAQYLQAIQAAHAAGMQVYADVVFDHKGGADGTEWVDAVEVNPSDRNQEISGTYQIQAWTKFDFPGRGNTYSSFKWRWYHFDGVDWDESRKLSRIYKFRGIGKAWDWEVDTENGNYDYLMYADLDMDHPEVVTELKNWGKWYVNTTNIDGFRLDAVKHIKFQFFPDWLSYVRSQTGKPLFTVGEYWSYDINKLHNYITKTNGTMSLFDAPLHNKFYTASKSGGAFDMRTLMTNTLMKDRPTLAVTFVDNHDTEPGQALQSWVDPWFKPLAYAFILTREEGYPCVFYGDYYGIPQYNIPSLKSKIDPLLIARRDYAYGTQHDYLDHSDIIGWTREGVTEKPGSGLAALITDGPGGSKWMYVGKRHAGKVFYDLTGNRSDTVTINSDGWGEFKVNGGSVSVWVPRKTTVSTIARPITTRPWTGEFVRWTEPRLVAWP

SEQ ID NO: 17941 - protein, 515 aa, Geobacillus stearothermophilus
AAPFNGTMMQYFEWYLPDDGTLWTKVANEANNLSSLGITALWLPPAYKGTSRSDVGYGVYDLYDLGEFNQKGTVRTKYGTKAQYLQAIQAAHAAGMRVYADVVFDHKGGADGTEWVDAVEVNPSDRNQEISGTYQIQAWTKFDFPGRGNTYSSFKWRWYHFDGVDWDESRKLSRIYKFRGIGKAWDWEVDTENGNYDYLMYADLDMDHPEVVTELKNWGKWYVNTTNIDGFRLDAVKHIKFQFFPDWLSYVRSQTGKPLFTVGEYWSYDINKLHNYITKTNGTMSLFDAPLHNKFYTASKSGGAFDMRTLMTNTLMKDEPTLAVTFVDNHDTEPGQALQSWVDPWFKPLAYAFILTRQEGYPCVFYGDYYGIPQYNIPSLKSKIDPLLIARRDYAYGTQHDYLDHSDIIGWTREGVTEKPGSGLAALITDGPGGSKWMYVGKEHAGKVFYDLTGNRSDTVTINSDGWGEFKVNGGSVSVWVPRKTTVSTIARPITTRPWTGEFVRWTEPRLVAWP

SEQ ID NO: 17942 - protein, 515 aa, Geobacillus stearothermophilus
AAPFNGTMMQYFEWYLPDDGTLWTKVANEANNLSSLGITALWLPPAYKGTSRSDVGYGVYDLYDLGEFNQKGTVRTKYGTKAQYLQAIQAAHAAGMEVYADVVFDHKGGADGTEWVDAVEVNPSDRNQEISGTYQIQAWTKFDFPGRGNTYSSFKWRWYHFDGVDWDESRKLSRIYKFRGIGKAWDWEVDTENGNYDYLMYADLDMDHPEVVTELKNWGKWYVNTTNIDGFRLDAVKHIKFSFFPDWLSYVRSQTGKPLFTVGEYWSYDINKLHNYITKTNGTMSLFDAPLHNKFYTASKSGGAFDMRTLMTNTLMKDEPTLAVTFVDNHDTEPGQALQSWVDPWFKPLAYAFILTREEGYPCVFYGDYYGIPQYNIPSLKSKIDPLLIARRDYAYGTQHDYLDHSDIIGWTREGVTEKPGSGLAALITDGPGGSKWMYVGKRHAGKVFYDLTGNRSDTVTINSDGWGEFKVNGGSVSVWVPRKTTVSTIARPITTRPWTGEFVRWTEPRLVAWP

SEQ ID NO: 17943 - protein, 515 aa, Geobacillus stearothermophilus
AAPFNGTMMQYFEWYLPDDGTLWTKVANEANNLSSLGITALWLPPAYKGTSRSDVGYGVYDLYDLGEFNQKGTVRTKYGTKAQYLQAIQAAHAAGMQVYADVVFDHKGGADGTEWVDAVEVNPSDRNQEISGTYQIQAWTKFDFPGRGNTYSSFKWRWYHFDGVDWDESRKLSRIYKFRGIGKAWDWEVDTENGNYDYLMYADLDMDHPEVVTELKNWGKWYVNTTNIDGFRLDAVKHIKFQFFPDWLSYVRSQTGKPLFTVGEYWSYDINKLHNYITKTNGTMSLFDAPLHNKFYTASKSGGAFDMRTLMTNTLMKDRPTLAVTFVDNHDTEPGQALQSWVDPWFKPLAYAFILTRREGYPCVFYGDYYGIPQYNIPSLKSKIDPLLIARRDYAYGTQHDYLDHSDIIGWTREGVTEKPGSGLAALITDGPGGSKWMYVGKRHAGKVFYDLTGNRSDTVTINSDGWGEFKVNGGSVSVWVPRKTTVSTIARPITTRPWTGEFVRWTEPRLVAWP

SEQ ID NO: 17944 - protein, 515 aa, Geobacillus stearothermophilus
AAPFNGTMMQYFEWYLPDDGTLWTKVANEANNLSSLGITALWLPPAYKGTSRSDVGYGVYDLYDLGEFNQKGTVRTKYGTKAQYLQAIQAAHAAGMRVYADVVFDHKGGADGTEWVDAVEVNPSDRNQEISGTYQIQAWTKFDFPGRGNTYSSFKWRWYHFDGVDWDESRKLSRIYKFRGIGKAWDWEVDTENGNYDYLMYADLDMDHPEVVTELKNWGKWYVNTTNIDGFRLDAVKHIKFSFFPDWLSYVRSQTGKPLFTVGEYWSYDINKLHNYITKTNGTMSLFDAPLHNKFYTASKSGGAFDMRTLMTNTLMKDEPTLAVTFVDNHDTEPGQALQSWVDPWFKPLAYAFILTRREGYPCVFYGDYYGIPQYNIPSLKSKIDPLLIARRDYAYGTQHDYLDHSDIIGWTREGVTEKPGSGLAALITDGPGGSKWMYVGKRHAGKVFYDLTGNRSDTVTINSDGWGEFKVNGGSVSVWVPRKTTVSTIARPITTRPWTGEFVRWTEPRLVAWP

SEQ ID NO: 17945 - protein, 515 aa, Geobacillus stearothermophilus
AAPFNGTMMQYFEWYLPDDGTLWTKVANEANNLSSLGITALWLPPAYKGTSRSDVGYGVYDLYDLGEFNQKGTVRTKYGTKAQYLQAIQAAHAAGMEVYADVVFDHKGGADGTEWVDAVEVNPSDRNQEISGTYQIQAWTKFDFPGRGNTYSSFKWRWYHFDGVDWDESRKLSRIYKFRGIGKAWDWEVDTENGNYDYLMYADLDMDHPEVVTELKNWGKWYVNTTNIDGFRLDAVKHIKFSFFPDWLSYVRSQTGKPLFTVGEYWSYDINKLHNYITKTNGTMSLFDAPLHNKFYTASKSGGAFDMRTLMTNTLMKDRPTLAVTFVDNHDTEPGQALQSWVDPWFKPLAYAFILTREEGYPCVFYGDYYGIPQYNIPSLKSKIDPLLIARRDYAYGTQHDYLDHSDIIGWTREGVTEKPGSGLAALITDGPGGSKWMYVGKRHAGKVFYDLTGNRSDTVTINSDGWGEFKVNGGSVSVWVPRKTTVSTIARPITTRPWTGEFVRWTEPRLVAWP

SEQ ID NO: 17946 - protein, 515 aa, Geobacillus stearothermophilus
AAPFNGTMMQYFEWYLPDDGTLWTKVANEANNLSSLGITALWLPPAYKGTSRSDVGYGVYDLYDLGEFNQKGTVRTKYGTKAQYLQAIQAAHAAGMRVYADVVFDHKGGADGTEWVDAVEVNPSDRNQEISGTYQIQAWTKFDFPGRGNTYSSFKWRWYHFDGVDWDESRKLSRIYKFRGIGKAWDWEVDTENGNYDYLMYADLDMDHPEVVTELKNWGKWYVNTTNIDGFRLDAVKHIKFQFFPDWLSYVRSQTGKPLFTVGEYWSYDINKLHNYITKTNGTMSLFDAPLHNKFYTASKSGGAFDMRTLMTNTLMKDEPTLAVTFVDNHDTEPGQALQSWVDPWFKPLAYAFILTRQEGYPCVFYGDYYGIPQYNIPSLKSKIDPLLIARRDYAYGTQHDYLDHSDIIGWTREGVTEKPGSGLAALITDGPGGSKWMYVGKRHAGKVFYDLTGNRSDTVTINSDGWGEFKVNGGSVSVWVPRKTTVSTIARPITTRPWTGEFVRWTEPRLVAWP

SEQ ID NO: 17947 - protein, 515 aa, Geobacillus stearothermophilus
AAPFNGTMMQYFEWYLPDDGTLWTKVANEANNLSSLGITALWLPPAYKGTSRSDVGYGVYDLYDLGEFNQKGTVRTKYGTKAQYLQAIQAAHAAGMRVYADVVFDHKGGADGTEWVDAVEVNPSDRNQEISGTYQIQAWTKFDFPGRGNTYSSFKWRWYHFDGVDWDESRKLSRIYKFRGIGKAWDWEVDTENGNYDYLMYADLDMDHPEVVTELKNWGKWYVNTTNIDGFRLDAVKHIKFSFFPDWLSYVRSQTGKPLFTVGEYWSYDINKLHNYITKTNGTMSLFDAPLHNKFYTASKSGGAFDMRTLMTNTLMKDEPTLAVTFVDNHDTEPGQALQSWVDPWFKPLAYAFILTRREGYPCVFYGDYYGIPQYNIPSLKSKIDPLLIARRDYAYGTQHDYLDHSDIIGWTREGVTEKPGSGLAALITDGPGGSKWMYVGKEHAGKVFYDLTGNRSDTVTINSDGWGEFKVNGGSVSVWVPRKTTVSTIARPITTRPWTGEFVRWTEPRLVAWP

SEQ ID NO: 17948 - protein, 515 aa, Geobacillus stearothermophilus
AAPFNGTMMQYFEWYLPDDGTLWTKVANEANNLSSLGITALWLPPAYKGTSRSDVGYGVYDLYDLGEFNQKGTVRTKYGTKAQYLQAIQAAHAAGMRVYADVVFDHKGGADGTEWVDAVEVNPSDRNQEISGTYQIQAWTKFDFPGRGNTYSSFKWRWYHFDGVDWDESRKLSRIYKFRGIGKAWDWEVDTENGNYDYLMYADLDMDHPEVVTELKNWGKWYVNTTNIDGFRLDAVKHIKFQFFPDWLSYVRSQTGKPLFTVGEYWSYDINKLHNYITKTNGTMSLFDAPLHNKFYTASKSGGAFDMRTLMTNTLMKDQPTLAVTFVDNHDTEPGQALQSWVDPWFKPLAYAFILTRREGYPCVFYGDYYGIPQYNIPSLKSKIDPLLIARRDYAYGTQHDYLDHSDIIGWTREGVTEKPGSGLAALITDGPGGSKWMYVGKEHAGKVFYDLTGNRSDTVTINSDGWGEFKVNGGSVSVWVPRKTTVSTIARPITTRPWTGEFVRWTEPRLVAWP

SEQ ID NO: 17949 - protein, 515 aa, Geobacillus stearothermophilus
AAPFNGTMMQYFEWYLPDDGTLWTKVANEANNLSSLGITALWLPPAYKGTSRSDVGYGVYDLYDLGEFNQKGTVRTKYGTKAQYLQAIQAAHAAGMRVYADVVFDHKGGADGTEWVDAVEVNPSDRNQEISGTYQIQAWTKFDFPGRGNTYSSFKWRWYHFDGVDWDESRKLSRIYKFRGIGKAWDWEVDTENGNYDYLMYADLDMDHPEVVTELKNWGKWYVNTTNIDGFRLDAVKHIKFSFFPDWLSYVRSQTGKPLFTVGEYWSYDINKLHNYITKTNGTMSLFDAPLHNKFYTASKSGGAFDMRTLMTNTLMKDRPTLAVTFVDNHDTEPGQALQSWVDPWFKPLAYAFILTRREGYPCVFYGDYYGIPQYNIPSLKSKIDPLLIARRDYAYGTQHDYLDHSDIIGWTREGVTEKPGSGLAALITDGPGGSKWMYVGKEHAGKVFYDLTGNRSDTVTINSDGWGEFKVNGGSVSVWVPRKTTVSTIARPITTRPWTGEFVRWTEPRLVAWP

SEQ ID NO: 17950 - protein, 515 aa, Geobacillus stearothermophilus
AAPFNGTMMQYFEWYLPDDGTLWTKVANEANNLSSLGITALWLPPAYKGTSRSDVGYGVYDLYDLGEFNQKGTVRTKYGTKAQYLQAIQAAHAAGMQVYADVVFDHKGGADGTEWVDAVEVNPSDRNQEISGTYQIQAWTKFDFPGRGNTYSSFKWRWYHFDGVDWDESRKLSRIYKFRGIGKAWDWEVDTENGNYDYLMYADLDMDHPEVVTELKNWGPWYVLTTNIDGFRLDAVKHIKFQFFPDWLSYVRSSTGKPLFTVGEYWSYDINKLHNYITKTNGTMSLFDAPLHNKFYTASKSGGAFDMRTLMTNTLMKDQPTLAVTFVDNHDTEPGQALQSWVDPWFKPLAYAFILTRQEGYPCVFYGDYYGIPQYNIPSLKSKIDPLLIARRDYAYGTQHDYLDHSDIIGWTREGVTEKPGSGLAALITDGPGGSKWMYVGKQHAGKVFYDLTGNRSDTVTINSDGWGEFKVNGGSVSVWVPRKTTVSTIARPITTRPWTGEFVRWTEPRLVAWP

SEQ ID NO: 17951 - protein, 515 aa, Geobacillus stearothermophilus
AAPFNGTMMQYFEWYLPDDGTLWTKVANEANNLSSLGITALWLPPAYKGTSRSDVGYGVYDLYDLGEFNQKGTVRTKYGTKAQYLQAIQAAHAAGMQVYADVVFDHKGGADGTEWVDAVEVNPSDRNQEISGTYQIQAATKFDFPGRGNTYSSFKWRWYHFDGVDWDESRKLSRIYKFRGIGKAWDWEVDTENGNYDYLMYADLDMDHPEVVTELKNWGKWYVNTTNIDGFRLDAVKHIKFSFFPDWLSYVRSQTGKPLFTVGEYWSYDINKLHNYITKTNGTMSLFDAPLHNKFYTASKSGGAFDMRTLMTNTLMKDQPTLAVTFVDNHDTEPGQALQSWVDPWFKPLAYAFILTRQEGYPGVFYGDYYGIPQYNIPSLKSKIDPLLIARRDYAYGTQHDYLDHSDIIGWTREGVTEKPGSGLAALITDGPGGSKWMYVGKQHAGKVFYDLTGNRSDTVTITSDGWGEFKVNGGSVSVWVPRKTTVSTITRPITTRPWTGEFVRWTEPRLVAWP

SEQ ID NO: 17952 - protein, 515 aa, unidentified
AAPFNGTMMQYFEWYLPDDGTLWTKVANEANNLSSLGITALWLPPAYKGTSRSDVGYGVYDLYDLGEFNQKGTVRTKYGTKAQYLQAIQAAHAAGMQVYADVVFDHKGGADGTEWVDAVEVNPSDRNQEISGTYQIQAWTKFDFNGRGNTYSSFKWRWYHFDGVDWDESRKLSRIYKFRGIGKAWDWEVDTENGNYDYLMYADLDMDHPEVVTELKNWGKWYVNTTNIDGFRLDAVKHIKFSFFPDWLSYVRSQTGKPLFTVGEYWSYDINKLHNYITKTNGTMSLFDAPLHNKFYTASKSGGAFDMSTLMNNTLMKDQPTLAVTFVDNHDTEPGQALQSWVDPWFKPLAYAFILTRQEGYPCVFYGDYYGIPQYNIPSLKSKIDPLLIARRDYAYGTQHDYLDHSDIIGWTREGVTEKPGSGLAALITDGPGGSKWMYVGKQHAGKVFYDLTGNRSDTVTINSDGWGEFKVNGGSVSVWVPRKTTVSTIAWPITTRPWTGEFVRWTEPRLVAWP

SEQ ID NO: 17953 - protein, 515 aa, Geobacillus stearothermophilus
AAPFNGTMMQYFEWYLPDDGTLWTKVANEANNLSSLGITALWLPPAYKGTSRSDVGYGVYDLYDLGEFNQKGTVRTKYGTKAQYLQAIQAAHAAGMEVYADVVFDHKGGADGTEWVDAVEVNPSDRNQEISGTYQIQAWTKFDFPGRGNTYSSFKWRWYHFDGVDWDESRKLSRIYKFRGIGKAWDWEVDTENGNYDYLMYADLDMDHPEVVTELKNWGKWYVNTTNIDGFRLDAVKHIKFQFFPDWLSYVRSQTGKPLFTVGEYWSYDINKLHNYITKTNGTMSLFDAPLHNKFYTASKSGGAFDMRTLMTNTLMKDQPTLAVTFVDNHDTEPGQALQSWVDPWFKPLAYAFILTRREGYPCVFYGDYYGIPQYNIPSLKSKIDPLLIARRDYAYGTQHDYLDHSDIIGWTREGVTEKPGSGLAALITDGPGGSKWMYVGKEHAGKVFYDLTGNRSDTVTINSDGWGEFKVNGGSVSVWVPRKTTVSTIARPITTRPWTGEFVRWTEPRLVAWP

SEQ ID NO: 17954 - protein, 515 aa, Geobacillus stearothermophilus
AAPFNGTMMQYFEWYLPDDGTLWTKVAREANNLSSLGITALWLPPAYKGTSRSDVGYGVYDLYDLGEFNQKGTVRTKYGTKAQYLQAIQAAHAAGMQVYADVVFDHKGGADGTEWVDAVEVNPSDRNQEISGTYQIQAWTKFDFPGRGNTYSSFKWRWYHFDGVDWDESRKLSRIYKFRGIGKAWDWEVDTENGNYDYLMYADLDMDHPEVVTELKNWGKWYVRTTNIDGFRLDAVKHIKFSFFPDWLSYVRSQTGKPLFTVGEYWSYDINKLHNYITKTNGTMSLFDAPLHNKFYTASKSGGAFNMRTLMTNTLMKNQPTLAVTFVDNHDTEPGQALQSWVDPWFKPLAYAFILTRQEGYPCVFYGDYYGIPQYNIPSLKSKIDPLLIARRDYAYGTQHDYLDHSDIIGWTREGVTEKPGSGLAALITDGPGGSKWMYVGKQHAGKVFYDLTGNRSDTVTINSDGWGEFKVNGGSVSVWVPRKTTVSTIARPITTRPWTGEFVRWTEPRLVAWP

SEQ ID NO: 17955 - protein, 515 aa, Geobacillus stearothermophilus
AAPFNGTMMQYFEWYLPDDGTLWTKVANEANNLSSLGITALWLPPAYKGTSRSDVGYGVYDLYDLGEFNQKGTVRTKYGTKAQYLQAIQAAHAAGMQVYADVVFDHKGGADGTEWVDAVEVNPSDRNQEISGTYQIQAYTKFDFPGRGNTYSSFKWRWYHFDGVDWDESRKLSRIYKFRGIGKAWDWEVDTENGNYDYLMYADLDMDHPEVVTELKNWGKWYVNTTNIDGFRLDAVKHIKFSFFPDWLSYVRSQTGKPLFTVGEYWSYDINKLHNYITKTNGTMSLFDAPLHNKFYTASKSGGAFDMRTLMTNTLMKDQPTLAVTFVDNHDTEPGQALQSWVDPWFKPLAYAFILTRQEGYPGVFYGDYYGIPQYNIPSLKSKIDPLLIARRDYAYGTQHDYLDHSDIIGWTREGVTEKPGSGLAALITDGPGGSKWMYVGKQHAGKVFYDLTGNRSDTVTITSDGWGEFKVNGGSVSVWVPRKTTVSTITRPITTRPWTGEFVRWTEPRLVAWP

SEQ ID NO: 17956 - protein, 515 aa, Geobacillus stearothermophilus
AAPFNGTMMQYFEWYLPDDGTLWTKVANEANNLSSLGITALWLPPAYKGTSRSDVGYGVYDLYDLGEFNQKGTVRTKYGTKAQYLQAIQAAHAAGMRVYADVVFDHKGGADGTEWVDAVEVNPSDRNQEISGTYQIQAWTKFDFPGRGNTYSSFKWRWYHFDGVDWDESRKLSRIYKFRGIGKAWDWEVDTENGNYDYLMYADLDMDHPEVVTELKNWGKWYVNTTNIDGFRLDAVKHIKFQFFPDWLSYVRSQTGKPLFTVGEYWSYDINKLHNYITKTNGTMSLFDAPLHNKFYTASKSGGAFDMRTLMTNTLMKDQPTLAVTFVDNHDTEPGQALQSWVDPWFKPLAYAFILTREEGYPCVFYGDYYGIPQYNIPSLKSKIDPLLIARRDYAYGTQHDYLDHSDIIGWTREGVTEKPGSGLAALITDGPGGSKWMYVGKRHAGKVFYDLTGNRSDTVTINSDGWGEFKVNGGSVSVWVPRKTTVSTIARPITTRPWTGEFVRWTEPRLVAWP

SEQ ID NO: 17957 - protein, 515 aa, Geobacillus stearothermophilus
AAPFNGTMMQYFEWYLPDDGTLWTKVANEANNLSSLGITALWLPPAYKGTSRSDVGYGVYDLYDLGEFNQKGTVRTKYGTKAQYLQAIQAAHAAGMRVYADVVFDHKGGADGTEWVDAVEVNPSDRNQEISGTYQIQAWTKFDFPGRGNTYSSFKWRWYHFDGVDWDESRKLSRIYKFRGIGKAWDWEVDTENGNYDYLMYADLDMDHPEVVTELKNWGKWYVNTTNIDGFRLDAVKHIKFSFFPDWLSYVRSQTGKPLFTVGEYWSYDINKLHNYITKTNGTMSLFDAPLHNKFYTASKSGGAFDMRTLMTNTLMKDEPTLAVTFVDNHDTEPGQALQSWVDPWFKPLAYAFILTREEGYPCVFYGDYYGIPQYNIPSLKSKIDPLLIARRDYAYGTQHDYLDHSDIIGWTREGVTEKPGSGLAALITDGPGGSKWMYVGKEHAGKVFYDLTGNRSDTVTINSDGWGEFKVNGGSVSVWVPRKTTVSTIARPITTRPWTGEFVRWTEPRLVAWP

SEQ ID NO: 17958 - protein, 515 aa, Geobacillus stearothermophilus
AAPFNGTMMQYFEWYLPDDGTLWTKVANEANNLSSLGITALWLPPAYKGTSRSDVGYGVYDLYDLGEFNQKGTVRTKYGTKAQYLQAIQAAHAAGMEVYADVVFDHKGGADGTEWVDAVEVNPSDRNQEISGTYQIQAWTKFDFPGRGNTYSSFKWRWYHFDGVDWDESRKLSRIYKFRGIGKAWDWEVDTENGNYDYLMYADLDMDHPEVVTELKNWGKWYVNTTNIDGFRLDAVKHIKFQFFPDWLSYVRSQTGKPLFTVGEYWSYDINKLHNYITKTNGTMSLFDAPLHNKFYTASKSGGAFDMRTLMTNTLMKDQPTLAVTFVDNHDTEPGQALQSWVDPWFKPLAYAFILTRREGYPCVFYGDYYGIPQYNIPSLKSKIDPLLIARRDYAYGTQHDYLDHSDIIGWTREGVTEKPGSGLAALITDGPGGSKWMYVGKRHAGKVFYDLTGNRSDTVTINSDGWGEFKVNGGSVSVWVPRKTTVSTIARPITTRPWTGEFVRWTEPRLVAWP

SEQ ID NO: 17959 - protein, 515 aa, Geobacillus stearothermophilus
AAPFNGTMMQYFEWYLPDDGTLWTKVANEANNLSSLGITALWLPPAYKGTSRSDVGYGVYDLYDLGEFNQKGTVRTKYGTKAQYLQAIQAAHAAGMEVYADVVFDHKGGADGTEWVDAVEVNPSDRNQEISGTYQIQAWTKFDFPGRGNTYSSFKWRWYHFDGVDWDESRKLSRIYKFRGIGKAWDWEVDTENGNYDYLMYADLDMDHPEVVTELKNWGKWYVNTTNIDGFRLDAVKHIKFQFFPDWLSYVRSQTGKPLFTVGEYWSYDINKLHNYITKTNGTMSLFDAPLHNKFYTASKSGGAFDMRTLMTNTLMKDQPTLAVTFVDNHDTEPGQALQSWVDPWFKPLAYAFILTREEGYPCVFYGDYYGIPQYNIPSLKSKIDPLLIARRDYAYGTQHDYLDHSDIIGWTREGVTEKPGSGLAALITDGPGGSKWMYVGKEHAGKVFYDLTGNRSDTVTINSDGWGEFKVNGGSVSVWVPRKTTVSTIARPITTRPWTGEFVRWTEPRLVAWP

SEQ ID NO: 17960 - protein, 515 aa, Geobacillus stearothermophilus
AAPFNGTMMQYFEWYLPDDGTLWTKVANEANNLSSLGITALWLPPAYKGTSRSDVGYGVYDLYDLGEFNQKGTVRTKYGTKAQYLQAIQAAHAAGMEVYADVVFDHKGGADGTEWVDAVEVNPSDRNQEISGTYQIQAWTKFDFPGRGNTYSSFKWRWYHFDGVDWDESRKLSRIYKFRGIGKAWDWEVDTENGNYDYLMYADLDMDHPEVVTELKNWGKWYVNTTNIDGFRLDAVKHIKFSFFPDWLSYVRSQTGKPLFTVGEYWSYDINKLHNYITKTNGTMSLFDAPLHNKFYTASKSGGAFDMRTLMTNTLMKDEPTLAVTFVDNHDTEPGQALQSWVDPWFKPLAYAFILTRREGYPCVFYGDYYGIPQYNIPSLKSKIDPLLIARRDYAYGTQHDYLDHSDIIGWTREGVTEKPGSGLAALITDGPGGSKWMYVGKEHAGKVFYDLTGNRSDTVTINSDGWGEFKVNGGSVSVWVPRKTTVSTIARPITTRPWTGEFVRWTEPRLVAWP

SEQ ID NO: 17961 - protein, 515 aa, Geobacillus stearothermophilus
AAPFNGTMMQYFEWYLPDDGTLWTKVANEANNLSSLGITALWLPPAYKGTSRSDVGYGVYDLYDLGEFNQKGTVRTKYGTKAQYLQAIQAAHAAGMEVYADVVFDHKGGADGTEWVDAVEVNPSDRNQEISGTYQIQAWTKFDFPGRGNTYSSFKWRWYHFDGVDWDESRKLSRIYKFRGIGKAWDWEVDTENGNYDYLMYADLDMDHPEVVTELKNWGKWYVNTTNIDGFRLDAVKHIKFQFFPDWLSYVRSQTGKPLFTVGEYWSYDINKLHNYITKTNGTMSLFDAPLHNKFYTASKSGGAFDMRTLMTNTLMKDEPTLAVTFVDNHDTEPGQALQSWVDPWFKPLAYAFILTREEGYPCVFYGDYYGIPQYNIPSLKSKIDPLLIARRDYAYGTQHDYLDHSDIIGWTREGVTEKPGSGLAALITDGPGGSKWMYVGKQHAGKVFYDLTGNRSDTVTINSDGWGEFKVNGGSVSVWVPRKTTVSTIARPITTRPWTGEFVRWTEPRLVAWP

SEQ ID NO: 17962 - protein, 515 aa, Geobacillus stearothermophilus
AAPFNGTMMQYFEWYLPDDGTLWTKVADEANNLSSLGITALWLPPAYKGTSRSDVGYGVYDLYDLGEFNQKGTVRTKYGTKAQYLQAIQAAHAAGMQVYADVVFDHKGGADGTEWVDAVEVNPSDRNQEISGTYQIQAWTKFDFPGRGNTYSSFKWRWYHFDGVDWDESRKLSRIYKFRGIGKAWDWEVDTENGNYDYLMYADLDMDHPEVVTELKNWGKWYVDTTNIDGFRLDAVKHIKFSFFPDWLSYVRSQTGKPLFTVGEYWSYDINKLHNYITKTNGTMSLFDAPLHNKFYTASKSGGAFDMQTLMTNTLMKDQPTLAVTFVDNHDTEPGQALQSWVDPWFKPLAYAFILTRQEGYPCVFYGDYYGIPQYNIPSLKSKIDPLLIARRDYAYGTQHDYLDHSDIIGWTREGVTEKPGSGLAALITDGPGGSKWMYVGKQHAGKVFYDLTGNRSDTVTINSDGWGEFKVNGGSVSVWVPQKTTVSTIARPITTRPWTGEFVRWTEPRLVAWP

SEQ ID NO: 17963 - protein, 515 aa, Geobacillus stearothermophilus
AAPFNGTMMQYFEWYLPDDGTLWTKVANEANNLSSLGITALWLPPAYKGTSRSDVGYGVYDLYDLGEFNQKGTVRTKYGTKAQYLQAIQAAHAAGMQVYADVVFDHKGGADGTEWVDAVEVNPSDRNQEISGTYQIQAWTKFDFPGRGNTYSSFKWRWYHFDGVDWDESRKLSRIYKFRGIGKAWDWEVDTENGNYDYLMYADLDMDHPEVVTELKNWGKWYVNTTNIDGFRLDAVKHIKFQFFPDWLSYVRSQTGKPLFTVGEYWSYDINKLHNYITKTNGTMSLFDAPLHNKFYTASKSGGAFDMRTLMTNTLMKDEPTLAVTFVDNHDTEPGQALQSWVDPWFKPLAYAFILTRREGYPCVFYGDYYGIPQYNIPSLKSKIDPLLIARRDYAYGTQHDYLDHSDIIGWTREGVTEKPGSGLAALITDGPGGSKWMYVGKEHAGKVFYDLTGNRSDTVTINSDGWGEFKVNGGSVSVWVPRKTTVSTIARPITTRPWTGEFVRWTEPRLVAWP

SEQ ID NO: 17964 - protein, 515 aa, Geobacillus stearothermophilus
AAPFNGTMMQYFEWYLPDDGTLWTKVANEANNLSSLGITALWLPPAYKGTSRSDVGYGVYDLYDLGEFNQKGTVRTKYGTKAQYLQAIQAAHAAGMRVYADVVFDHKGGADGTEWVDAVEVNPSDRNQEISGTYQIQAWTKFDFPGRGNTYSSFKWRWYHFDGVDWDESRKLSRIYKFRGIGKAWDWEVDTENGNYDYLMYADLDMDHPEVVTELKNWGKWYVNTTNIDGFRLDAVKHIKFQFFPDWLSYVRSQTGKPLFTVGEYWSYDINKLHNYITKTNGTMSLFDAPLHNKFYTASKSGGAFDMRTLMTNTLMKDRPTLAVTFVDNHDTEPGQALQSWVDPWFKPLAYAFILTRQEGYPCVFYGDYYGIPQYNIPSLKSKIDPLLIARRDYAYGTQHDYLDHSDIIGWTREGVTEKPGSGLAALITDGPGGSKWMYVGKRHAGKVFYDLTGNRSDTVTINSDGWGEFKVNGGSVSVWVPRKTTVSTIARPITTRPWTGEFVRWTEPRLVAWP

SEQ ID NO: 17965 - protein, 515 aa, Geobacillus stearothermophilus
AAPFNGTMMQYFEWYLPDDGTLWTKVANEANNLSSLGITALWLPPAYKGTSRSDVGYGVYDLYDLGEFNQKGTVRTKYGTKAQYLQAIQAAHAAGMEVYADVVFDHKGGADGTEWVDAVEVNPSDRNQEISGTYQIQAWTKFDFPGRGNTYSSFKWRWYHFDGVDWDESRKLSRIYKFRGIGKAWDWEVDTENGNYDYLMYADLDMDHPEVVTELKNWGKWYVNTTNIDGFRLDAVKHIKFSFFPDWLSYVRSQTGKPLFTVGEYWSYDINKLHNYITKTNGTMSLFDAPLHNKFYTASKSGGAFDMRTLMTNTLMKDRPTLAVTFVDNHDTEPGQALQSWVDPWFKPLAYAFILTREEGYPCVFYGDYYGIPQYNIPSLKSKIDPLLIARRDYAYGTQHDYLDHSDIIGWTREGVTEKPGSGLAALITDGPGGSKWMYVGKEHAGKVFYDLTGNRSDTVTINSDGWGEFKVNGGSVSVWVPRKTTVSTIARPITTRPWTGEFVRWTEPRLVAWP

SEQ ID NO: 17966 - protein, 515 aa, Geobacillus stearothermophilus
AAPFNGTMMQYFEWYLPDDGTLWTKVANEANNLSSLGITALWLPPAYKGTSRSDVGYGVYDLYDLGEFNQKGTVRTKYGTKAQYLQAIQAAHAAGMRVYADVVFDHKGGADGTEWVDAVEVNPSDRNQEISGTYQIQAWTKFDFPGRGNTYSSFKWRWYHFDGVDWDESRKLSRIYKFRGIGKAWDWEVDTENGNYDYLMYADLDMDHPEVVTELKNWGKWYVNTTNIDGFRLDAVKHIKFQFFPDWLSYVRSQTGKPLFTVGEYWSYDINKLHNYITKTNGTMSLFDAPLHNKFYTASKSGGAFDMRTLMTNTLMKDQPTLAVTFVDNHDTEPGQALQSWVDPWFKPLAYAFILTRREGYPCVFYGDYYGIPQYNIPSLKSKIDPLLIARRDYAYGTQHDYLDHSDIIGWTREGVTEKPGSGLAALITDGPGGSKWMYVGKRHAGKVFYDLTGNRSDTVTINSDGWGEFKVNGGSVSVWVPRKTTVSTIARPITTRPWTGEFVRWTEPRLVAWP

SEQ ID NO: 17967 - protein, 515 aa, Geobacillus stearothermophilus
AAPFNGTMMQYFEWYLPDDGTLWTKVANEANNLSSLGITALWLPPAYKGTSRSDVGYGVYDLYDLGEFNQKGTVRTKYGTKAQYLQAIQAAHAAGMRVYADVVFDHKGGADGTEWVDAVEVNPSDRNQEISGTYQIQAWTKFDFPGRGNTYSSFKWRWYHFDGVDWDESRKLSRIYKFRGIGKAWDWEVDTENGNYDYLMYADLDMDHPEVVTELKNWGKWYVNTTNIDGFRLDAVKHIKFSFFPDWLSYVRSQTGKPLFTVGEYWSYDINKLHNYITKTNGTMSLFDAPLHNKFYTASKSGGAFDMRTLMTNTLMKDRPTLAVTFVDNHDTEPGQALQSWVDPWFKPLAYAFILTRREGYPCVFYGDYYGIPQYNIPSLKSKIDPLLIARRDYAYGTQHDYLDHSDIIGWTREGVTEKPGSGLAALITDGPGGSKWMYVGKRHAGKVFYDLTGNRSDTVTINSDGWGEFKVNGGSVSVWVPRKTTVSTIARPITTRPWTGEFVRWTEPRLVAWP

SEQ ID NO: 17968 - protein, 515 aa, Geobacillus stearothermophilus
AAPFNGTMMQYFEWYLPDDGTLWTKVANEANNLSSLGITALWLPPAYKGTSRSDVGYGVYDLYDLGEFNQKGTVRTKYGTKAQYLQAIQAAHAAGMQVYADVVFDHKGGADGTEWVDAVEVNPSDRNQEISGTYQIQAWTKFDFPGRGNTYSSFKWRWYHFDGVDWDESRKLSRIYKFRGIGKAWDWEVDTENGNYDYLMYADLDMDHPEVVTELKNWGKWYVNTTNIDGFRLDAVKHIKFQFFPDWLSYVRSQTGKPLFTVGEYWSYDINKLHNYITKTNGTMSLFDAPLHNKFYTASKSGGAFDMRTLMTNTLMKDRPTLAVTFVDNHDTEPGQALQSWVDPWFKPLAYAFILTREEGYPCVFYGDYYGIPQYNIPSLKSKIDPLLIARRDYAYGTQHDYLDHSDIIGWTREGVTEKPGSGLAALITDGPGGSKWMYVGKEHAGKVFYDLTGNRSDTVTINSDGWGEFKVNGGSVSVWVPRKTTVSTIARPITTRPWTGEFVRWTEPRLVAWP

SEQ ID NO: 17969 - protein, 515 aa, Geobacillus stearothermophilus
AAPFNGTMMQYFEWYLPDDGTLWTKVANEANNLSSLGITALWLPPAYKGTSRSDVGYGVYDLYDLGEFNQKGTVRTKYGTKAQYLQAIQAAHAAGMQVYADVVFDHKGGADGTEWVDAVEVNPSDRNQEISGTYQIQAWTKFDFPGRGNTYSSFKWRWYHFDGVDWDESRKLSRIYKFRGIGKAWDWEVDTENGNYDYLMYADLDMDHPEVVTELKNWGKWYVNTTNIDGFRLDAVKHIKFQFFPDWLSYVRSQTGKPLFTVGEYWSYDINKLHNYITKTNGTMSLFDAPLHNKFYTASKSGGAFDMRTLMTNTLMKDEPTLAVTFVDNHDTEPGQALQSWVDPWFKPLAYAFILTREEGYPCVFYGDYYGIPQYNIPSLKSKIDPLLIARRDYAYGTQHDYLDHSDIIGWTREGVTEKPGSGLAALITDGPGGSKWMYVGKRHAGKVFYDLTGNRSDTVTINSDGWGEFKVNGGSVSVWVPRKTTVSTIARPITTRPWTGEFVRWTEPRLVAWP

SEQ ID NO: 17970 - protein, 515 aa, Geobacillus stearothermophilus
AAPFNGTMMQYFEWYLPDDGTLWTKVANEANNLSSLGITALWLPPAYKGTSRSDVGYGVYDLYDLGEFNQKGTVRTKYGTKAQYLQAIQAAHAAGMRVYADVVFDHKGGADGTEWVDAVEVNPSDRNQEISGTYQIQAWTKFDFPGRGNTYSSFKWRWYHFDGVDWDESRKLSRIYKFRGIGKAWDWEVDTENGNYDYLMYADLDMDHPEVVTELKNWGKWYVNTTNIDGFRLDAVKHIKFQFFPDWLSYVRSQTGKPLFTVGEYWSYDINKLHNYITKTNGTMSLFDAPLHNKFYTASKSGGAFDMRTLMTNTLMKDRPTLAVTFVDNHDTEPGQALQSWVDPWFKPLAYAFILTREEGYPCVFYGDYYGIPQYNIPSLKSKIDPLLIARRDYAYGTQHDYLDHSDIIGWTREGVTEKPGSGLAALITDGPGGSKWMYVGKQHAGKVFYDLTGNRSDTVTINSDGWGEFKVNGGSVSVWVPRKTTVSTIARPITTRPWTGEFVRWTEPRLVAWP

SEQ ID NO: 17971 - protein, 515 aa, Geobacillus stearothermophilus
AAPFNGTMMQYFEWYLPDDGTLWTKVANEANNLSSLGITALWLPPAYKGTSRSDVGYGVYDLYDLGEFNQKGTVRTKYGTKAQYLQAIQAAHAAGMQVYADVVFDHKGGADGTEWVDAVEVNPSDRNQEISGTYQIQAWTKFDFPGRGNTYSSFKWRWYHFNGVDWDESRKLSRIYKFRGIGKKWNEEVDTENGNYDYLMYANLDMNHPEVVTELKNWGKWYVNTTNIDGFRLDAVKHIKFSFFPDWLSYVRSQTGKPLFTVGEYWSYDINKLHNYITKTDGTMSLFDAPLHNKFYTASKSGGAFDMRTLMTNTLMKDQPTLAVTFVDNHDTEPGQALQSWVDPWFKPLAYAFILTRQEGYPCVFYGDYYGIPQYNIPSLKSKIDPLLIARRDYAYGTQHDYLDHSDIIGWTREGGTEKPGSGLAALITDGPGGSKWMYVGKQHAGKVFYDLTGNRSDTVTINSDGWGEFKVNGGSVSVWVPRKTTVSTIARPITTRPWTGEFVRWTEPRLVAWP

SEQ ID NO: 17972 - protein, 515 aa, Geobacillus stearothermophilus
AAPFNGTMMQYFEWYLPDDGTLWTKVANEANNLSSLGITALWLPPAYKGTSRSDVGYGVYDLYDLGEFNQKGTVRTKYGTKAQYLQAIQAAHAAGMRVYADVVFDHKGGADGTEWVDAVEVNPSDRNQEISGTYQIQAWTKFDFPGRGNTYSSFKWRWYHFDGVDWDESRKLSRIYKFRGIGKAWDWEVDTENGNYDYLMYADLDMDHPEVVTELKNWGKWYVNTTNIDGFRLDAVKHIKFQFFPDWLSYVRSQTGKPLFTVGEYWSYDINKLHNYITKTNGTMSLFDAPLHNKFYTASKSGGAFDMRTLMTNTLMKDEPTLAVTFVDNHDTEPGQALQSWVDPWFKPLAYAFILTREEGYPCVFYGDYYGIPQYNIPSLKSKIDPLLIARRDYAYGTQHDYLDHSDIIGWTREGVTEKPGSGLAALITDGPGGSKWMYVGKQHAGKVFYDLTGNRSDTVTINSDGWGEFKVNGGSVSVWVPRKTTVSTIARPITTRPWTGEFVRWTEPRLVAWP

SEQ ID NO: 17973 - protein, 515 aa, Geobacillus stearothermophilus
AAPFNGTMMQYFEWYLPDDGTLWTKVANEANNLSSLGITALWLPPAYKGTSRSDVGYGVYDLYDLGEFNQKGTVRTKYGTKAQYLQAIQAAHAAGMQVYADVVFNHKGGADGTEWVDAVEVNPSDRNQEISGTYQIQAWTKFDFPGRGNTYSSFKWRWYHFNGVDWDESRKLSRIYKFRGIGKAWNWEVDTENGNYDYLMYANLDYNHPEVVTELKNWGKWYVNTTNIDGFRLDAVKHIKFSFFPDWLSYVRSQTGKPLFTVGEYWSYDINKLHNYITKTDGTMSLFDAPLHNKFYTASKSGGAFDMRTLMTNTLMKDQPTLAVTFVDNHDTEPGQALQSWVDPWFKPLAYAFILTRQEGYPCVFYGDYYGIPQYNIPSLKSKIDPLLIARRDYAYGTQHDYLDHSDIIGWTREGGTEKPGSGLAALITDGPGGSKWMYVGKQHAGKVFYDLTGNRSDTVTINSDGWGEFKVNGGSVSVWVPRKTTVSTIARPITTRPWTGEFVRWTEPRLVAWP

SEQ ID NO: 17974 - protein, 515 aa, Geobacillus stearothermophilus
AAPFNGTMMQYFEWYLPDDGTLWTKVANEANNLSSLGITALWLPPAYKGTSRSDVGYGVYDLYDLGEFNQKGTVRTKYGTKAQYLQAIQAAHAAGMEVYADVVFDHKGGADGTEWVDAVEVNPSDRNQEISGTYQIQAWTKFDFPGRGNTYSSFKWRWYHFDGVDWDESRKLSRIYKFRGIGKAWDWEVDTENGNYDYLMYADLDMDHPEVVTELKNWGKWYVNTTNIDGFRLDAVKHIKFQFFPDWLSYVRSQTGKPLFTVGEYWSYDINKLHNYITKTNGTMSLFDAPLHNKFYTASKSGGAFDMRTLMTNTLMKDRPTLAVTFVDNHDTEPGQALQSWVDPWFKPLAYAFILTRQEGYPCVFYGDYYGIPQYNIPSLKSKIDPLLIARRDYAYGTQHDYLDHSDIIGWTREGVTEKPGSGLAALITDGPGGSKWMYVGKEHAGKVFYDLTGNRSDTVTINSDGWGEFKVNGGSVSVWVPRKTTVSTIARPITTRPWTGEFVRWTEPRLVAWP

SEQ ID NO: 17975 - protein, 515 aa, Geobacillus stearothermophilus
AAPFNGTMMQYFEWYLPDDGTLWTKVANEANNLSSLGITALWLPPAYKGTSRSDVGYGVYDLYDLGEFNQKGTVRTKYGTKAQYLQAIQAAHAAGMRVYADVVFDHKGGADGTEWVDAVEVNPSDRNQEISGTYQIQAWTKFDFPGRGNTYSSFKWRWYHFDGVDWDESRKLSRIYKFRGIGKAWDWEVDTENGNYDYLMYADLDMDHPEVVTELKNWGKWYVNTTNIDGFRLDAVKHIKFSFFPDWLSYVRSQTGKPLFTVGEYWSYDINKLHNYITKTNGTMSLFDAPLHNKFYTASKSGGAFDMRTLMTNTLMKDRPTLAVTFVDNHDTEPGQALQSWVDPWFKPLAYAFILTREEGYPCVFYGDYYGIPQYNIPSLKSKIDPLLIARRDYAYGTQHDYLDHSDIIGWTREGVTEKPGSGLAALITDGPGGSKWMYVGKEHAGKVFYDLTGNRSDTVTINSDGWGEFKVNGGSVSVWVPRKTTVSTIARPITTRPWTGEFVRWTEPRLVAWP

SEQ ID NO: 17976 - protein, 515 aa, Geobacillus stearothermophilus
AAPFNGTMMQYFEWYLPDDGTLWTKVANEANNLSSLGITALWLPPAYKGTSRSDVGYGVYDLYDLGEFNQKGTVRTKYGTKAQYLQAIQAAHAAGMQVYADVVFDHKGNADGTEWVDAVEVNPSDRNQEISGTYQIQAWTKFDFPGRGNTYSSFKWRWYHFDGVDWDESRKLSRIYKFRGIGKAWDWEVDTENGNYDYLMYADLDMDHPEVVTELKNWGKWYVNTTNIDGFRLDAVKHIKFSFFPDWLSYVRSQTGKPLFTVGEYWSYDINKLHNYITKTNGTMSLFDAPLHNKFYTASKSGGAFDMRTLMTNTLMKDQPTLAVTFVDNHDTEPGQALQSWVDPWFKPLAYAFILTRQEGYPGVFYGDYYGIPQYNIPSLKSKIDPLLIARRDYAYGTQHDYLDHSDIIGWTREGVTEKPGSGLAALITDGPGGSKWMYVGKQHAGKVFYDLTGNRSDTVTITSDGWGEFKVNGGSVSVWVPRKTTVSTITRPITTRPWTGEFVRWTEPRLVAWP

SEQ ID NO: 17977 - protein, 515 aa, Geobacillus stearothermophilus
AAPFNGTMMQYFEWYLPDDGTLWTKVANEANNLSSLGITALWLPPAYKGTSRSDVGYGVYDLYDLGEFNQKGTVRTKYGTKAQYLQAIQAAHAAGMRVYADVVFDHKGGADGTEWVDAVEVNPSDRNQEISGTYQIQAWTKFDFPGRGNTYSSFKWRWYHFDGVDWDESRKLSRIYKFRGIGKAWDWEVDTENGNYDYLMYADLDMDHPEVVTELKNWGKWYVNTTNIDGFRLDAVKHIKFQFFPDWLSYVRSQTGKPLFTVGEYWSYDINKLHNYITKTNGTMSLFDAPLHNKFYTASKSGGAFDMRTLMTNTLMKDRPTLAVTFVDNHDTEPGQALQSWVDPWFKPLAYAFILTRREGYPCVFYGDYYGIPQYNIPSLKSKIDPLLIARRDYAYGTQHDYLDHSDIIGWTREGVTEKPGSGLAALITDGPGGSKWMYVGKQHAGKVFYDLTGNRSDTVTINSDGWGEFKVNGGSVSVWVPRKTTVSTIARPITTRPWTGEFVRWTEPRLVAWP

SEQ ID NO: 17978 - protein, 515 aa, Geobacillus stearothermophilus
AAPFNGTMMQYFEWYLPDDGTLWTKVANEANNLSSLGITALWLPPAYKGTSRSDVGYGVYDLYDLGEFNQKGTVRTKYGTKAQYLQAIQAAHAAGMEVYADVVFDHKGGADGTEWVDAVEVNPSDRNQEISGTYQIQAWTKFDFPGRGNTYSSFKWRWYHFDGVDWDESRKLSRIYKFRGIGKAWDWEVDTENGNYDYLMYADLDMDHPEVVTELKNWGKWYVNTTNIDGFRLDAVKHIKFQFFPDWLSYVRSQTGKPLFTVGEYWSYDINKLHNYITKTNGTMSLFDAPLHNKFYTASKSGGAFDMRTLMTNTLMKDEPTLAVTFVDNHDTEPGQALQSWVDPWFKPLAYAFILTRREGYPCVFYGDYYGIPQYNIPSLKSKIDPLLIARRDYAYGTQHDYLDHSDIIGWTREGVTEKPGSGLAALITDGPGGSKWMYVGKQHAGKVFYDLTGNRSDTVTINSDGWGEFKVNGGSVSVWVPRKTTVSTIARPITTRPWTGEFVRWTEPRLVAWP

SEQ ID NO: 17979 - protein, 515 aa, Geobacillus stearothermophilus
AAPFNGTMMQYFEWYLPDDGTLWTKVANEANNLSSLGITALWLPPAYKGTSRSDVGYGVYDLYDLGEFNQKGTVRTKYGTKAQYLQAIQAAHAAGMEVYADVVFDHKGGADGTEWVDAVEVNPSDRNQEISGTYQIQAWTKFDFPGRGNTYSSFKWRWYHFDGVDWDESRKLSRIYKFRGIGKAWDWEVDTENGNYDYLMYADLDMDHPEVVTELKNWGKWYVNTTNIDGFRLDAVKHIKFQFFPDWLSYVRSQTGKPLFTVGEYWSYDINKLHNYITKTNGTMSLFDAPLHNKFYTASKSGGAFDMRTLMTNTLMKDRPTLAVTFVDNHDTEPGQALQSWVDPWFKPLAYAFILTRQEGYPCVFYGDYYGIPQYNIPSLKSKIDPLLIARRDYAYGTQHDYLDHSDIIGWTREGVTEKPGSGLAALITDGPGGSKWMYVGKRHAGKVFYDLTGNRSDTVTINSDGWGEFKVNGGSVSVWVPRKTTVSTIARPITTRPWTGEFVRWTEPRLVAWP

SEQ ID NO: 17980 - protein, 515 aa, Geobacillus stearothermophilus
AAPFNGTMMQYFEWYLPDDGTLWTKVANEANNLSSLGITALWLPPAYKGTSRSDVGYGVYDLYDLGEFNQKGTVRTKYGTKAQYLQAIQAAHAAGMEVYADVVFDHKGGADGTEWVDAVEVNPSDRNQEISGTYQIQAWTKFDFPGRGNTYSSFKWRWYHFDGVDWDESRKLSRIYKFRGIGKAWDWEVDTENGNYDYLMYADLDMDHPEVVTELKNWGKWYVNTTNIDGFRLDAVKHIKFQFFPDWLSYVRSQTGKPLFTVGEYWSYDINKLHNYITKTNGTMSLFDAPLHNKFYTASKSGGAFDMRTLMTNTLMKDQPTLAVTFVDNHDTEPGQALQSWVDPWFKPLAYAFILTREEGYPCVFYGDYYGIPQYNIPSLKSKIDPLLIARRDYAYGTQHDYLDHSDIIGWTREGVTEKPGSGLAALITDGPGGSKWMYVGKRHAGKVFYDLTGNRSDTVTINSDGWGEFKVNGGSVSVWVPRKTTVSTIARPITTRPWTGEFVRWTEPRLVAWP

SEQ ID NO: 17981 - protein, 515 aa, Geobacillus stearothermophilus
AAPFNGTMMQYFEWYLPDDGTLWTKVANEANNLSSLGITALWLPPAYKGTSRSDVGYGVYDLYDLGEFNQKGTVRTKYGTKAQYLQAIQAAHAAGMRVYADVVFDHKGGADGTEWVDAVEVNPSDRNQEISGTYQIQAWTKFDFPGRGNTYSSFKWRWYHFDGVDWDESRKLSRIYKFRGIGKAWDWEVDTENGNYDYLMYADLDMDHPEVVTELKNWGKWYVNTTNIDGFRLDAVKHIKFQFFPDWLSYVRSQTGKPLFTVGEYWSYDINKLHNYITKTNGTMSLFDAPLHNKFYTASKSGGAFDMRTLMTNTLMKDQPTLAVTFVDNHDTEPGQALQSWVDPWFKPLAYAFILTREEGYPCVFYGDYYGIPQYNIPSLKSKIDPLLIARRDYAYGTQHDYLDHSDIIGWTREGVTEKPGSGLAALITDGPGGSKWMYVGKEHAGKVFYDLTGNRSDTVTINSDGWGEFKVNGGSVSVWVPRKTTVSTIARPITTRPWTGEFVRWTEPRLVAWP

SEQ ID NO: 17982 - protein, 515 aa, Geobacillus stearothermophilus
AAPFNGTMMQYFEWYLPDDGTLWTKVANEANNLSSLGITALWLPPAYKGTSRSDVGYGVYDLYDLGEFNQKGTVRTKYGTKAQYLQAIQAAHAAGMQVYADVVFDHKGGADGTEWVDAVEVNPSDRNQEISGTYQIQAWTKFDFPGRGNTYSSFKWRWYHFDGVDWDESRKLSRIYKFRGIGKAWDWEVDTENGNYDYLMYADLDMDHPEVVTELKNWGKWYVNTTNIDGFRLDAVKHIKFQFFPDWLSYVRSQTGKPLFTVGEYWSYDINKLHNYITKTNGTMSLFDAPLHNKFYTASKSGGAFDMRTLMTNTLMKDEPTLAVTFVDNHDTEPGQALQSWVDPWFKPLAYAFILTRREGYPCVFYGDYYGIPQYNIPSLKSKIDPLLIARRDYAYGTQHDYLDHSDIIGWTREGVTEKPGSGLAALITDGPGGSKWMYVGKRHAGKVFYDLTGNRSDTVTINSDGWGEFKVNGGSVSVWVPRKTTVSTIARPITTRPWTGEFVRWTEPRLVAWP

SEQ ID NO: 17983 - protein, 515 aa, Geobacillus stearothermophilus
AAPFNGTMMQYFEWYLPDDGTLWTKVANEANNLSSLGITALWLPPAYKGTSRSDVGYGVYDLYDLGEFNQKGTVRTKYGTKAQYLQAIQAAHAAGMQVYADVVFDHKGDADGTEWVDAVEVNPSDRNQEISGTYQIQAWTKFDFPGRGNTYSSFKWRWYHFDGVDWDESRKLSRIYKFRGIGKAWDWEVDTENGNYDYLMYADLDMDHPEVVTELKNWGKWYVNTTNIDGFRLDAVKHIKFSFFPDWLSYVRSQTGKPLFTVGEYWSYDINKLHNYITKTNGTMSLFDAPLHNKFYTASKSGGAFDMRTLMTNTLMKDQPTLAVTFVDNHDTEPGQALQSWVDPWFKPLAYAFILTRQEGYPGVFYGDYYGIPQYNIPSLKSKIDPLLIARRDYAYGTQHDYLDHSDIIGWTREGVTEKPGSGLAALITDGPGGSKWMYVGKQHAGKVFYDLTGNRSDTVTITSDGWGEFKVNGGSVSVWVPRKTTVSTITRPITTRPWTGEFVRWTEPRLVAWP

SEQ ID NO: 17984 - protein, 515 aa, Geobacillus stearothermophilus
AAPFNGTMMQYFEWYLPDDGTLWTKVANEANNLSSLGITALWLPPAYKGTSRSDVGYGVYDLYDLGEFNQKGTVRTKYGTKAQYLQAIQAAHAAGMEVYADVVFDHKGGADGTEWVDAVEVNPSDRNQEISGTYQIQAWTKFDFPGRGNTYSSFKWRWYHFDGVDWDESRKLSRIYKFRGIGKAWDWEVDTENGNYDYLMYADLDMDHPEVVTELKNWGKWYVNTTNIDGFRLDAVKHIKFSFFPDWLSYVRSQTGKPLFTVGEYWSYDINKLHNYITKTNGTMSLFDAPLHNKFYTASKSGGAFDMRTLMTNTLMKDEPTLAVTFVDNHDTEPGQALQSWVDPWFKPLAYAFILTREEGYPCVFYGDYYGIPQYNIPSLKSKIDPLLIARRDYAYGTQHDYLDHSDIIGWTREGVTEKPGSGLAALITDGPGGSKWMYVGKEHAGKVFYDLTGNRSDTVTINSDGWGEFKVNGGSVSVWVPRKTTVSTIARPITTRPWTGEFVRWTEPRLVAWP

SEQ ID NO: 17985 - protein, 515 aa, Geobacillus stearothermophilus
AAPFNGTMMQYFEWYLPDDGTLWTKVANEANNLSSLGITALWLPPAYKGTSRSDVGYGVYDLYDLGEFNQKGTVRTKYGTKAQYLQAIQAAHAAGMQVYADVVFDHKGGADGTEWVDAVEVNPSDRNQEISGTYQIQAWTKFDFPGRGNTYSSFKWRWYHFDGVDWDESRKLSRIYKFRGIGKAWDWEVDTENGNYDYLMYADLDMDHPEVVTELKNWGKWYVNTTNIDGFRLDAVKHIKFQFFPDWLSYVRSQTGKPLFTVGEYWSYDINKLHNYITKTNGTMSLFDAPLHNKFYTASKSGGAFDMRTLMTNTLMKDRPTLAVTFVDNHDTEPGQALQSWVDPWFKPLAYAFILTRREGYPCVFYGDYYGIPQYNIPSLKSKIDPLLIARRDYAYGTQHDYLDHSDIIGWTREGVTEKPGSGLAALITDGPGGSKWMYVGKEHAGKVFYDLTGNRSDTVTINSDGWGEFKVNGGSVSVWVPRKTTVSTIARPITTRPWTGEFVRWTEPRLVAWP

SEQ ID NO: 17986 - protein, 515 aa, Geobacillus stearothermophilus
AAPFNGTMMQYFEWYLPDDGTLWTKVANEANNLSSLGITALWLPPAYKGTSRSDVGYGVYDLYDLGEFNQKGTVRTKYGTKAQYLQAIQAAHAAGMEVYADVVFDHKGGADGTEWVDAVEVNPSDRNQEISGTYQIQAWTKFDFPGRGNTYSSFKWRWYHFDGVDWDESRKLSRIYKFRGIGKAWDWEVDTENGNYDYLMYADLDMDHPEVVTELKNWGKWYVNTTNIDGFRLDAVKHIKFSFFPDWLSYVRSQTGKPLFTVGEYWSYDINKLHNYITKTNGTMSLFDAPLHNKFYTASKSGGAFDMRTLMTNTLMKDEPTLAVTFVDNHDTEPGQALQSWVDPWFKPLAYAFILTRREGYPCVFYGDYYGIPQYNIPSLKSKIDPLLIARRDYAYGTQHDYLDHSDIIGWTREGVTEKPGSGLAALITDGPGGSKWMYVGKRHAGKVFYDLTGNRSDTVTINSDGWGEFKVNGGSVSVWVPRKTTVSTIARPITTRPWTGEFVRWTEPRLVAWP

SEQ ID NO: 17987 - protein, 515 aa, Geobacillus stearothermophilus
AAPFNGTMMQYFEWYLPDDGTLWTKVANEANNLSSLGITALWLPPAYKGTSRSDVGYGVYDLYDLGEFNQKGTVRTKYGTKAQYLQAIQAAHAAGMQVYADVVFDHKGFADGTEWVDAVEVNPSDRNQEISGTYQIQAWTKFDFPGRGNTYSSFKWRWYHFDGVDWDESRKLSRIYKFRGIGKAWDWEVDTENGNYDYLMYADLDMDHPEVVTELKNWGKWYVNTTNIDGFRLDAVKHIKFSFFPDWLSYVRSQTGKPLFTVGEYWSYDINKLHNYITKTNGTMSLFDAPLHNKFYTASKSGGAFDMRTLMTNTLMKDQPTLAVTFVDNHDTEPGQALQSWVDPWFKPLAYAFILTRQEGYPGVFYGDYYGIPQYNIPSLKSKIDPLLIARRDYAYGTQHDYLDHSDIIGWTREGVTEKPGSGLAALITDGPGGSKWMYVGKQHAGKVFYDLTGNRSDTVTITSDGWGEFKVNGGSVSVWVPRKTTVSTITRPITTRPWTGEFVRWTEPRLVAWP

SEQ ID NO: 17988 - protein, 515 aa, Geobacillus stearothermophilus
AAPFNGTMMQYFEWYLPDDGTLWTKVANEANNLSSLGITALWLPPAYKGTSRSDVGYGVYDLYDLGEFNQKGTVRTKYGTKAQYLQAIQAAHAAGMRVYADVVFDHKGGADGTEWVDAVEVNPSDRNQEISGTYQIQAWTKFDFPGRGNTYSSFKWRWYHFDGVDWDESRKLSRIYKFRGIGKAWDWEVDTENGNYDYLMYADLDMDHPEVVTELKNWGKWYVNTTNIDGFRLDAVKHIKFQFFPDWLSYVRSQTGKPLFTVGEYWSYDINKLHNYITKTNGTMSLFDAPLHNKFYTASKSGGAFDMRTLMTNTLMKDEPTLAVTFVDNHDTEPGQALQSWVDPWFKPLAYAFILTRREGYPCVFYGDYYGIPQYNIPSLKSKIDPLLIARRDYAYGTQHDYLDHSDIIGWTREGVTEKPGSGLAALITDGPGGSKWMYVGKQHAGKVFYDLTGNRSDTVTINSDGWGEFKVNGGSVSVWVPRKTTVSTIARPITTRPWTGEFVRWTEPRLVAWP

SEQ ID NO: 17989 - protein, 515 aa, Geobacillus stearothermophilus
AAPFNGTMMQYFEWYLPDDGTLWTKVANEANNLSSLGITALWLPPAYKGTSRSDVGYGVYDLYDLGEFNQKGTVRTKYGTKAQYLQAIQAAHAAGMRVYADVVFDHKGGADGTEWVDAVEVNPSDRNQEISGTYQIQAWTKFDFPGRGNTYSSFKWRWYHFDGVDWDESRKLSRIYKFRGIGKAWDWEVDTENGNYDYLMYADLDMDHPEVVTELKNWGKWYVNTTNIDGFRLDAVKHIKFQFFPDWLSYVRSQTGKPLFTVGEYWSYDINKLHNYITKTNGTMSLFDAPLHNKFYTASKSGGAFDMRTLMTNTLMKDRPTLAVTFVDNHDTEPGQALQSWVDPWFKPLAYAFILTRQEGYPCVFYGDYYGIPQYNIPSLKSKIDPLLIARRDYAYGTQHDYLDHSDIIGWTREGVTEKPGSGLAALITDGPGGSKWMYVGKEHAGKVFYDLTGNRSDTVTINSDGWGEFKVNGGSVSVWVPRKTTVSTIARPITTRPWTGEFVRWTEPRLVAWP

SEQ ID NO: 17990 - protein, 515 aa, Geobacillus stearothermophilus
AAPFNGTMMQYFEWYLPDDGTLWTKVANEANNLSSLGITALWLPPAYKGTSRSDVGYGVYDLYDLGEFNQKGTVRTKYGTKAQYLQAIQAAHAAGMEVYADVVFDHKGGADGTEWVDAVEVNPSDRNQEISGTYQIQAWTKFDFPGRGNTYSSFKWRWYHFDGVDWDESRKLSRIYKFRGIGKAWDWEVDTENGNYDYLMYADLDMDHPEVVTELKNWGKWYVNTTNIDGFRLDAVKHIKFSFFPDWLSYVRSQTGKPLFTVGEYWSYDINKLHNYITKTNGTMSLFDAPLHNKFYTASKSGGAFDMRTLMTNTLMKDRPTLAVTFVDNHDTEPGQALQSWVDPWFKPLAYAFILTRREGYPCVFYGDYYGIPQYNIPSLKSKIDPLLIARRDYAYGTQHDYLDHSDIIGWTREGVTEKPGSGLAALITDGPGGSKWMYVGKEHAGKVFYDLTGNRSDTVTINSDGWGEFKVNGGSVSVWVPRKTTVSTIARPITTRPWTGEFVRWTEPRLVAWP

SEQ ID NO: 17991 - protein, 515 aa, Geobacillus stearothermophilus
AAPFNGTMMQYFEWYLPDDGTLWTKVANEANNLSSLGITALWLPPAYKGTSRSDVGYGVYDLYDLGEFNQKGTVRTKYGTKAQYLQAIQAAHAAGMQVYADVVFDHKGGADGTEWVDAVEVNPSDRNQEISGTYQIQAWTKFDFPGRGNTYSSFKWRWYHFDGVDWDESRKLSRIYKFRGIGKAWDWEVDTENGNYDYLMYADLDMDHPEVVTELKNWGKWYVNTTNIDGFRLDAVKHIKFQFFPDWLSYVRSQTGKPLFTVGEYWSYDINKLHNYITKTNGTMSLFDAPLHNKFYTASKSGGAFDMRTLMTNTLMKDEPTLAVTFVDNHDTEPGQALQSWVDPWFKPLAYAFILTREEGYPCVFYGDYYGIPQYNIPSLKSKIDPLLIARRDYAYGTQHDYLDHSDIIGWTREGVTEKPGSGLAALITDGPGGSKWMYVGKEHAGKVFYDLTGNRSDTVTINSDGWGEFKVNGGSVSVWVPRKTTVSTIARPITTRPWTGEFVRWTEPRLVAWP

SEQ ID NO: 17992 - protein, 515 aa, Geobacillus stearothermophilus
AAPFNGTMMQYFEWYLPDDGTLWTKVANEANNLSSLGITALWLPPAYKGTSRSDVGYGVYDLYDLGEFNQKGTVRTKYGTKAQYLQAIQAAHAAGMEVYADVVFDHKGGADGTEWVDAVEVNPSDRNQEISGTYQIQAWTKFDFPGRGNTYSSFKWRWYHFDGVDWDESRKLSRIYKFRGIGKAWDWEVDTENGNYDYLMYADLDMDHPEVVTELKNWGKWYVNTTNIDGFRLDAVKHIKFQFFPDWLSYVRSQTGKPLFTVGEYWSYDINKLHNYITKTNGTMSLFDAPLHNKFYTASKSGGAFDMRTLMTNTLMKDRPTLAVTFVDNHDTEPGQALQSWVDPWFKPLAYAFILTREEGYPCVFYGDYYGIPQYNIPSLKSKIDPLLIARRDYAYGTQHDYLDHSDIIGWTREGVTEKPGSGLAALITDGPGGSKWMYVGKQHAGKVFYDLTGNRSDTVTINSDGWGEFKVNGGSVSVWVPRKTTVSTIARPITTRPWTGEFVRWTEPRLVAWP

SEQ ID NO: 17993 - protein, 515 aa, Geobacillus stearothermophilus
AAPFNGTMMQYFEWYLPDDGTLWTKVANEANNLSSLGITALWLPPAYKGTSRSDVGYGVYDLYDLGEFNQKGTVRTKYGTKAQYLQAIQAAHAAGMEVYADVVFDHKGGADGTEWVDAVEVNPSDRNQEISGTYQIQAWTKFDFPGRGNTYSSFKWRWYHFDGVDWDESRKLSRIYKFRGIGKAWDWEVDTENGNYDYLMYADLDMDHPEVVTELKNWGKWYVNTTNIDGFRLDAVKHIKFQFFPDWLSYVRSQTGKPLFTVGEYWSYDINKLHNYITKTNGTMSLFDAPLHNKFYTASKSGGAFDMRTLMTNTLMKDEPTLAVTFVDNHDTEPGQALQSWVDPWFKPLAYAFILTRQEGYPCVFYGDYYGIPQYNIPSLKSKIDPLLIARRDYAYGTQHDYLDHSDIIGWTREGVTEKPGSGLAALITDGPGGSKWMYVGKRHAGKVFYDLTGNRSDTVTINSDGWGEFKVNGGSVSVWVPRKTTVSTIARPITTRPWTGEFVRWTEPRLVAWP

SEQ ID NO: 17994 - protein, 515 aa, Geobacillus stearothermophilus
AAPFNGTMMQYFEWYLPDDGTLWTKVANEANNLSSLGITALWLPPAYKGTSRSDVGYGVYDLYDLGEFNQKGTVRTKYGTKAQYLQAIQAAHAAGMEVYADVVFDHKGGADGTEWVDAVEVNPSDRNQEISGTYQIQAWTKFDFPGRGNTYSSFKWRWYHFDGVDWDESRKLSRIYKFRGIGKAWDWEVDTENGNYDYLMYADLDMDHPEVVTELKNWGKWYVNTTNIDGFRLDAVKHIKFQFFPDWLSYVRSQTGKPLFTVGEYWSYDINKLHNYITKTNGTMSLFDAPLHNKFYTASKSGGAFDMRTLMTNTLMKDEPTLAVTFVDNHDTEPGQALQSWVDPWFKPLAYAFILTRQEGYPCVFYGDYYGIPQYNIPSLKSKIDPLLIARRDYAYGTQHDYLDHSDIIGWTREGVTEKPGSGLAALITDGPGGSKWMYVGKEHAGKVFYDLTGNRSDTVTINSDGWGEFKVNGGSVSVWVPRKTTVSTIARPITTRPWTGEFVRWTEPRLVAWP

SEQ ID NO: 17995 - protein, 515 aa, Geobacillus stearothermophilus
AAPFNGTMMQYFEWYLPDDGTLWTKVANEANNLSSLGITALWLPPAYKGTSRSDVGYGVYDLYDLGEFNQKGTVRTKYGTKAQYLQAIQAAHAAGMQVYADVVFDHKGGADGTEWVDAVEVNPSDRNQVISGTYQIQAWTKFDFPGRGNTYSSFKWRWYHFDGVDWDESRKLSRIYLFEGIGKAWDWEVDTENGNYDYLMYADLDMDHPEVVTELKNWGKWYVNTTNIDGFRLDAVKHIKFQFFPDWLSYVRSQTGKPLFTVGEYWSYDINKLHNYITKTNGTMSLFDAPLHNKFYTASKSGGAFDMRTLMTNTLMKDQPTLAVTFVDNHDTEPGQALQSWVDPWFKPLAYAFILTRQEGYPCVFYGDYYGIPQYNIPSLKSKIDPLLIARRDYAYGTQHDYLDHSDIIGWTREGVTEKPGSGLAALITDGPGGSKWMYVGKQHAGKVFYDLTGNRSDTVTINSDGWGEFKVNGGSVSVWVPRKTTVSTIARPITTRPWTGEFVRWTEPRLVAWP

SEQ ID NO: 17996 - protein, 515 aa, Geobacillus stearothermophilus
AAPFNGTMMQYFEWYLPDDGTLWTKVANEANNLSSLGITALWLPPAYKGTSRSDVGYGVYDLYDLGEFNQKGTVRTKYGTKAQYLQAIQAAHAAGMRVYADVVFDHKGGADGTEWVDAVEVNPSDRNQEISGTYQIQAWTKFDFPGRGNTYSSFKWRWYHFDGVDWDESRKLSRIYKFRGIGKAWDWEVDTENGNYDYLMYADLDMDHPEVVTELKNWGKWYVNTTNIDGFRLDAVKHIKFSFFPDWLSYVRSQTGKPLFTVGEYWSYDINKLHNYITKTNGTMSLFDAPLHNKFYTASKSGGAFDMRTLMTNTLMKDRPTLAVTFVDNHDTEPGQALQSWVDPWFKPLAYAFILTREEGYPCVFYGDYYGIPQYNIPSLKSKIDPLLIARRDYAYGTQHDYLDHSDIIGWTREGVTEKPGSGLAALITDGPGGSKWMYVGKRHAGKVFYDLTGNRSDTVTINSDGWGEFKVNGGSVSVWVPRKTTVSTIARPITTRPWTGEFVRWTEPRLVAWP

SEQ ID NO: 17997 - protein, 515 aa, Geobacillus stearothermophilus
AAPFNGTMMQYFEWYLPDDGTLWTKVANEANNLSSLGITALWLPPAYKGTSRSDVGYGVYDLYDLGEFNQKGTVRTKYGTKAQYLQAIQAAHAAGMQVYADVVFDHKGGADGTEWVDAVEVNPSDRNQEISGTYQIQAWTKFDFPGRGNTYSSFKWRWYHFDGVDWDESRKLSRIYKFRGIGKAWDWEVDTENGNYDYLMYADLDMDHPEVVTELKNWGPWYVLTTNIDGFRLDAVKHIKFSFFPDWLSYVRSSTGKPLFTVGEYWSYDINKLHNYITKTNGTTSLFDAPLHNKFYTASKSGGAFDMRTLMTNTLMKDQPTLAVTFVDNHDTEPGQALQSWVDPWFKPLAYAFILTRQEGYPCVFYGDYYGIPQYNIPSLKSKIDPLLIARRDYAYGTQHDYLDHSDIIGWTREGVTEKPGSGLAALITDGPGGSKWMYVGKQHAGKVFYDLTGNRSDTVTINSDGWGEFKVNGGSVSVWVPRKTTVSTIARPITTRPWTGEFVRWTEPRLVAWP

SEQ ID NO: 17998 - protein, 515 aa, Geobacillus stearothermophilus
AAPFNGTMMQYFEWYLPDDGTLWTKVANEANNLSSLGITALWLPPAYKGTSRSDVGYGVYDLYDLGEFNQKGTVRTKYGTKAQYLQAIQAAHAAGMEVYADVVFDHKGGADGTEWVDAVEVNPSDRNQEISGTYQIQAWTKFDFPGRGNTYSSFKWRWYHFDGVDWDESRKLSRIYKFRGIGKAWDWEVDTENGNYDYLMYADLDMDHPEVVTELKNWGKWYVNTTNIDGFRLDAVKHIKFSFFPDWLSYVRSQTGKPLFTVGEYWSYDINKLHNYITKTNGTMSLFDAPLHNKFYTASKSGGAFDMRTLMTNTLMKDRPTLAVTFVDNHDTEPGQALQSWVDPWFKPLAYAFILTRREGYPCVFYGDYYGIPQYNIPSLKSKIDPLLIARRDYAYGTQHDYLDHSDIIGWTREGVTEKPGSGLAALITDGPGGSKWMYVGKRHAGKVFYDLTGNRSDTVTINSDGWGEFKVNGGSVSVWVPRKTTVSTIARPITTRPWTGEFVRWTEPRLVAWP

SEQ ID NO: 17999 - protein, 515 aa, Geobacillus stearothermophilus
AAPFNGTMMQYFEWYLPDDGTLWTKVANEANNLSSLGITALWLPPAYKGTSRSDVGYGVYDLYDLGEFNQKGTVRTKYGTKAQYLQAIQAAHAAGMRVYADVVFDHKGGADGTEWVDAVEVNPSDRNQEISGTYQIQAWTKFDFPGRGNTYSSFKWRWYHFDGVDWDESRKLSRIYKFRGIGKAWDWEVDTENGNYDYLMYADLDMDHPEVVTELKNWGKWYVNTTNIDGFRLDAVKHIKFSFFPDWLSYVRSQTGKPLFTVGEYWSYDINKLHNYITKTNGTMSLFDAPLHNKFYTASKSGGAFDMRTLMTNTLMKDEPTLAVTFVDNHDTEPGQALQSWVDPWFKPLAYAFILTREEGYPCVFYGDYYGIPQYNIPSLKSKIDPLLIARRDYAYGTQHDYLDHSDIIGWTREGVTEKPGSGLAALITDGPGGSKWMYVGKRHAGKVFYDLTGNRSDTVTINSDGWGEFKVNGGSVSVWVPRKTTVSTIARPITTRPWTGEFVRWTEPRLVAWP

SEQ ID NO: 18000 - protein, 515 aa, Geobacillus stearothermophilus
AAPFNGTMMQYFEWYLPDDGTLWTKVANEANNLSSLGITALWLPPAYKGTSRSDVGYGVYDLYDLGEFNQKGTVRTKYGTKAQYLQAIQAAHAAGMQVYADVVFDHKGGADGTEWVDAVEVNPSDRNQEISGTYQIQALTKFDFPGRGNTYSSFKWRWYHFDGVDWDESRKLSRIYKFRGIGKAWDWEVDTENGNYDYLMYADLDMDHPEVVTELKNWGKWYVNTTNIDGFRLDAVKHIKFSFFPDWLSYVRSQTGKPLFTVGEYWSYDINKLHNYITKTNGTMSLFDAPLHNKFYTASKSGGAFDMRTLMTNTLMKDQPTLAVTFVDNHDTEPGQALQSWVDPWFKPLAYAFILTRQEGYPGVFYGDYYGIPQYNIPSLKSKIDPLLIARRDYAYGTQHDYLDHSDIIGWTREGVTEKPGSGLAALITDGPGGSKWMYVGKQHAGKVFYDLTGNRSDTVTITSDGWGEFKVNGGSVSVWVPRKTTVSTITRPITTRPWTGEFVRWTEPRLVAWP

SEQ ID NO: 18001 - protein, 515 aa, Geobacillus stearothermophilus
AAPFNGTMMQYFEWYLPDDGTLWTKVANEANNLSSLGITALWLPPAYKGTSRSDVGYGVYDLYDLGEFNQKGTVRTKYGTKAQYLQAIQAAHAAGMRQVYADVVFDHKGGADGTEWVDAVEVNPSDRNQEISGTYQIQAWTKFDFPGRGNTYSSFKWRWYHFDGVDWDESRKLSRIYKFRGIGKAWDWEVDTENGNYDYLMYADLDMDHPEVVTELKNWGKWYVNTTNIDGFRLDAVKHIKFQFFPDWLSYVRSQTGKPLFTVGEYWSYDINKLHNYITKTNGTMSLFDAPLHNKFYTASKSGGAFDMRTLMTNTLMKRPTLAVTFVDNHDTEPGQALQSWVDPWFKPLAYAFILTRREGYPCVFYGDYYGIPQYNIPSLKSKIDPLLIARRDYAYGTQHDYLDHSDIIGWTREGVTEKPGSGLAALITDGPGGSKWMYVGKEHAGKVFYDLTGNRSDTVTINSDGWGEFKVNGGSVSVWVPRKTTVSTIARPITTRPWTGEFVRWTEPRLVAWP

SEQ ID NO: 18002 - protein, 498 aa, Aspergillus oryzae
MVAWWSLFLYGLQVAAPALAATPADWRSQSIYFLLTDRFARTDGSTTATCNTADQKYCGGTWQGIIDKLDYIQGMGFTAIWITPVTAQLPQTTAYGDAYHGYWQQDIYSLNENYGTADDLKALSSALHERGMYLMVDVVANHMGYDGAGSSVDYSVFDPFNSASYFHPFCFIQNYEDQTQVEDCWLGDNTVSLPDLDTTKDVVKNEWYDWVGSLVSNYSIDGLRIDTVKHVQKDFWPGYNKAAGVYCIGEVLDGDPAYTCPYQNVMDGVLNYPIYYPLLNAFKSTSGSMDDLYNMINTVKSDCPDSTLLGTFVENHDNPRFASYTNDIALAKNVAAFIILNDGIPIIYAGQEQHYAGGNDPANREATWLSGYPTDSELYKLIASANAIRNYAISKDTGFVTYKNWPIYKDDTTIAMRKGTDGSQIVTILSNKGASGDSYTLSLSGAGYTAGQQLTEVIGCTTVTVDSSGDVPVPMAGGLPRVLYPTEKLAGSKICSSS

SEQ ID NO: 18003 - protein, 498 aa, Aspergillus oryzae
MVAWWSLFLYGLQVAAPALAATPADWRSQSIYFLLTDRFARTDGSTTATCNTADQKYCGGTWQGIIDKLDYIQGMGFTAIWITPVTAQLPQTTAYGDAYHGYWQQDIYSLNENYGTADDLKALSSALHERGMYLMVDVVANHMGYDGAGSSVDYSVFDPFDSSSYFHPFCFIQNYEDQTQVEDCWLGDNTVSLPDLDTTKDVVKNEWYDWVGSLVSNYSIDGLRIDTVKHVQKDFWPGYNKAAGVYCIGEVLDGDPAYTCPYQNVMDGVLNYPIYYPLLNAFKSTSGSMDDLYNMINTVKSDCPDSTLLGTFVENHDNPRFASYTNDIALAKNVAAFIILNDGIPIIYAGQEQHYAGGNDPANREATWLSGYPTDSELYKLIASANAIRNYAISKDTGFVTYKNWPIYKDDTTIAMRKGTDGSQIVTILSNKGASGDSYTLSLSGAGYTAGQQLTEVIGCTTVTVDSSGDVPVPMAGGLPRVLYPTEKLAGSKICSSS

SEQ ID NO: 18004 - protein, 498 aa, Aspergillus oryzae
MVAWWSLFLYGLQVAAPALAATPADWRSQSIYFLLTDRFARTDGSTTATCNTADQKYCGGTWQGIIDKLDYIQGMGFTAIWITPVTAQLPQTTAYGDAYHGYWQQDIYSLNENYGTADDLKALSSALHERGMYLMVDVVANHMGYDGAGSSVDYSVFVPFDSSSYFHPFCFIQNYEDQTQVEDCWLGDNTVSLPDLDTTKDVVKNEWYDWVGSLVSNYSIDGLRIDTVKHVQKDFWPGYNKAAGVYCIGEVLDGDPAYTCPYQNVMDGVLNYPIYYPLLNAFKSTSGSMDDLYNMINTVKSDCPDSTLLGTFVENHDNPRFASYTNDIALAKNVAAFIILNDGIPIIYAGQEQHYAGGNDPANREATWLSGYPTDSELYKLIASANAIRNYAISKDTGFVTYKNWPIYKDDTTIAMRKGTDGSQIVTILSNKGASGDSYTLSLSGAGYTAGQQLTEVIGCTTVTVDSSGDVPVPMAGGLPRVLYPTEKLAGSKICSSS

SEQ ID NO: 18005 - protein, 491 aa, Geobacillus stearothermophilus
AAPFNGTMMQYFEWYLPDDGTLWTKVANEANNLSSLGITALWLPPAYKGTSRSDVGYGAYDLYDLGEFNQKGTVRTKYGTKAQYLQAIQAAHAAGMQVYADVVFDHKGGADGTEWVDAVEVNPSDRNQVISGTYQIQAWTKFDFPGRGNTYSSFKWRWYHFDGVDWDESRKLSRIYLFEGKAWDWEVDTEFGNYDYLMYADLDMDHPEVTTELKNWGKWYVNTTNIDGFRLDAVKHIKFSFFPDWLSYVRSSTGKPLFTVGEYWSGDINKLHNYITKTDGTVSLFDAPLHYKFYNASKSGGAFDMRTLMTNTLMKDQPTLAVTFVDNHDTEPGQALQSWVDPWFKPLAYAFILTRQEGYPCVFYGDYYGIPQYNIPSLKSKIDPLLIARRDYAYGRQHDYLDHSDIIGWTREGGTEKPGSGLAALITDGPGGSKWMYVGKQHAGKVFYDLTGNRSDTVTINSDGWGEFKVNGGSVSVWVPRKTTVSTIARP

SEQ ID NO: 18006 - protein, 491 aa, Geobacillus stearothermophilus
AAPFNGTMMQYFEWYLPDDGTLWTKVANEANNLSSLGITALWLPPAYKGTSRSDVGYGAYDLYDLGEFNQKGTVRTKYGTKAQYLQAIQAAHAAGMQVYADVVFDHKGGADATEWVDAVEVNPSDRNQVISGTYQIQAWTKFDFPGRGNTYSSFKWRWYHFDGVDWDESRKLSRIYLFEGKAWDWEVDTEFGNYDYLMYADLDMDHPEVTTELKNWGKWYVNTTNIDGFRLDAVKHIKFSFFPDWLSYVRSSTGKPLFTVGEYWSGDINKLHNYITKTDGTVSLFDAPLHYKFYNASKSGGAFDMRTLMTNTLMKDQPTLAVTFVDNHDTEPGQALQSWVDPWFKPLAYAFILTRQEGYPCVFYGDYYGIPQYNIPSLKSKIDPLLIARRDYAYGTQHDYLDHSDIIGWTREGGTEKPGSGLAALITDGPGGSKWMYVGKQHAGKVFYDLTGNRSDTVTINSDGWGEFKVNGGSVSVWVPRKTTVSTIARP

SEQ ID NO: 18007 - protein, 491 aa, Geobacillus stearothermophilus
AAPFNGTMMQYFEWYLPDDGTLWTKVANEANNLSSLGITALWLPPAYKGTSRSDVGYGAYDLYDLGEFNQKGTVRTKYGTKAQYLQAIQAAHAAGMQVYADVVFDHKGGADGTEWVDAVEVNPSDRNQVISGTYQIQAWTKFDFPGRGNTYSSFKWRWYHFDGVDWDESRKLSRIYLFEGKAWDWEVDTEFGNYDYLMYADLDMDHPEVTTELKNWGKWYVNTTNIDGFRLDAVKHIKFSFFPDWLSYVRSSTGKPLFTVGEYWSGDINKLHNYITKTDGTVSLFDAPLHYKFYNASKSGGAFDMRTLMTNTLMKDQPTLAVTFVDNHDTEPGQALQSWVDPWFKPLAYAFILTRQEGYPCVFYGDYYGIPQYNIPSLKHKIDPLLIARRDYAYGTQHDYLDHSDIIGWTREGGTEKPGSGLAALITDGPGGSKWMYVGKQHAGKVFYDLTGNRSDTVTINSDGWGEFKVNGGSVSVWVPRKTTVSTIARP

SEQ ID NO: 18008 - protein, 491 aa, Geobacillus stearothermophilus
AAPFNGTMMQYFEWYLPDDGTLWTKVANEANNLSSLGITALWLPPAYKGTSRSDVGYGAYDLYDLGEFNQKGTVRTKYGTKAQYLQAIQAAHAAGMQVYADVVFDHKGGADGTEWVDAVEVNPSDRNQVISGTYQIQAWTKFDFPGRGNTYSSFKWRWYHFDGVDWDESRKLSRIYLFEGKAWDWEVDTEFGNYDYLMYADLDMDHPEVTTELKNWGKWYVNTTNIDGFRLDAVKHIKFSFFPDWLSYVRSSTGKPLFTVGEYWSGDINKLHNYITKTDGTVSLFDAPLHYKFYNASKSGGNFDMRTLMTNTLMKDQPTLAVTFVDNHDTEPGQALQSWVDPWFKPLAYAFILTRQEGYPCVFYGDYYGIPQYNIPSLKSKIDPLLIARRDYAYGTQHDYLDHSDIIGWTREGGTEKPGSGLAALITDGPGGSKWMYVGKQHAGKVFYDLTGNRSDTVTINSDGWGEFKVNGGSVSVWVPRKTTVSTIARP

SEQ ID NO: 18009 - protein, 491 aa, Geobacillus stearothermophilus
AAPFNGTMMQYFEWYLPDDGTLWTKVANEANNLSSLGITALWLPPAYKGTSRSDVGYGAYDLYDLGEFNQKGTVRTKYGTKAQYLQAIQAAHAAGMQVYADVVFDHKAGADGTEWVDAVEVNPSDRNQVISGTYQIQAWTKFDFPGRGNTYSSFKWRWYHFDGVDWDESRKLSRIYLFEGKAWDWEVDTEFGNYDYLMYADLDMDHPEVTTELKNWGKWYVNTTNIDGFRLDAVKHIKFSFFPDWLSYVRSSTGKPLFTVGEYWSGDINKLHNYITKTDGTVSLFDAPLHYKFYNASKSGGAFDMRTLMTNTLMKDQPTLAVTFVDNHDTEPGQALQSWVDPWFKPLAYAFILTRQEGYPCVFYGDYYGIPQYNIPSLKSKIDPLLIARRDYAYGTQHDYLDHSDIIGWTREGGTEKPGSGLAALITDGPGGSKWMYVGKQHAGKVFYDLTGNRSDTVTINSDGWGEFKVNGGSVSVWVPRKTTVSTIARP

SEQ ID NO: 18010 - protein, 491 aa, Geobacillus stearothermophilus
AAPFNGTMMQYFEWYLPDDGTLWTKVANEANNLSSLGITALWLPPAYKGTSRSDVGYGAYDLYDLGEFNQKGTVRTKYGTKAQYLQAIQAAHAAGMQVYADVVFDHKGGADGTEWVDAVEVNPSDRNQVISGTYQIQAWTKFDFPGRGNTYSSFKWRWYHFDGVDWDESRKLSRIYLFEGKAWDWEVDTEFGNYDYLMYADLDMDHPEVTTELKNWGKWYVNTTNIDGFRLDAVKHIKFSFFPDWLSYVRSSTGKPLFTVGEYWSGDINKLHNYITKTDGTVSLFDAPLHYKFYNASKSGGAFDMRTLMWNTLMKDQPTLAVTFVDNHDTEPGQALQSWVDPWFKPLAYAFILTRQEGYPCVFYGDYYGIPQYNIPSLKSKIDPLLIARRDYAYGTQHDYLDHSDIIGWTREGGTEKPGSGLAALITDGPGGSKWMYVGKQHAGKVFYDLTGNRSDTVTINSDGWGEFKVNGGSVSVWVPRKTTVSTIARP

SEQ ID NO: 18011 - protein, 491 aa, Geobacillus stearothermophilus
AAPFNGTMMQYFEWYLPDDGTLWTKVANEANNLSSLGITALWLPPAYKGISRSDVGYGAYDLYDLGEFNQKGTVRTKYGTKAQYLQAIQAAHAAGMQVYADVVFDHKGGADGTEWVDAVEVNPSDRNQVISGTYQIQAWTKFDFPGRGNTYSSFKWRWYHFDGVDWDESRKLSRIYLFEGKAWDWEVDTEFGNYDYLMYADLDMDHPEVTTELKNWGKWYVNTTNIDGFRLDAVKHIKFSFFPDWLSYVRSSTGKPLFTVGEYWSGDINKLHNYITKTDGTVSLFDAPLHYKFYNASKSGGAFDMRTLMTNTLMKDQPTLAVTFVDNHDTEPGQALQSWVDPWFKPLAYAFILTRQEGYPCVFYGDYYGIPQYNIPSLKSKIDPLLIARRDYAYGTQHDYLDHSDIIGWTREGGTEKPGSGLAALITDGPGGSKWMYVGKQHAGKVFYDLTGNRSDTVTINSDGWGEFKVNGGSVSVWVPRKTTVSTIARP

SEQ ID NO: 18012 - protein, 491 aa, Geobacillus stearothermophilus
AAPFNGTMMQYFEWYLPDDGTLWTKVANEANNLSSLGITALWLPPAYKGTSRSDVGYGAYDLYDLGEFNQKGTVRTKYGTKAQYLQAIQAAHAAGMQVYADVVFDHKGGADGTEWVDAVEVNPSDRNQVISGTYQIQAWTKFDFPGRGNTYSSFKWRWYHFDGVDWDESRKLSRIYLFEGKAWDWEVDTEFGNYDYLMYADLDMDHPDVTTELKNWGKWYVNTTNIDGFRLDAVKHIKFSFFPDWLSYVRSSTGKPLFTVGEYWSGDINKLHNYITKTDGTVSLFDAPLHYKFYNASKSGGAFDMRTLMTNTLMKDQPTLAVTFVDNHDTEPGQALQSWVDPWFKPLAYAFILTRQEGYPCVFYGDYYGIPQYNIPSLKSKIDPLLIARRDYAYGTQHDYLDHSDIIGWTREGGTEKPGSGLAALITDGPGGSKWMYVGKQHAGKVFYDLTGNRSDTVTINSDGWGEFKVNGGSVSVWVPRKTTVSTIARP

SEQ ID NO: 18013 - protein, 491 aa, Geobacillus stearothermophilus
AAPFNGTMMQYFEWYLPDDGTLWTKVANEANNLSSLGITALWLPPAYKGTSRSDVGYGAYDLYDLGEFNQKGTVRTKYGTKAQYLQAIQAAHAAGMQVYADVVFDHKGGADGTEWVDAVEVNPSDRNQVISGTYQIQAWTKFDFPGRGNTYSSFKWRWYHFDGVDWDESRKLSRIYLFEGKAWDWEVDTEFGNYDYLMYADLDMDHPEVTTELKNWGKWYVNTTNIDGFRLDAVKHIKFSFFPDWLSYVRSSTGKPLFTVGEYWSGDINKLHNYITKTDGTVSLFDAPLHYKFYNASKSGGAFDMRWLMTNTLMKDQPTLAVTFVDNHDTEPGQALQSWVDPWFKPLAYAFILTRQEGYPCVFYGDYYGIPQYNIPSLKSKIDPLLIARRDYAYGTQHDYLDHSDIIGWTREGGTEKPGSGLAALITDGPGGSKWMYVGKQHAGKVFYDLTGNRSDTVTINSDGWGEFKVNGGSVSVWVPRKTTVSTIARP

SEQ ID NO: 18014 - protein, 491 aa, Geobacillus stearothermophilus
AAPFNGTMMQYFEWYLPDDGTLWTKVANEANNLSSLGITALWLPPAYKGTSRSDVGYGAYDLYDLGEFNQKGTVRTKYGTKAQYLQAIQAAHAAGMQVYADVVFDHKGGADGTEWVDAVEVNPSDRNQVISGTYQIQAWTKFDFPGRGNTYSSFKWRWYHFDGVDWDESRKLSRIYLFEGKAWDWEVDTEFGNYDYLMYADLDMDHPEVTTELKNWGKWYVNNTNIDGFRLDAVKHIKFSFFPDWLSYVRSSTGKPLFTVGEYWSGDINKLHNYITKTDGTVSLFDAPLHYKFYNASKSGGAFDMRTLMTNTLMKDQPTLAVTFVDNHDTEPGQALQSWVDPWFKPLAYAFILTRQEGYPCVFYGDYYGIPQYNIPSLKSKIDPLLIARRDYAYGTQHDYLDHSDIIGWTREGGTEKPGSGLAALITDGPGGSKWMYVGKQHAGKVFYDLTGNRSDTVTINSDGWGEFKVNGGSVSVWVPRKTTVSTIARP

SEQ ID NO: 18015 - protein, 491 aa, Geobacillus stearothermophilus
AAPFNGTMMQYFEWYLPDDGTLWTKVANEANNLSSLGITALWLPPAYKGTSRSDVGYGAYDLYDLGEFNQKGTVRTKYGTKAQYLQAIQAAHAAGMQVYADVVFDHKGGADGTEWVDAVEVNPSDRNQVISGTYQIQAWTKFDFPGRGNTYSSFKWRWYHFDGVDWDESRKLSRIYLFEGKAWDWEVDTEFGNYDYLMYADLDMDHPEVTTELKNWGKWYVNTTNIDGFRLDAVKHIKFSFFPDWLSYVRSSTGKPLFTVGEYWSGDINKLHNYITKTDGTVSLFDAPLHYKFYNASKSGGAFDMRTLMTNTLMKDQPTLAVTFVDNHDTEPGQALQSWVDPWFKPLAYAFILTRQEGYPCVFYGDYYGIPQYNIPSLKSKIDPLLIARRDYAYGTQHDYLDHWDIIGWTREGGTEKPGSGLAALITDGPGGSKWMYVGKQHAGKVFYDLTGNRSDTVTINSDGWGEFKVNGGSVSVWVPRKTTVSTIARP

SEQ ID NO: 18016 - protein, 491 aa, Geobacillus stearothermophilus
AAPFNGTMMQYFEWYLPDDGTLWTKVANEANNLSSLGITALWLPPAYKGTSRSDVGYGAYDLYDLGEFNQKGTVRTKYGTKAQYLQAIQAAHAAGMQVYADVVFDHKGGADGTEWVDAVEVNPSDRNQVISGTYQIQAWTKFDFPGRGNTYSSFKWRWYHFDGVDWDESRKLSRIYLFEGKAWDWEVDTEFGNYDYLMYADLDMDHPEVTTELKNWGKWYVNTTNIDGFRLDAVKHIKFSFFPDWLSYVRSSTGKPLFTVGEYWSGDINKLHNYITKTDGTVSLFDAPLHYKFYNASKSGGAFDMRTLMTNTLMKDQATLAVTFVDNHDTEPGQALQSWVDPWFKPLAYAFILTRQEGYPCVFYGDYYGIPQYNIPSLKSKIDPLLIARRDYAYGTQHDYLDHSDIIGWTREGGTEKPGSGLAALITDGPGGSKWMYVGKQHAGKVFYDLTGNRSDTVTINSDGWGEFKVNGGSVSVWVPRKTTVSTIARP

SEQ ID NO: 18017 - protein, 491 aa, Geobacillus stearothermophilus
AAPFNGTMMQYFEWYLPDDGTLWTKVANEANNLSSLGITALWLPPAYKGTSRSDVGYGAYDLYDLGEFNQKGTVRTKYGTKAQYLQAIQAIHAAGMQVYADVVFDHKGGADGTEWVDAVEVNPSDRNQVISGTYQIQAWTKFDFPGRGNTYSSFKWRWYHFDGVDWDESRKLSRIYLFEGKAWDWEVDTEFGNYDYLMYADLDMDHPEVTTELKNWGKWYVNTTNIDGFRLDAVKHIKFSFFPDWLSYVRSSTGKPLFTVGEYWSGDINKLHNYITKTDGTVSLFDAPLHYKFYNASKSGGAFDMRTLMTNTLMKDQPTLAVTFVDNHDTEPGQALQSWVDPWFKPLAYAFILTRQEGYPCVFYGDYYGIPQYNIPSLKSKIDPLLIARRDYAYGTQHDYLDHSDIIGWTREGGTEKPGSGLAALITDGPGGSKWMYVGKQHAGKVFYDLTGNRSDTVTINSDGWGEFKVNGGSVSVWVPRKTTVSTIARP

SEQ ID NO: 18018 - protein, 491 aa, Geobacillus stearothermophilus
AAPFNGTMMQYFEWYLPDDGTLWTKVANEANNLSSLGITALWLPPAYKGTSRSDVGYGAYDLYDLGEFNQKGTVRTKYGTKAQYLQAIQAAHAAGMQVYADVVFDHKGGADGTEWVDAVEVNPSDRNQVISGTYQIQAWTKFDFPGRGNTYSSFKWRWYHFDGVDWDESRKLSRIYLFEGKAWDWEVDTEFGNYDYLMYADLDMDHPEVITELKNWGKWYVNTTNIDGFRLDAVKHIKFSFFPDWLSYVRSSTGKPLFTVGEYWSGDINKLHNYITKTDGTVSLFDAPLHYKFYNASKSGGAFDMRTLMTNTLMKDQPTLAVTFVDNHDTEPGQALQSWVDPWFKPLAYAFILTRQEGYPCVFYGDYYGIPQYNIPSLKSKIDPLLIARRDYAYGTQHDYLDHSDIIGWTREGGTEKPGSGLAALITDGPGGSKWMYVGKQHAGKVFYDLTGNRSDTVTINSDGWGEFKVNGGSVSVWVPRKTTVSTIARP

SEQ ID NO: 18019 - protein, 491 aa, Geobacillus stearothermophilus
AAPFNGTMMQYFEWYLPDDGTLWTKVANEANNLSSLGITALWLPPAYKGTSRSDVGYGAYDLYDLGEFNQKGTVRTKYGTKAQYLQAIQAAHAAGMQVYADVVFDHKGGADGTEWVDAVEVNPSDRNQVISGPYQIQAWTKFDFPGRGNTYSSFKWRWYHFDGVDWDESRKLSRIYLFGGKAWDWEVDTEFGNYDYLMYADLDMDHPEVTTELKNWGKWYVNTTNIDGFRLDAVKHIKFSFFPDWLSYVRSSTGKPLFTVGEYWSGDINKLHNYITKTDGTVSLFDAPLHYKFYNASKSGGAFDMRTLMTNTLMKDQPTLAVTFVDNHDTEPGQALQSWVDPWFKPLAYAFILTRQEGYPCVFYGDYYGIPQYNIPSLKSKIDPLLIARRDYAYGTQHDYLDHSDIIGWTREGGTEKPGSGLAALITDGPGGSKWMYVGKQHAGKVFYDLTGNRSDTVTINSDGWGEFKVNGGSVSVWVPRKTTVSTIARP

SEQ ID NO: 18020 - protein, 491 aa, Geobacillus stearothermophilus
AAPFNGTMMQYFEWYLPDDGTLWTKVANEANNLSSLGITALWLPPAYKGTSRSDVGYGAYDLYDLGEFNQKGTVRTKYGTKAQYLQAIQAAHAAGMQVYADVVFDHKGGADGTEWVDAVEVNPSDRNQVISGTYQIQAWTKFDFPGRGNTYSSFKWRWYHFDGVDWDESRKLSRIYLFEGKAWDWEVDTEFGNYDYLMYADLDMDHPEVTTELKNWGKWYVNTTNIDGFRLDAVKHIKFSFFPDWLSYVRSSTGKELFTVGEYWSGDINKLHNYITKTDGTVSLFDAPLHYKFYNASKSGGAFDMRTLMTNTLMKDQPTLAVTFVDNHDTEPGQALQSWVDPWFKPLAYAFILTRQEGYPCVFYGDYYGIPQYNIPSLKSKIDPLLIARRDYAYGTQHDYLDHSDIIGWTREGGTEKPGSGLAALITDGPGGSKWMYVGKQHAGKVFYDLTGNRSDTVTINSDGWGEFKVNGGSVSVWVPRKTTVSTIARP

SEQ ID NO: 18021 - protein, 491 aa, Geobacillus stearothermophilus
AAPFNGTMMQYFEWYLPDDGQLWTKVANEANNLSSLGITALWLPPAYKGTSRSDVGYGAYDLYDLGEFNQKGTVRTKYGTKAQYLQAIQAAHAAGMQVYADVVFDHKGGADGTEWVDAVEVNPSDRNQVISGTYQIQAWTKFDFPGRGNTYSSFKWRWYHFDGVDWDESRKLSRIYLFEGKAWDWEVDTEFGNYDYLMYADLDMDHPEVTTELKNWGKWYVNTTNIDGFRLDAVKHIKFSFFPDWLSYVRSSTGKPLFTVGEYWSGDINKLHNYITKTDGTVSLFDAPLHYKFYNASKSGGAFDMRTLMTNTLMKDQPTLAVTFVDNHDTEPGQALQSWVDPWFKPLAYAFILTRQEGYPCVFYGDYYGIPQYNIPSLKSKIDPLLIARRDYAYGTQHDYLDHSDIIGWTREGGTEKPGSGLAALITDGPGGSKWMYVGKQHAGKVFYDLTGNRSDTVTINSDGWGEFKVNGGSVSVWVPRKTTVSTIARP

SEQ ID NO: 18022 - protein, 491 aa, Geobacillus stearothermophilus
AAPFNGTMMQYFEWYLPDDGTLWTKVANEANNLSSLGITALWLPPAYKGTSRSDVGYGAYDLYDLGEFNQKGTVRTKYGTKAQYLQAIQAAHAAGMQVYADVVFDHKGGADGTEWVDAVEVNPSDRNQVISGTYQIQAWTKFDFPGRGNTYSSFKWRWYHFDGVDWDESRKLNRIYLFEGKAWDWEVDTEFGNYDYLMYADLDMDHPEVTTELKNWGKWYVNTTNIDGFRLDAVKHIKFSFFPDWLSYVRSSTGKPLFTVGEYWSGDINKLHNYITKTDGTVSLFDAPLHYKFYNASKSGGAFDMRTLMTNTLMKDQPTLAVTFVDNHDTEPGQALQSWVDPWFKPLAYAFILTRQEGYPCVFYGDYYGIPQYNIPSLKSKIDPLLIARRDYAYGTQHDYLDHSDIIGWTREGGTEKPGSGLAALITDGPGGSKWMYVGKQHAGKVFYDLTGNRSDTVTINSDGWGEFKVNGGSVSVWVPRKTTVSTIARP

SEQ ID NO: 18023 - protein, 491 aa, Geobacillus stearothermophilus
AAPFNGTMMQYFEWYLPDDGTLWTKVANEANNLSSLGITALWLPPAYKGTSRSDVGYGAYDLYDLGEFNQKGTVRTKYGTKAQYLQAIQAAHAAGMQVYADVVFDHKGGADGTEWVDAVEVNPSDRNQVISGTYQIQAWTHFDFPGRGNTYSSFKWRWYHFDGVDWDESRKLSRIYLFEGKAWDWEVDTEFGNYDYLMYADLDMDHPEVTTELKNWGKWYVNTTNIDGFRLDAVKHIKFSFFPDWLSYVRSSTGKPLFTVGEYWSGDINKLHNYITKTDGTVSLFDAPLHYKFYNASKSGGAFDMRTLMTNTLMKDQPTLAVTFVDNHDTEPGQALQSWVDPWFKPLAYAFILTRQEGYPCVFYGDYYGIPQYNIPSLKSKIDPLLIARRDYAYGTQHDYLDHSDIIGWTREGGTEKPGSGLAALITDGPGGSKWMYVGKQHAGKVFYDLTGNRSDTVTINSDGWGEFKVNGGSVSVWVPRKTTVSTIARP

SEQ ID NO: 18024 - protein, 491 aa, Geobacillus stearothermophilus
AAPFNGTMMQYFEWYLPDDGTLWTKVANEANNLSSQGITALWLPPAYKGTSRSDVGYGAYDLYDLGEFNQKGTVRTKYGTKAQYLQAIQAAHAAGMQVYADVVFDHKGGADGTEWVDAVEVNPSDRNQVISGTYQIQAWTKFDFPGRGNTYSSFKWRWYHFDGVDWDESRKLSRIYLFEGKAWDWEVDTEFGNYDYLMYADLDMDHPEVTTELKNWGKWYVNTTNIDGFRLDAVKHIKFSFFPDWLSYVRSSTGKPLFTVGEYWSGDINKLHNYITKTDGTVSLFDAPLHYKFYNASKSGGAFDMRTLMTNTLMKDQPTLAVTFVDNHDTEPGQALQSWVDPWFKPLAYAFILTRQEGYPCVFYGDYYGIPQYNIPSLKSKIDPLLIARRDYAYGTQHDYLDHSDIIGWTREGGTEKPGSGLAALITDGPGGSKWMYVGKQHAGKVFYDLTGNRSDTVTINSDGWGEFKVNGGSVSVWVPRKTTVSTIARP

SEQ ID NO: 18025 - protein, 488 aa, Geobacillus stearothermophilus
AAPFNGTMMQYFEWYLPDDGTLWTKVANEANNLSSLGITALWLPPAYKGTSRSDVGYGVYDLYDLGEFNQKGTVRTKYGTKAQYLQAIQAAHAAGMEVYADVVFDHKGGADGTEWVDAVEVNPSDRNQEISGTYQIQAWTKFDFPGRGNTYSSFKWRWYHFDGVDWDESRKLSRIYKFRGIGKAWDWEVDTENGNYDYLMYADLDMDHPEVVTELKNWGKWYVNTTNIDGFRLDAVKHIKFQFFPDWLSYVRSQTGKPLFTVGEYWSYDINKLHNYITKTNGTMSLFDAPLHNKFYTASKSGGAFDMRTLMTNTLMKDEPTLAVTFVDNHDTEPGQALQSWVDPWFKPLAYAFILTRQEGYPCVFYGDYYGIPQYNIPSLKSKIDPLLIARRDYAYGTQHDYLDHSDIIGWTREGVTEKPGSGLAALITDGPGGSKWMYVGKRHAGKVFYDLTGNRSDTVTINSDGWGEFKVNGGSVSVWVPRKTTVS

SEQ ID NO: 18026 - protein, 486 aa, Geobacillus stearothermophilus
AAPFNGTMMQYFEWYLPDDGTLWTKVANEANNLSSLGITALWLPPAYKGTSRSDVGYGVYDLYDLGEFNQKGTVRTKYGTKAQYLQAIQAAHAAGMQVYADVVFDHKGGADGTEWVDAVEVNPSDRNQVISGTYQIQAWTKFDFPGRGNTYSSFKWRWYHFDGVDWDESRKLSRIYLFEGKAWDWEVDTEFGNYDYLMYADLDMDHPEVVTELKNWGPWYVLTTNIDGFRLDAVKHIKFSFFPDWLSYVRSSTGKPLFTVGEYWSYDINKLHNYITKTDGTTSLFDAPLHNKFYTASKSGGAFDMRTLMTNTLMKDQPTLAVTFVDNHDTEPGQALQSWVDPWFKPLAYAFILTRQEGYPCVFYGDYYGIPQYNIPSLKSKIDPLLIARRDYAYGTQHDYLDHSDIIGWTREGGTEKPGSGLAALITDGPGGSKWMYVGKQHAGKVFYDLTGNRSDTVTINSDGWGEFKVNGGSVSVWVPRKTTVS

SEQ ID NO: 18027 - protein, 486 aa, Geobacillus stearothermophilus
AAPFNGTMMQYFEWYLPDDGTLWTKVANEANNLSSLGITALWLPPAYKGTSRSDVGYGAYDLYDLGEFNQKGTVRTKYGTKAQYLQAIQAAHAAGMQVYADVVFDHKGGADGTEWVDAVEVNPSDRNQVISGTYQIQAWTKFDFPGRGNTYSSFKWRWYHFDGVDWDESRKLSRIYLFEGKAWDWEVDTEFGNYDYLMYADLDMDHPEVTTELKNWGKWYVNTTNIDGFRLDAVKHIKFSFFPDWLSYVRSSTGKPLFTVGEYWSYDINKLHNYITKTDGTVSLFDAPLHNKFYTASKSGGAFDMRTLMTNTLMKDQPTLAVTFVDNHDTEPGQALQSWVDPWFKPLAYAFILTRQEGYPCVFYGDYYGIPQYNIPSLKSKIDPLLIARRDYAYGTQHDYLDHSDIIGWTREGGTEKPGSGLAALITDGPGGSKWMYVGKQHAGKVFYDLTGNRSDTVTINSDGWGEFKVNGGSVSVWVPRKTTVS

SEQ ID NO: 18028 - protein, 488 aa, Geobacillus stearothermophilus
AAPFNGTMMQYFEWYLPDDGTLWTKVANEANNLSSLGITALWLPPAYKGTSRSDVGYGVYDLYDLGEFNQKGTVRTKYGTKAQYLQAIQAAHAAGMEVYADVVFDHKGGADGTEWVDAVEVNPSDRNQEISGTYQIQAWTKFDFPGRGNTYSSFKWRWYHFDGVDWDESRKLSRIYKFRGIGKAWDWEVDTENGNYDYLMYADLDMDHPEVVTELKNWGKWYVNTTNIDGFRLDAVKHIKFSFFPDWLSYVRSQTGKPLFTVGEYWSYDINKLHNYITKTNGTMSLFDAPLHNKFYTASKSGGAFDMRTLMTNTLMKDRPTLAVTFVDNHDTEPGQALQSWVDPWFKPLAYAFILTRREGYPCVFYGDYYGIPQYNIPSLKSKIDPLLIARRDYAYGTQHDYLDHSDIIGWTREGVTEKPGSGLAALITDGPGGSKWMYVGKEHAGKVFYDLTGNRSDTVTINSDGWGEFKVNGGSVSVWVPRKTTVS

SEQ ID NO: 18029 - protein, 488 aa, Geobacillus stearothermophilus
AAPFNGTMMQYFEWYLPDDGTLWTKVANEANNLSSLGITALWLPPAYKGTSRSDVGYGVYDLYDLGEFNQKGAVRTKYGTKAQYLQAIQAAHAAGMQVYADVVFDHKGGADGTEWVDAVEVNPSDRNQEISGTYQIQAWTKFDFPGRGNTYSSFKWRWYHFDGVDWDESRKLSRIYKFRGIGKAWDWEVDTENGNYDYLMYADLDMDHPEVVTELKSWGKWYVNTTNIDGFRLDAVKHIKFSFFPDWLSYVRSQTGKPLFTVGEYWSYDINKLHNYIMKTNGTMSLFDAPLHNKFYTASKSGGTFDMRTLMTNTLMKDQPTLAVTFVDNHDTEPGQALQSWVDPWFKPLAYAFILTRQEGYPCVFYGDYYGIPQYNIPSLKSKIDPLLIARRDYAYGTQHDYLDHSDIIGWTREGVTEKPGSGLAALITDGPGGSKWMYVGKQHAGKVFYDLTGNRSDTVTINSDGWGEFKVNGGSVSVWVPRKTTVS

SEQ ID NO: 18030 - protein, 488 aa, Geobacillus stearothermophilus
AAPFNGTMMQYFEWYLPDDGTLWTKVANEANNLSSLGITALWLPPAYKGTSRSDVGYGVYDLYDLGEFNQKGTVRTKYGTKAQYLQAIQAAHAAGMEVYADVVFDHKGGADGTEWVDAVEVNPSDRNQEISGTYQIQAWTKFDFPGRGNTYSSFKWRWYHFDGVDWDESRKLSRIYKFRGIGKAWDWEVDTENGNYDYLMYADLDMDHPEVVTELKNWGKWYVNTTNIDGFRLDAVKHIKFSFFPDWLSYVRSQTGKPLFTVGEYWSYDINKLHNYITKTNGTMSLFDAPLHNKFYTASKSGGAFDMRTLMTNTLMKDRPTLAVTFVDNHDTEPGQALQSWVDPWFKPLAYAFILTRREGYPCVFYGDYYGIPQYNIPSLKSKIDPLLIARRDYAYGTQHDYLDHSDIIGWTREGVTEKPGSGLAALITDGPGGSKWMYVGKRHAGKVFYDLTGNRSDTVTINSDGWGEFKVNGGSVSVWVPRKTTVS

SEQ ID NO: 18031 - protein, 488 aa, Geobacillus stearothermophilus
AAPFNGTMMQYFEWYLPDDGTLWTKVANEANNLSSLGITALWLPPAYKGTSRSDVGYGVYDLYDLGEFNQKGTVRTKYGTKAQYLQAIQAAHAAGMRVYADVVFDHKGGADGTEWVDAVEVNPSDRNQEISGTYQIQAWTKFDFPGRGNTYSSFKWRWYHFDGVDWDESRKLSRIYKFRGIGKAWDWEVDTENGNYDYLMYADLDMDHPEVVTELKNWGKWYVNTTNIDGFRLDAVKHIKFQFFPDWLSYVRSQTGKPLFTVGEYWSYDINKLHNYITKTNGTMSLFDAPLHNKFYTASKSGGAFDMRTLMTNTLMKDEPTLAVTFVDNHDTEPGQALQSWVDPWFKPLAYAFILTRREGYPCVFYGDYYGIPQYNIPSLKSKIDPLLIARRDYAYGTQHDYLDHSDIIGWTREGVTEKPGSGLAALITDGPGGSKWMYVGKQHAGKVFYDLTGNRSDTVTINSDGWGEFKVNGGSVSVWVPRKTTVS

SEQ ID NO: 18032 - protein, 488 aa, Geobacillus stearothermophilus
AAPFNGTMMQYFEWYLPDDGTLWTKVANEANNLSSLGITALWLPPAYKGTSRSDVGYGVYDLYDLGEFNQKGTVRTKYGTKAQYLQAIQAAHAAGMRVYADVVFDHKGGADGTEWVDAVEVNPSDRNQEISGTYQIQAWTKFDFPGRGNTYSSFKWRWYHFDGVDWDESRKLSRIYKFRGIGKAWDWEVDTENGNYDYLMYADLDMDHPEVVTELKNWGKWYVNTTNIDGFRLDAVKHIKFQFFPDWLSYVRSQTGKPLFTVGEYWSYDINKLHNYITKTNGTMSLFDAPLHNKFYTASKSGGAFDMRTLMTNTLMKDRPTLAVTFVDNHDTEPGQALQSWVDPWFKPLAYAFILTRQEGYPCVFYGDYYGIPQYNIPSLKSKIDPLLIARRDYAYGTQHDYLDHSDIIGWTREGVTEKPGSGLAALITDGPGGSKWMYVGKEHAGKVFYDLTGNRSDTVTINSDGWGEFKVNGGSVSVWVPRKTTVS

SEQ ID NO: 18033 - protein, 488 aa, Geobacillus stearothermophilus
AAPFNGTMMQYFEWYLPDDGTLWTKVANEANNLSSLGITALWLPPAYKGTSRSDVGYGVYDLYDLGEFNQKGTVRTKYGTKAQYLQAIQAAHAAGMQVYADVVFDHKGGADGTEWVDAVEVNPSDRNQEISGTYQIQAWTKFDFPGRGNTYSSFKWRWYHFDGVDWDESRKLSRIYKFRGIGKAWDWEVDTENGNYDYLMYADLDMDHPEVVTELKNWGKWYVNTTNIDGFRLDAVKHIKFQFFPDWLSYVRSQTGKPLFTVGEYWSYDINKLHNYITKTNGTMSLFDAPLHNKFYTASKSGGAFDMRTLMTNTLMKDRPTLAVTFVDNHDTEPGQALQSWVDPWFKPLAYAFILTRREGYPCVFYGDYYGIPQYNIPSLKSKIDPLLIARRDYAYGTQHDYLDHSDIIGWTREGVTEKPGSGLAALITDGPGGSKWMYVGKEHAGKVFYDLTGNRSDTVTINSDGWGEFKVNGGSVSVWVPRKTTVS

SEQ ID NO: 18034 - protein, 488 aa, Geobacillus stearothermophilus
AAPFNGTMMQYFEWYLPDDGTLWTKVANEANNLSSLGITALWLPPAYKGTSRSDVGYGVYDLYDLGEFNQKGTVRTKYGTKAQYLQAIQAAHAAGMRVYADVVFDHKGGADGTEWVDAVEVNPSDRNQEISGTYQIQAWTKFDFPGRGNTYSSFKWRWYHFDGVDWDESRKLSRIYKFRGIGKAWDWEVDTENGNYDYLMYADLDMDHPEVVTELKNWGKWYVNTTNIDGFRLDAVKHIKFQFFPDWLSYVRSQTGKPLFTVGEYWSYDINKLHNYITKTNGTMSLFDAPLHNKFYTASKSGGAFDMRTLMTNTLMKDEPTLAVTFVDNHDTEPGQALQSWVDPWFKPLAYAFILTREEGYPCVFYGDYYGIPQYNIPSLKSKIDPLLIARRDYAYGTQHDYLDHSDIIGWTREGVTEKPGSGLAALITDGPGGSKWMYVGKQHAGKVFYDLTGNRSDTVTINSDGWGEFKVNGGSVSVWVPRKTTVS

SEQ ID NO: 18035 - protein, 488 aa, Geobacillus stearothermophilus
AAPFNGTMMQYFEWYLPDDGTLWTKVANEANNLSSLGITALWLPPAYKGTSRSDVGYGVYDLYDLGEFNQKGTVRTKYGTKAQYLQAIQAAHAAGMEVYADVVFDHKGGADGTEWVDAVEVNPSDRNQEISGTYQIQAWTKFDFPGRGNTYSSFKWRWYHFDGVDWDESRKLSRIYKFRGIGKAWDWEVDTENGNYDYLMYADLDMDHPEVVTELKNWGKWYVNTTNIDGFRLDAVKHIKFQFFPDWLSYVRSQTGKPLFTVGEYWSYDINKLHNYITKTNGTMSLFDAPLHNKFYTASKSGGAFDMRTLMTNTLMKDQPTLAVTFVDNHDTEPGQALQSWVDPWFKPLAYAFILTRREGYPCVFYGDYYGIPQYNIPSLKSKIDPLLIARRDYAYGTQHDYLDHSDIIGWTREGVTEKPGSGLAALITDGPGGSKWMYVGKEHAGKVFYDLTGNRSDTVTINSDGWGEFKVNGGSVSVWVPRKTTVS

SEQ ID NO: 18036 - protein, 488 aa, Geobacillus stearothermophilus
AAPFNGTMMQYFEWYLPDDGTLWTKVANEANNLSSLGITALWLPPAYKGTSRSDVGYGVYDLYDLGEFNQKGTVRTKYGTKAQYLQAIQAAHAAGMQVYADVVFNHKGGADGTEWVDAVEVNPSDRNQEISGTYQIQAWTKFDFPGRGNTYSSFKWRWYHFNGVDWDESRKLSRIYKFRGIGKAWNWEVDTENGNYDYLMYANLDYNHPEVVTELKNWGKWYVNTTNIDGFRLDAVKHIKFSFFPDWLSYVRSQTGKPLFTVGEYWSYDINKLHNYITKTDGTMSLFDAPLHNKFYTASKSGGAFDMRTLMTNTLMKDQPTLAVTFVDNHDTEPGQALQSWVDPWFKPLAYAFILTRQEGYPCVFYGDYYGIPQYNIPSLKSKIDPLLIARRDYAYGTQHDYLDHSDIIGWTREGGTEKPGSGLAALITDGPGGSKWMYVGKQHAGKVFYDLTGNRSDTVTINSDGWGEFKVNGGSVSVWVPRKTTVS

SEQ ID NO: 18037 - protein, 486 aa, Geobacillus stearothermophilus
AAPFNGTMMQYFEWYLPDDGTLWTKVANEANNLSSLGITALWLPPAYKGTSRSDVGYGVYDLYDLGEFNQKGTVRTKYGTKAQYLQAIQAAHAAGMQVYADVVFDHKGGADGTEWVDAVEVNPSDRNQVISGTYQIQAWTKFDFPGRGNTYSSFKWRWYHFDGVDWDESRKLSRIYLFEGKAWDWEVDTEFGNYDYLMYADLDMDHPEVVTELKNWGPWYVLTTNIDGFRLDAVKHIKFQFFPDWLSYVRSSTGKPLFTVGEYWSYDINKLHNYITKTDGTMSLFDAPLHNKFYTASKSGGAFDMRTLMTNTLMKDQPTLAVTFVDNHDTEPGQALQSWVDPWFKPLAYAFILTRQEGYPCVFYGDYYGIPQYNIPSLKSKIDPLLIARRDYAYGTQHDYLDHSDIIGWTREGGTEKPGSGLAALITDGPGGSKWMYVGKQHAGKVFYDLTGNRSDTVTINSDGWGEFKVNGGSVSVWVPRKTTVS

SEQ ID NO: 18038 - protein, 488 aa, Geobacillus stearothermophilus
AAPFNGTMMQYFEWYLPDDGTLWTKVANEANNLSSLGITALWLPPAYKGTSRSDVGYGVYDLYDLGEFNQKGTVRTKYGTKAQYLQAIQAAHAAGMEVYADVVFDHKGGADGTEWVDAVEVNPSDRNQEISGTYQIQAWTKFDFPGRGNTYSSFKWRWYHFDGVDWDESRKLSRIYKFRGIGKAWDWEVDTENGNYDYLMYADLDMDHPEVVTELKNWGKWYVNTTNIDGFRLDAVKHIKFQFFPDWLSYVRSQTGKPLFTVGEYWSYDINKLHNYITKTNGTMSLFDAPLHNKFYTASKSGGAFDMRTLMTNTLMKDQPTLAVTFVDNHDTEPGQALQSWVDPWFKPLAYAFILTREEGYPCVFYGDYYGIPQYNIPSLKSKIDPLLIARRDYAYGTQHDYLDHSDIIGWTREGVTEKPGSGLAALITDGPGGSKWMYVGKRHAGKVFYDLTGNRSDTVTINSDGWGEFKVNGGSVSVWVPRKTTVS

SEQ ID NO: 18039 - protein, 488 aa, Geobacillus stearothermophilus
AAPFNGTMMQYFEWYLPDDGTLWTKVANEANNLSSLGITALWLPPAYKGTSRSDVGYGVYDLYDLGEFNQKGTVRTKYGTKAQYLQAIQAAHAAGMEVYADVVFDHKGGADGTEWVDAVEVNPSDRNQEISGTYQIQAWTKFDFPGRGNTYSSFKWRWYHFDGVDWDESRKLSRIYKFRGIGKAWDWEVDTENGNYDYLMYADLDMDHPEVVTELKNWGKWYVNTTNIDGFRLDAVKHIKFQFFPDWLSYVRSQTGKPLFTVGEYWSYDINKLHNYITKTNGTMSLFDAPLHNKFYTASKSGGAFDMRTLMTNTLMKDRPTLAVTFVDNHDTEPGQALQSWVDPWFKPLAYAFILTREEGYPCVFYGDYYGIPQYNIPSLKSKIDPLLIARRDYAYGTQHDYLDHSDIIGWTREGVTEKPGSGLAALITDGPGGSKWMYVGKQHAGKVFYDLTGNRSDTVTINSDGWGEFKVNGGSVSVWVPRKTTVS

SEQ ID NO: 18040 - protein, 488 aa, Geobacillus stearothermophilus
AAPFNGTMMQYFEWYLPDDGTLWTKVANEANNLSSLGITALWLPPAYKGTSRSDVGYGVYDLYDLGEFNQKGTVRTKYGTKAQYLQAIQAAHAAGMQVYADVVFDHKGGADGTEWVDAVEVNPSDRNQEISGTYQIQAWTKFDFPGRGNTYSSFKWRWYHFNGVDWDESRKLSRIYKFRGIGKKWNEEVDTENGNYDYLMYANLDMNHPEVVTELKNWGKWYVNTTNIDGFRLDAVKHIKFSFFPDWLSYVRSQTGKPLFTVGEYWSYDINKLHNYITKTDGTMSLFDAPLHNKFYTASKSGGAFDMRTLMTNTLMKDQPTLAVTFVDNHDTEPGQALQSWVDPWFKPLAYAFILTRQEGYPCVFYGDYYGIPQYNIPSLKSKIDPLLIARRDYAYGTQHDYLDHSDIIGWTREGGTEKPGSGLAALITDGPGGSKWMYVGKQHAGKVFYDLTGNRSDTVTINSDGWGEFKVNGGSVSVWVPRKTTVS

SEQ ID NO: 18041 - protein, 488 aa, Geobacillus stearothermophilus
AAPFNGTMMQYFEWYLPDDGTLWTKVANEANNLSSLGITALWLPPAYKGTSRSDVGYGVYDLYDLGEFNQKGTVRTKYGTKAQYLQAIQAAHAAGMRVYADVVFDHKGGADGTEWVDAVEVNPSDRNQEISGTYQIQAWTKFDFPGRGNTYSSFKWRWYHFDGVDWDESRKLSRIYKFRGIGKAWDWEVDTENGNYDYLMYADLDMDHPEVVTELKNWGKWYVNTTNIDGFRLDAVKHIKFQFFPDWLSYVRSQTGKPLFTVGEYWSYDINKLHNYITKTNGTMSLFDAPLHNKFYTASKSGGAFDMRTLMTNTLMKDEPTLAVTFVDNHDTEPGQALQSWVDPWFKPLAYAFILTRQEGYPCVFYGDYYGIPQYNIPSLKSKIDPLLIARRDYAYGTQHDYLDHSDIIGWTREGVTEKPGSGLAALITDGPGGSKWMYVGKEHAGKVFYDLTGNRSDTVTINSDGWGEFKVNGGSVSVWVPRKTTVS

SEQ ID NO: 18042 - protein, 488 aa, Geobacillus stearothermophilus
AAPFNGTMMQYFEWYLPDDGTLWTKVANEANNLSSLGITALWLPPAYKGTSRSDVGYGVYDLYDLGEFNQKGTVRTKYGTKAQYLQAIQAAHAAGMRVYADVVFDHKGGADGTEWVDAVEVNPSDRNQEISGTYQIQAWTKFDFPGRGNTYSSFKWRWYHFDGVDWDESRKLSRIYKFRGIGKAWDWEVDTENGNYDYLMYADLDMDHPEVVTELKNWGKWYVNTTNIDGFRLDAVKHIKFSFFPDWLSYVRSQTGKPLFTVGEYWSYDINKLHNYITKTNGTMSLFDAPLHNKFYTASKSGGAFDMRTLMTNTLMKDRPTLAVTFVDNHDTEPGQALQSWVDPWFKPLAYAFILTRREGYPCVFYGDYYGIPQYNIPSLKSKIDPLLIARRDYAYGTQHDYLDHSDIIGWTREGVTEKPGSGLAALITDGPGGSKWMYVGKEHAGKVFYDLTGNRSDTVTINSDGWGEFKVNGGSVSVWVPRKTTVS

SEQ ID NO: 18043 - protein, 488 aa, Geobacillus stearothermophilus
AAPFNGTMMQYFEWYLPDDGTLWTKVANEANNLSSLGITALWLPPAYKGTSRSDVGYGVYDLYDLGEFNQKGTVRTKYGTKAQYLQAIQAAHAAGMEVYADVVFDHKGGADGTEWVDAVEVNPSDRNQEISGTYQIQAWTKFDFPGRGNTYSSFKWRWYHFDGVDWDESRKLSRIYKFRGIGKAWDWEVDTENGNYDYLMYADLDMDHPEVVTELKNWGKWYVNTTNIDGFRLDAVKHIKFQFFPDWLSYVRSQTGKPLFTVGEYWSYDINKLHNYITKTNGTMSLFDAPLHNKFYTASKSGGAFDMRTLMTNTLMKDEPTLAVTFVDNHDTEPGQALQSWVDPWFKPLAYAFILTRQEGYPCVFYGDYYGIPQYNIPSLKSKIDPLLIARRDYAYGTQHDYLDHSDIIGWTREGVTEKPGSGLAALITDGPGGSKWMYVGKEHAGKVFYDLTGNRSDTVTINSDGWGEFKVNGGSVSVWVPRKTTVS

SEQ ID NO: 18044 - protein, 486 aa, Geobacillus stearothermophilus
AAPFNGTMMQYFEWYLPDDGTLWTKVANEANNLSSLGITALWLPPAYKGTSRSDVGYGVYDLYDLGEFNQKGAVRTKYGTKAQYLQAIQAAHAAGMQVYADVVFDHKGGADGTEWVDAVEVNPSDRNQEISGTYQIQAWTKFDFPGRGNTYSSFKWRWYHFDGVDWDESRKLSRIYKFRGKAWDWEVDTEFGNYDYLMYADLDMDHPEVVTELKSWGKWYVNTTNIDGFRLDAVKHIKFSFFPDWLSDVRSQTGKPLFTVGEYWSYDINKLHNYIMKTNGTMSLFDAPLHNKFYTASKSGGTFDMRTLMTNTLMKDQPTLAVTFVDNHDTEPGQALQSWVDPWFKPLAYAFILTRQEGYPCVFYGDYYGIPQYNIPSLKSKIDPLLIARRDYAYGTQHDYLDHSDIIGWTREGVTEKPGSGLAALITDGPGGSKWMYVGKQHAGKVFYDLTGNRSDTVTINSDGWGEFKVNGGSVSVWVPRKTTVS

SEQ ID NO: 18045 - protein, 488 aa, Geobacillus stearothermophilus
AAPFNGTMMQYFEWYLPDDGTLWTKVANEANNLSSLGITALWLPPAYKGTSRSDVGYGVYDLYDLGEFNQKGTVRTKYGTKAQYLQAIQAAHAAGMEVYADVVFDHKGGADGTEWVDAVEVNPSDRNQEISGTYQIQAWTKFDFPGRGNTYSSFKWRWYHFDGVDWDESRKLSRIYKFRGIGKAWDWEVDTENGNYDYLMYADLDMDHPEVVTELKNWGKWYVNTTNIDGFRLDAVKHIKFSFFPDWLSYVRSQTGKPLFTVGEYWSYDINKLHNYITKTNGTMSLFDAPLHNKFYTASKSGGAFDMRTLMTNTLMKDEPTLAVTFVDNHDTEPGQALQSWVDPWFKPLAYAFILTRREGYPCVFYGDYYGIPQYNIPSLKSKIDPLLIARRDYAYGTQHDYLDHSDIIGWTREGVTEKPGSGLAALITDGPGGSKWMYVGKEHAGKVFYDLTGNRSDTVTINSDGWGEFKVNGGSVSVWVPRKTTVS

SEQ ID NO: 18046 - protein, 488 aa, Geobacillus stearothermophilus
AAPFNGTMMQYFEWYLPDDGTLWTKVANEANNLSSLGITALWLPPAYKGTSRSDVGYGVYDLYDLGEFNQKGTVRTKYGTKAQYLQAIQAAHAAGMRVYADVVFDHKGGADGTEWVDAVEVNPSDRNQEISGTYQIQAWTKFDFPGRGNTYSSFKWRWYHFDGVDWDESRKLSRIYKFRGIGKAWDWEVDTENGNYDYLMYADLDMDHPEVVTELKNWGKWYVNTTNIDGFRLDAVKHIKFSFFPDWLSYVRSQTGKPLFTVGEYWSYDINKLHNYITKTNGTMSLFDAPLHNKFYTASKSGGAFDMRTLMTNTLMKDEPTLAVTFVDNHDTEPGQALQSWVDPWFKPLAYAFILTRREGYPCVFYGDYYGIPQYNIPSLKSKIDPLLIARRDYAYGTQHDYLDHSDIIGWTREGVTEKPGSGLAALITDGPGGSKWMYVGKEHAGKVFYDLTGNRSDTVTINSDGWGEFKVNGGSVSVWVPRKTTVS

SEQ ID NO: 18047 - protein, 488 aa, Geobacillus stearothermophilus
AAPFNGTMMQYFEWYLPDDGTLWTKVANEANNLSSLGITALWLPPAYKGTSRSDVGYGVYDLYDLGEFNQKGTVRTKYGTKAQYLQAIQAAHAAGMRVYADVVFDHKGGADGTEWVDAVEVNPSDRNQEISGTYQIQAWTKFDFPGRGNTYSSFKWRWYHFDGVDWDESRKLSRIYKFRGIGKAWDWEVDTENGNYDYLMYADLDMDHPEVVTELKNWGKWYVNTTNIDGFRLDAVKHIKFSFFPDWLSYVRSQTGKPLFTVGEYWSYDINKLHNYITKTNGTMSLFDAPLHNKFYTASKSGGAFDMRTLMTNTLMKDRPTLAVTFVDNHDTEPGQALQSWVDPWFKPLAYAFILTREEGYPCVFYGDYYGIPQYNIPSLKSKIDPLLIARRDYAYGTQHDYLDHSDIIGWTREGVTEKPGSGLAALITDGPGGSKWMYVGKEHAGKVFYDLTGNRSDTVTINSDGWGEFKVNGGSVSVWVPRKTTVS

SEQ ID NO: 18048 - protein, 488 aa, Geobacillus stearothermophilus
AAPFNGTMMQYFEWYLPDDGTLWTKVANEANNLSSLGITALWLPPAYKGTSRSDVGYGVYDLYDLGEFNQKGTVRTKYGTKAQYLQAIQAAHAAGMEVYADVVFDHKGGADGTEWVDAVEVNPSDRNQEISGTYQIQAWTKFDFPGRGNTYSSFKWRWYHFDGVDWDESRKLSRIYKFRGIGKAWDWEVDTENGNYDYLMYADLDMDHPEVVTELKNWGKWYVNTTNIDGFRLDAVKHIKFQFFPDWLSYVRSQTGKPLFTVGEYWSYDINKLHNYITKTNGTMSLFDAPLHNKFYTASKSGGAFDMRTLMTNTLMKDQPTLAVTFVDNHDTEPGQALQSWVDPWFKPLAYAFILTRREGYPCVFYGDYYGIPQYNIPSLKSKIDPLLIARRDYAYGTQHDYLDHSDIIGWTREGVTEKPGSGLAALITDGPGGSKWMYVGKRHAGKVFYDLTGNRSDTVTINSDGWGEFKVNGGSVSVWVPRKTTVS

SEQ ID NO: 18049 - protein, 488 aa, Geobacillus stearothermophilus
AAPFNGTMMQYFEWYLPDDGTLWTKVANEANNLSSLGITALWLPPAYKGTSRSDVGYGVYDLYDLGEFNQKGTVRTKYGTKAQYLQAIQAAHAAGMRVYADVVFDHKGGADGTEWVDAVEVNPSDRNQEISGTYQIQAWTKFDFPGRGNTYSSFKWRWYHFDGVDWDESRKLSRIYKFRGIGKAWDWEVDTENGNYDYLMYADLDMDHPEVVTELKNWGKWYVNTTNIDGFRLDAVKHIKFQFFPDWLSYVRSQTGKPLFTVGEYWSYDINKLHNYITKTNGTMSLFDAPLHNKFYTASKSGGAFDMRTLMTNTLMKDRPTLAVTFVDNHDTEPGQALQSWVDPWFKPLAYAFILTREEGYPCVFYGDYYGIPQYNIPSLKSKIDPLLIARRDYAYGTQHDYLDHSDIIGWTREGVTEKPGSGLAALITDGPGGSKWMYVGKQHAGKVFYDLTGNRSDTVTINSDGWGEFKVNGGSVSVWVPRKTTVS

SEQ ID NO: 18050 - protein, 488 aa, Geobacillus stearothermophilus
AAPFNGTMMQYFEWYLPDDGTLWTKVANEANNLSSLGITALWLPPAYKGTSRSDVGYGVYDLYDLGEFNQKGTVRTKYGTKAQYLQAIQAAHAAGMRVYADVVFDHKGGADGTEWVDAVEVNPSDRNQEISGTYQIQAWTKFDFPGRGNTYSSFKWRWYHFDGVDWDESRKLSRIYKFRGIGKAWDWEVDTENGNYDYLMYADLDMDHPEVVTELKNWGKWYVNTTNIDGFRLDAVKHIKFQFFPDWLSYVRSQTGKPLFTVGEYWSYDINKLHNYITKTNGTMSLFDAPLHNKFYTASKSGGAFDMRTLMTNTLMKDRPTLAVTFVDNHDTEPGQALQSWVDPWFKPLAYAFILTRQEGYPCVFYGDYYGIPQYNIPSLKSKIDPLLIARRDYAYGTQHDYLDHSDIIGWTREGVTEKPGSGLAALITDGPGGSKWMYVGKRHAGKVFYDLTGNRSDTVTINSDGWGEFKVNGGSVSVWVPRKTTVS

SEQ ID NO: 18051 - protein, 488 aa, Geobacillus stearothermophilus
AAPFNGTMMQYFEWYLPDDGTLWTKVADEANNLSSLGITALWLPPAYKGTSRSDVGYGVYDLYDLGEFNQKGTVRTKYGTKAQYLQAIQAAHAAGMQVYADVVFDHKGGADGTEWVDAVEVNPSDRNQEISGTYQIQAWTKFDFPGRGNTYSSFKWRWYHFDGVDWDESRKLSRIYKFRGIGKAWDWEVDTENGNYDYLMYADLDMDHPEVVTELKNWGKWYVDTTNIDGFRLDAVKHIKFSFFPDWLSYVRSQTGKPLFTVGEYWSYDINKLHNYITKTNGTMSLFDAPLHNKFYTASKSGGAFDMQTLMTNTLMKDQPTLAVTFVDNHDTEPGQALQSWVDPWFKPLAYAFILTRQEGYPCVFYGDYYGIPQYNIPSLKSKIDPLLIARRDYAYGTQHDYLDHSDIIGWTREGVTEKPGSGLAALITDGPGGSKWMYVGKQHAGKVFYDLTGNRSDTVTINSDGWGEFKVNGGSVSVWVPQKTTVS

SEQ ID NO: 18052 - protein, 488 aa, Geobacillus stearothermophilus
AAPFNGTMMQYFEWYLPDDGTLWTKVANEANNLSSLGITALWLPPAYKGTSRSDVGYGVYDLYDLGEFNQKGTVRTKYGTKAQYLQAIQAAHAAGMQVYADVVFDHKGGADGTEWVDAVEVNPSDRNQVISGTYQIQAWTKFDFPGRGNTYSSFKWRWYHFDGVDWDESRKLSRIYLFEGIGKAWDWEVDTENGNYDYLMYADLDMDHPEVVTELKNWGKWYVNTTNIDGFRLDAVKHIKFQFFPDWLSYVRSQTGKPLFTVGEYWSYDINKLHNYITKTNGTMSLFDAPLHNKFYTASKSGGAFDMRTLMTNTLMKDQPTLAVTFVDNHDTEPGQALQSWVDPWFKPLAYAFILTRQEGYPCVFYGDYYGIPQYNIPSLKSKIDPLLIARRDYAYGTQHDYLDHSDIIGWTREGVTEKPGSGLAALITDGPGGSKWMYVGKQHAGKVFYDLTGNRSDTVTINSDGWGEFKVNGGSVSVWVPRKTTVS

SEQ ID NO: 18053 - protein, 488 aa, Geobacillus stearothermophilus
AAPFNGTMMQYFEWYLPDDGTLWTKVAREANNLSSLGITALWLPPAYKGTSRSDVGYGVYDLYDLGEFNQKGTVRTKYGTKAQYLQAIQAAHAAGMQVYADVVFDHKGGADGTEWVDAVEVNPSDRNQEISGTYQIQAWTKFDFPGRGNTYSSFKWRWYHFDGVDWDESRKLSRIYKFRGIGKAWDWEVDTENGNYDYLMYADLDMDHPEVVTELKNWGKWYVRTTNIDGFRLDAVKHIKFSFFPDWLSYVRSQTGKPLFTVGEYWSYDINKLHNYITKTNGTMSLFDAPLHNKFYTASKSGGAFNMRTLMTNTLMKNQPTLAVTFVDNHDTEPGQALQSWVDPWFKPLAYAFILTRQEGYPCVFYGDYYGIPQYNIPSLKSKIDPLLIARRDYAYGTQHDYLDHSDIIGWTREGVTEKPGSGLAALITDGPGGSKWMYVGKQHAGKVFYDLTGNRSDTVTINSDGWGEFKVNGGSVSVWVPRKTTVS

SEQ ID NO: 18054 - protein, 488 aa, Geobacillus stearothermophilus
AAPFNGTMMQYFEWYLPDDGTLWTKVANEANNLSSLGITALWLPPAYKGTSRSDVGYGVYDLYDLGEFNQKGSVRTKYGTKAQYLQAIQAAHAAGMQVYADVVFDHKGGADGTEWVDAVEVNPSDRNQEISGTYQIQAWTKFDFNGRGNTYSSFKWRWYHFDGVDWDESRKLSRIYKFRGIGKAWDWEVDTENGNYDYLMYADLDMDHPEVVTELKNWGKWYVNTTNIDGFRLDAVKHIKFSFFPDWLSYVRSQTGKPLFTVGEYWSYDINKLHNYITKTNGTMSLFDAPLHNKFYTASKSGGAFDMSTLMNNTLMKDQPTLAVTFVDNHDTEPGQALQSWVDPWFKPLAYAFILTRQEGYPCVFYGDYYGIPQYNIPSLKSKIDPLLIARRDYAYGTQHDYLDHSDIIGWTREGVTEKPGSGLAALITDGPGGSKWMYVGKQHAGKVFYDLTGNRSDTVTINSDGWGEFKVNGGSVSVWVPRKTTVS

SEQ ID NO: 18055 - protein, 488 aa, Geobacillus stearothermophilus
AAPFNGTMMQYFEWYLPDDGTLWTKVANEANNLSSLGITALWLPPAYKGTSRSDVGYGVYDLYDLGEFNQKGTVRTKYGTKAQYLQAIQAAHAAGMRVYADVVFDHKGGADGTEWVDAVEVNPSDRNQEISGTYQIQAWTKFDFPGRGNTYSSFKWRWYHFDGVDWDESRKLSRIYKFRGIGKAWDWEVDTENGNYDYLMYADLDMDHPEVVTELKNWGKWYVNTTNIDGFRLDAVKHIKFQFFPDWLSYVRSQTGKPLFTVGEYWSYDINKLHNYITKTNGTMSLFDAPLHNKFYTASKSGGAFDMRTLMTNTLMKDEPTLAVTFVDNHDTEPGQALQSWVDPWFKPLAYAFILTRQEGYPCVFYGDYYGIPQYNIPSLKSKIDPLLIARRDYAYGTQHDYLDHSDIIGWTREGVTEKPGSGLAALITDGPGGSKWMYVGKRHAGKVFYDLTGNRSDTVTINSDGWGEFKVNGGSVSVWVPRKTTVS

SEQ ID NO: 18056 - protein, 488 aa, Geobacillus stearothermophilus
AAPFNGTMMQYFEWYLPDDGTLWTKVANEANNLSSLGITALWLPPAYKGTSRSDVGYGVYDLYDLGEFNQKGTVRTKYGTKAQYLQAIQAAHAAGMQVYADVVFDHKGGADGTEWVDAVEVNPSDRNQEISGTYQIQAWTKFDFPGRGNTYSSFKWRWYHFDGVDWDESRKLSRIYKFRGIGKAWDWEVDTENGNYDYLMYADLDMDHPEVVTELKNWGKWYVNTTNIDGFRLDAVKHIKFQFFPDWLSYVRSQTGKPLFTVGEYWSYDINKLHNYITKTNGTMSLFDAPLHNKFYTASKSGGAFDMRTLMTNTLMKDEPTLAVTFVDNHDTEPGQALQSWVDPWFKPLAYAFILTRREGYPCVFYGDYYGIPQYNIPSLKSKIDPLLIARRDYAYGTQHDYLDHSDIIGWTREGVTEKPGSGLAALITDGPGGSKWMYVGKEHAGKVFYDLTGNRSDTVTINSDGWGEFKVNGGSVSVWVPRKTTVS

SEQ ID NO: 18057 - protein, 488 aa, Geobacillus stearothermophilus
AAPFNGTMMQYFEWYLPDDGTLWTKVANEANNLSSLGITALWLPPAYKGTSRSDVGYGVYDLYDLGEFNQKGTVRTKYGTKAQYLQAIQAAHAAGMEVYADVVFDHKGGADGTEWVDAVEVNPSDRNQEISGTYQIQAWTKFDFPGRGNTYSSFKWRWYHFDGVDWDESRKLSRIYKFRGIGKAWDWEVDTENGNYDYLMYADLDMDHPEVVTELKNWGKWYVNTTNIDGFRLDAVKHIKFQFFPDWLSYVRSQTGKPLFTVGEYWSYDINKLHNYITKTNGTMSLFDAPLHNKFYTASKSGGAFDMRTLMTNTLMKDQPTLAVTFVDNHDTEPGQALQSWVDPWFKPLAYAFILTREEGYPCVFYGDYYGIPQYNIPSLKSKIDPLLIARRDYAYGTQHDYLDHSDIIGWTREGVTEKPGSGLAALITDGPGGSKWMYVGKEHAGKVFYDLTGNRSDTVTINSDGWGEFKVNGGSVSVWVPRKTTVS

SEQ ID NO: 18058 - protein, 488 aa, Geobacillus stearothermophilus
AAPFNGTMMQYFEWYLPDDGTLWTKVANEANNLSSLGITALWLPPAYKGTSRSDVGYGVYDLYDLGEFNQKGTVRTKYGTKAQYLQAIQAAHAAGMRVYADVVFDHKGGADGTEWVDAVEVNPSDRNQEISGTYQIQAWTKFDFPGRGNTYSSFKWRWYHFDGVDWDESRKLSRIYKFRGIGKAWDWEVDTENGNYDYLMYADLDMDHPEVVTELKNWGKWYVNTTNIDGFRLDAVKHIKFSFFPDWLSYVRSQTGKPLFTVGEYWSYDINKLHNYITKTNGTMSLFDAPLHNKFYTASKSGGAFDMRTLMTNTLMKDEPTLAVTFVDNHDTEPGQALQSWVDPWFKPLAYAFILTREEGYPCVFYGDYYGIPQYNIPSLKSKIDPLLIARRDYAYGTQHDYLDHSDIIGWTREGVTEKPGSGLAALITDGPGGSKWMYVGKEHAGKVFYDLTGNRSDTVTINSDGWGEFKVNGGSVSVWVPRKTTVS

SEQ ID NO: 18059 - protein, 488 aa, Geobacillus stearothermophilus
AAPFNGTMMQYFEWYLPDDGTLWTKVANEANNLSSLGITALWLPPAYKGTSRSDVGYGVYDLYDLGEFNQKGTVRTKYGTKAQYLQAIQAAHAAGMQVYADVVFDHKGGADGTEWVDAVEVNPSDRNQEISGTYQIQAWTKFDFPGRGNTYSSFKWRWYHFDGVDWDESRKLSRIYKFRGIGKAWDWEVDTENGNYDYLMYADLDMDHPEVVTELKNWGKWYVNTTNIDGFRLDAVKHIKFQFFPDWLSYVRSQTGKPLFTVGEYWSYDINKLHNYITKTNGTMSLFDAPLHNKFYTASKSGGAFDMRTLMTNTLMKDEPTLAVTFVDNHDTEPGQALQSWVDPWFKPLAYAFILTREEGYPCVFYGDYYGIPQYNIPSLKSKIDPLLIARRDYAYGTQHDYLDHSDIIGWTREGVTEKPGSGLAALITDGPGGSKWMYVGKRHAGKVFYDLTGNRSDTVTINSDGWGEFKVNGGSVSVWVPRKTTVS

SEQ ID NO: 18060 - protein, 488 aa, Geobacillus stearothermophilus
AAPFNGTMMQYFEWYLPDDGTLWTKVANEANNLSSLGITALWLPPAYKGTSRSDVGYGVYDLYDLGEFNQKGTVRTKYGTKAQYLQAIQAAHAAGMRVYADVVFDHKGGADGTEWVDAVEVNPSDRNQEISGTYQIQAWTKFDFPGRGNTYSSFKWRWYHFDGVDWDESRKLSRIYKFRGIGKAWDWEVDTENGNYDYLMYADLDMDHPEVVTELKNWGKWYVNTTNIDGFRLDAVKHIKFQFFPDWLSYVRSQTGKPLFTVGEYWSYDINKLHNYITKTNGTMSLFDAPLHNKFYTASKSGGAFDMRTLMTNTLMKDRPTLAVTFVDNHDTEPGQALQSWVDPWFKPLAYAFILTRREGYPCVFYGDYYGIPQYNIPSLKSKIDPLLIARRDYAYGTQHDYLDHSDIIGWTREGVTEKPGSGLAALITDGPGGSKWMYVGKQHAGKVFYDLTGNRSDTVTINSDGWGEFKVNGGSVSVWVPRKTTVS

SEQ ID NO: 18061 - protein, 488 aa, Geobacillus stearothermophilus
AAPFNGTMMQYFEWYLPDDGTLWTKVANEANNLSSLGITALWLPPAYKGTSRSDVGYGVYDLYDLGEFNQKGTVRTKYGTKAQYLQAIQAAHAAGMQVYADVVFDHKGGADGTEWVDAVEVNPSDRNQEISGTYQIQAWTKFDFPGRGNTYSSFKWRWYHFDGVDWDESRKLSRIYKFRGIGKAWDWEVDTENGNYDYLMYADLDMDHPEVVTELKNWGKWYVNTTNIDGFRLDAVKHIKFQFFPDWLSYVRSQTGKPLFTVGEYWSYDINKLHNYITKTNGTMSLFDAPLHNKFYTASKSGGAFDMRTLMTNTLMKDEPTLAVTFVDNHDTEPGQALQSWVDPWFKPLAYAFILTRREGYPCVFYGDYYGIPQYNIPSLKSKIDPLLIARRDYAYGTQHDYLDHSDIIGWTREGVTEKPGSGLAALITDGPGGSKWMYVGKRHAGKVFYDLTGNRSDTVTINSDGWGEFKVNGGSVSVWVPRKTTVS

SEQ ID NO: 18062 - protein, 488 aa, Geobacillus stearothermophilus
AAPFNGTMMQYFEWYLPDDGTLWTKVANEANNLSSLGITALWLPPAYKGTSRSDVGYGVYDLYDLGEFNQKGTVRTKYGTKAQYLQAIQAAHAAGMQVYADVVFDHKGGADGTEWVDAVEVNPSDRNQEISGTYQIQAWTKFDFPGRGNTYSSFKWRWYHFDGVDWDESRKLSRIYKFRGIGKAWDWEVDTENGNYDYLMYADLDMDHPEVVTELKNWGKWYVNTTNIDGFRLDAVKHIKFQFFPDWLSYVRSQTGKPLFTVGEYWSYDINKLHNYITKTNGTMSLFDAPLHNKFYTASKSGGAFDMRTLMTNTLMKDRPTLAVTFVDNHDTEPGQALQSWVDPWFKPLAYAFILTREEGYPCVFYGDYYGIPQYNIPSLKSKIDPLLIARRDYAYGTQHDYLDHSDIIGWTREGVTEKPGSGLAALITDGPGGSKWMYVGKRHAGKVFYDLTGNRSDTVTINSDGWGEFKVNGGSVSVWVPRKTTVS

SEQ ID NO: 18063 - protein, 488 aa, Geobacillus stearothermophilus
AAPFNGTMMQYFEWYLPDDGTLWTKVANEANNLSSLGITALWLPPAYKGTSRSDVGYGVYDLYDLGEFNQKGTVRTKYGTKAQYLQAIQAAHAAGMEVYADVVFDHKGGADGTEWVDAVEVNPSDRNQEISGTYQIQAWTKFDFPGRGNTYSSFKWRWYHFDGVDWDESRKLSRIYKFRGIGKAWDWEVDTENGNYDYLMYADLDMDHPEVVTELKNWGKWYVNTTNIDGFRLDAVKHIKFQFFPDWLSYVRSQTGKPLFTVGEYWSYDINKLHNYITKTNGTMSLFDAPLHNKFYTASKSGGAFDMRTLMTNTLMKDRPTLAVTFVDNHDTEPGQALQSWVDPWFKPLAYAFILTRQEGYPCVFYGDYYGIPQYNIPSLKSKIDPLLIARRDYAYGTQHDYLDHSDIIGWTREGVTEKPGSGLAALITDGPGGSKWMYVGKEHAGKVFYDLTGNRSDTVTINSDGWGEFKVNGGSVSVWVPRKTTVS

SEQ ID NO: 18064 - protein, 488 aa, Geobacillus stearothermophilus
AAPFNGTMMQYFEWYLPDDGTLWTKVANEANNLSSLGITALWLPPAYKGTSRSDVGYGVYDLYDLGEFNQKGTVRTKYGTKAQYLQAIQAAHAAGMEVYADVVFDHKGGADGTEWVDAVEVNPSDRNQEISGTYQIQAWTKFDFPGRGNTYSSFKWRWYHFDGVDWDESRKLSRIYKFRGIGKAWDWEVDTENGNYDYLMYADLDMDHPEVVTELKNWGKWYVNTTNIDGFRLDAVKHIKFQFFPDWLSYVRSQTGKPLFTVGEYWSYDINKLHNYITKTNGTMSLFDAPLHNKFYTASKSGGAFDMRTLMTNTLMKDRPTLAVTFVDNHDTEPGQALQSWVDPWFKPLAYAFILTRQEGYPCVFYGDYYGIPQYNIPSLKSKIDPLLIARRDYAYGTQHDYLDHSDIIGWTREGVTEKPGSGLAALITDGPGGSKWMYVGKRHAGKVFYDLTGNRSDTVTINSDGWGEFKVNGGSVSVWVPRKTTVS

SEQ ID NO: 18065 - protein, 488 aa, Geobacillus stearothermophilus
AAPFNGTMMQYFEWYLPDDGTLWTKVANEANNLSSLGITALWLPPAYKGTSRSDVGYGVYDLYDLGEFNQKGTVRTKYGTKAQYLQAIQAAHAAGMQVYADVVFDHKGGADGTEWVDAVEVNPSDRNQEISGTYQIQAWTKFDFPGRGNTYSSFKWRWYHFDGVDWDESRKLSRIYKFRGIGKAWDWEVDTENGNYDYLMYADLDMDHPEVVTELKNWGPWYVLTTNIDGFRLDAVKHIKFSFFPDWLSYVRSSTGKPLFTVGEYWSYDINKLHNYITKTNGTTSLFDAPLHNKFYTASKSGGAFDMRTLMTNTLMKDQPTLAVTFVDNHDTEPGQALQSWVDPWFKPLAYAFILTRQEGYPCVFYGDYYGIPQYNIPSLKSKIDPLLIARRDYAYGTQHDYLDHSDIIGWTREGVTEKPGSGLAALITDGPGGSKWMYVGKQHAGKVFYDLTGNRSDTVTINSDGWGEFKVNGGSVSVWVPRKTTVS

SEQ ID NO: 18066 - protein, 486 aa, Geobacillus stearothermophilus
AAPFNGTMMQYFEWYLPDDGTLWTKVANEANNLSSLGITALWLPPAYKGTSRSDVGYGAYDLYDLGEFNQKGTVRTKYGTKAQYLQAIQAAHAAGMQVYADVVFDHKGGADGTEWVDAVEVNPSDRNQVISGTYQIQAWTKFDFPGRGNTYSSFKWRWYHFDGVDWDESRKLSRIYLFEGKAWDWEVDTEFGNYDYLMYADLDMDHPEVVTELKNWGPWYVLTTNIDGFRLDAVKHIKFSFFPDWLSYVRSSTGKPLFTVGEYWSYDINKLHNYITKTDGTMSLFDAPLHNKFYTASKSGGAFDMRTLMTNTLMKDQPTLAVTFVDNHDTEPGQALQSWVDPWFKPLAYAFILTRQEGYPCVFYGDYYGIPQYNIPSLKSKIDPLLIARRDYAYGTQHDYLDHSDIIGWTREGGTEKPGSGLAALITDGPGGSKWMYVGKQHAGKVFYDLTGNRSDTVTINSDGWGEFKVNGGSVSVWVPRKTTVS

SEQ ID NO: 18067 - protein, 488 aa, Geobacillus stearothermophilus
AAPFNGTMMQYFEWYLPDDGTLWTKVANEANNLSSLGITALWLPPAYKGTSRSDVGYGVYDLYDLGEFNQKGTVRTKYGTKAQYLQAIQAAHAAGMRVYADVVFDHKGGADGTEWVDAVEVNPSDRNQEISGTYQIQAWTKFDFPGRGNTYSSFKWRWYHFDGVDWDESRKLSRIYKFRGIGKAWDWEVDTENGNYDYLMYADLDMDHPEVVTELKNWGKWYVNTTNIDGFRLDAVKHIKFQFFPDWLSYVRSQTGKPLFTVGEYWSYDINKLHNYITKTNGTMSLFDAPLHNKFYTASKSGGAFDMRTLMTNTLMKDQPTLAVTFVDNHDTEPGQALQSWVDPWFKPLAYAFILTRREGYPCVFYGDYYGIPQYNIPSLKSKIDPLLIARRDYAYGTQHDYLDHSDIIGWTREGVTEKPGSGLAALITDGPGGSKWMYVGKEHAGKVFYDLTGNRSDTVTINSDGWGEFKVNGGSVSVWVPRKTTVS

SEQ ID NO: 18068 - protein, 488 aa, Geobacillus stearothermophilus
AAPFNGTMMQYFEWYLPDDGTLWTKVANEANNLSSLGITALWLPPAYKGTSRSDVGYGVYDLYDLGEFNQKGTVRTKYGTKAQYLQAIQAAHAAGMRVYADVVFDHKGGADGTEWVDAVEVNPSDRNQEISGTYQIQAWTKFDFPGRGNTYSSFKWRWYHFDGVDWDESRKLSRIYKFRGIGKAWDWEVDTENGNYDYLMYADLDMDHPEVVTELKNWGKWYVNTTNIDGFRLDAVKHIKFSFFPDWLSYVRSQTGKPLFTVGEYWSYDINKLHNYITKTNGTMSLFDAPLHNKFYTASKSGGAFDMRTLMTNTLMKDRPTLAVTFVDNHDTEPGQALQSWVDPWFKPLAYAFILTRREGYPCVFYGDYYGIPQYNIPSLKSKIDPLLIARRDYAYGTQHDYLDHSDIIGWTREGVTEKPGSGLAALITDGPGGSKWMYVGKRHAGKVFYDLTGNRSDTVTINSDGWGEFKVNGGSVSVWVPRKTTVS

SEQ ID NO: 18069 - protein, 486 aa, Pyrococcus furiosus
AAPFNGTMMQYFEWYLPDDGTLWTKVANEANNLSSLGITALWLPPAYKGTSRSDVGYGAYDLYDLGEFNQKGTVRTKYGTKAQYLQAIRAAHAAGMQVYADVVFDHKGGADGTEWVDAVEVNPSDRNQVISGTYQIQAWTKFDFPGRGNTYSSFKWRWYHFDGVDWDESRKLSRIYLFEGKAWDWEVDTEFGNYDYLMYADLDMDHPEVVTELKNWGKWYVNTTNIDGFRLDAVKHIKFSFFPDWLSYVRSSTGKPLFTVGEYWSYDINKLHNYITKTDGTVSLFDAPLHNKFYTASKSGGAFDMRTLMTNTLMKDQPTLAVTFVDNHDTEPGQALQSWVDPWFKPLAYAFILTRQEGYPCVFYGDYYGIPQYNIPSLKSKIDPLLIARRDYAYGTQHDYLDHSDIIGWTREGGTEKPGSGLAALITDGPGGSKWMYVGKQHAGKVFYDLTGNRSDTVTINSDGWGEFKVNGGSVSVWVPRKTTVS

SEQ ID NO: 18070 - protein, 488 aa, Geobacillus stearothermophilus
AAPFNGTMMQYFEWYLPDDGTLWTKVANEANNLSSLGITALWLPPAYKGTSRSDVGYGVYDLYDLGEFNQKGTVRTKYGTKAQYLQAIQAAHAAGMRVYADVVFDHKGGADGTEWVDAVEVNPSDRNQEISGTYQIQAWTKFDFPGRGNTYSSFKWRWYHFDGVDWDESRKLSRIYKFRGIGKAWDWEVDTENGNYDYLMYADLDMDHPEVVTELKNWGKWYVNTTNIDGFRLDAVKHIKFQFFPDWLSYVRSQTGKPLFTVGEYWSYDINKLHNYITKTNGTMSLFDAPLHNKFYTASKSGGAFDMRTLMTNTLMKDQPTLAVTFVDNHDTEPGQALQSWVDPWFKPLAYAFILTRREGYPCVFYGDYYGIPQYNIPSLKSKIDPLLIARRDYAYGTQHDYLDHSDIIGWTREGVTEKPGSGLAALITDGPGGSKWMYVGKRHAGKVFYDLTGNRSDTVTINSDGWGEFKVNGGSVSVWVPRKTTVS

SEQ ID NO: 18071 - protein, 488 aa, Geobacillus stearothermophilus
AAPFNGTMMQYFEWYLPDDGTLWTKVANEANNLSSLGITALWLPPAYKGTSRSDVGYGVYDLYDLGEFNQKGTVRTKYGTKAQYLQAIQAAHAAGMQVYADVVFDHKGGADGTEWVDAVEVNPSDRNQEISGTYQIQAWTKFDFPGRGNTYSSFKWRWYHFDGVDWDESRKLSRIYKFRGIGKAWDWEVDTENGNYDYLMYADLDMDHPEVVTELKNWGKWYVNTTNIDGFRLDAVKHIKFQFFPDWLSYVRSQTGKPLFTVGEYWSYDINKLHNYITKTNGTMSLFDAPLHNKFYTASKSGGAFDMRTLMTNTLMKDEPTLAVTFVDNHDTEPGQALQSWVDPWFKPLAYAFILTREEGYPCVFYGDYYGIPQYNIPSLKSKIDPLLIARRDYAYGTQHDYLDHSDIIGWTREGVTEKPGSGLAALITDGPGGSKWMYVGKEHAGKVFYDLTGNRSDTVTINSDGWGEFKVNGGSVSVWVPRKTTVS

SEQ ID NO: 18072 - protein, 488 aa, Geobacillus stearothermophilus
AAPFNGTMMQYFEWYLPDDGTLWTKVANEANNLSSLGITALWLPPAYKGTSRSDVGYGVYDLYDLGEFNQKGTVRTKYGTKAQYLQAIQAAHAAGMRVYADVVFDHKGGADGTEWVDAVEVNPSDRNQEISGTYQIQAWTKFDFPGRGNTYSSFKWRWYHFDGVDWDESRKLSRIYKFRGIGKAWDWEVDTENGNYDYLMYADLDMDHPEVVTELKNWGKWYVNTTNIDGFRLDAVKHIKFSFFPDWLSYVRSQTGKPLFTVGEYWSYDINKLHNYITKTNGTMSLFDAPLHNKFYTASKSGGAFDMRTLMTNTLMKDRPTLAVTFVDNHDTEPGQALQSWVDPWFKPLAYAFILTREEGYPCVFYGDYYGIPQYNIPSLKSKIDPLLIARRDYAYGTQHDYLDHSDIIGWTREGVTEKPGSGLAALITDGPGGSKWMYVGKRHAGKVFYDLTGNRSDTVTINSDGWGEFKVNGGSVSVWVPRKTTVS

SEQ ID NO: 18073 - protein, 488 aa, Geobacillus stearothermophilus
AAPFNGTMMQYFEWYLPDDGTLWTKVANEANNLSSLGITALWLPPAYKGTSRSDVGYGVYDLYDLGEFNQKGTVRTKYGTKAQYLQAIQAAHAAGMQVYADVVFDHKGGADGTEWVDAVEVNPSDRNQEISGTYQIQAWTKFDFPGRGNTYSSFKWRWYHFDGVDWDESRKLSRIYKFRGIGKAWDWEVDTENGNYDYLMYADLDMDHPEVVTELKNWGKWYVNTTNIDGFRLDAVKHIKFQFFPDWLSYVRSQTGKPLFTVGEYWSYDINKLHNYITKTNGTMSLFDAPLHNKFYTASKSGGAFDMRTLMTNTLMKDRPTLAVTFVDNHDTEPGQALQSWVDPWFKPLAYAFILTREEGYPCVFYGDYYGIPQYNIPSLKSKIDPLLIARRDYAYGTQHDYLDHSDIIGWTREGVTEKPGSGLAALITDGPGGSKWMYVGKEHAGKVFYDLTGNRSDTVTINSDGWGEFKVNGGSVSVWVPRKTTVS

SEQ ID NO: 18074 - protein, 488 aa, Geobacillus stearothermophilus
AAPFNGTMMQYFEWYLPDDGTLWTKVANEANNLSSLGITALWLPPAYKGTSRSDVGYGVYDLYDLGEFNQKGTVRTKYGTKAQYLQAIQAAHAAGMEVYADVVFDHKGGADGTEWVDAVEVNPSDRNQEISGTYQIQAWTKFDFPGRGNTYSSFKWRWYHFDGVDWDESRKLSRIYKFRGIGKAWDWEVDTENGNYDYLMYADLDMDHPEVVTELKNWGKWYVNTTNIDGFRLDAVKHIKFSFFPDWLSYVRSQTGKPLFTVGEYWSYDINKLHNYITKTNGTMSLFDAPLHNKFYTASKSGGAFDMRTLMTNTLMKDEPTLAVTFVDNHDTEPGQALQSWVDPWFKPLAYAFILTREEGYPCVFYGDYYGIPQYNIPSLKSKIDPLLIARRDYAYGTQHDYLDHSDIIGWTREGVTEKPGSGLAALITDGPGGSKWMYVGKEHAGKVFYDLTGNRSDTVTINSDGWGEFKVNGGSVSVWVPRKTTVS

SEQ ID NO: 18075 - protein, 488 aa, Geobacillus stearothermophilus
AAPFNGTMMQYFEWYLPDDGTLWTKVANEANNLSSLGITALWLPPAYKGTSRSDVGYGVYDLYDLGEFNQKGTVRTKYGTKAQYLQAIQAAHAAGMRVYADVVFDHKGGADGTEWVDAVEVNPSDRNQEISGTYQIQAWTKFDFPGRGNTYSSFKWRWYHFDGVDWDESRKLSRIYKFRGIGKAWDWEVDTENGNYDYLMYADLDMDHPEVVTELKNWGKWYVNTTNIDGFRLDAVKHIKFSFFPDWLSYVRSQTGKPLFTVGEYWSYDINKLHNYITKTNGTMSLFDAPLHNKFYTASKSGGAFDMRTLMTNTLMKDEPTLAVTFVDNHDTEPGQALQSWVDPWFKPLAYAFILTRREGYPCVFYGDYYGIPQYNIPSLKSKIDPLLIARRDYAYGTQHDYLDHSDIIGWTREGVTEKPGSGLAALITDGPGGSKWMYVGKRHAGKVFYDLTGNRSDTVTINSDGWGEFKVNGGSVSVWVPRKTTVS

SEQ ID NO: 18076 - protein, 488 aa, Geobacillus stearothermophilus
AAPFNGTMMQYFEWYLPDDGTLWTKVANEANNLSSLGITALWLPPAYKGTSRSDVGYGVYDLYDLGEFNQKGTVRTKYGTKAQYLQAIQAAHAAGMEVYADVVFDHKGGADGTEWVDAVEVNPSDRNQEISGTYQIQAWTKFDFPGRGNTYSSFKWRWYHFDGVDWDESRKLSRIYKFRGIGKAWDWEVDTENGNYDYLMYADLDMDHPEVVTELKNWGKWYVNTTNIDGFRLDAVKHIKFQFFPDWLSYVRSQTGKPLFTVGEYWSYDINKLHNYITKTNGTMSLFDAPLHNKFYTASKSGGAFDMRTLMTNTLMKDEPTLAVTFVDNHDTEPGQALQSWVDPWFKPLAYAFILTRREGYPCVFYGDYYGIPQYNIPSLKSKIDPLLIARRDYAYGTQHDYLDHSDIIGWTREGVTEKPGSGLAALITDGPGGSKWMYVGKQHAGKVFYDLTGNRSDTVTINSDGWGEFKVNGGSVSVWVPRKTTVS

SEQ ID NO: 18077 - protein, 488 aa, Geobacillus stearothermophilus
AAPFNGTMMQYFEWYLPDDGTLWTKVANEANNLSSLGITALWLPPAYKGTSRSDVGYGVYDLYDLGEFNQKGTVRTKYGTKAQYLQAIQAAHAAGMEVYADVVFDHKGGADGTEWVDAVEVNPSDRNQEISGTYQIQAWTKFDFPGRGNTYSSFKWRWYHFDGVDWDESRKLSRIYKFRGIGKAWDWEVDTENGNYDYLMYADLDMDHPEVVTELKNWGKWYVNTTNIDGFRLDAVKHIKFQFFPDWLSYVRSQTGKPLFTVGEYWSYDINKLHNYITKTNGTMSLFDAPLHNKFYTASKSGGAFDMRTLMTNTLMKDEPTLAVTFVDNHDTEPGQALQSWVDPWFKPLAYAFILTREEGYPCVFYGDYYGIPQYNIPSLKSKIDPLLIARRDYAYGTQHDYLDHSDIIGWTREGVTEKPGSGLAALITDGPGGSKWMYVGKQHAGKVFYDLTGNRSDTVTINSDGWGEFKVNGGSVSVWVPRKTTVS

SEQ ID NO: 18078 - protein, 488 aa, Geobacillus stearothermophilus
AAPFNGTMMQYFEWYLPDDGTLWTKVANEANNLSSLGITALWLPPAYKGTSRSDVGYGVYDLYDLGEFNQKGTVRTKYGTKAQYLQAIQAAHAAGMRVYADVVFDHKGGADGTEWVDAVEVNPSDRNQEISGTYQIQAWTKFDFPGRGNTYSSFKWRWYHFDGVDWDESRKLSRIYKFRGIGKAWDWEVDTENGNYDYLMYADLDMDHPEVVTELKNWGKWYVNTTNIDGFRLDAVKHIKFSFFPDWLSYVRSQTGKPLFTVGEYWSYDINKLHNYITKTNGTMSLFDAPLHNKFYTASKSGGAFDMRTLMTNTLMKDEPTLAVTFVDNHDTEPGQALQSWVDPWFKPLAYAFILTREEGYPCVFYGDYYGIPQYNIPSLKSKIDPLLIARRDYAYGTQHDYLDHSDIIGWTREGVTEKPGSGLAALITDGPGGSKWMYVGKRHAGKVFYDLTGNRSDTVTINSDGWGEFKVNGGSVSVWVPRKTTVS

SEQ ID NO: 18079 - protein, 488 aa, Geobacillus stearothermophilus
AAPFNGTMMQYFEWYLPDDGTLWTKVANEANNLSSLGITALWLPPAYKGTSRSDVGYGVYDLYDLGEFNQKGTVRTKYGTKAQYLQAIQAAHAAGMEVYADVVFDHKGGADGTEWVDAVEVNPSDRNQEISGTYQIQAWTKFDFPGRGNTYSSFKWRWYHFDGVDWDESRKLSRIYKFRGIGKAWDWEVDTENGNYDYLMYADLDMDHPEVVTELKNWGKWYVNTTNIDGFRLDAVKHIKFSFFPDWLSYVRSQTGKPLFTVGEYWSYDINKLHNYITKTNGTMSLFDAPLHNKFYTASKSGGAFDMRTLMTNTLMKDEPTLAVTFVDNHDTEPGQALQSWVDPWFKPLAYAFILTREEGYPCVFYGDYYGIPQYNIPSLKSKIDPLLIARRDYAYGTQHDYLDHSDIIGWTREGVTEKPGSGLAALITDGPGGSKWMYVGKRHAGKVFYDLTGNRSDTVTINSDGWGEFKVNGGSVSVWVPRKTTVS

SEQ ID NO: 18080 - protein, 488 aa, Geobacillus stearothermophilus
AAPFNGTMMQYFEWYLPDDGTLWTKVANEANNLSSLGITALWLPPAYKGTSRSDVGYGVYDLYDLGEFNQKGTVRTKYGTKAQYLQAIQAAHAAGMQVYADVVFDHKGGADGTEWVDAVEVNPSDRNQEISGTYQIQAWTKFDFPGRGNTYSSFKWRWYHFDGVDWDESRKLSRIYKFRGIGKAWDWEVDTENGNYDYLMYADLDMDHPEVVTELKNWGPWYVLTTNIDGFRLDAVKHIKFQFFPDWLSYVRSSTGKPLFTVGEYWSYDINKLHNYITKTNGTMSLFDAPLHNKFYTASKSGGAFDMRTLMTNTLMKDQPTLAVTFVDNHDTEPGQALQSWVDPWFKPLAYAFILTRQEGYPCVFYGDYYGIPQYNIPSLKSKIDPLLIARRDYAYGTQHDYLDHSDIIGWTREGVTEKPGSGLAALITDGPGGSKWMYVGKQHAGKVFYDLTGNRSDTVTINSDGWGEFKVNGGSVSVWVPRKTTVS

SEQ ID NO: 18081 - protein, 488 aa, Geobacillus stearothermophilus
AAPFNGTMMQYFEWYLPDDGTLWTKVANEANNLSSLGITALWLPPAYKGTSRSDVGYGVYDLYDLGEFNQKGTVRTKYGTKAQYLQAIQAAHAAGMRVYADVVFDHKGGADGTEWVDAVEVNPSDRNQEISGTYQIQAWTKFDFPGRGNTYSSFKWRWYHFDGVDWDESRKLSRIYKFRGIGKAWDWEVDTENGNYDYLMYADLDMDHPEVVTELKNWGKWYVNTTNIDGFRLDAVKHIKFQFFPDWLSYVRSQTGKPLFTVGEYWSYDINKLHNYITKTNGTMSLFDAPLHNKFYTASKSGGAFDMRTLMTNTLMKDQPTLAVTFVDNHDTEPGQALQSWVDPWFKPLAYAFILTREEGYPCVFYGDYYGIPQYNIPSLKSKIDPLLIARRDYAYGTQHDYLDHSDIIGWTREGVTEKPGSGLAALITDGPGGSKWMYVGKEHAGKVFYDLTGNRSDTVTINSDGWGEFKVNGGSVSVWVPRKTTVS

SEQ ID NO: 18082 - protein, 488 aa, Geobacillus stearothermophilus
AAPFNGTMMQYFEWYLPDDGTLWTKVANEANNLSSLGITALWLPPAYKGTSRSDVGYGVYDLYDLGEFNQKGTVRTKYGTKAQYLQAIQAAHAAGMEVYADVVFDHKGGADGTEWVDAVEVNPSDRNQEISGTYQIQAWTKFDFPGRGNTYSSFKWRWYHFDGVDWDESRKLSRIYKFRGIGKAWDWEVDTENGNYDYLMYADLDMDHPEVVTELKNWGKWYVNTTNIDGFRLDAVKHIKFQFFPDWLSYVRSQTGKPLFTVGEYWSYDINKLHNYITKTNGTMSLFDAPLHNKFYTASKSGGAFDMRTLMTNTLMKDRPTLAVTFVDNHDTEPGQALQSWVDPWFKPLAYAFILTRREGYPCVFYGDYYGIPQYNIPSLKSKIDPLLIARRDYAYGTQHDYLDHSDIIGWTREGVTEKPGSGLAALITDGPGGSKWMYVGKQHAGKVFYDLTGNRSDTVTINSDGWGEFKVNGGSVSVWVPRKTTVS

SEQ ID NO: 18083 - protein, 488 aa, Geobacillus stearothermophilus
AAPFNGTMMQYFEWYLPDDGTLWTKVANEANNLSSLGITALWLPPAYKGTSRSDVGYGVYDLYDLGEFNQKGTVRTKYGTKAQYLQAIQAAHAAGMRVYADVVFDHKGGADGTEWVDAVEVNPSDRNQEISGTYQIQAWTKFDFPGRGNTYSSFKWRWYHFDGVDWDESRKLSRIYKFRGIGKAWDWEVDTENGNYDYLMYADLDMDHPEVVTELKNWGKWYVNTTNIDGFRLDAVKHIKFQFFPDWLSYVRSQTGKPLFTVGEYWSYDINKLHNYITKTNGTMSLFDAPLHNKFYTASKSGGAFDMRTLMTNTLMKDQPTLAVTFVDNHDTEPGQALQSWVDPWFKPLAYAFILTREEGYPCVFYGDYYGIPQYNIPSLKSKIDPLLIARRDYAYGTQHDYLDHSDIIGWTREGVTEKPGSGLAALITDGPGGSKWMYVGKRHAGKVFYDLTGNRSDTVTINSDGWGEFKVNGGSVSVWVPRKTTVS

SEQ ID NO: 18084 - protein, 488 aa, Geobacillus stearothermophilus
AAPFNGTMMQYFEWYLPDDGTLWTKVANEANNLSSLGITALWLPPAYKGTSRSDVGYGVYDLYDLGEFNQKGTVRTKYGTKAQYLQAIQAAHAAGMEVYADVVFDHKGGADGTEWVDAVEVNPSDRNQEISGTYQIQAWTKFDFPGRGNTYSSFKWRWYHFDGVDWDESRKLSRIYKFRGIGKAWDWEVDTENGNYDYLMYADLDMDHPEVVTELKNWGKWYVNTTNIDGFRLDAVKHIKFSFFPDWLSYVRSQTGKPLFTVGEYWSYDINKLHNYITKTNGTMSLFDAPLHNKFYTASKSGGAFDMRTLMTNTLMKDRPTLAVTFVDNHDTEPGQALQSWVDPWFKPLAYAFILTREEGYPCVFYGDYYGIPQYNIPSLKSKIDPLLIARRDYAYGTQHDYLDHSDIIGWTREGVTEKPGSGLAALITDGPGGSKWMYVGKRHAGKVFYDLTGNRSDTVTINSDGWGEFKVNGGSVSVWVPRKTTVS

SEQ ID NO: 18085 - protein, 488 aa, Geobacillus stearothermophilus
AAPFNGTMMQYFEWYLPDDGTLWTKVANEANNLSSLGITALWLPPAYKGTSRSDVGYGVYDLYDLGEFNQKGTVRTKYGTKAQYLQAIQAAHAAGMQVYADVVFDHKGGADGTEWVDAVEVNPSDRNQEISGTYQIQAWTKFDFPGRGNTYSSFKWRWYHFDGVDWDESRKLSRIYKFRGIGKAWDWEVDTENGNYDYLMYADLDMDHPEVVTELKNWGKWYVNTTNIDGFRLDAVKHIKFQFFPDWLSYVRSQTGKPLFTVGEYWSYDINKLHNYITKTNGTMSLFDAPLHNKFYTASKSGGAFDMRTLMTNTLMKDRPTLAVTFVDNHDTEPGQALQSWVDPWFKPLAYAFILTRREGYPCVFYGDYYGIPQYNIPSLKSKIDPLLIARRDYAYGTQHDYLDHSDIIGWTREGVTEKPGSGLAALITDGPGGSKWMYVGKRHAGKVFYDLTGNRSDTVTINSDGWGEFKVNGGSVSVWVPRKTTVS

SEQ ID NO: 18086 - protein, 486 aa, Geobacillus stearothermophilus
AAPFNGTMMQYFEWYLPDDGTLWTKVANEANNLSSLGITALWLPPAYKGTSRSDVGYGVYDLYDLGEFNQKGTVRTKYGTKAQYLQAIQAAHAAGMQVYADVVFDHKGGADGTEWVDAVEVNPSDRNQVISGTYQIQAWTKFDFPGRGNTYSSFKWRWYHFDGVDWDESRKLSRIYLFVGKAWDWEVDTEFGNYDYLMYADLDMDHPEVVTELKNWGPWYVLTTNIDGFRLDAVKHIKFQFFPDWLSYVRSSTGKPLFTVGEYWSYDINKLHNYITKTDGTMSLFDAPLHNKFYTASKSGGAFDMRTLMTNTLMKDQPTLAVTFVDNHDTEPGQALQSWVDPWFKPLAYAFILTRQEGYPCVFYGDYYGIPQYNIPSLKSKIDPLLIARRDYAYGTQHDYLDHSDIIGWTREGGTEKPGSGLAALITDGPGGSKWMYVGKQHAGKVFYDLTGNRSDTVTINSDGWGEFKVNGGSVSVWVPRKTTVS

SEQ ID NO: 18087 - protein, 488 aa, Geobacillus stearothermophilus
AAPFNGTMMQYFEWYLPDDGTLWTKVANEANNLSSLGITALWLPPAYKGTSRSDVGYGVYDLYDLGEFNQKGTVRTKYGTKAQYLQAIQAAHAAGMEVYADVVFDHKGGADGTEWVDAVEVNPSDRNQEISGTYQIQAWTKFDFPGRGNTYSSFKWRWYHFDGVDWDESRKLSRIYKFRGIGKAWDWEVDTENGNYDYLMYADLDMDHPEVVTELKNWGKWYVNTTNIDGFRLDAVKHIKFSFFPDWLSYVRSQTGKPLFTVGEYWSYDINKLHNYITKTNGTMSLFDAPLHNKFYTASKSGGAFDMRTLMTNTLMKDEPTLAVTFVDNHDTEPGQALQSWVDPWFKPLAYAFILTRREGYPCVFYGDYYGIPQYNIPSLKSKIDPLLIARRDYAYGTQHDYLDHSDIIGWTREGVTEKPGSGLAALITDGPGGSKWMYVGKRHAGKVFYDLTGNRSDTVTINSDGWGEFKVNGGSVSVWVPRKTTVS

SEQ ID NO: 18088 - protein, 488 aa, Geobacillus stearothermophilus
AAPFNGTMMQYFEWYLPDDGTLWTKVANEANNLSSLGITALWLPPAYKGTSRSDVGYGVYDLYDLGEFNQKGTVRTKYGTKAQYLQAIQAAHAAGMEVYADVVFDHKGGADGTEWVDAVEVNPSDRNQEISGTYQIQAWTKFDFPGRGNTYSSFKWRWYHFDGVDWDESRKLSRIYKFRGIGKAWDWEVDTENGNYDYLMYADLDMDHPEVVTELKNWGKWYVNTTNIDGFRLDAVKHIKFSFFPDWLSYVRSQTGKPLFTVGEYWSYDINKLHNYITKTNGTMSLFDAPLHNKFYTASKSGGAFDMRTLMTNTLMKDRPTLAVTFVDNHDTEPGQALQSWVDPWFKPLAYAFILTREEGYPCVFYGDYYGIPQYNIPSLKSKIDPLLIARRDYAYGTQHDYLDHSDIIGWTREGVTEKPGSGLAALITDGPGGSKWMYVGKEHAGKVFYDLTGNRSDTVTINSDGWGEFKVNGGSVSVWVPRKTTVS

SEQ ID NO: 18089 - protein, 488 aa, Geobacillus stearothermophilus
AAPFNGTMMQYFEWYLPDDGTLWTKVANEANNLSSLGITALWLPPAYKGTSRSDVGYGVYDLYDLGEFNQKGTVRTKYGTKAQYLQAIQAAHAAGMRQVYADVVFDHKGGADGTEWVDAVEVNPSDRNQEISGTYQIQAWTKFDFPGRGNTYSSFKWRWYHFDGVDWDESRKLSRIYKFRGIGKAWDWEVDTENGNYDYLMYADLDMDHPEVVTELKNWGKWYVNTTNIDGFRLDAVKHIKFQFFPDWLSYVRSQTGKPLFTVGEYWSYDINKLHNYITKTNGTMSLFDAPLHNKFYTASKSGGAFDMRTLMTNTLMKRPTLAVTFVDNHDTEPGQALQSWVDPWFKPLAYAFILTRREGYPCVFYGDYYGIPQYNIPSLKSKIDPLLIARRDYAYGTQHDYLDHSDIIGWTREGVTEKPGSGLAALITDGPGGSKWMYVGKEHAGKVFYDLTGNRSDTVTINSDGWGEFKVNGGSVSVWVPRKTTVS

SEQ ID NO: 18090 - protein, 484 aa, Geobacillus stearothermophilus
AAPFNGTMMQYFEWYLPDDGTLWTKVANEANNLSSLGITALWLPPAYKGTSRSDVGYGVYDLYDLGEFNQKGTVRTKYGTKAQYLQAIQAAHAAGMQVYADVVFDHKGGADGTEWVDAVEVNPSDRNQVISGTYQIQAWTKFDFPGRGNTYSSFKWRWYHFDGVDWDESRKLSRIYLFEGKAWDWEVDTEFGNYDYLMYADLDMDHPEVVTELKNWGPWYVLTTNIDGFRLDAVKHIKFQFFPDWLSYVRSSTGKPLFTVGEYWSYDINKLHNYITKTDGTMSLFDAPLHNKFYTASKSGGAFDMRTLMTNTLMKDQPTLAVTFVDNHDTEPGQALQSWVDPWFKPLAYAFILTRQEGYPCVFYGDYYGIPQYPSLKSKIDPLLIARRDYAYGTQHDYLDHSDIIGWTREGGTEKPGSGLAALITDGPGGSKWMYVGKQHAGKVFYDLTGNRSDTVTINSDGWGEFKVNGGSVSVWVPRKTTVS

SEQ ID NO: 18091 - protein, 484 aa, Aspergillus niger
AATALAATPADWRSQSIYFLLTDRFARTDGSTTATCNTADQKYCGGTWQGIIDKLDYIQGMGFTAIWITPVTAQLPQTTAYGDAYHGYWQQDIYSLNENYGTADDLRALSSALHERGMYLMVDVVANHMGYDGAGSSVDYSVFKPFSSQDYFHPFCFIQNYEDQTQVEDCWLGDNTVSLPDLDTTKDVVKNEWYDWVGSLVSNYSIDGLRIDTVKHVQKDFWPGYNKAAGVYCIGEVLDGDPAYTCPYQNVMDGVLNYPIYYPLLNAFQSTSGSMDDLYNMINTVKSDCPDSTLLGTFVENHDNPRFASYTNDIALAKNVAAFIILNDGIPIIYAGQEQHYAGGNDPANREATWLSGYPTDSELYKLIASANAIRNYAISQDTGFVTYQNWPIYQDDTTIAMRKGTDGSQIVTILSNLGASGDSYTLSLSGAGYTAGQQLTEVIGCTTVTVGSDGNVPVPMAGGLPRVLYPTEKLAGSKICSSS

SEQ ID NO: 18092 - protein, 484 aa, Aspergillus niger
AATALAATPADWRSQSIYFLLTDRFARTDGSTTATCNTADQKYCGGTWQGIIDKLDYIQGMGFTAIWITPVTAQLPQTTAYGDAYHGYWQQDIYSLNENYGTADDLKALSSALHERGMYLMVDVVANHMGYDGAGSSVDYSVFKPFSSQDYFHPFCFIQNYEDQTQVEDCWLGDNTVSLPDLDTTKDVVKNMWYDWVGSLVSNYSIDGLRIDTVKHVQKDFWPGYNKAAGVYCIGEVLDGDPAYTCPYQNVMDGVLNYPMYYPLLNAFKSTSGSMDDLYNMINTMKSDCPDSTLLGTFMENHDNPRFASYTNDMALAKNVAAFIILNDGIPIIYAGQEQHYAGGNDPANREATWLSGYPTDSELYKLIASANAIRNYAISKDTGFVTYKNWPIYKDDTTIAMRKGTDGSQIVTILSNKGASGDSYTLSLSGAGYTAGQQLMEVIGCTTVTVGSDGNVPVPMAGGLPRVLYPTEKLAGSKICSSS

SEQ ID NO: 18093 - protein, 484 aa, Aspergillus niger
AATALAATPADWRSQSIYFLLTDRFARTDGSTTATCNTADQKYCGGTWQGIIDHLDYIQGMGFTAIWITPVTAQLPQTTAYGDAYHGYWQQDIYSLNENYGTADDLKALSSALHERGMYLMVDVVANHMGYDGAGSSVDYSVFNPFSSQDYFHPFCFIQNYEDQTQVEDCWLGDNTVSLPDLDTTKDVVKNEWYDWVGSLVSNYSIDGLRIDTVKHVQKDFWPGYNSAAGVYCIGEVLDGDPAYTCPYQNVMDGVLNYPIYYPLLNAFKSTSGSMDDLYNMINTVASDCPDSTLLGTFVENHDNPRFASYTNDIALAKNVAAFIILNDGIPIIYAGQEQHYAGGNDPANREATWLSGYPTDSELYQLIASANAIRNYAISKDTGFVTYKNWPIYKDDTTIAMRKGTDGSQIVTILSNKGASGDSYTLSLSGAGYTAGQQLTEVIGCTTVTVGSDGNVPVPMAGGLPRVLYPTEKLAGSGICSSS

SEQ ID NO: 18094 - protein, 484 aa, Aspergillus niger
AATALAATPADWRSQSIYFLLTDRFARTDGSTTATCNTADQKYCGGTWQGIIDKLDYIQGMGFTAIWITPVTAQLPQTTAYGDAYHGYWQQDIYSLNENYGTADDLKALSSALHERGMYLMVDVVANHMGYDGAGSSVDYSVFNPFSSQDYFHPFCFIQNYEDQTQVEDCWLGDNTVSLPDLDTTKDVVRNEWYDWVGSLVSNYSIDGLRIDTVKHVQKDFWPGYNDAAGVYCIGEVLDGDPAYTCPYQNVMDGVLNYPIYYPLLNAFQSTSGSMDDLYNMINTVKSDCPDSTLLGTFVENHDNPRFASYTNDIALAKNVAAFIILNDGIPIIYAGQEQHYAGGNDPANREATWLSGYPTDSELYKLIASANAIRNYAISKDTGFVTYKNWPIYQDDTTIAMRKGTDGSQIVTILSNKGASGDSYTLSLSGAGYTAGQQLTEVIGCTTVTVGSDGNVPVPMAGGLPRVLYPTEKLAGSGICSSS

SEQ ID NO: 18095 - protein, 483 aa, Unidentified
HHNGTNGTMMQYFEWHLPNDGNHWNRLRDDASNLRNRGITAIWIPPAWKGTSQNDVGYGAYDLYDLGEFNQKGTVRTKYGTRSQLESAIHALKNNGVQVYGDVVMNHKGGADATENVLAVEVNPNNRNQEISGDYTIEAYTKFDFPGRGNTYSDFKWRWYHFDGVDWDQSRQFQNRIYKFRGKAWDWEVDSEFGNYDYLMYADYDMDHPEVVNELRRWGEWYTNTLNLDGFRIDAVKHIKFSFTRDWLTHVRNATGKGMFAVAEFWKNDLGALENYLNKTNWNHSVFDVPLHYNLYNASNSRGNYDMAKLLNGTVVQKHPMHAVTFVDNHDSQPGESLESFVQEWFKPLAYALILTREQGYPSVFYGDYYGIPTHSVPAMKAKIDPILEARQNFAYGTQHDYFDHHNIIGWTREGNTTHPNSGLATIMSDGPGGEKWMYVGQNKAGQVWHDITGNKPGTVTINADGWANFSVNKGSVSIWVKR

SEQ ID NO: 18096 - protein, 485 aa, Bacillus sp.
HHNGTNGTMMQYFEWHLPNDGNHWNRLRDDASNLRNRGITAIWIPPAWKGTSQNDVGYGAYDLYDLGEFNQKGTVRTKYGTRSQLESAIHALKNNGVQVYGDVVMNHKAGADATENVLAVEVNPNNRNQEISGDYTIEAYTKFDFPGRGNTYSDFKWRWYHFDGVDWDQSRQFQNRIYKFRGDGKAWDWEVDSDFGNYDYLMYADYDMDHPEVVNELRRWGEWYTNTLNLDGFRIDAVKHIKFSFTRDWLTHVRNATGKGMFAVAEFWKNDLGALENYLNKTNWNHSVFDVPLHYNLYNASNSGGNYDMAKLLNGTVVQKHPMHAVTFVDNHDSQPGESLESFVQEWFKPLAYALILTREQGYPSVFYGDYYGIPTHSVPAMKAKIDPILEARQNFAYGTQHDYFDHHNIIGWTREGNTTHPNSGLATIMSDGPGGEKWMYVGQNKAGQVWHDITGNKPGTVTINADGWANFSVNGGSVSIWVKR

SEQ ID NO: 18097 - protein, 485 aa, Bacillus sp.
HHNGTNGTMMQYFEWHLPNDGNHWNRLRDDASNLRNRGITAIWIPPAWKGTSQNDVGYGAYDLYDLGEFNQKGTVRTKYGTRSQLESAIHALKNNGVQVYGDVVMNHKAGADATENVLAVEVNPNNRNQEISGDYTIEAYTKFDFPGRGNTYSDFKWRWYHFDGVDWDQSRQFQNRIYKFRGDGKAWDWEVDSEFGNYDYLMYADYDMDHPEVVNELRRWGEWYTNTLNLDGFRIDAVKHIKFSFTRDWLTHVRNATGKGMFAVAEFWKNDLGALENYLNKTNWNHSVFDVPLHYNLYNASNSGGNYDMAKLLNGTVVQKHPMHAVTFVDNHDSQPGESLESFVQEWFKPLAYALILTREQGYPSVFYGDYYGIPTHSVPAMKAKIDPILEARQNFAYGTQHDYFDHHNIIGWTREGNTTHPNSGLATIMSDGPGGEKWMYVGQNKAGQVWHDITGNKPGTVTINADGWANFSVNEGSVSIWVKR

SEQ ID NO: 18098 - protein, 483 aa, Bacillus sp.
HHNGTNGTMMQYFEWHLPNDGNHWNRLRDDASNLRNRGITAIWIPPAWKGTSQNDVGYGAYDLYDLGEFNQKGTVRTKYGTRSQLESAIHALKNNGVQVYGDVVMNHKGGADATETVLAVEVNPNNRNLEISGDYTIEAWTRFDFPGRGNTYSDFKWRWYHFDGVDWDQSRQFQNRIYKFRGKAWDWEVDSENGYYDNLMYAFVDLDHPEVVNELRRWGEWYTNTLNLDGFRIDAVKHIKYSFTRDWLTHVRNATGKEMFAVAEFWKNDLGALENYLNKTNWNHSVFDVPLHYNLYNASNSGGNYDMAKLLNGTVVQKHPMHAVTFVDNHDSQPGESLESFVQEWFKPLAYALILTREQGYPSVFYGDYYGIPTHSVPAMKAKIDPILEARQNFAYGTQHDYFDHHNIIGWTREGNTTHPNSGLATIMSDGPGGEKWMYVGQNKAGQVWHDITGNKPGTVTINADGWANFSVNGGSVSIWVKR

SEQ ID NO: 18099 - protein, 483 aa, Bacillus sp.
HHNGTNGTMMQYFEWHLPNDGNHWNRLRDDASNLRNRGITAIWIPPAWKGTSQNDVGYGAYDLYDLGEFNQKGTVRTKYGTRSQLESAIHALKNNGVQVYGDVVMNHKAGADATENVLAVEVNPNNRNQEISGDYTIEAYTKFDFPGRGNTYSDFKWRWYHFDGVDWDQSRQFQNRIYKFRGKAWDWEVDSEFGNYDYLMYADYDMDHPEVVNELRRWGEWYTNTLNLDGFRIDAVKHIKFSFTRDWLTHVRNATGKGMFAVAEFWKNDLGALENYLNKTNWNHSVFDVPLHYNLYNASNSGGNYDMAKLLNGTVVQKHPMHAVTFVDNHDSQPGESLESFVQEWFKPLAYALILTREQGYPSVFYGDYYGIPTHSVPAMKAKIDPILEARQNFAYGTQHDYFDHHNIIGWTREGNTTHPNSGLATIMSDGPGGEKWMYVGQNKAGQVWHDITGNKPGTVTINADGWANFSVNGESVSIWVKR

SEQ ID NO: 18100 - protein, 483 aa, Bacillus sp.
HHNGTNGTMMQYFEWHLPNDGNHWNRLRDDASNLRNRGITAIWIPPAWKGTSQNDVGYGAYDLYDLGEFNQKGTVRTKYGTRSQLESAIHALKNNGVQVYGDVVMNHKGGADATETVLAVEVNPNNRNLEISGDYTIEAWTRFDFPGRGNTYSDFKWRWYHFDGVDWDQSRQFQNRIYKFRGKAWDWEVDSEYGNNDYLMFADLDMDHPEVVNELRRWGEWYTNTLNLDGFRIDAVKHIKYSFTRDWLTHVRNATGKEMFAVAEFWKNDLGALENYLNKTNWNHSVFDVPLHYNLYNASNSGGNYDMAKLLNGTVVQKHPMHAVTFVDNHDSQPGESLESFVQEWFKPLAYALILTREQGYPSVFYGDYYGIPTHSVPAMKAKIDPILEARQNFAYGTQHDYFDHHNIIGWTREGNTTHPNSGLATIMSDGPGGEKWMYVGQNKAGQVWHDITGNKPGTVTINADGWANFSVNGGSVSIWVKR

SEQ ID NO: 18101 - protein, 483 aa, Bacillus sp.
HHNGTNGTMMQYFEWHLPNDGNHWNRLRDDASNLRNRGITAIWIPPAWKGTSQNDVGYGAYDLYDLGEFNQKGTVRTKYGTRSQLESAIHALKNNGVQVYGDVVMNHKGGADATENVLAVEVNPNNRNQEISEDYTIEAWTKFDFPGRRNTHSDFKWRWYHFDGVDWDQSRQFQNRIYKFRGKAWDWEVDSEYGNNDYLMFADLDMDHPEVVNELRRWGEWYTNTLNLDGFRIDAVKHIKYSFTRDWLTHVRNATGKEMFAVAEFWKNDLGALENYLNKTNWNHSVFDVPLHYNLYNASNSGGNYDMAKLLNGTVVQKHPMHAVTFVDNHDSQPGESLESFVQEWFKPLAYALILTREQGYPSVFYGDYYGIPTHSVPAMKAKIDPILEARQNFAYGTQHDYFDHHNIIGWTREGNTTHPNSGLATIMSDGPGGEKWMYVGQNKAGQVWHDITGNKPGTVTINADGWANFSVNGGSVSIWVKR

SEQ ID NO: 18102 - protein, 483 aa, Bacillus sp.
HHNGTNGTMMQYFEWHLPNDGNHWNRLRDDASNLRNRGITAIWIPPAWKGTSQNDVGYGAYDLYDLGEFNQKGTVRTKYGTRSQLESAIHALKNNGVQVYGDVVMNHKAGADATENVLAVEVNPNNRNQEISGDYTIEAYTKFDFPGRGNTYSDFKWRWYHFDGVDWDQSRQFQNRIYKFRGKAWDWEVDSDFGNYDYLMYADYDMDHPEVVNELRRWGEWYTNTLNLDGFRIDAVKHIKFSFTRDWLTHVRNATGKGMFAVAEFWKNDLGALENYLNKTNWNHSVFDVPLHYNLYNASNSGGNYDMAKLLNGTVVQKHPMHAVTFVDNHDSQPGESLESFVQEWFKPLAYALILTREQGYPSVFYGDYYGIPTHSVPAMKAKIDPILEARQNFAYGTQHDYFDHHNIIGWTREGNTTHPNSGLATIMSDGPGGEKWMYVGQNKAGQVWHDITGNKPGTVTINADGWANFSVNGGSVSIWVKR

SEQ ID NO: 18103 - protein, 483 aa, Bacillus sp.
HHNGTNGTMMQYFEWHLPNDGNHWNRLRDDASNLRNRGITAIWIPPAWKGTSQNDVGYGAYDLYDLGEFNQKGTVRTKYGTRSQLESAIHALKNNGVQVYGDVVMNHKGGADATETVLAVEVNPNNRNQEISEDYTIEAWTKFDFPERGNTHSDFKWRWYHFDGVDWDQSRQFQNRIYKFRGKAWDWEVDSENGNYDNLMYAFVDLDHPEVVNELRRWGEWYTNTLNLDGFRIDAVKHIKYSFTRDWLTHVRNATGKEMFAVAEFWKNDLGALENYLNKTNWNHSVFDVPLHYNLYNASNSGGNYDMAKLLNGTVVQKHPMHAVTFVDNHDSQPGESLESFVQEWFKPLAYALILTREQGYPSVFYGDYYGIPTHSVPAMKAKIDPILEARQNFAYGTQHDYFDHHNIIGWTREGNTTHPNSGLATIMSDGPGGEKWMYVGQNKAGQVWHDITGNKPGTVTINADGWANFSVNGGSVSIWVKR

SEQ ID NO: 18104 - protein, 485 aa, Bacillus sp.
HHNGTNGTMMQYFEWHLPNDGNHWNRLRDDASNLRNRGITAIWIPPAWKGTSQNDVGYGAYDLYDLGEFNQKGTVRTKYGTRSQLESAIHALKNNGVQVYGDVVMNHKGGADATENVLAVEVNPNNRNQEISGDYTIEAYTKFDFPGRGNTYSDFKWRWYHFDGVDWDQSRQFQNRIYKFRGDGKAWDWEVDSEFGNYDYLMYADYDMDHPEVVNELRRWGEWYTNTLNLDGFRIDAVKHIKFSFTRDWLTHVRNATGKGMFAVAEFWKNDLGALENYLNKTNWNHSVFDVPLHYNLYNASNSRGNYDMAKLLNGTVVQKHPMHAVTFVDNHDSQPGESLESFVQEWFKPLAYALILTREQGYPSVFYGDYYGIPTHSVPAMKAKIDPILEARQNFAYGTQHDYFDHHNIIGWTREGNTTHPNSGLATIMSDGPGGEKWMYVGQNKAGQVWHDITGNKPGTVTINADGWANFSVNKGSVSIWVKR

SEQ ID NO: 18105 - protein, 485 aa, Bacillus sp.
HHNGTNGTMMQYFEWHLPNDGNHWNRLRDDASNLRNRGITAIWIPPAWKGTSQNDVGYGAYDLYDLGEFNQKGTVRTKYGTRSQLESAIHALKNNGVQVYGDVVMNHKGGADATETVLAVEVNPNNRNLEISGDYTIEAWTRFDFPGRGNTYSDFKWRWYHFDGVDWDQSRQFQNRIYKFRGXXKAWDWEVDSEYGNNDYLMFADLDMDHPEVVNELRRWGEWYTNTLNLDGFRIDAVKHIKYSFTRDWLTHVRNATGKEMFAVAEFWKNDLGALENYLNKTNWNHSVFDVPLHYNLYNASNSGGNYDMAKLLNGTVVQKHPMHAVTFVDNHDSQPGESLESFVQEWFKPLAYALILTREQGYPSVFYGDYYGIPTHSVPAMKAKIDPILEARQNFAYGTQHDYFDHHNIIGWTREGNTTHPNSGLATIMSDGPGGEKWMYVGQNKAGQVWHDITGNKPGTVTINADGWANFSVNGGSVSIWVKR

SEQ ID NO: 18106 - protein, 485 aa, Bacillus sp.
HHNGTNGTMMQYFEWHLPNDGNHWNRLRDDASNLRNRGITAIWIPPAWKGTSQNDVGYGAYDLYDLGEFNQKGTVRTKYGTRSQLESAIHALKNNGVQVYGDVVMNHKGGADATETVLAVEVNPNNRNQEISEDYTIEAWTKFDFPERGNTHSDFKWRWYHFDGVDWDQSRQFQNRIYKFRGXXKAWDWEVDSENGNNDYLMFADLDMDHPEVVNELRRWGEWYTNTLNLDGFRIDAVKHIKYSFTRDWLTHVRNATGKEMFAVAEFWKNDLGALENYLNKTNWNHSVFDVPLHYNLYNASNSGGNYDMAKLLNGTVVQKHPMHAVTFVDNHDSQPGESLESFVQEWFKPLAYALILTREQGYPSVFYGDYYGIPTHSVPAMKAKIDPILEARQNFAYGTQHDYFDHHNIIGWTREGNTTHPNSGLATIMSDGPGGEKWMYVGQNKAGQVWHDITGNKPGTVTINADGWANFSVNGGSVSIWVKR

SEQ ID NO: 18107 - protein, 483 aa, Bacillus sp.
HHNGTNGTMMQYFEWHLPNDGNHWNRLRDDASNLRNRGITAIWIPPAWKGTSQNDVGYGAYDLYDLGEFNQKGTVRTKYGTRSQLESAIHALKNNGVQVYGDVVMNHKAGADATENVLAVEVNPNNRNQEISGDYTIEAYTKFDFPGRGNTYSDFKWRWYHFDGVDWDQSRQFQNRIYKFRGKAWDWEVDSEFGNYDYLMYADYDMDHPEVVNELRRWGEWYTNTLNLDGFRIDAVKHIKFSFTRDWLTHVRNATGKGMFAVAEFWKNDLGALENYLNKTNWNHSVFDVPLHYNLYNASNSGGNYDMAKLLNGTVVQKHPMHAVTFVDNHDSQPGESLESFVQEWFKPLAYALILTREQGYPSVFYGDYYGIPTHSVPAMKAKIDPILEARQNFAYGTQHDYFDHHNIIGWTREGNTTHPNSGLATIMSDGPGGEKWMYVGQNKAGQVWHDITGNKPGTVTINADGWANFSVNEGSVSIWVKR

SEQ ID NO: 18108 - protein, 485 aa, Bacillus sp.
HHNGTNGTMMQYFEWHLPNDGNHWNRLRDDASNLRNRGITAIWIPPAWKGTSQNDVGYGAYDLYDLGEFNQKGTVRTKYGTRSQLESAIHALKNNGVQVYGDVVMNHKGGADATENVLAVEVNPNNRNQEISGDYTIEAYTKFDFPGRGNTYSDFKWRWYHFDGVDWDQSRQFQNRIYKFRGDGKAWDWEVDSEFGNYDYLMYADYDMDHPEVVNELRRWGEWYTNTLNLDGFRIDAVKHIKFSFTRDWLTHVRNATGKGMFAVAEFWKNDLGALENYLNKTNRNHSVFDVPLHYNLYNASNSGGNYDMAKLLNGTVVQKHPMHAVTFVDNHDSQPGESLESFVQEWFKPLAYALILTREQGYPSVFYGDYYGIPTHSVPAMKAKIDPILEARQNFAYGTQHDYFDHHNIIGWTREGNTTHPNSGLATIMSDGPGGEKWMYVGQNKAGQVWHDITGNKPGTVTINADGWANFSVNGRSVSIWVKR

SEQ ID NO: 18109 - protein, 485 aa, Bacillus sp.
HHNGTNGTMMQYFEWHLPNDGNHWNRLRDDASNLRNRGITAIWIPPAWKGTSQNDVGYGAYDLYDLGEFNQKGTVRTKYGTRSQLESAIHALKNNGVQVYGDVVMNHKGGADATENVLAVEVNPNNRNQEISEDYTIEAWTKFDFPGRRNTHSDFKWRWYHFDGVDWDQSRQFQNRIYKFRGXXKAWDWEVDSEYGNNDYLMFADLDMDHPEVVNELRRWGEWYTNTLNLDGFRIDAVKHIKYSFTRDWLTHVRNATGKEMFAVAEFWKNDLGALENYLNKTNWNHSVFDVPLHYNLYNASNSGGNYDMAKLLNGTVVQKHPMHAVTFVDNHDSQPGESLESFVQEWFKPLAYALILTREQGYPSVFYGDYYGIPTHSVPAMKAKIDPILEARQNFAYGTQHDYFDHHNIIGWTREGNTTHPNSGLATIMSDGPGGEKWMYVGQNKAGQVWHDITGNKPGTVTINADGWANFSVNGGSVSIWVKR

SEQ ID NO: 18110 - protein, 483 aa, Bacillus sp.
HHNGTNGTMMQYFEWHLPNDGNHWNRLRDDASNLRNRGITAIWIPPAWKGTSQNDVGYGAYDLYDLGEFNQKGTVRTKYGTRSQLESAIHALKNNGVQVYGDVVMNHKGGADATENVLAVEVNPNNRNQEISGDYTIEAYTKFDFPGRGNTYSDFKWRWYHFDGVDWDQSRQFQNRIYKFRGKAWDWEVDSEFGNYDYLMYADYDMDHPEVVNELRRWGEWYTNTLNLDGFRIDAVKHIKFSFTRDWLTHVRNATGKGMFAVAEFWKNDLGALENYLNKTNFNHSVFDVPLHYNLYNASNSGGNYDMAKLLNGTVVQKHPMHAVTFVDNHDSQPGESLESFVQEWFKPLAYALILTREQGYPSVFYGDYYGIPTHSVPAMKAKIDPILEARQNFAYGTQHDYFDHHNIIGWTREGNTTHPNSGLATIMSDGPGGEKWMYVGQNKAGQVWHDITGNKPGTVTINADGWANFSVNGRSVSIWVKR

SEQ ID NO: 18111 - protein, 483 aa, Bacillus sp.
HHNGTNGTMMQYFEWHLPNDGNHWNRLRDDASNLRNRGITAIWIPPAWKGTSQNDVGYGAYDLYDLGEFNQKGTVRTKYGTRSQLESAIHALKNNGVQVYGDVVMNHKGGADATETVLAVEVNPNNRNQEISEDYTIEAWTKFDFPERGNTHSDFKWRWYHFDGVDWDQSRQFQNRIYKFRGKAWDWEVDSENGNNDYLMFADLDMDHPEVVNELRRWGEWYTNTLNLDGFRIDAVKHIKYSFTRDWLTHVRNATGKEMFAVAEFWKNDLGALENYLNKTNWNHSVFDVPLHYNLYNASNSGGNYDMAKLLNGTVVQKHPMHAVTFVDNHDSQPGESLESFVQEWFKPLAYALILTREQGYPSVFYGDYYGIPTHSVPAMKAKIDPILEARQNFAYGTQHDYFDHHNIIGWTREGNTTHPNSGLATIMSDGPGGEKWMYVGQNKAGQVWHDITGNKPGTVTINADGWANFSVNGGSVSIWVKR

SEQ ID NO: 18112 - protein, 483 aa, Bacillus sp.
HHNGTNGTMMQYFEWHLPNDGNHWNRLRDDASNLRNRGITAIWIPPAWKGTSQNDVGYGAYDLYDLGEFNQKGTVRTKYGTRSQLESAIHALKNNGVQVYGDVVMNHKGGADATENVLAVEVNPNNRNQEISGDYTIEAYTKFDFPGRGNTYSDFKWRWYHFDGVDWDQSRQFQNRIYKFRGKAWDWEVDSEFGNYDYLMYADYDMDHPEVVNELRRWGEWYTNTLNLDGFRIDAVKHIKFSFTRDWLTHVRNATGKGMFAVAEFWKNDLGALENYLNKTNRNHSVFDVPLHYNLYNASNSGGNYDMAKLLNGTVVQKHPMHAVTFVDNHDSQPGESLESFVQEWFKPLAYALILTREQGYPSVFYGDYYGIPTHSVPAMKAKIDPILEARQNFAYGTQHDYFDHHNIIGWTREGNTTHPNSGLATIMSDGPGGEKWMYVGQNKAGQVWHDITGNKPGTVTINADGWANFSVNGKSVSIWVKR

SEQ ID NO: 18113 - protein, 485 aa, Bacillus sp.
HHNGTNGTMMQYFEWHLPNDGNHWNRLRDDASNLRNRGITAIWIPPAWKGTSQNDVGYGAYDLYDLGEFNQKGTVRTKYGTRSQLESAIHALKNNGVQVYGDVVMNHKGGADATENVLAVEVNPNNRNQEISGDYTIEAYTKFDFPGRGNTYSDFKWRWYHFDGVDWDQSRQFQNRIYKFRGDGKAWDWEVDSEFGNYDYLMYADYDMDHPEVVNELRRWGEWYTNTLNLDGFRIDAVKHIKFSFTRDWLTHVRNATGKGMFAVAEFWKNDLGALENYLNKTNFNHSVFDVPLHYNLYNASNSGGNYDMAKLLNGTVVQKHPMHAVTFVDNHDSQPGESLESFVQEWFKPLAYALILTREQGYPSVFYGDYYGIPTHSVPAMKAKIDPILEARQNFAYGTQHDYFDHHNIIGWTREGNTTHPNSGLATIMSDGPGGEKWMYVGQNKAGQVWHDITGNKPGTVTINADGWANFSVNGRSVSIWVKR

SEQ ID NO: 18114 - protein, 483 aa, Bacillus sp.
HHNGTNGTMMQYFEWHLPNDGNHWNRLRDDASNLRNRGITAIWIPPAWKGTSQNDVGYGAYDLYDLGEFNQKGTVRTKYGTRSQLESAIHALKNNGVQVYGDVVMNHKGGADATENVLAVEVNPNNRNQEISEDYTIEAWTKFDFPGRRNTHSDFKWRWYHFDGVDWDQSRQFQNRIYKFRGKAWDWEVDSENGYYDNLMYAFVDLDHPEVVNELRRWGEWYTNTLNLDGFRIDAVKHIKYSFTRDWLTHVRNATGKEMFAVAEFWKNDLGALENYLNKTNWNHSVFDVPLHYNLYNASNSGGNYDMAKLLNGTVVQKHPMHAVTFVDNHDSQPGESLESFVQEWFKPLAYALILTREQGYPSVFYGDYYGIPTHSVPAMKAKIDPILEARQNFAYGTQHDYFDHHNIIGWTREGNTTHPNSGLATIMSDGPGGEKWMYVGQNKAGQVWHDITGNKPGTVTINADGWANFSVNGGSVSIWVKR

SEQ ID NO: 18115 - protein, 485 aa, Bacillus sp.
HHNGTNGTMMQYFEWHLPNDGNHWNRLRDDASNLRNRGITAIWIPPAWKGTSQNDVGYGAYDLYDLGEFNQKGTVRTKYGTRSQLESAIHALKNNGVQVYGDVVMNHKGGADATENVLAVEVNPNNRNQEISGDYTIEAYTKFDFPGRGNTYSDFKWRWYHFDGVDWDQSRQFQNRIYKFRGDGKAWDWEVDSEFGNYDYLMYADYDMDHPEVVNELRRWGEWYTNTLNLDGFRIDAVKHIKFSFTRDWLTHVRNATGKGMFAVAEFWKNDLGALENYLNKTNRNHSVFDVPLHYNLYNASNSGGNYDMAKLLNGTVVQKHPMHAVTFVDNHDSQPGESLESFVQEWFKPLAYALILTREQGYPSVFYGDYYGIPTHSVPAMKAKIDPILEARQNFAYGTQHDYFDHHNIIGWTREGNTTHPNSGLATIMSDGPGGEKWMYVGQNKAGQVWHDITGNKPGTVTINADGWANFSVNGKSVSIWVKR

SEQ ID NO: 18116 - protein, 483 aa, Bacillus licheniformis
VNGTLMQYFEWYTPNDGQHWKRLQNDAEHLSDIGITAVWIPPAYKGTSQADVGYGAYDLYDLGEFHQKGTVRTKYGTKGELQSAIGSLHSRNVQVYGDVVLNHKAGADATEDVTAVEVNPANRNQETSEEYQIKAWTDFRFPGRGNTYSDFKWHWYHFDGADWDESRKISRIFKFRGEGKAWDWEVSSENGNYDYLMYADVDYDHPDVVAETKKWGIWYANELSLDGFRIDAAKHIKFSFLRDWVQAVRQATGKEMFTVAEYWQNNAGKLENYLNKTSFNQSVFDVPLHFNLQAASSQGGGYDMRRLLDGTVVSRHPEKAVTFVENHDTQPGQSLESTVQTWFKPLAYAFILTRESGYPQVFYGDMYGTKGTSPKEIPSLKDNIEPILKARKEYAYGPQHDYIDHPDVIGWTREGDSSAAKSGLAALITDGPGGSKRMYAGLKNAGETWYDITGNRSDTVKIGSDGWGEFHVNDGSVSIYVQK

SEQ ID NO: 18117 - protein, 479 aa, Aspergillus oryzae
ATPADWRSQSIYFLLTDRFARTDGSTTATCNTADKKYCGGTWQGIIDKLDYIQGMGFTAIWITPVTAQLPQTTAAGDAYHGYWQQDIYSLNENYGTADDLKALSSALHERGMYLMVDVVANHMGYDGAGSSVDYSVFKPFSSQDYFHPFCFIQNYEDQTQVEDCWLGDPAGFSLPDLDTTKDVVKNEWYDWVGSLVSNYSIDGLRIDTVKHVQKDFWPGYNKAAGVYCIGEVLGDDPAYTCPYQNVMDGVLNYPIYYPLLNAFKSTSGSMDDLYNMINTVKSDCPDSTLLGTFVENHDNPRFASYTNDIALAKNVAAFIILNDGIPIIYAGQEQHYAGGNDPANREATWLSGYPTDSELYKLIASANAIRNYAISKDTGFVTYKNWPIYKDDTTIAMRKGTDGSQIVTILSNKGASGDSYTLSLSGAGYTAGQQLTEVIGCTTVTVGSDGNVPVPMAGGLPRVLYPTEKLAGSKICSSS

SEQ ID NO: 18118 - protein, 479 aa, Aspergillus oryzae
ATPADWRSQSIYFLLTDRFARTDGSTTATCNTADKKYCGGTWQGIIDKLDYIQGMGFTAIWITPVTAQLPQTTAAGDAYHGYWQQDIYSLNENYGTADDLKALSSALHERGMYLMVDVVANHMGYDGAGSSVDYSVFKPFSSQDYFHPFCFIQNYEDQTQVEDCWFTDPAGFSLPDLDTTKDVVKNEWYDWVGSLVSNYSIDGLRIDTVKHVQKDFWPGYNKAAGVYCIGEVLDGDPAYTCPYQNVMDGVLNYPIYYPLLNAFKSTSGSMDDLYNMINTVKSDCPDSTLLGTFVENHDNPRFASYTNDIALAKNVAAFIILNDGIPIIYAGQEQHYAGGNDPANREATWLSGYPTDSELYKLIASANAIRNYAISKDTGFVTYKNWPIYKDDTTIAMRKGTDGSQIVTILSNKGASGDSYTLSLSGAGYTAGQQLTEVIGCTTVTVGSDGNVPVPMAGGLPRVLYPTEKLAGSKICSSS

SEQ ID NO: 18119 - protein, 397 aa, unidentified
HHNGTNGTMMQYFEWHLPNDGNHWNRLRDDASNLRNRGITAIWIPPAWKGTSQNDVGYGAYDLYDLGEFNQKGTVRTKYGTRSQLESAIHALKNNGVQVYGDVVMNHKGGADATENVLAVEVNPNNRNQEISGDYTIEAYTKFDFPGRGNTYSDFKWRWYHFDGVDWDQSRQFQNRIYKFRGKAWDWEVDSEFGNYDYLMYADYDMDHPEVVNELRRWGEWYTNTLNLDGFRIDAVKHIKFSFTRDWLTHVRNATGKGMFAVAEFWKNDLGALENYLNKTNWNHSVFDVPLHYNLYNASNSRGNYDMAKLLNGTVVQKHPMHAVTFVDNHDSQPGESLESFVQEWFKPLAYALILTREQGYPSVFYGDYYGIPTHSVPAMKAKIDPILEARQNFAYG

SEQ ID NO: 18120 - protein, 516 aa, Geobacillus stearothermophilus
AAAPFNGTMMQYFEWYLPDDGTLWTKVANEANNLSSLGITALWLPPAYKGTSRSDVGYGVYDLYDLGEFNQKGSVRTKYGTKAQYLQAIQAAHAAGMQVYADVVFDHKGGADGTEWVDAVEVNPSDRNQEISGTYQIQAWTKFDFNGRGNTYSSFKWRWYHFDGVDWDESRKLSRIYKFRGIGKAWDWEVDTENGNYDYLMYADLDMDHPEVVTELKNWGKWYVNTTNIDGFRLDAVKHIKFSFFPDWLSYVRSQTGKPLFTVGEYWSYDINKLHNYITKTNGTMSLFDAPLHNKFYTASKSGGAFDMSTLMNNTLMKDQPTLAVTFVDNHDTEPGQALQSWVDPWFKPLAYAFILTRQEGYPCVFYGDYYGIPQYNIPSLKSKIDPLLIARRDYAYGTQHDYLDHSDIIGWTREGVTEKPGSGLAALITDGPGGSKWMYVGKQHAGKVFYDLTGNRSDTVTINSDGWGEFKVNGGSVSVWVPRKTTVSTIAWPITTRPWTGEFVRWTEPRLVAWP

SEQ ID NO: 18121 - protein, 513 aa, Geobacillus stearothermophilus
AAPFNGTMMQYFEWYLPDDGTLWTKVANEANNLSSLGITALWLPPAYKGTSRSDVGYGVYDLYDLGEFNQKGTVRTKYGTKAQYLQAIQAAHAAGMQVYADVVFDHKGGADGTEWVDAVEVNPSDRNQVISGTYQIQAWTKFDFPGRGNTYSSFKWRWYHFDGVDWDESRKLSRIYLFEGKAWDWEVDTEFGNYDYLMYADLDMDHPEVVTELKNWGPWYVLTTNIDGFRLDAVKHIKFSFFPDWLSYVRSSTGKPLFTVGEYWSYDINKLHNYITKTNGTMSLFDAPLHNKFYTASKSGGAFDMRTLMTNTLMKDQPTLAVTFVDNHDTEPGQALQSWVDPWFKPLAYAFILTRQEGYPCVFYGDYYGIPQYNIPSLKSKIDPLLIARRDYAYGTQHDYLDHSDIIGWTREGVTEKPGSGLAALITDGPGGSKWMYVGKQHAGKVFYDLTGNRSDTVTINSDGWGEFKVNGGSVSVWVPRKTTVSTIARPITTRPWTGEFVRWTEPRLVAWP

SEQ ID NO: 18122 - protein, 515 aa, Geobacillus stearothermophilus
AAPFNGTMMQYFEWYLPDDGTLWTKVANEANNLSSLGITALWLPPAYKGTSRSDVGYGVYDLYDLGEFNQKGTVRTKYGTKAQYLQAIQAAHAAGMRVYADVVFDHKGGADGTEWVDAVEVNPSDRNQEISGTYQIQAWTKFDFPGRGNTYSSFKWRWYHFDGVDWDESRKLSRIYKFRGIGKAWDWEVDTENGNYDYLMYADLDMDHPEVVTELKNWGKWYVNTTNIDGFRLDAVKHIKFQFFPDWLSYVRSQTGKPLFTVGEYWSYDINKLHNYITKTNGTMSLFDAPLHNKFYTASKSGGAFDMRTLMTNTLMKDQPTLAVTFVDNHDTEPGQALRSWVDPWFKPLAYAFILTRREGYPCVFYGDYYGIPQYNIPSLKSKIDPLLIARRDYAYGTQHDYLDHSDIIGWTREGVTEKPGSGLAALITDGPGGSKWMYVGKRHAGKVFYDLTGNRSDTVTINSDGWGEFKVNGGSVSVWVPRKTTVSTIARPITTRPWTGEFVRWTEPRLVAWP

SEQ ID NO: 18123 - protein, 515 aa, Geobacillus stearothermophilus
AAPFNGTMMQYFEWYLPDDGTLWTKVANEANNLSSLGITALWLPPAYKGTSRSDVGYGVYDLYDLGEFNQKGTVRTKYGTKAQYLQAIQAAHAAGMQVYADVVFDHKGGADGTEWVDAVEVNPSDRNQEISGTYQIQAWTKFDFPGRGNTYSSFKWRWYHFDGVDWDESRKLSRIYKFRGIGKAWDWEVDTENGNYDYLMYADLDMDHPEVVTELKNWGPWYVLTTNIDGFRLDAVKHIKFQFFPDWLSYVRSSTGKPLFTVGEYWSYDINKLHNYITKTNGTVSLFDAPLHNKFYTASKSGGAFDMRTLMTNTLMKDQPTLAVTFVDNHDTEPGQALQSWVDPWFKPLAYAFILTRQEGYPCVFYGDYYGIPQYNIPSLKSKIDPLLIARRDYAYGTQHDYLDHSDIIGWTREGVTEKPGSGLAALITDGPGGSKWMYVGKQHAGKVFYDLTGNRSDTVTINSDGWGEFKVNGGSVSVWVPRKTTVSTIARPITTRPWTGEFVRWTEPRLVAWP

SEQ ID NO: 18124 - protein, 515 aa, Geobacillus stearothermophilus
AAPFNGTMMQYFEWYLPDDGTLWTKVANEANNLSSLGITALWLPPAYKGTSRSDVGYGVYDLYDLGEFNQKGTVRTKYGTKAQYLQAIQAAHAAGMEVYADVVFDHKGGADGTEWVDAVEVNPSDRNQEISGTYQIQAWTKFDFPGRGNTYSSFKWRWYHFDGVDWDESRKLSRIYKFRGIGKAWDWEVDTENGNYDYLMYADLDMDHPEVVTELKNWGKWYVNTTNIDGFRLDAVKHIKFQFFPDWLSYVRSQTGKPLFTVGEYWSYDINKLHNYITKTNGTMSLFDAPLHNKFYTASKSGGAFDMRTLMTNTLMKDRPTLAVTFVDNHDTEPGQALQSWVDPWFKPLAYAFILTRREGYPCVFYGDYYGIPQYNIPSLKSKIDPLLIARRDYAYGTQHDYLDHSDIIGWTREGVTEKPGSGLAALITDGPGGSKWMYVGKRHAGKVFYDLTGNRSDTVTINSDGWGEFKVNGGSVSVWVPRKTTVSTIARPITTRPWTGEFVRWTEPRLVAWP

SEQ ID NO: 18125 - protein, 515 aa, Geobacillus stearothermophilus
AAPFNGTMMQYFEWYLPDDGTLWTKVANEANNLSSLGITALWLPPAYKGTSRSDVGYGVYDLYDLGEFNQKGTVRTKYGTKAQYLQAIQAAHAAGMRVYADVVFDHKGGADGTEWVDAVEVNPSDRNQEISGTYQIQAWTKFDFPGRGNTYSSFKWRWYHFDGVDWDESRKLSRIYKFRGIGKAWDWEVDTENGNYDYLMYADLDMDHPEVVTELKNWGKWYVNTTNIDGFRLDAVKHIKFQFFPDWLSYVRSQTGKPLFTVGEYWSYDINKLHNYITKTNGTMSLFDAPLHNKFYTASKSGGAFDMRTLMTNTLMKDEPTLAVTFVDNHDTEPGQALQSWVDPWFKPLAYAFILTREEGYPCVFYGDYYGIPQYNIPSLKSKIDPLLIARRDYAYGTQHDYLDHSDIIGWTREGVTEKPGSGLAALITDGPGGSKWMYVGKEHAGKVFYDLTGNRSDTVTINSDGWGEFKVNGGSVSVWVPRKTTVSTIARPITTRPWTGEFVRWTEPRLVAWP

SEQ ID NO: 18126 - protein, 515 aa, Geobacillus stearothermophilus
AAPFNGTMMQYFEWYLPDDGTLWTKVANEANNLSSLGITALWLPPAYKGTSRSDVGYGVYDLYDLGEFNQKGTVRTKYGTKAQYLQAIQAAHAAGMRVYADVVFDHKGGADGTEWVDAVEVNPSDRNQEISGTYQIQAWTKFDFPGRGNTYSSFKWRWYHFDGVDWDESRKLSRIYKFRGIGKAWDWEVDTENGNYDYLMYADLDMDHPEVVTELKNWGKWYVNTTNIDGFRLDAVKHIKFQFFPDWLSYVRSQTGKPLFTVGEYWSYDINKLHNYITKTNGTMSLFDAPLHNKFYTASKSGGAFDMRTLMTNTLMKDEPTLAVTFVDNHDTEPGQALQSWVDPWFKPLAYAFILTRREGYPCVFYGDYYGIPQYNIPSLKSKIDPLLIARRDYAYGTQHDYLDHSDIIGWTREGVTEKPGSGLAALITDGPGGSKWMYVGKEHAGKVFYDLTGNRSDTVTINSDGWGEFKVNGGSVSVWVPRKTTVSTIARPITTRPWTGEFVRWTEPRLVAWP

SEQ ID NO: 18127 - protein, 515 aa, Geobacillus stearothermophilus
AAPFNGTMMQYFEWYLPDDGTLWTKVANEANNLSSLGITALWLPPAYKGTSRSDVGYGVYDLYDLGEFNQKGTVRTKYGTKAQYLQAIQAAHAAGMEVYADVVFDHKGGADGTEWVDAVEVNPSDRNQEISGTYQIQAWTKFDFPGRGNTYSSFKWRWYHFDGVDWDESRKLSRIYKFRGIGKAWDWEVDTENGNYDYLMYADLDMDHPEVVTELKNWGKWYVNTTNIDGFRLDAVKHIKFQFFPDWLSYVRSQTGKPLFTVGEYWSYDINKLHNYITKTNGTMSLFDAPLHNKFYTASKSGGAFDMRTLMTNTLMKDRPTLAVTFVDNHDTEPGQALQSWVDPWFKPLAYAFILTREEGYPCVFYGDYYGIPQYNIPSLKSKIDPLLIARRDYAYGTQHDYLDHSDIIGWTREGVTEKPGSGLAALITDGPGGSKWMYVGKRHAGKVFYDLTGNRSDTVTINSDGWGEFKVNGGSVSVWVPRKTTVSTIARPITTRPWTGEFVRWTEPRLVAWP

SEQ ID NO: 18128 - protein, 515 aa, Geobacillus stearothermophilus
AAPFNGTMMQYFEWYLPDDGTLWTKVANEANNLSSLGITALWLPPAYKGTSRSDVGYGVYDLYDLGEFNQKGTVRTKYGTKAQYLQAIQAAHAAGMRVYADVVFDHKGGADGTEWVDAVEVNPSDRNQEISGTYQIQAWTKFDFPGRGNTYSSFKWRWYHFDGVDWDESRKLSRIYKFRGIGKAWDWEVDTENGNYDYLMYADLDMDHPEVVTELKNWGKWYVNTTNIDGFRLDAVKHIKFQFFPDWLSYVRSQTGKPLFTVGEYWSYDINKLHNYITKTNGTMSLFDAPLHNKFYTASKSGGAFDMRTLMTNTLMKDRPTLAVTFVDNHDTEPGQALQSWVDPWFKPLAYAFILTREEGYPCVFYGDYYGIPQYNIPSLKSKIDPLLIARRDYAYGTQHDYLDHSDIIGWTREGVTEKPGSGLAALITDGPGGSKWMYVGKEHAGKVFYDLTGNRSDTVTINSDGWGEFKVNGGSVSVWVPRKTTVSTIARPITTRPWTGEFVRWTEPRLVAWP

SEQ ID NO: 18129 - protein, 515 aa, Geobacillus stearothermophilus
AAPFNGTMMQYFEWYLPDDGTLWTKVANEANNLSSLGITALWLPPAYKGTSRSDVGYGVYDLYDLGEFNQKGTVRTKYGTKAQYLQAIQAAHAAGMRVYADVVFDHKGGADGTEWVDAVEVNPSDRNQEISGTYQIQAWTKFDFPGRGNTYSSFKWRWYHFDGVDWDESRKLSRIYKFRGIGKAWDWEVDTENGNYDYLMYADLDMDHPEVVTELKNWGKWYVNTTNIDGFRLDAVKHIKFQFFPDWLSYVRSQTGKPLFTVGEYWSYDINKLHNYITKTNGTMSLFDAPLHNKFYTASKSGGAFDMRTLMTNTLMKDEPTLAVTFVDNHDTEPGQALQSWVDPWFKPLAYAFILTRREGYPCVFYGDYYGIPQYNIPSLKSKIDPLLIARRDYAYGTQHDYLDHSDIIGWTREGVTEKPGSGLAALITDGPGGSKWMYVGKRHAGKVFYDLTGNRSDTVTINSDGWGEFKVNGGSVSVWVPRKTTVSTIARPITTRPWTGEFVRWTEPRLVAWP

SEQ ID NO: 18130 - protein, 515 aa, Geobacillus stearothermophilus
AAPFNGTMMQYFEWYLPDDGTLWTKVANEANNLSSLGITALWLPPAYKGTSRSDVGYGVYDLYDLGEFNQKGTVRTKYGTKAQYLQAIQAAHAAGMRVYADVVFDHKGGADGTEWVDAVEVNPSDRNQEISGTYQIQAWTKFDFPGRGNTYSSFKWRWYHFDGVDWDESRKLSRIYKFRGIGKAWDWEVDTENGNYDYLMYADLDMDHPEVVTELKNWGKWYVNTTNIDGFRLDAVKHIKFQFFPDWLSYVRSQTGKPLFTVGEYWSYDINKLHNYITKTNGTMSLFDAPLHNKFYTASKSGGAFDMRTLMTNTLMKDRPTLAVTFVDNHDTEPGQALQSWVDPWFKPLAYAFILTREEGYPCVFYGDYYGIPQYNIPSLKSKIDPLLIARRDYAYGTQHDYLDHSDIIGWTREGVTEKPGSGLAALITDGPGGSKWMYVGKRHAGKVFYDLTGNRSDTVTINSDGWGEFKVNGGSVSVWVPRKTTVSTIARPITTRPWTGEFVRWTEPRLVAWP

SEQ ID NO: 18131 - protein, 515 aa, Geobacillus stearothermophilus
AAPFNGTMMQYFEWYLPDDGTLWTKVANEANNLSSLGITALWLPPAYKGTSRSDVGYGVYDLYDLGEFNQKGTVRTKYGTKAQYLQAIQAAHAAGMRVYADVVFDHKGGADGTEWVDAVEVNPSDRNQEISGTYQIQAWTKFDFPGRGNTYSSFKWRWYHFDGVDWDESRKLSRIYKFRGIGKAWDWEVDTENGNYDYLMYADLDMDHPEVVTELKNWGKWYVNTTNIDGFRLDAVKHIKFQFFPDWLSYVRSQTGKPLFTVGEYWSYDINKLHNYITKTNGTMSLFDAPLHNKFYTASKSGGAFDMRTLMTNTLMKDEPTLAVTFVDNHDTEPGQALQSWVDPWFKPLAYAFILTREEGYPCVFYGDYYGIPQYNIPSLKSKIDPLLIARRDYAYGTQHDYLDHSDIIGWTREGVTEKPGSGLAALITDGPGGSKWMYVGKRHAGKVFYDLTGNRSDTVTINSDGWGEFKVNGGSVSVWVPRKTTVSTIARPITTRPWTGEFVRWTEPRLVAWP

SEQ ID NO: 18132 - protein, 515 aa, Geobacillus stearothermophilus
AAPFNGTMMQYFEWYLPDDGTLWTKVANEANNLSSLGITALWLPPAYKGTSRSDVGYGVYDLYDLGEFNQKGTVRTKYGTKAQYLQAIQAAHAAGMEVYADVVFDHKGGADGTEWVDAVEVNPSDRNQEISGTYQIQAWTKFDFPGRGNTYSSFKWRWYHFDGVDWDESRKLSRIYKFRGIGKAWDWEVDTENGNYDYLMYADLDMDHPEVVTELKNWGKWYVNTTNIDGFRLDAVKHIKFQFFPDWLSYVRSQTGKPLFTVGEYWSYDINKLHNYITKTNGTMSLFDAPLHNKFYTASKSGGAFDMRTLMTNTLMKDEPTLAVTFVDNHDTEPGQALQSWVDPWFKPLAYAFILTRREGYPCVFYGDYYGIPQYNIPSLKSKIDPLLIARRDYAYGTQHDYLDHSDIIGWTREGVTEKPGSGLAALITDGPGGSKWMYVGKEHAGKVFYDLTGNRSDTVTINSDGWGEFKVNGGSVSVWVPRKTTVSTIARPITTRPWTGEFVRWTEPRLVAWP

SEQ ID NO: 18133 - protein, 515 aa, Geobacillus stearothermophilus
AAPFNGTMMQYFEWYLPDDGTLWTKVANEANNLSSLGITALWLPPAYKGTSRSDVGYGVYDLYDLGEFNQKGTVRTKYGTKAQYLQAIQAAHAAGMQVYADVVFDHKGGADGTEWVDAVEVNPSDRNQEISGTYQIQAWTKFDFPGRGNTYSSFKWRWYHFNGVDWDESRKLSRIYKFRGIGKKWNEEVDTENGNYDYLMYANLDYNHPEVVTELKNWGKWYVNTTNIDGFRLDAVKHIKFSFFPDWLSYVRSQTGKPLFTVGEYWSYDINKLHNYITKTDGTMSLFDAPLHNKFYTASKSGGAFDMRTLMTNTLMKDQPTLAVTFVDNHDTEPGQALQSWVDPWFKPLAYAFILTRQEGYPCVFYGDYYGIPQYNIPSLKSKIDPLLIARRDYAYGTQHDYLDHSDIIGWTREGGTEKPGSGLAALITDGPGGSKWMYVGKQHAGKVFYDLTGNRSDTVTINSDGWGEFKVNGGSVSVWVPRKTTVSTIARPITTRPWTGEFVRWTEPRLVAWP

SEQ ID NO: 18134 - protein, 515 aa, Geobacillus stearothermophilus
AAPFNGTMMQYFEWYLPDDGTLWTKVANEANNLSSLGITALWLPPAYKGTSRSDVGYGVYDLYDLGEFNQKGTVRTKYGTKAQYLQAIQAAHAAGMEVYADVVFDHKGGADGTEWVDAVEVNPSDRNQEISGTYQIQAWTKFDFPGRGNTYSSFKWRWYHFDGVDWDESRKLSRIYKFRGIGKAWDWEVDTENGNYDYLMYADLDMDHPEVVTELKNWGKWYVNTTNIDGFRLDAVKHIKFQFFPDWLSYVRSQTGKPLFTVGEYWSYDINKLHNYITKTNGTMSLFDAPLHNKFYTASKSGGAFDMRTLMTNTLMKDRPTLAVTFVDNHDTEPGQALQSWVDPWFKPLAYAFILTRREGYPCVFYGDYYGIPQYNIPSLKSKIDPLLIARRDYAYGTQHDYLDHSDIIGWTREGVTEKPGSGLAALITDGPGGSKWMYVGKEHAGKVFYDLTGNRSDTVTINSDGWGEFKVNGGSVSVWVPRKTTVSTIARPITTRPWTGEFVRWTEPRLVAWP

SEQ ID NO: 18135 - protein, 515 aa, Geobacillus stearothermophilus
AAPFNGTMMQYFEWYLPDDGTLWTKVADEANNLSSLGITALWLPPAYKGTSRSDVGYGVYDLYDLGEFNQKGTVRTKYGTKAQYLQAIQAAHAAGMRVYADVVFDHKGGADGTEWVDAVEVNPSDRNQEISGTYQIQAWTKFDFPGRGNTYSSFKWRWYHFDGVDWDESRKLSRIYKFRGIGKAWDWEVDTENGNYDYLMYADLDMDHPEVVTELKNWGKWYVNTTNIDGFRLDAVKHIKFSFFPDWLSYVRSQTGKPLFTVGEYWSYDINKLHNYITKTNGTMSLFDAPLHNKFYTASKSGGAFDMRTLMTNTLMKDRPTLAVTFVDNHDTEPGQALQSWVDPWFKPLAYAFILTREEGYPCVFYGDYYGIPQYNIPSLKSKIDPLLIARRDYAYGTQHDYLDHSDIIGWTREGVTEKPGSGLAALITDGPGGSKWMYVGKEHAGKVFYDLTGNRSDTVTINSDGWGEFKVNGGSVSVWVPRKTTVSTIARPITTRPWTGEFVRWTEPRLVAWP

SEQ ID NO: 18136 - protein, 515 aa, Geobacillus stearothermophilus
AAPFNGTMMQYFEWYLPDDGTLWTKVANEANNLSSLGITALWLPPAYKGTSRSDVGYGVYDLYDLGEFNQKGTVRTKYGTKAQYLQAIQAAHAAGMEVYADVVFDHKGGADGTEWVDAVEVNPSDRNQEISGTYQIQAWTKFDFPGRGNTYSSFKWRWYHFDGVDWDESRKLSRIYKFRGIGKAWDWEVDTENGNYDYLMYADLDMDHPEVVTELKNWGKWYVNTTNIDGFRLDAVKHIKFQFFPDWLSYVRSQTGKPLFTVGEYWSYDINKLHNYITKTNGTMSLFDAPLHNKFYTASKSGGAFDMRTLMTNTLMKDEPTLAVTFVDNHDTEPGQALQSWVDPWFKPLAYAFILTREEGYPCVFYGDYYGIPQYNIPSLKSKIDPLLIARRDYAYGTQHDYLDHSDIIGWTREGVTEKPGSGLAALITDGPGGSKWMYVGKEHAGKVFYDLTGNRSDTVTINSDGWGEFKVNGGSVSVWVPRKTTVSTIARPITTRPWTGEFVRWTEPRLVAWP

SEQ ID NO: 18137 - protein, 515 aa, Bacillus stearothermophilus
AAPFNGTMMQYFEWYLPDDGTLWTKVANEANNLSSLGITALWLPPAYKGTSRSDVGYGVYDLYDLGEFNQKGTVRTKYGTKAQYLQAIQAAHAAGMQVYADVVFDHKGGADGTEWVDAVEVNPSDRNQEISGTYQIQAWTKFDFPGRGNTYSSFKWRWYHFDGVDWDESRKLSRIYKFEGIGKAWDWEVDTENGNYDYLMYADLDMDHPEVVTELKNWGPWYVLTTNIDGFRLDAVKHIKFQFFPDWLSYVRSSTGKPLFTVGEYWSYDINKLHNYITKTNGTMSLFDAPLHNKFYTASKSGGAFDMRTLMTNTLMKDQPTLAVTFVDNHDTEPGQALQSWVDPWFKPLAYAFILTRQEGYPCVFYGDYYGIPQYNIPSLKSKIDPLLIARRDYAYGTQHDYLDHSDIIGWTREGVTEKPGSGLAALITDGPGGSKWMYVGKQHAGKVFYDLTGNRSDTVTINSDGWGEFKVNGGSVSVWVPRKTTVSTIARPITTRPWTGEFVRWTEPRLVAWP

SEQ ID NO: 18138 - protein, 515 aa, Geobacillus stearothermophilus
AAPFNGTMMQYFEWYLPDDGTLWTKVANEANNLSSLGITALWLPPAYKGTSRSDVGYGVYDLYDLGEFNQKGTVRTKYGTKAQYLQAIQAAHAAGMEVYADVVFDHKGGADGTEWVDAVEVNPSDRNQEISGTYQIQAWTKFDFPGRGNTYSSFKWRWYHFDGVDWDESRKLSRIYKFRGIGKAWDWEVDTENGNYDYLMYADLDMDHPEVVTELKNWGKWYVNTTNIDGFRLDAVKHIKFQFFPDWLSYVRSQTGKPLFTVGEYWSYDINKLHNYITKTNGTMSLFDAPLHNKFYTASKSGGAFDMRTLMTNTLMKDRPTLAVTFVDNHDTEPGQALQSWVDPWFKPLAYAFILTREEGYPCVFYGDYYGIPQYNIPSLKSKIDPLLIARRDYAYGTQHDYLDHSDIIGWTREGVTEKPGSGLAALITDGPGGSKWMYVGKEHAGKVFYDLTGNRSDTVTINSDGWGEFKVNGGSVSVWVPRKTTVSTIARPITTRPWTGEFVRWTEPRLVAWP

SEQ ID NO: 18139 - protein, 515 aa, Geobacillus stearothermophilus
AAPFNGTMMQYFEWYLPDDGTLWTKVANEANNLSSLGITALWLPPAYKGTSRSDVGYGVYDLYDLGEFNQKGTVRTKYGTKAQYLQAIQAAHAAGMEVYADVVFDHKGGADGTEWVDAVEVNPSDRNQEISGTYQIQAWTKFDFPGRGNTYSSFKWRWYHFDGVDWDESRKLSRIYKFRGIGKAWDWEVDTENGNYDYLMYADLDMDHPEVVTELKNWGKWYVNTTNIDGFRLDAVKHIKFQFFPDWLSYVRSQTGKPLFTVGEYWSYDINKLHNYITKTNGTMSLFDAPLHNKFYTASKSGGAFDMRTLMTNTLMKDEPTLAVTFVDNHDTEPGQALQSWVDPWFKPLAYAFILTREEGYPCVFYGDYYGIPQYNIPSLKSKIDPLLIARRDYAYGTQHDYLDHSDIIGWTREGVTEKPGSGLAALITDGPGGSKWMYVGKRHAGKVFYDLTGNRSDTVTINSDGWGEFKVNGGSVSVWVPRKTTVSTIARPITTRPWTGEFVRWTEPRLVAWP

SEQ ID NO: 18140 - protein, 491 aa, Geobacillus stearothermophilus
AAPFNGTMMQYFEWYLPDDGTLWTKVANEANNLSSLGITALWLPPAYKGTSRSDVGYGAYDLYDLGEFNQKGTVRTKYGTKAQYLQAIQAAHAAGMQVYADVVFDHKGGADGTEWVDAVEVNPSDRNQVISGTYQIQAWTKFDFPGRGNTYSSFKWRWYHFDGVDWDESRKLSRIYLFEGKAWDWEVDTEFGNYDYLMYADLDMDHPEVTTELKNWGKWYVNTTNIDGFRLDAVKHIKFSFFPDWLSYVRSSTGKPLFTVGEYWSGDINKLHNYLTKTDHTVSLFDAPLHYKFYNASKSGGAFDMRTLMTNTLMKDQPTLAVTFVDNHDTEPGQALQSWVDPWFKPLAYAFILTRQEGYPCVFYGDYYGIPQYNIPSLKSKIDPLLIARRDYAYGTQHDYLDHSDIIGWTREGGTEKPGSGLAALITDGPGGSKWMYVGKQHAGKVFYDLTGNRSDTVTINSDGWGEFKVNGGSVSVWVPRKTTVSTIARP

SEQ ID NO: 18141 - protein, 491 aa, Geobacillus stearothermophilus
AAPFNGTMMQYFEWYLPDDGQLWNRVANDANNLSSLGITALWLPPAYKGTSRSDVGYGAYDLYDLGEFNQKGTVRTKYGTKAQYLQAIQAAHAAGMQVYADVVFDHKGGADGTEWVDAVEVNPSDRNQVISGTYQIQAWTKFDFPGRGNTYSSFKWRWYHFDGVDWDESRKLSRIYLFEGKAWDWPVDTEFGNYDYLMYADLDMDHPEVTTELKNWGKWYVNTTNIDGFRLDAVKHIKFYFFPDWLSYVRSSTGKPLFTVGEYWSGDINKLHNYITKTDGTVSLFDAPLHYKFYNASKSGGAFDMRTLMTNTLMKDQPTLAVTFVDNHDTEPGQALQSWVDPWFKPLAYAFILTRQEGYPCVFYGDYYGIPQYNIPSLKSKIDPLLIARRDYAYGTQHDYLDHSDIIGWTREGGTEKPGSGLAALITDGPGGSKWMYVGKQHAGKVFYDLTGNRSDTVTINSDGWGEFKVNGGSVSVWVPRKTTVSTIARP

SEQ ID NO: 18142 - protein, 491 aa, Geobacillus stearothermophilus
AAPFNGTMMQYFEWYLPDDGTLWTKVANEANNLSSLGITALWLPPAYKGTSRSDVGYGAYDLYDLGEFNQKGTVRTKYGTKAQYLQAIQAAHAAGMQVYADVVFDHKGGADGTEWVDAVEVNPSDRNQVISGTYQIQAWTKFDFPGRGNTYSSFKWRWYHFDGVDWDESRKLSRIYLFEGKAWDWEVDTEFGNYDYLMYADLDMDHPEVTTELKNWGKWYVNTTNIDGFRLDAVKHIKFSFFPDWLSYVRSSTGKPLFTVGEYWSGDINKLHNYITKTDGTVSLFDAPLHYKFYNASKSGGAFDMRWLMWNTLMKDQPTLAVTFVDNHDTEPGQALQSWVDPWFKPLAYAFILTRQEGYPCVFYGDYYGIPQYNIPSLKSKIDPLLIARRDYAYGTQHDYLDHSDIIGWTREGGTEKPGSGLAALITDGPGGSKWMYVGKQHAGKVFYDLTGNRSDTVTINSDGWGEFKVNGGSVSVWVPRKTTVSTIARP

SEQ ID NO: 18143 - protein, 491 aa, Geobacillus stearothermophilus
AAPFNGTMMQYFEWYLPDDGTLWTKVANEANNLSSLGITALWLPPAYKGTSRSDVGYGAYDLYDLGEFNQKGTVRTKYGTKAQYLQAIQAAHAAGMQVYADVVFDHKGGADGTEWVDAVEVNPSDRNQVISGTYQIQAWTKFDFPGRGNTYSSFKWRWYHFDGVDWDESRKLSRIYLFEGKAWDWEVDTEFGNYDYLMYADLDMDYPEVTTELKRWGKWYVNTTNIDGFRLDAVKHIKFSFFPDWLSYVRSSTGKPLFTVGEYWSGDINKLHNYITKTDGTVSLFDAPLHYKFYNASKSGGAFDMRTLMTNTLMKDQPTLAVTFVDNHDTEPGQALQSWVDPWFKPLAYAFILTRQEGYPCVFYGDYYGIPQYNIPSLKSKIDPLLIARRDYAYGTQHDYLDHSDIIGWTREGGTEKPGSGLAALITDGPGGSKWMYVGKQHAGKVFYDLTGNRSDTVTINSDGWGEFKVNGGSVSVWVPRKTTVSTIARP

SEQ ID NO: 18144 - protein, 491 aa, Geobacillus stearothermophilus
AAPFNGTMMQYFEWYLPDDGTLWTKVANEANNLSSLGITALWLPPAYKGTSRSDVGYGAYDLYDLGEFNQKGTVRTKYGTKAQYLQAIQAAHAAGMQVYADVVFDHKGGADGTEWVDAVEVNPSDRNQVISGTYQIQAWTKFDFPGRGNTYSSFKWRWYHFDGVDWDESRKLSRIYLFEGKAWDWEVDTEFGNYDYLMYADLDMDHPEVTTELKNWGKWYVNTTNIDGFRLDAVKHIKFSFFPDWLSYVRSSTGKPLFTVGEYWSGDINKLHNYITKTDGTVSLFDAPLHYKFYNASKSGGAFDMRTLMTNTLMKDQPTLAVTFVENHDTQPGQALQSWVDPWFKPLAYAFILTRQEGYPCVFYGDYYGIPQYNIPSLKSKIDPLLIARRDYAYGTQHDYLDHSDIIGWTREGGTEKPGSGLAALITDGPGGSKWMYVGKQHAGKVFYDLTGNRSDTVTINSDGWGEFKVNGGSVSVWVPRKTTVSTIARP

SEQ ID NO: 18145 - protein, 488 aa, Geobacillus stearothermophilus
AAPFNGTMMQYFEWYLPDDGTLWTKVANEANNLSSLGITALWLPPAYKGTSRSDVGYGVYDLYDLGEFNQKGTVRTKYGTKAQYLQAIQAAHAAGMRVYADVVFDHKGGADGTEWVDAVEVNPSDRNQEISGTYQIQAWTKFDFPGRGNTYSSFKWRWYHFDGVDWDESRKLSRIYKFRGIGKAWDWEVDTENGNYDYLMYADLDMDHPEVVTELKNWGKWYVNTTNIDGFRLDAVKHIKFQFFPDWLSYVRSQTGKPLFTVGEYWSYDINKLHNYITKTNGTMSLFDAPLHNKFYTASKSGGAFDMRTLMTNTLMKDRPTLAVTFVDNHDTEPGQALQSWVDPWFKPLAYAFILTREEGYPCVFYGDYYGIPQYNIPSLKSKIDPLLIARRDYAYGTQHDYLDHSDIIGWTREGVTEKPGSGLAALITDGPGGSKWMYVGKEHAGKVFYDLTGNRSDTVTINSDGWGEFKVNGGSVSVWVPRKTTVS

SEQ ID NO: 18146 - protein, 488 aa, Geobacillus stearothermophilus
AAPFNGTMMQYFEWYLPDDGTLWTKVANEANNLSSLGITALWLPPAYKGTSRSDVGYGVYDLYDLGEFNQKGTVRTKYGTKAQYLQAIQAAHAAGMEVYADVVFDHKGGADGTEWVDAVEVNPSDRNQEISGTYQIQAWTKFDFPGRGNTYSSFKWRWYHFDGVDWDESRKLSRIYKFRGIGKAWDWEVDTENGNYDYLMYADLDMDHPEVVTELKNWGKWYVNTTNIDGFRLDAVKHIKFQFFPDWLSYVRSQTGKPLFTVGEYWSYDINKLHNYITKTNGTMSLFDAPLHNKFYTASKSGGAFDMRTLMTNTLMKDRPTLAVTFVDNHDTEPGQALQSWVDPWFKPLAYAFILTRREGYPCVFYGDYYGIPQYNIPSLKSKIDPLLIARRDYAYGTQHDYLDHSDIIGWTREGVTEKPGSGLAALITDGPGGSKWMYVGKRHAGKVFYDLTGNRSDTVTINSDGWGEFKVNGGSVSVWVPRKTTVS

SEQ ID NO: 18147 - protein, 488 aa, Geobacillus stearothermophilus
AAPFNGTMMQYFEWYLPDDGTLWTKVANEANNLSSLGITALWLPPAYKGTSRSDVGYGVYDLYDLGEFNQKGTVRTKYGTKAQYLQAIQAAHAAGMQVYADVVFDHKGGADGTEWVDAVEVNPSDRNQVISGTYQIQAWTKFDFPGRGNTYSSFKWRWYHFDGVDWDESRKLSRIYLFEGXXKAWDWEVDTEFGNYDYLMYADLDMDHPEVVTELKNWGPWYVLTTNIDGFRLDAVKHIKFSFFPDWLSYVRSSTGKPLFTVGEYWSYDINKLHNYITKTNGTMSLFDAPLHNKFYTASKSGGAFDMRTLMTNTLMKDQPTLAVTFVDNHDTEPGQALQSWVDPWFKPLAYAFILTRQEGYPCVFYGDYYGIPQYNIPSLKSKIDPLLIARRDYAYGTQHDYLDHSDIIGWTREGVTEKPGSGLAALITDGPGGSKWMYVGKQHAGKVFYDLTGNRSDTVTINSDGWGEFKVNGGSVSVWVPRKTTVS

SEQ ID NO: 18148 - protein, 488 aa, Geobacillus stearothermophilus
AAPFNGTMMQYFEWYLPDDGTLWTKVANEANNLSSLGITALWLPPAYKGTSRSDVGYGVYDLYDLGEFNQKGTVRTKYGTKAQYLQAIQAAHAAGMRVYADVVFDHKGGADGTEWVDAVEVNPSDRNQEISGTYQIQAWTKFDFPGRGNTYSSFKWRWYHFDGVDWDESRKLSRIYKFRGIGKAWDWEVDTENGNYDYLMYADLDMDHPEVVTELKNWGKWYVNTTNIDGFRLDAVKHIKFQFFPDWLSYVRSQTGKPLFTVGEYWSYDINKLHNYITKTNGTMSLFDAPLHNKFYTASKSGGAFDMRTLMTNTLMKDEPTLAVTFVDNHDTEPGQALQSWVDPWFKPLAYAFILTREEGYPCVFYGDYYGIPQYNIPSLKSKIDPLLIARRDYAYGTQHDYLDHSDIIGWTREGVTEKPGSGLAALITDGPGGSKWMYVGKRHAGKVFYDLTGNRSDTVTINSDGWGEFKVNGGSVSVWVPRKTTVS

SEQ ID NO: 18149 - protein, 488 aa, Geobacillus stearothermophilus
AAPFNGTMMQYFEWYLPDDGTLWTKVANEANNLSSLGITALWLPPAYKGTSRSDVGYGVYDLYDLGEFNQKGTVRTKYGTKAQYLQAIQAAHAAGMRVYADVVFDHKGGADGTEWVDAVEVNPSDRNQEISGTYQIQAWTKFDFPGRGNTYSSFKWRWYHFDGVDWDESRKLSRIYKFRGIGKAWDWEVDTENGNYDYLMYADLDMDHPEVVTELKNWGKWYVNTTNIDGFRLDAVKHIKFQFFPDWLSYVRSQTGKPLFTVGEYWSYDINKLHNYITKTNGTMSLFDAPLHNKFYTASKSGGAFDMRTLMTNTLMKDEPTLAVTFVDNHDTEPGQALQSWVDPWFKPLAYAFILTREEGYPCVFYGDYYGIPQYNIPSLKSKIDPLLIARRDYAYGTQHDYLDHSDIIGWTREGVTEKPGSGLAALITDGPGGSKWMYVGKEHAGKVFYDLTGNRSDTVTINSDGWGEFKVNGGSVSVWVPRKTTVS

SEQ ID NO: 18150 - protein, 488 aa, Geobacillus stearothermophilus
AAPFNGTMMQYFEWYLPDDGTLWTKVANEANNLSSLGITALWLPPAYKGTSRSDVGYGVYDLYDLGEFNQKGTVRTKYGTKAQYLQAIQAAHAAGMRVYADVVFDHKGGADGTEWVDAVEVNPSDRNQEISGTYQIQAWTKFDFPGRGNTYSSFKWRWYHFDGVDWDESRKLSRIYKFRGIGKAWDWEVDTENGNYDYLMYADLDMDHPEVVTELKNWGKWYVNTTNIDGFRLDAVKHIKFQFFPDWLSYVRSQTGKPLFTVGEYWSYDINKLHNYITKTNGTMSLFDAPLHNKFYTASKSGGAFDMRTLMTNTLMKDRPTLAVTFVDNHDTEPGQALQSWVDPWFKPLAYAFILTREEGYPCVFYGDYYGIPQYNIPSLKSKIDPLLIARRDYAYGTQHDYLDHSDIIGWTREGVTEKPGSGLAALITDGPGGSKWMYVGKRHAGKVFYDLTGNRSDTVTINSDGWGEFKVNGGSVSVWVPRKTTVS

SEQ ID NO: 18151 - protein, 488 aa, Geobacillus stearothermophilus
AAPFNGTMMQYFEWYLPDDGTLWTKVANEANNLSSLGITALWLPPAYKGTSRSDVGYGVYDLYDLGEFNQKGTVRTKYGTKAQYLQAIQAAHAAGMEVYADVVFDHKGGADGTEWVDAVEVNPSDRNQEISGTYQIQAWTKFDFPGRGNTYSSFKWRWYHFDGVDWDESRKLSRIYKFRGIGKAWDWEVDTENGNYDYLMYADLDMDHPEVVTELKNWGKWYVNTTNIDGFRLDAVKHIKFQFFPDWLSYVRSQTGKPLFTVGEYWSYDINKLHNYITKTNGTMSLFDAPLHNKFYTASKSGGAFDMRTLMTNTLMKDRPTLAVTFVDNHDTEPGQALQSWVDPWFKPLAYAFILTREEGYPCVFYGDYYGIPQYNIPSLKSKIDPLLIARRDYAYGTQHDYLDHSDIIGWTREGVTEKPGSGLAALITDGPGGSKWMYVGKEHAGKVFYDLTGNRSDTVTINSDGWGEFKVNGGSVSVWVPRKTTVS

SEQ ID NO: 18152 - protein, 488 aa, Geobacillus stearothermophilus
AAPFNGTMMQYFEWYLPDDGTLWTKVANEANNLSSLGITALWLPPAYKGTSRSDVGYGVYDLYDLGEFNQKGTVRTKYGTKAQYLQAIQAAHAAGMEVYADVVFDHKGGADGTEWVDAVEVNPSDRNQEISGTYQIQAWTKFDFPGRGNTYSSFKWRWYHFDGVDWDESRKLSRIYKFRGIGKAWDWEVDTENGNYDYLMYADLDMDHPEVVTELKNWGKWYVNTTNIDGFRLDAVKHIKFQFFPDWLSYVRSQTGKPLFTVGEYWSYDINKLHNYITKTNGTMSLFDAPLHNKFYTASKSGGAFDMRTLMTNTLMKDEPTLAVTFVDNHDTEPGQALQSWVDPWFKPLAYAFILTRREGYPCVFYGDYYGIPQYNIPSLKSKIDPLLIARRDYAYGTQHDYLDHSDIIGWTREGVTEKPGSGLAALITDGPGGSKWMYVGKEHAGKVFYDLTGNRSDTVTINSDGWGEFKVNGGSVSVWVPRKTTVS

SEQ ID NO: 18153 - protein, 488 aa, Geobacillus stearothermophilus
AAPFNGTMMQYFEWYLPDDGTLWTKVANEANNLSSLGITALWLPPAYKGTSRSDVGYGVYDLYDLGEFNQKGTVRTKYGTKAQYLQAIQAAHAAGMQVYADVVFDHKGGADGTEWVDAVEVNPSDRNQEISGTYQIQAWTKFDFPGRGNTYSSFKWRWYHFNGVDWDESRKLSRIYKFRGIGKKWNEEVDTENGNYDYLMYANLDYNHPEVVTELKNWGKWYVNTTNIDGFRLDAVKHIKFSFFPDWLSYVRSQTGKPLFTVGEYWSYDINKLHNYITKTDGTMSLFDAPLHNKFYTASKSGGAFDMRTLMTNTLMKDQPTLAVTFVDNHDTEPGQALQSWVDPWFKPLAYAFILTRQEGYPCVFYGDYYGIPQYNIPSLKSKIDPLLIARRDYAYGTQHDYLDHSDIIGWTREGGTEKPGSGLAALITDGPGGSKWMYVGKQHAGKVFYDLTGNRSDTVTINSDGWGEFKVNGGSVSVWVPRKTTVS

SEQ ID NO: 18154 - protein, 488 aa, Geobacillus stearothermophilus
AAPFNGTMMQYFEWYLPDDGTLWTKVANEANNLSSLGITALWLPPAYKGTSRSDVGYGVYDLYDLGEFNQKGTVRTKYGTKAQYLQAIQAAHAAGMEVYADVVFDHKGGADGTEWVDAVEVNPSDRNQEISGTYQIQAWTKFDFPGRGNTYSSFKWRWYHFDGVDWDESRKLSRIYKFRGIGKAWDWEVDTENGNYDYLMYADLDMDHPEVVTELKNWGKWYVNTTNIDGFRLDAVKHIKFQFFPDWLSYVRSQTGKPLFTVGEYWSYDINKLHNYITKTNGTMSLFDAPLHNKFYTASKSGGAFDMRTLMTNTLMKDEPTLAVTFVDNHDTEPGQALQSWVDPWFKPLAYAFILTREEGYPCVFYGDYYGIPQYNIPSLKSKIDPLLIARRDYAYGTQHDYLDHSDIIGWTREGVTEKPGSGLAALITDGPGGSKWMYVGKEHAGKVFYDLTGNRSDTVTINSDGWGEFKVNGGSVSVWVPRKTTVS

SEQ ID NO: 18155 - protein, 488 aa, Geobacillus stearothermophilus
AAPFNGTMMQYFEWYLPDDGTLWTKVANEANNLSSLGITALWLPPAYKGTSRSDVGYGVYDLYDLGEFNQKGTVRTKYGTKAQYLQAIQAAHAAGMEVYADVVFDHKGGADGTEWVDAVEVNPSDRNQEISGTYQIQAWTKFDFPGRGNTYSSFKWRWYHFDGVDWDESRKLSRIYKFRGIGKAWDWEVDTENGNYDYLMYADLDMDHPEVVTELKNWGKWYVNTTNIDGFRLDAVKHIKFQFFPDWLSYVRSQTGKPLFTVGEYWSYDINKLHNYITKTNGTMSLFDAPLHNKFYTASKSGGAFDMRTLMTNTLMKDRPTLAVTFVDNHDTEPGQALQSWVDPWFKPLAYAFILTREEGYPCVFYGDYYGIPQYNIPSLKSKIDPLLIARRDYAYGTQHDYLDHSDIIGWTREGVTEKPGSGLAALITDGPGGSKWMYVGKRHAGKVFYDLTGNRSDTVTINSDGWGEFKVNGGSVSVWVPRKTTVS

SEQ ID NO: 18156 - protein, 488 aa, Geobacillus stearothermophilus
AAPFNGTMMQYFEWYLPDDGTLWTKVADEANNLSSLGITALWLPPAYKGTSRSDVGYGVYDLYDLGEFNQKGTVRTKYGTKAQYLQAIQAAHAAGMRVYADVVFDHKGGADGTEWVDAVEVNPSDRNQEISGTYQIQAWTKFDFPGRGNTYSSFKWRWYHFDGVDWDESRKLSRIYKFRGIGKAWDWEVDTENGNYDYLMYADLDMDHPEVVTELKNWGKWYVNTTNIDGFRLDAVKHIKFSFFPDWLSYVRSQTGKPLFTVGEYWSYDINKLHNYITKTNGTMSLFDAPLHNKFYTASKSGGAFDMRTLMTNTLMKDRPTLAVTFVDNHDTEPGQALQSWVDPWFKPLAYAFILTREEGYPCVFYGDYYGIPQYNIPSLKSKIDPLLIARRDYAYGTQHDYLDHSDIIGWTREGVTEKPGSGLAALITDGPGGSKWMYVGKEHAGKVFYDLTGNRSDTVTINSDGWGEFKVNGGSVSVWVPRKTTVS

SEQ ID NO: 18157 - protein, 488 aa, Geobacillus stearothermophilus
AAPFNGTMMQYFEWYLPDDGTLWTKVANEANNLSSLGITALWLPPAYKGTSRSDVGYGVYDLYDLGEFNQKGTVRTKYGTKAQYLQAIQAAHAAGMRVYADVVFDHKGGADGTEWVDAVEVNPSDRNQEISGTYQIQAWTKFDFPGRGNTYSSFKWRWYHFDGVDWDESRKLSRIYKFRGIGKAWDWEVDTENGNYDYLMYADLDMDHPEVVTELKNWGKWYVNTTNIDGFRLDAVKHIKFQFFPDWLSYVRSQTGKPLFTVGEYWSYDINKLHNYITKTNGTMSLFDAPLHNKFYTASKSGGAFDMRTLMTNTLMKDEPTLAVTFVDNHDTEPGQALQSWVDPWFKPLAYAFILTRREGYPCVFYGDYYGIPQYNIPSLKSKIDPLLIARRDYAYGTQHDYLDHSDIIGWTREGVTEKPGSGLAALITDGPGGSKWMYVGKEHAGKVFYDLTGNRSDTVTINSDGWGEFKVNGGSVSVWVPRKTTVS

SEQ ID NO: 18158 - protein, 488 aa, Geobacillus stearothermophilus
AAPFNGTMMQYFEWYLPDDGTLWTKVANEANNLSSLGITALWLPPAYKGTSRSDVGYGVYDLYDLGEFNQKGTVRTKYGTKAQYLQAIQAAHAAGMEVYADVVFDHKGGADGTEWVDAVEVNPSDRNQEISGTYQIQAWTKFDFPGRGNTYSSFKWRWYHFDGVDWDESRKLSRIYKFRGIGKAWDWEVDTENGNYDYLMYADLDMDHPEVVTELKNWGKWYVNTTNIDGFRLDAVKHIKFQFFPDWLSYVRSQTGKPLFTVGEYWSYDINKLHNYITKTNGTMSLFDAPLHNKFYTASKSGGAFDMRTLMTNTLMKDEPTLAVTFVDNHDTEPGQALQSWVDPWFKPLAYAFILTREEGYPCVFYGDYYGIPQYNIPSLKSKIDPLLIARRDYAYGTQHDYLDHSDIIGWTREGVTEKPGSGLAALITDGPGGSKWMYVGKRHAGKVFYDLTGNRSDTVTINSDGWGEFKVNGGSVSVWVPRKTTVS

SEQ ID NO: 18159 - protein, 486 aa, Geobacillus stearothermophilus
AAPFNGTMMQYFEWYLPDDGTLWTKVANEANNLSSLGITALWLPPAYKGTSRSDVGYGAYDLYDLGEFNQKGTVRTKYGTKAQYLQAIQAAHAAGMQVYADVVFDHKGGADGTEWVDAVEVNPSDRNQVISGTYQIQAWTKFDFPGRGNTYSSFKWRWYHFDGVDWDESRKLSRIYLFEGKAWDWEVDTEFGNYDYLMYADLDMDHPEVVTELKNWGPWYVLTTNIDGFRLDAVKHIKFQFFPDWLSYVRSSTGKPLFTVGEYWSYDINKLHNYITKTDGTMSLFDAPLHNKFYTASKSGGAFDMRTLMTNTLMKDQPTLAVTFVDNHDTEPGQALQSWVDPWFKPLAYAFILTRQEGYPCVFYGDYYGIPQYNIPSLKSKIDPLLIARRDYAYGTQHDYLDHSDIIGWTREGGTEKPGSGLAALITDGPGGSKWMYVGKQHAGKVFYDLTGNRSDTVTINSDGWGEFKVNGGSVSVWVPRKTTVS

SEQ ID NO: 18160 - protein, 488 aa, Geobacillus stearothermophilus
AAPFNGTMMQYFEWYLPDDGTLWTKVANEANNLSSLGITALWLPPAYKGTSRSDVGYGVYDLYDLGEFNQKGTVRTKYGTKAQYLQAIQAAHAAGMRVYADVVFDHKGGADGTEWVDAVEVNPSDRNQEISGTYQIQAWTKFDFPGRGNTYSSFKWRWYHFDGVDWDESRKLSRIYKFRGIGKAWDWEVDTENGNYDYLMYADLDMDHPEVVTELKNWGKWYVNTTNIDGFRLDAVKHIKFQFFPDWLSYVRSQTGKPLFTVGEYWSYDINKLHNYITKTNGTMSLFDAPLHNKFYTASKSGGAFDMRTLMTNTLMKDQPTLAVTFVDNHDTEPGQALRSWVDPWFKPLAYAFILTRREGYPCVFYGDYYGIPQYNIPSLKSKIDPLLIARRDYAYGTQHDYLDHSDIIGWTREGVTEKPGSGLAALITDGPGGSKWMYVGKRHAGKVFYDLTGNRSDTVTINSDGWGEFKVNGGSVSVWVPRKTTVS

SEQ ID NO: 18161 - protein, 486 aa, Geobacillus stearothermophilus
AAPFNGTMMQYFEWYLPDDGTLWTKVANEANNLSSLGITALWLPPAYKGTSRSDVGYGVYDLYDLGEFNQKGAVRTKYGTKAQYLQAIQAAHAAGMQVYADVVFDHKGGADGTEWVDAVEVNPSDRNQRISGTYQIQAWTKFDFPGRGNTYSSFKWRWYHFDGVDWDESRKLSRIYKFRGKAWDWEVDTENGNYDYLMYADLDMDHPEVVTELKSWGKWYVNTTNIDGFRLDAVKHIKFSFFPDWLSYVRSQTGKPLFTVGEYWSYDINKLHNYIMKTNGTMSLFDAPLHNKFYTASKSGGTFDMRTLMTNTLMKDQPTLAVTFVDNHDTEPGQALQSWVDPWFKPLAYAFILTRQEGYPCVFYGDYYGIPQYNIPSLKSKIDPLLIARRDYAYGTQHDYLDHSDIIGWTREGVTEKPGSGLAALITDGPGGSKWMYVGKQHAGKVFYDLTGNRSDTVTINSDGWGEFKVNGGSVSVWVPRKTTVS

SEQ ID NO: 18162 - protein, 488 aa, Geobacillus stearothermophilus
AAPFNGTMMQYFEWYLPDDGTLWTKVANEANNLSSLGITALWLPPAYKGTSRSDVGYGVYDLYDLGEFNQKGTVRTKYGTKAQYLQAIQAAHAAGMRVYADVVFDHKGGADGTEWVDAVEVNPSDRNQEISGTYQIQAWTKFDFPGRGNTYSSFKWRWYHFDGVDWDESRKLSRIYKFRGIGKAWDWEVDTENGNYDYLMYADLDMDHPEVVTELKNWGKWYVNTTNIDGFRLDAVKHIKFQFFPDWLSYVRSQTGKPLFTVGEYWSYDINKLHNYITKTNGTMSLFDAPLHNKFYTASKSGGAFDMRTLMTNTLMKDEPTLAVTFVDNHDTEPGQALQSWVDPWFKPLAYAFILTRREGYPCVFYGDYYGIPQYNIPSLKSKIDPLLIARRDYAYGTQHDYLDHSDIIGWTREGVTEKPGSGLAALITDGPGGSKWMYVGKRHAGKVFYDLTGNRSDTVTINSDGWGEFKVNGGSVSVWVPRKTTVS

SEQ ID NO: 18163 - protein, 488 aa, Geobacillus stearothermophilus
AAPFNGTMMQYFEWYLPDDGTLWTKVANEANNLSSLGITALWLPPAYKGTSRSDVGYGVYDLYDLGEFNQKGTVRTKYGTKAQYLQAIQAAHAAGMEVYADVVFDHKGGADGTEWVDAVEVNPSDRNQEISGTYQIQAWTKFDFPGRGNTYSSFKWRWYHFDGVDWDESRKLSRIYKFRGIGKAWDWEVDTENGNYDYLMYADLDMDHPEVVTELKNWGKWYVNTTNIDGFRLDAVKHIKFQFFPDWLSYVRSQTGKPLFTVGEYWSYDINKLHNYITKTNGTMSLFDAPLHNKFYTASKSGGAFDMRTLMTNTLMKDRPTLAVTFVDNHDTEPGQALQSWVDPWFKPLAYAFILTRREGYPCVFYGDYYGIPQYNIPSLKSKIDPLLIARRDYAYGTQHDYLDHSDIIGWTREGVTEKPGSGLAALITDGPGGSKWMYVGKEHAGKVFYDLTGNRSDTVTINSDGWGEFKVNGGSVSVWVPRKTTVS

SEQ ID NO: 18164 - protein, 486 aa, Geobacillus stearothermophilus
AAPFNGTMMQYFEWYLPDDGTLWTKVANEANNLSSLGITALWLPPAYKGTSRSDVGYGVYDLYDLGEFNQKGAVRTKYGTKAQYLQAIQAAHAAGMQVYADVVFDHKGGADGTEWVDAVEVNPSDRNQEISGTYQIQAWTKFDFPGRGNTYSSFKWRWYHFDGVDWDESRKLSRIYKFRGKAWDWEVDTENGNYDYLMYADLDMDHPEVVTELKSWGKWYVNTTNIDGFRLDAVKHIKFSFFPDWLSDVRSQTGKPLFTVGEYWSYDINKLHNYIMKTNGTMSLFDAPLHNKFYTASKSGGTFDMRTLMTNTLMKDQPTLAVTFVDNHDTEPGQALQSWVDPWFKPLAYAFILTRQEGYPCVFYGDYYGIPQYNIPSLKSKIDPLLIARRDYAYGTQHDYLDHSDIIGWTREGVTEKPGSGLAALITDGPGGSKWMYVGKQHAGKVFYDLTGNRSDTVTINSDGWGEFKVNGGSVSVWVPRKTTVS

SEQ ID NO: 18165 - protein, 486 aa, Geobacillus stearothermophilus
AAPFNGTMMQYFEWYLPDDGTLWTKVANEANNLSSLGITALWLPPAYKGTSRSDVGYGVYDLYDLGEFNQKGTVRTKYGTKAQYLQAIQAAHAAGMQVYADVVFDHKGGADGTEWVDAVEVNPSDRNQVISGTYQIQAWTKFDFPGRGNTYSSFKWRWYHFDGVDWDESRKLSRIYLFEGKAWDWEVDTEFGNYDYLMYADLDMDHPEVVTELKNWGPWYVLTTNIDGFRLDAVKHIKFQFFPDWLSYVRSSTGKPLFTVGEYWSYDINKLHNYITKTDGTTSLFDAPLHNKFYTASKSGGAFDMRTLMTNTLMKDQPTLAVTFVDNHDTEPGQALQSWVDPWFKPLAYAFILTRQEGYPCVFYGDYYGIPQYNIPSLKSKIDPLLIARRDYAYGTQHDYLDHSDIIGWTREGGTEKPGSGLAALITDGPGGSKWMYVGKQHAGKVFYDLTGNRSDTVTINSDGWGEFKVNGGSVSVWVPRKTTVS

SEQ ID NO: 18166 - protein, 488 aa, Geobacillus stearothermophilus
AAPFNGTMMQYFEWYLPDDGTLWTKVANEANNLSSLGITALWLPPAYKGTSRSDVGYGVYDLYDLGEFNQKGAVRTKYGTKAQYLQAIQAAHAAGMQVYADVVFDHKGGADGTEWVDAVEVNPSDRNQEISGTYQIQAWTKFDFPGRGNTYSSFKWRWYHFDGVDWDESRKLSRIYKFRGIGKAWDWEVDTENGNYDYLMYADLDMDHPEVVTELKSWGKWYVNTTNIDGFRLDAVKHIKFSFFPDWLSDVRSQTGKPLFTVGEYWSYDINKLHNYIMKTNGTMSLFDAPLHNKFYTASKSGGTFDMRTLMTNTLMKDQPTLAVTFVDNHDTEPGQALQSWVDPWFKPLAYAFILTRQEGYPCVFYGDYYGIPQYNIPSLKSKIDPLLIARRDYAYGTQHDYLDHSDIIGWTREGVTEKPGSGLAALITDGPGGSKWMYVGKQHAGKVFYDLTGNRSDTVTINSDGWGEFKVNGGSVSVWVPRKTTVS

SEQ ID NO: 18167 - protein, 489 aa, Geobacillus stearothermophilus
AAPFNGTMMQYFEWYLPDDGTLWTKVANEANNLSSLGITALWLPPAYKGTSRSDVGYGVYDLYDLGEFNQKGAVRTKYGTKAQYLQAIQAAHAAGMQVYADVVFDHKGGADGTEWVDAVEVNPSDRNQEISGTYQIQAWTKFDFPGRGNTYSSFKWRWYHFDGVDWDESRKLSRIYKFRGIGKAWDWEVDTENGNYDYLMYADLDMDHPEVVTELKSWGKWYVNTTNIDGFRLDAVKHIKFSFFPDWLSDVRSQTGKPLFTVGEYWSYDINKLHNTYIMKTNGTMSLFDAPLHNKFYTASKSGGTFDMRTLMTNTLMKDQPTLAVTFVDNHDTEPGQALQSWVDPWFKPLAYAFILTRQEGYPCVFYGDYYGIPQYNIPSLKSKIDPLLIARRDYAYGTQHDYLDHSDIIGWTREGVTEKPGSGLAALITDGPGGSKWMYVGKQHAGKVFYDLTGNRSDTVTINSDGWGEFKVNGGSVSVWVPRKTTVS

SEQ ID NO: 18168 - protein, 486 aa, Geobacillus stearothermophilus
AAPFNGTMMQYFEWYLPDDGTLWTKVANEANNLSSLGITALWLPPAYKGTSRSDVGYGAYDLYDLGEFNQKGTVRTKYGTKAQYLQAIQAAHAAGMQVYADVVFDHKGGADGTEWVDAVEVNPSDRNQVISGTYQIQAWTKFDFPGRGNTYSSFKWRWYHFDGVDWDESRKLSRIYLFEGKAWDWEVDTEFGNYDYLMYADLDMDHPEVVTELKNWGPWYVLTTNIDGFRLDAVKHIKFSFFPDWLSYVRSSTGKPLFTVGEYWSYDINKLHNYITKTDGTTSLFDAPLHNKFYTASKSGGAFDMRTLMTNTLMKDQPTLAVTFVDNHDTEPGQALQSWVDPWFKPLAYAFILTRQEGYPCVFYGDYYGIPQYNIPSLKSKIDPLLIARRDYAYGTQHDYLDHSDIIGWTREGGTEKPGSGLAALITDGPGGSKWMYVGKQHAGKVFYDLTGNRSDTVTINSDGWGEFKVNGGSVSVWVPRKTTVS

SEQ ID NO: 18169 - protein, 486 aa, Geobacillus stearothermophilus
AAPFNGTMMQYFEWYLPDDGTLWTKVANEANNLSSLGITALWLPPAYKGTSRSDVGYGVYDLYDLGEFNQKGTVRTKYGTKAQYLQAIQAAHAAGMQVYADVVFDHKGGADGTEWVDAVEVNPSDRNQVISGTYQIQAWTKFDFPGRGNTYSSFKWRWYHFDGVDWDESRKLSRIYLFEGKAWDWEVDTEFGNYDYLMYADLDMDHPEVVTELKNWGPWYVLTTNIDGFRLDAVKHIKFSFFPDWLSYVRSSTGKPLFTVGEYWSYDINKLHNYITKTNGTMSLFDAPLHNKFYTASKSGGAFDMRTLMTNTLMKDQPTLAVTFVDNHDTEPGQALQSWVDPWFKPLAYAFILTRQEGYPCVFYGDYYGIPQYNIPSLKSKIDPLLIARRDYAYGTQHDYLDHSDIIGWTREGVTEKPGSGLAALITDGPGGSKWMYVGKQHAGKVFYDLTGNRSDTVTINSDGWGEFKVNGGSVSVWVPRKTTVS

SEQ ID NO: 18170 - protein, 488 aa, Geobacillus stearothermophilus
AAPFNGTMMQYFEWYLPDDGTLWTKVANEANNLSSLGITALWLPPAYKGTSRSDVGYGVYDLYDLGEFNQKGTVRTKYGTKAQYLQAIQAAHAAGMQVYADVVFDHKGGADGTEWVDAVEVNPSDRNQEISGTYQIQAWTKFDFPGRGNTYSSFKWRWYHFDGVDWDESRKLSRIYKFRGIGKAWDWEVDTENGNYDYLMYADLDMDHPEVVTELKNWGPWYVLTTNIDGFRLDAVKHIKFQFFPDWLSYVRSSTGKPLFTVGEYWSYDINKLHNYITKTNGTVSLFDAPLHNKFYTASKSGGAFDMRTLMTNTLMKDQPTLAVTFVDNHDTEPGQALQSWVDPWFKPLAYAFILTRQEGYPCVFYGDYYGIPQYNIPSLKSKIDPLLIARRDYAYGTQHDYLDHSDIIGWTREGVTEKPGSGLAALITDGPGGSKWMYVGKQHAGKVFYDLTGNRSDTVTINSDGWGEFKVNGGSVSVWVPRKTTVS

SEQ ID NO: 18171 - protein, 488 aa, Bacillus stearothermophilus
AAPFNGTMMQYFEWYLPDDGTLWTKVANEANNLSSLGITALWLPPAYKGTSRSDVGYGVYDLYDLGEFNQKGTVRTKYGTKAQYLQAIQAAHAAGMQVYADVVFDHKGGADGTEWVDAVEVNPSDRNQEISGTYQIQAWTKFDFPGRGNTYSSFKWRWYHFDGVDWDESRKLSRIYKFEGIGKAWDWEVDTENGNYDYLMYADLDMDHPEVVTELKNWGPWYVLTTNIDGFRLDAVKHIKFQFFPDWLSYVRSSTGKPLFTVGEYWSYDINKLHNYITKTNGTMSLFDAPLHNKFYTASKSGGAFDMRTLMTNTLMKDQPTLAVTFVDNHDTEPGQALQSWVDPWFKPLAYAFILTRQEGYPCVFYGDYYGIPQYNIPSLKSKIDPLLIARRDYAYGTQHDYLDHSDIIGWTREGVTEKPGSGLAALITDGPGGSKWMYVGKQHAGKVFYDLTGNRSDTVTINSDGWGEFKVNGGSVSVWVPRKTTVS

SEQ ID NO: 18172 - protein, 484 aa, Aspergillus niger
AATALAATPADWRSQSIYFLLTDRFARTDGSTTATCNTADQKYCGGTWQGIIDKLDYIQGMGFTAIWITPVTKQLPQTTAYGDAYHGYWQQDIYSLNENYGTADDLKALSSALHERGMYLMVDVVANHMGYDGAGSSVDYSVFKPFSSQDYFHPFCFIQNYEDQTQVEDCWLGDNTVSLPDLDTTKDVVKNEWYDWVKSLVSNYSIDGLRIDTVKHVQKDFWPGYNKAAGVYCIGEVLDGDPAYTCPYQNVMDGVLNYPIYYPLLNAFKSTSGSMDDLYNMINTVKSDCKDSTLLGTFVENHDNPRFASYTNDIALAKNVAAFIILNDGIPIIYAGQEQHYAGGNDPANREATWLSGYPTDSELYKLIASANKIRNYAISKDTGFVTYKNWPIYKDDTTIAMKKGTDGSQIVTILSNKGASGDSYTLSLSGAGYTAGQKLTEVIGCTTVTVGSDGNVPVPMAGGLPKVLYPTEKLAGSKICSSS

SEQ ID NO: 18173 - protein, 485 aa, Bacillus sp.
HHNGTNGTMMQYFEWHLPNDGNHWNRLRDDASNLRNRGITAIWIPPAWKGISQNDVGYGAYDLYDLGEFNQKGTVRTKYGTRSQLESAIHALKNNGVQVIGDVVMNHKAGADATENVLAVEVNPNNRNQEISGDYTIEAYTKFDFPGRGNTYSDFKWRWYHFDGVDWDQSRQFQNRIYKFRGDGKAWDWEVDSEFGNYDYLMYADYDMDHPEVVNELRRWGEWYTNTLNLDGFRIDAVKHIKFSFTRDWLTHVRNATGKGMFAVAEFWKNDLGALENYLNKTNWNHSVFDVPLHYNLYNASNSGGNYDMAKLLNGTVVQKHPMHAVTFVDNHDSQPGESLESFVQEWFKPLAYALILTREQGYPSVFYGDYYGIPTHSVPAMKAKIDPILEARQNFAYGTQHDYFDHHNIIGWTREGNTTHPNSGLATIMSDGPGGEKWMYVGQNKAGQVWHDITGNKPGTVTINADGWANFSVNGGSVSIWVKR

SEQ ID NO: 18174 - protein, 483 aa, Bacillus sp.
HHNGTNGTMMQYFEWHLPNDGNHWNRLRDDASNLRNRGITAIWIPPAWKGISQNDVGYGAYDLYDLGEFNQKGTVRTKYGTRSQLESAIHALKNNGVQVYGDVVMNHKAGADATENVLAVEVNPNNRNQEISGDYTIEAYTKFDFPGRGNTYSDFKWRWYHFDGVDWDQSRQFQNRIYKFRGKAWDWEVDSEFGNYDYLMYADYDMDHPEVVNELRRWGEWYTNTLNLDGFRIDAVKHIKFSFTRDWLTHVRNATGKGMFAVAEFWKNDLGALENYLNKTNWNHSVFDVPLHYNLYNASNSGGNYDMAKLLNGTVVQKHPMHAVTFVDNHDSQPGESLESFVQEWFKPLAYALILTREQGYPSVFYGDYYGIPTHSVPAMKAKIDPILEARQNFAYGTQHDYFDHHNIIGWTREGNTTHPNSGLATIMSDGPGGEKRMYVGQNKAGQVWHDITGNKPGTVTINADGWANFSVNGGSVSIWVKR

SEQ ID NO: 18175 - protein, 483 aa, Unidentified
HHNGTNGTMMQYFEWHLPNDGNHWNRLRDDASNLRNRGITAIWIPPAWKGTSQNDVGYGAYDLYDLGEFNQKGTVRTKYGTRSQLESAIHALKNNGVQVYGDVVMNHKGGADATENVLAVEVNPNNRNQEISGDYTIEAYTKFDFPGRGNTYSDFKWRWYHFDGVDWDQSRQFQNRIYKFRGKAWDWEVDSEFGNYDYLMYADYDMDHPEVVNELRRWGEWYTNTLNLDGFRIDAVKHIKFSFTRDWLTHVRNATGKGMFAVAEFWKNDLGALENYLNKTNWNHSVFDVPLHYNLYNASNSRGNYDMAKLLNGTVVQKHPAHAVTFVDNHDSQPGESLESFVQEWFKPLAYALILTREQGYPSVFYGDYYGIPTHSVPAMKAKIDPILEARQNFAYGTQHDYFDHHNIIGWTREGNTTHPNSGLATIMSDGPGGEKWMYVGQNKAGQVWHDITGNKPGTVTINADGWANFSVNKGSVSIWVKR

SEQ ID NO: 18176 - protein, 483 aa, Bacillus sp.
HHNGTNGTMMQYFEWHLPNDGNHWNRLRDDASNLRNRGITAIWIPPAWKGISQNDVGYGAYDLYDLGEFNQKGTVRTKYGTRSQLESAIHALKNNGVQVIGDVVMNHKAGADATENVLAVEVNPNNRNQEISGDYTIEAYTKFDFPGRGNTYSDFKWRWYHFDGVDWDQSRQFQNRIYKFRGKAWDWEVDSEFGNYDYLMYADYDMDHPEVVNELRRWGEWYTNTLNLDGFRIDAVKHIKFSFTRDWLTHVRNATGKGMFAVAEFWKNDLGALENYLNKTNWNHSVFDVPLHYNLYNASNSGGNYDMAKLLNGTVVQKHPMHAVTFVDNHDSQPGESLESFVQEWFKPLAYALILTREQGYPSVFYGDYYGIPTHSVPAMKAKIDPILEARQNFAYGTQHDYFDHHNIIGWTREGNTTHPNSGLATIMSDGPGGEKWMYVGQNKAGQVWHDITGNKPGTVTINADGWANFSVNGGSVSIWVKR

SEQ ID NO: 18177 - protein, 485 aa, Bacillus sp.
HHNGTNGTMMQYFEWHLPNDGNHWNRLRDDASNLRNRGITAIWIPPAWKGISQNDVGYGAYDLYDLGEFNQKGTVRTKYGTRSQLESAIHALKNNGVQVYGDVVMNHKAGADATENVLAVEVNPNNRNQEISGDYTIEAYTKFDFPGRGNTYSDFKWRWYHFDGVDWDQSRQFQNRIYKFRGDGKAWDWEVDSEFGNYDYLMYADYDMDHPEVVNELRRWGEWYTNTLNLDGFRIDAVKHIKFSFTRDWLTHVRNATGKGMFAVAEFWKNDLGALENYLNKTNWNHSVFDVPLHYNLYNASNSGGNYDMAKLLNGTVVQKHPMHAVTFVDNHDSQPGESLESFVQEWFKPLAYALILTREQGYPSVFYGDYYGIPTHSVPAMKAKIDPILEARQNFAYGTQHDYFDHHNIIGWTREGNTTHPNSGLATIMSDGPGGEKRMYVGQNKAGQVWHDITGNKPGTVTINADGWANFSVNGGSVSIWVKR

SEQ ID NO: 18178 - protein, 483 aa, unidentified
VNGTLMQYFEWYTPNDGQHWKRLQNDAEHLSDIGITAVWIPPAYKGTSQSDNGYGPYDLYDLGEFQQKGTVRTKYGTKSELQDAIGSLHSRNVQVYGDVVLNHKAGADATEDVTAVEVNPANRNQETSGEYQIKAWTDFRSPGRGNTYSDFKWHWYHFDGADWDESRKISRIFKFRGEGKAWDWEVSSENGNYDYLMYADVDYDHPDVVAETKKWGIWYANELSLDGFRIDAAKHIKFSFLRDWVQAVRQATGKEMFTVAEYWQNNAGKLENYLNKTSFNQSVFDVPLHFNLQAASSQGGGYDMRRLLDGTVVSEHPEKAVTSVENHDTQPGQSLESTVQTWFKPLAYAFILTRESGYPQVFYGDMYGTKGTSPKEIPSLKDKLEPILKARKEYAYGPQHDYIDHPDVIGWTREGDSSAAKSGLAALITDGPGGSKRMYAGLKNAGETWYDITGNRSDTVKIGSDGWGEFHVNGGSVSIYVQK

SEQ ID NO: 18179 - protein, 513 aa, Geobacillus stearothermophilus
AAPFNGTMMQYFEWYLPDDGTLWTKVANEANNLSSLGITALWLPPAYKGTSRSDVGYGVYDLYDLGEFNQKGTVRTKYGTKAQYLQAIQAAHAAGMQVYADVVFDHKGGADGTEWVDAVEVNPSDRNQVISGTYQIQAWTKFDFPGRGNTYSSFKWRWYHFDGVDWDESRKLSRIYLFEGKAWDWEVDTEFGNYDYLMYADLDMDHPEVVTELKNWGPWYVLTTNIDGFRLDAVKHIKFSFFPDWLSYVRSSTGKPLFTVGEYWSYDINKLHNYITKTNGTTSLFDAPLHNKFYTASKSGGAFDMRTLMTNTLMKDQPTLAVTFVDNHDTEPGQALQSWVDPWFKPLAYAFILTRQEGYPCVFYGDYYGIPQYNIPSLKSKIDPLLIARRDYAYGTQHDYLDHSDIIGWTREGVTEKPGSGLAALITDGPGGSKWMYVGKQHAGKVFYDLTGNRSDTVTINSDGWGEFKVNGGSVSVWVPRKTTVSTIARPITTRPWTGEFVRWTEPRLVAWP

SEQ ID NO: 18180 - protein, 513 aa, Geobacillus stearothermophilus
AAPFNGTMMQYFEWYLPDDGTLWTKVANEANNLSSLGITALWLPPAYKGTSRSDVGYGAYDLYDLGEFNQKGTVRTKYGTKAQYLQAIQAAHAAGMQVYADVVFDHKGGADGTEWVDAVEVNPSDRNQVISGTYQIQAWTKFDFPGRGNTYSSFKWRWYHFDGVDWDESRKLSRIYLFEGKAWDWEVDTEFGNYDYLMYADLDMDHPEVVTELKNWGPWYVLTTNIDGFRLDAVKHIKFSFFPDWLSYVRSSTGKPLFTVGEYWSYDINKLHNYITKTNGTMSLFDAPLHNKFYTASKSGGAFDMRTLMTNTLMKDQPTLAVTFVDNHDTEPGQALQSWVDPWFKPLAYAFILTRQEGYPCVFYGDYYGIPQYNIPSLKSKIDPLLIARRDYAYGTQHDYLDHSDIIGWTREGVTEKPGSGLAALITDGPGGSKWMYVGKQHAGKVFYDLTGNRSDTVTINSDGWGEFKVNGGSVSVWVPRKTTVSTIARPITTRPWTGEFVRWTEPRLVAWP

SEQ ID NO: 18181 - protein, 513 aa, Geobacillus stearothermophilus
AAPFNGTMMQYFEWYLPDDGTLWTKVANEANNLSSLGITALWLPPAYKGTSRSDVGYGVYDLYDLGEFNQKGTVRTKYGTKAQYLQAIQAAHAAGMQVYADVVFDHKGGADGTEWVDAVEVNPSDRNQVISGTYQIQAWTKFDFPGRGNTYSSFKWRWYHFDGVDWDESRKLSRIYLFVGKAWDWEVDTEFGNYDYLMYADLDMDHPEVVTELKNWGPWYVLTTNIDGFRLDAVKHIKFQFFPDWLSYVRSSTGKPLFTVGEYWSYDINKLHNYITKTNGTMSLFDAPLHNKFYTASKSGGAFDMRTLMTNTLMKDQPTLAVTFVDNHDTEPGQALQSWVDPWFKPLAYAFILTRQEGYPCVFYGDYYGIPQYNIPSLKSKIDPLLIARRDYAYGTQHDYLDHSDIIGWTREGVTEKPGSGLAALITDGPGGSKWMYVGKQHAGKVFYDLTGNRSDTVTINSDGWGEFKVNGGSVSVWVPRKTTVSTIARPITTRPWTGEFVRWTEPRLVAWP

SEQ ID NO: 18182 - protein, 513 aa, Geobacillus stearothermophilus
AAPFNGTMMQYFEWYLPDDGTLWTKVANEANNLSSLGITALWLPPAYKGTSRSDVGYGVYDLYDLGEFNQKGTVRTKYGTKAQYLQAIQAAHAAGMQVYADVVFDHKGGADGTEWVDAVEVNPSDRNQVISGTYQIQAWTKFDFPGRGNTYSSFKWRWYHFDGVDWDESRKLSRIYLFEGKAWDWEVDTEFGNYDYLMYADLDMDHPEVVTELKNWGPWYVLTTNIDGFRLDAVKHIKFQFFPDWLSYVRSSTGKPLFTVGEYWSYDINKLHNYITKTNGTMSLFDAPLHNKFYTASKSGGAFDMRTLMTNTLMKDQPTLAVTFVDNHDTEPGQALQSWVDPWFKPLAYAFILTRQEGYPCVFYGDYYGIPQYNIPSLKSKIDPLLIARRDYAYGTQHDYLDHSDIIGWTREGVTEKPGSGLAALITDGPGGSKWMYVGKQHAGKVFYDLTGNRSDTVTINSDGWGEFKVNGGSVSVWVPRKTTVSTIARPITTRPWTGEFVRWTEPRLVAWP

SEQ ID NO: 18183 - protein, 513 aa, Geobacillus stearothermophilus
AAPFNGTMMQYFEWYLPDDGTLWTKVANEANNLSSLGITALWLPPAYKGTSRSDVGYGAYDLYDLGEFNQKGTVRTKYGTKAQYLQAIRAAHAAGMQVYADVVFDHKGGADGTEWVDAVEVNPSDRNQVISGTYQIQAWTKFDFPGRGNTYSSFKWRWYHFDGVDWDESRKLSRIYLFEGKAWDWEVDTEFGNYDYLMYADLDMDHPEVVTELKNWGKWYVNTTNIDGFRLDAVKHIKFSFFPDWLSYVRSSTGKPLFTVGEYWSYDINKLHNYITKTNGTVSLFDAPLHNKFYTASKSGGAFDMRTLMTNTLMKDQPTLAVTFVDNHDTEPGQALQSWVDPWFKPLAYAFILTRQEGYPCVFYGDYYGIPQYNIPSLKSKIDPLLIARRDYAYGTQHDYLDHSDIIGWTREGVTEKPGSGLAALITDGPGGSKWMYVGKQHAGKVFYDLTGNRSDTVTINSDGWGEFKVNGGSVSVWVPRKTTVSTIARPITTRPWTGEFVRWTEPRLVAWP

SEQ ID NO: 18184 - protein, 515 aa, Geobacillus stearothermophilus
AAPFNGTMMQYFEWYLPDDGTLWTKVADEANNLSSLGITALWLPPAYKGTSRSDVGYGVYDLYDLGEFNQKGTVRTKYGTKAQYLQAIQAAHAAGMQVYADVVFDHKGGADGTEWVDAVEVNPSDRNQEISGTYQIQAWTKFDFPGRGNTYSSFKWRWYHFDGVDWDESRQLSRIYKFRGIGKAWDWEVDTENGNYDYLMYADLDMDHPEVVTELKNWGKWYVDTTNIDGFRLDAVKHIKFSFFPDWLSYVRSQTGKPLFTVGEYWSYDIDKLHNYITKTNGTMSLFDAPLHNKFYTASKSGGAFDMQTLMTNTLMKDQPTLAVTFVDNHDTEPGQALQSWVDPWFKPLAYAFILTRQEGYPCVFYGDYYGIPQYNIPSLKSKIDPLLIARRDYAYGTQHDYLDHSDIIGWTREGVTEKPGSGLAALITDGPGGSKWMYVGKQHAGKVFYDLTGNRSDTVTINSDGWGEFKVNGGSVSVWVPQKTTVSTIARPITTRPWTGEFVRWTEPRLVAWP

SEQ ID NO: 18185 - protein, 515 aa, Geobacillus stearothermophilus
AAPFNGTMMQYFEWYLPDNGTLWTKVAREANNLSSLGITALWLPPAYKGTSRSDVGYGVYDLYDLGEFNQKGTVRTKYGTKAQYLQAIQAAHAAGMQVYADVVFDHKGGADGTEWVDAVEVNPSDRNQEISGTYQIQAWTKFDFPGRGNTYSSFKWRWYHFDGVDWDESRKLSRIYKFRGIGKAWDWEVDTENGNYDYLMYADLDMDHPEVVTELKNWGKWYVRTTNIDGFRLDAVKHIKFSFFPDWLSYVRSQTGKPLFTVGEYWSYDIRKLHNYITKTNGTMSLFDAPLHNKFYTASKSGGAFNMRTLMTNTLMKNQPTLAVTFVDNHDTEPGQALQSWVDPWFKPLAYAFILTRQEGYPCVFYGDYYGIPQYNIPSLKSKIDPLLIARRDYAYGTQHDYLDHSDIIGWTREGVTEKPGSGLAALITDGPGGSKWMYVGKQHAGKVFYDLTGNRSDTVTINSDGWGEFKVNGGSVSVWVPRKTTVSTIARPITTRPWTGEFVRWTEPRLVAWP

SEQ ID NO: 18186 - protein, 515 aa, Geobacillus stearothermophilus
AAPFNGTMMQYFEWYLPDDGTLWTKVANEANNLSSLGITALWLPPAYKGTSRSDVGYGVYDLYDLGEFNQKGTVRTKYGTKAQYLQAIQAAHAAGMQVYADVVFNHKGGADGTEWVDAVEVNPSDRNQEISGTYQIQAWTKFDFPGRGNTYSSFKWRWYHFNGVDWDESRKLSRIYKFRGIGKKWNEEVDTENGNYDYLMYANLDYNHPEVVTELKNWGKWYVNTTNIDGFRLDAVKHIKFSFFPDWLSYVRSQTGKPLFTVGEYWSYDINKLHNYITKTDGTMSLFDAPLHNKFYTASKSGGAFDMRTLMTNTLMKDQPTLAVTFVDNHDTEPGQALQSWVDPWFKPLAYAFILTRQEGYPCVFYGDYYGIPQYNIPSLKSKIDPLLIARRDYAYGTQHDYLDHSDIIGWTREGGTEKPGSGLAALITDGPGGSKWMYVGKQHAGKVFYDLTGNRSDTVTINSDGWGEFKVNGGSVSVWVPRKTTVSTIARPITTRPWTGEFVRWTEPRLVAWP

SEQ ID NO: 18187 - protein, 515 aa, Geobacillus stearothermophilus
AAPFNGTMMQYFEWYLPDDGTLWTKVAKEANNLSSLGITALWLPPAYKGTSRSDVGYGVYDLYDLGEFNQKGTVRTKYGTKAQYLQAIQAAHAAGMRVYADVVFDHKGGADGTEWVDAVEVNPSDRNQEISGTYQIQAWTKFDFPGRGNTYSSFKWRWYHFDGVDWDESRKLSRIYKFRGIGKAWDWEVDTENGNYDYLMYADLDMDHPEVVTELKNWGKWYVNTTNIDGFRLDAVKHIKFSFFPDWLSYVRSQTGKPLFTVGEYWSYDINKLHNYITKTNGTMSLFDAPLHNKFYTASKSGGAFDMRTLMTNTLMKNRPTLAVTFVDNHDTEPGQALQSWVDPWFKPLAYAFILTREEGYPCVFYGDYYGIPQYNIPSLKSKIDPLLIARRDYAYGTQHDYLDHSDIIGWTREGVTEKPGSGLAALITDGPGGSKWMYVGKEHAGKVFYDLTGNRSDTVTINSDGWGEFKVNGGSVSVWVPRKTTVSTIARPITTRPWTGEFVRWTEPRLVAWP

SEQ ID NO: 18188 - protein, 515 aa, Geobacillus stearothermophilus
AAPFNGTMMQYFEWYLPDDGTLWTKVANEANNLSSLGITALWLPPAYKGTSRSDVGYGVYDLYDLGEFNQKGTVRTKYGTKAQYLQAIQAAHAAGMQVYADVVFDHKGGADGTEWVDAVEVNPSDRNQVISGTYQIQAWTKFDFPGRGNTYSSFKWRWYHFDGVDWDESRKLSRIYLFEGIGKAWDWEVDTENGNYDYLMYADLDMDHPEVVTELKNWGPWYVLTTNIDGFRLDAVKHIKFSFFPDWLSYVRSSTGKPLFTVGEYWSYDINKLHNYITKTNGTMSLFDAPLHNKFYTASKSGGAFDMRTLMTNTLMKDQPTLAVTFVDNHDTEPGQALQSWVDPWFKPLAYAFILTRQEGYPCVFYGDYYGIPQYNIPSLKSKIDPLLIARRDYAYGTQHDYLDHSDIIGWTREGVTEKPGSGLAALITDGPGGSKWMYVGKQHAGKVFYDLTGNRSDTVTINSDGWGEFKVNGGSVSVWVPRKTTVSTIARPITTRPWTGEFVRWTEPRLVAWP

SEQ ID NO: 18189 - protein, 515 aa, Geobacillus stearothermophilus
AAPFNGTMMQYFEWYLPDDGTLWTKVADEANNLSSLGITALWLPPAYKGTSRSDVGYGVYDLYDLGEFNQKGTVRTKYGTKAQYLQAIQAAHAAGMQVYADVVFDHKGGADGTEWVDAVEVNPSDRNQEISGTYQIQAWTKFDFPGRGNTYSSFKWRWYHFDGVDWDESRQLSRIYKFRGIGKAWDWEVDTENGNYDYLMYADLDMDHPEVVTELKNWGKWYVDTTNIDGFRLDAVKHIKFSFFPDWLSYVRSQTGKPLFTVGEYWSYDIDKLHNYITKTDGTMSLFDAPLHNKFYTASKSGGAFDMQTLMTNTLMKDQPTLAVTFVDNHDTEPGQALQSWVDPWFKPLAYAFILTRQEGYPCVFYGDYYGIPQYNIPSLKSQIDPLLIARRDYAYGTQHDYLDHSDIIGWTREGVTEKPGSGLAALITDGPGGSKWMYVGKQHAGKVFYDLTGNRSDTVTINSDGWGEFKVNGGSVSVWVPQKTTVSTIARPITTRPWTGEFVRWTEPRLVAWP

SEQ ID NO: 18190 - protein, 511 aa, Geobacillus stearothermophilus
AAPFNGTMMQYFEWYLPDDGTLWTKVANEANNLSSLGITALWLPPAYKGTSRSDVGYGVYDLYDLGEFNQKGTVRTKYGTKAQYLQAIQAAHAAGMQVYADVVFDHKGGADGTEWVDAVEVNPSDRNQVISGTYQIQAWTKFDFPGRGNTYSSFKWRWYHFDGVDWDESRKLSRIYLFEGKAWDWEVDTEFGNYDYLMYADLDMDHPEVVTELKNWGPWYVLTTNIDGFRLDAVKHIKFQFFPDWLSYVRSSTGKPLFTVGEYWSYDINKLHNYITKTNGTMSLFDAPLHNKFYTASKSGGAFDMRTLMTNTLMKDQPTLAVTFVDNHDTEPGQALQSWVDPWFKPLAYAFILTRQEGYPCVFYGDYYGIPQYPSLKSKIDPLLIARRDYAYGTQHDYLDHSDIIGWTREGVTEKPGSGLAALITDGPGGSKWMYVGKQHAGKVFYDLTGNRSDTVTINSDGWGEFKVNGGSVSVWVPRKTTVSTIARPITTRPWTGEFVRWTEPRLVAWP

SEQ ID NO: 18191 - protein, 498 aa, Aspergillus oryzae
MVAWWSLFLYGLQVAAPALAATPADWRSQSIYFLLTDRFARTDGSTTATCNTADQKYCGGTWQGIIDKLDYIQGMGFTAIWITPVTAQLPQTTAYGDAYHGYWQQDIYSLNENYGTADDLKALSSALHERGMYLMVDVVANHMGYDGAGSSVDYSVFDPFDSSSYFHPFCFIQNWDDQTQVEDCWLGDNTVSLPDLDTTKDVVKNEWYDWVGSLVSNYSIDGLRIDTVKHVQKDFWPGYNKAAGVYCIGEVLDGDPAYTCPYQNVMDGVLNYPIYYPLLNAFKSTSGSMDDLYNMINTVKSDCPDSTLLGTFVENHDNPRFASYTNDIALAKNVAAFIILNDGIPIIYAGQEQHYAGGNDPANREATWLSGYPTDSELYKLIASANAIRNYAISKDTGFVTYKNWPIYKDDTTIAMRKGTDGSQIVTILSNKGASGDSYTLSLSGAGYTAGQQLTEVIGCTTVTVDSSGDVPVPMAGGLPRVLYPTEKLAGSKICSSS

SEQ ID NO: 18192 - protein, 498 aa, Aspergillus oryzae
MVAWWSLFLYGLQVAAPALAATPADWRSQSIYFLLTDRFARTDGSTTATCNTADQKYCGGTWQGIIDKLDYIQGMGFTAIWITPVTAQLPQTTAYGDAYHGYWQQDIYSLNENYGTADDLKALSSALHERGMYLMVDVVANHMGYDGAGSSVDYSVFVPFNSASYFHPFCFIQNYEDQTQVEDCWLGDNTVSLPDLDTTKDVVKNEWYDWVGSLVSNYSIDGLRIDTVKHVQKDFWPGYNKAAGVYCIGEVLDGDPAYTCPYQKVLDGVLNYPIYYPLLNAFKSTSGSMDDLYNMINTVKSDCPDSTLLGTFVENHDNPRFASYTNDIALAKNVAAFIILNDGIPIIYAGQEQHYAGGNDPANREATWLSGYPTDSELYKLIASANAIRNYAISKDTGFVTYKNWPIYKDDTTIAMRKGTDGSQIVTILSNKGASGDSYTLSLSGAGYTAGQQLTEVIGCTTVTVDSSGDVPVPMAGGLPRVLYPTEKLAGSKICSSS

SEQ ID NO: 18193 - protein, 491 aa, Geobacillus stearothermophilus
AAPFNGTMMQYFEWYLPDDGTLWTKVANEANNLSSLGITALWLPPAYKGTSRSDVGYGAYDLYDLGEFNQKGTVRTKYGTKAQYLQAIQAAHAAGMQVYADVVFDHKGGADGTEWVDAVEVNPSDRNQVISGTYQIQAWTKFDFPGRGNTYSSFKWRWYHFDGVDWDESRKLSRIYLFEGKAWDWEVDTEFGNYDYLMYADLDMDHPEVTTELKNWGKWYVNTTNIDGFRLDAVKHIKFSFFPDWLSYVRSSTGKPLFTVGEYWSYDINKLHNYITKTDGTVSLFDAPLHNKFYTASKSGGAFDMRTLMTNTLMKDQPTLAVTFVDNHDTEPGQALQSWVDPWFKPLAYAFILTRQEGYPCVFYGDYYGIPQYNIPSLKSKIDPLLIARRDYAYGTQHDYLDHSDIIGWTREGGTEKPGSGLAALITDGPGGSKWMYVGKQHAGKVFYDLTGNRSDTVTINSDGWGEFKVNGGSVSVWVPRKTTVSTIARP

SEQ ID NO: 18194 - protein, 491 aa, Geobacillus stearothermophilus
AAPFNGTMMQYFEWYLPDDGTLWTKVANEANNLSSLGITALWLPPAYKGTSRSDVGYGAYDLYDLGEFNQKGTVRTKYGTKAQYLSAIQSAHSAGMQVYADVVFDHKGGADGTEWVDAVEVNPSDRNQVISGTYQIQAWTKFDFPGRGNTYSSFKWRWYHFDGVDWDESRKLSRIYLFEGKAWDWEVDTEFGNYDYLMYADLDMDHPEVTTELKNWGKWYVNTTNIDGFRLDAVKHIKFSFFPDWLSYVRSSTGKPLFTVGEYWSGDINKLHNYITKTDGTVSLFDAPLHYKFYNASKSGGAFDMRTLMTNTLMKDQPTLAVTFVDNHDTEPGQALQSWVDPWFKPLAYAFILTRQEGYPCVFYGDYYGIPQYNIPSLKSKIDPLLIARRDYAYGTQHDYLDHSDIIGWTREGGTEKPGSGLAALITDGPGGSKWMYVGKQHAGKVFYDLTGNRSDTVTINSDGWGEFKVNGGSVSVWVPRKTTVSTIARP

SEQ ID NO: 18195 - protein, 491 aa, Geobacillus stearothermophilus
AAPFNGTMMQYFEWYLPDDGTLWTKVANEANNLSSLGITALWLPPAYKGTSRSDVGYGAYDLYDLGEFNQKGTVRTKYGTKAQYLQAIQAAHAAGMQVYADVVFDHKGGADGTEDVQAVEVNPSDRNQVISGPYQIQAWTKFDFPGRGNTYSSFKWRWYHFDGVDWDESRKLSRIYLFEGKAWDWEVDTEFGNYDYLMYADLDMDHPEVTTELKNWGKWYVNTTNIDGFRLDAVKHIKFSFFPDWLSYVRSSTGKPLFTVGEYWSGDINKLHNYITKTDGTVSLFDAPLHYKFYNASKSGGAFDMRTLMTNTLMKDQPTLAVTFVDNHDTEPGQALQSWVDPWFKPLAYAFILTRQEGYPCVFYGDYYGIPQYNIPSLKSKIDPLLIARRDYAYGTQHDYLDHSDIIGWTREGGTEKPGSGLAALITDGPGGSKWMYVGKQHAGKVFYDLTGNRSDTVTINSDGWGEFKVNGGSVSVWVPRKTTVSTIARP

SEQ ID NO: 18196 - protein, 491 aa, Geobacillus stearothermophilus
AAPFNGTMMQYFEWYLPDDGTLWTKVANEANNLSSLGITALWLPPAYKGTSRSDVGYGAYDLYDLGEFNQKGTVRTKYGTKAQYLQAIQAAHAAGMQVYADVVFDHKGGADGTEWVDAVEVNPSDRNQVISGTYQIQAWTKFDFPGRGNTYSSFKWRWYHFDGVDWDESRKLSRIYLFEGKAWDWEVDTEFGNYDYLMYADLDMDHPEVTTELKNWGKWYVNTTNIDGFRLDAVKHIKFSFFPDWLSYVRSSTGKPLFTVGEYWSGDINKLHNYITKTDGTVSLFDAPLHYKFYNASKSGGAFDMRTLMTNTLMKDQPTLAVTFVDNHDTEPGQALQSWVDPWFKPLAYAFILTRQEGYPCVFYGDYYGIPQYNIPSLKSKIDPLLKARKLYAYGTQHDYLDHSDIIGWTREGGTEKPGSGLAALITDGPGGSKWMYVGKQHAGKVFYDLTGNRSDTVTINSDGWGEFKVNGGSVSVWVPRKTTVSTIARP

SEQ ID NO: 18197 - protein, 491 aa, Geobacillus stearothermophilus
AAPFNGTMMQYFEWYLPDDGQLWNRVANEANNLSSLGITALWLPPAYKGTSRSDVGYGAYDLYDLGEFNQKGTVRTKYGTKAQYLQAIQAAHAAGMQVYADVVFDHKGGADGTEWVDAVEVNPSDRNQVISGTYQIQAWTKFDFPGRGNTYSSFKWRWYHFDGVDWDESRKLSRIYLFEGKAWDWEVDTEFGNYDYLMYADLDMDHPEVTTELKNWGKWYVNTTNIDGFRLDAVKHIKFSFFPDWLSYVRSSTGKPLFTVGEYWSGDINKLHNYITKTDGTVSLFDAPLHYKFYNASKSGGAFDMRTLMTNTLMKDQPTLAVTFVDNHDTEPGQALQSWVDPWFKPLAYAFILTRQEGYPCVFYGDYYGIPQYNIPSLKSKIDPLLIARRDYAYGTQHDYLDHSDIIGWTREGGTEKPGSGLAALITDGPGGSKWMYVGKQHAGKVFYDLTGNRSDTVTINSDGWGEFKVNGGSVSVWVPRKTTVSTIARP

SEQ ID NO: 18198 - protein, 486 aa, Geobacillus stearothermophilus
AAPFNGTMMQYFEWYLPDDGTLWTKVANEANNLSSLGITALWLPPAYKGTSRSDVGYGAYDLYDLGEFNQKGTVRTKYGTKAQYLQAIRAAHAAGMQVYADVVFDHKGGADGTEWVDAVEVNPSDRNQVISGTYQIQAWTKFDFPGRGNTYSSFKWRWYHFDGVDWDESRKLSRIYLFEGKAWDWEVDTEFGNYDYLMYADLDMDHPEVVTELKNWGPWYVLTTNIDGFRLDAVKHIKFSFFPDWLSYVRSSTGKPLFTVGEYWSYDLNKLHNYITKTDGTMSLFDAPLHNKFYTASKSGGAFDMRTLMTNTLMKDQPTLAVTFVDNHDTEPGQALQSWVDPWFKPLAYAFILTRQEGYPCVFYGDYYGIPQYNIPSLKSKIDPLLIARRDYAYGTQHDYLDHSDIIGWTREGGTEKPGSGLAALITDGPGGSKWMYVGKQHAGKVFYDLTGNRSDTVTINSDGWGEFKVNGGSVSVWVPRKTTVS

SEQ ID NO: 18199 - protein, 488 aa, Geobacillus stearothermophilus
AAPFNGTMMQYFEWYLPDDGTLWTKVANEANNLSSLGITALWLPPAYKGTSRSDVGYGVYDLYDLGEFNQKGTVRTKYGTKAQYLQAIQAAHAAGMQVYADVVFDHKGGADGTEWVDAVEVNPSDRNQVISGTYQIQAWTKFDFPGRGNTYSSFKWRWYHFDGVDWDESRKLSRIYLFEGXXKAWDWEVDTEFGNYDYLMYADLDMDHPEVVTELKNWGPWYVLTTNIDGFRLDAVKHIKFSFFPDWLSYVRSSTGKPLFTVGEYWSYDINKLHNYITKTNGTTSLFDAPLHNKFYTASKSGGAFDMRTLMTNTLMKDQPTLAVTFVDNHDTEPGQALQSWVDPWFKPLAYAFILTRQEGYPCVFYGDYYGIPQYNIPSLKSKIDPLLIARRDYAYGTQHDYLDHSDIIGWTREGVTEKPGSGLAALITDGPGGSKWMYVGKQHAGKVFYDLTGNRSDTVTINSDGWGEFKVNGGSVSVWVPRKTTVS

SEQ ID NO: 18200 - protein, 486 aa, Geobacillus stearothermophilus
AAPFNGTMMQYFEWYLPDDGTLWTKVANEANNLSSLGITALWLPPAYKGTSRSDVGYGAYDLYDLGEFNQKGTVRTKYGTKAQYLQAIQAAHAAGMQVYADVVFDHKGGADGTEWVDAVEVNPSDRNQVISGTYQIQAWTKFDFPGRGNTYSSFKWRWYHFDGVDWDASRKLSRIYLFEGKAWDWEVDTEFGNYDYLMYADLDMDYPEVVTELKNWGPWYVLTTNIDGFRLDAVKHIKFSFFPDWLSYVRSSTGKPLFTVGEYWSYDINKLHNYITKTDGTMSLFDAPLHNKFYTASKSGGAFDMRTLMTNTLMKDQPTLAVTFVDNHDTEPGQALQSWVDPWFKPLAYAFILTRQEGYPCVFYGDYYGIPQYNIPSLKSKIDPLLIARRDYAYGTQHDYLDHSDIIGWTREGGTEKPGSGLAALITDGPGGSKWMYVGKQHAGKVFYDLTGNRSDTVTINSDGWGEFKVNGGSVSVWVPRKTTVS

SEQ ID NO: 18201 - protein, 488 aa, Geobacillus stearothermophilus
AAPFNGTMMQYFEWYLPDDGTLWTKVADEANNLSSLGITALWLPPAYKGTSRSDVGYGVYDLYDLGEFNQKGTVRTKYGTKAQYLQAIQAAHAAGMQVYADVVFDHKGGADGTEWVDAVEVNPSDRNQEISGTYQIQAWTKFDFPGRGNTYSSFKWRWYHFDGVDWDESRQLSRIYKFRGIGKAWDWEVDTENGNYDYLMYADLDMDHPEVVTELKNWGKWYVDTTNIDGFRLDAVKHIKFSFFPDWLSYVRSQTGKPLFTVGEYWSYDIDKLHNYITKTDGTMSLFDAPLHNKFYTASKSGGAFDMQTLMTNTLMKDQPTLAVTFVDNHDTEPGQALQSWVDPWFKPLAYAFILTRQEGYPCVFYGDYYGIPQYNIPSLKSQIDPLLIARRDYAYGTQHDYLDHSDIIGWTREGVTEKPGSGLAALITDGPGGSKWMYVGKQHAGKVFYDLTGNRSDTVTINSDGWGEFKVNGGSVSVWVPQKTTVS

SEQ ID NO: 18202 - protein, 486 aa, Geobacillus stearothermophilus
AAPFNGTMMQYFEWYLPDDGTLWTKVANEANNLSSLGITALWLPPAYKGTSRSDVGYGAYDLYDLGEFNQKGTVRTKYGTKAQYLQAIQAAHAAGMQVYADVVFDHKGGADGTEWVDAVEVNPSDRNQVISGTYQIQAWTKFDFPGRGNTYSSFKWRWYHFDGVDWDESRKLSRIYLFEGKAWDWEVDTEFGNYDYLMYADLDMDHPEVVTELKNWGPWYVLTTNIDGFRLDAVKHIKFQFFPDWLSYVRSSTGKPLFTVGEYWSYDINKLKNYITKTDGTMSLFDAPLHNKFYTASKSGGAFDMRTLMTNTLMKDQPTLAVTFVDNHDTEPGQALQSWVDPWFKPLAYAFILTRQEGYPCVFYGDYYGIPQYNIPSLKSKIDPLLIARRDYAYGTQHDYLDHSDIIGWTREGGTEKPGSGLAALITDGPGGSKWMYVGKQHAGKVFYDLTGNRSDTVTINSDGWGEFKVNGGSVSVWVPRKTTVS

SEQ ID NO: 18203 - protein, 488 aa, Geobacillus stearothermophilus
AAPFNGTMMQYFEWYLPDDGTLWTKVANEANNLSSLGITALWLPPAYKGTSRSDVGYGVYDLYDLGEFNQKGTVRTKYGTKAQYLQAIQAAHAAGMQVYADVVFNHKGGADGTEWVDAVEVNPSDRNQEISGTYQIQAWTKFDFPGRGNTYSSFKWRWYHFNGVDWDESRKLSRIYKFRGIGKKWNEEVDTENGNYDYLMYANLDYNHPEVVTELKNWGKWYVNTTNIDGFRLDAVKHIKFSFFPDWLSYVRSQTGKPLFTVGEYWSYDINKLHNYITKTDGTMSLFDAPLHNKFYTASKSGGAFDMRTLMTNTLMKDQPTLAVTFVDNHDTEPGQALQSWVDPWFKPLAYAFILTRQEGYPCVFYGDYYGIPQYNIPSLKSKIDPLLIARRDYAYGTQHDYLDHSDIIGWTREGGTEKPGSGLAALITDGPGGSKWMYVGKQHAGKVFYDLTGNRSDTVTINSDGWGEFKVNGGSVSVWVPRKTTVS

SEQ ID NO: 18204 - protein, 486 aa, Geobacillus stearothermophilus
AAPFNGTMMQYFEWYLPDDGTLWTKVANEANNLSSLGITALWLPPAYKGTSRSDVGYGAYDLYDLGEFNQKGTVRTKYGTKAQYLQAIQAAHAAGMQVYADVVFDHKGGADGTEWVDAVEVNPSDRNQVISGTYQIQAWTKFDFPGRGNTYSSFKWYWYHFDGVDWDESRKLSRIYLFEGKAWDWEVDTEFGNYDYLMYADLDMDHPEVVTELKNWGPWYVLTTNIDGFRLDAVKHIKFQFFPDWLSYVRSSTGKPLFTVGEYWSYDINKLHNYITKTDGTMSLFDAPLHNKFYTASKSGGAFDMRTLMTNTLMKDQPTLAVTFVDNHDTEPGQALQSWVDPWFKPLAYAFILTRQEGYPCVFYGDYYGIPQYNIPSLKSKIDPLLIARRDYAYGTQHDYLDHSDIIGWTREGGTEKPGSGLAALITDGPGGSKWMYVGKQHAGKVFYDLTGNRSDTVTINSDGWGEFKVNGGSVSVWVPRKTTVS

SEQ ID NO: 18205 - protein, 486 aa, Geobacillus stearothermophilus
AAPFNGTMMQYFEWYLPDDGTLWTKVANEANNLSSLGITALWLPPAYKGTSRSDVGYGAYDLYDLGEFNQKGTVRTKYGTKAQYLQAIQAAHAAGMQVYADVVFDHKGGADGTEWVDAVEVNPSDRNQVISGTYQIQAWTKFDFPGRGNTYSSFKWRWYHFDGVDWDESRKLSRIYLFEGKAWDWEVDTEFGNYDYLMYADLDMDHPEVVTELKNWGPWYVLTTNIDGFRLDAVKHIKFQFFPDWLSYVRSSTGKPLFTVGEYWSYDINKLHNFITKTDGTMSLFDAPLHNKFYTASKSGGAFDMRTLMTNTLMKDQPTLAVTFVDNHDTEPGQALQSWVDPWFKPLAYAFILTRQEGYPCVFYGDYYGIPQYNIPSLKSKIDPLLIARRDYAYGTQHDYLDHSDIIGWTREGGTEKPGSGLAALITDGPGGSKWMYVGKQHAGKVFYDLTGNRSDTVTINSDGWGEFKVNGGSVSVWVPRKTTVS

SEQ ID NO: 18206 - protein, 486 aa, Geobacillus stearothermophilus
AAPFNGTMMQYFEWYLPDDGTLWTKVANEANNLSSLGITALWLPPAYKGTSRSDVGYGAYDLYDLGEFNQKGTVRTKYGTKAQYLQAIQAAHAAGMQVYADVVFDHKGGADGTEWVDAVEVNPSDRNQVISGTYQIQAWTKFDFPGRGNTYSSFKWRWYHFDGVDWDESRKLSRIYLFEGKAWDWEVDTEFGNYDYLMYADLDMDHPEVVTELKNWGPWYVLTTNIDGFRLDAVKHIKFQFFPDWLSYVRSSTGKPLFTVGEYWSYDINKLHNYITKTDGTTSLFDAPLHNKFYTASKSGGAFDMRTLMTNTLMKDQPTLAVTFVDNHDTEPGQALQSWVDPWFKPLAYAFILTRQEGYPCVFYGDYYGIPQYNIPSLKSKIDPLLIARRDYAYGTQHDYLDHSDIIGWTREGGTEKPGSGLAALITDGPGGSKWMYVGKQHAGKVFYDLTGNRSDTVTINSDGWGEFKVNGGSVSVWVPRKTTVS

SEQ ID NO: 18207 - protein, 486 aa, Geobacillus stearothermophilus
AAPFNGTMMQYFEWYLPDDGTLWTKVANEANNLSSLGITALWLPPAYKGTSRSDVGYGAYDLYDLGEFNQKGTVRTKYGTKAQYLQAIRAAHAAGMQVYADVVFDHKGGADGTEWVDAVEVNPSDRNQVISGTYQIQAWTKFDFPGRGNTYSSFKWRWYHFDGVDWDESRKLSRIYLFEGKAWDWEVDTEFGNYDYLMYADLDMDHPEVVTELKNWGPWYVLTTNIDGFRLDAVKHIKFSFFPDWLSYVRSSTGKPLFTVGEYWSYDINKLKNYITKTDGTMSLFDAPLHNKFYTASKSGGAFDMRTLMTNTLMKDQPTLAVTFVDNHDTEPGQALQSWVDPWFKPLAYAFILTRQEGYPCVFYGDYYGIPQYNIPSLKSKIDPLLIARRDYAYGTQHDYLDHSDIIGWTREGGTEKPGSGLAALITDGPGGSKWMYVGKQHAGKVFYDLTGNRSDTVTINSDGWGEFKVNGGSVSVWVPRKTTVS

SEQ ID NO: 18208 - protein, 486 aa, Geobacillus stearothermophilus
AAPFNGTMMQYFEWYLPDDGTLWTKVANEANNLSSLGITALWLPPAYKGTSRSDVGYGAYDLYDLGEFNQKGTVRTKYGTKAQYLQAIQAAHAAGMQVYADVVFDHKGGADGTEWVDAVEVNPSDRNQVISGTYQIQAWTKFDFPGRGNTYSSFKWRWYHFDGVDWDESRKLSRIYLFEGKAWDWEVDTEFGNYDYLMYADLDMDYPEVVTELKNWGPWYVLTTNIDGFRLDAVKHIKFQFFPDWLSYVRSSTGKPLFTVGEYWSYDINKLHNYITKTDGTMSLFDAPLHNKFYTASKSGGAFDMRTLMTNTLMKDQPTLAVTFVDNHDTEPGQALQSWVDPWFKPLAYAFILTRQEGYPCVFYGDYYGIPQYNIPSLKSKIDPLLIARRDYAYGTQHDYLDHSDIIGWTREGGTEKPGSGLAALITDGPGGSKWMYVGKQHAGKVFYDLTGNRSDTVTINSDGWGEFKVNGGSVSVWVPRKTTVS

SEQ ID NO: 18209 - protein, 486 aa, Geobacillus stearothermophilus
AAPFNGTMMQYFEWYLPDDGTLWTKVANEANNLSSLGITALWLPPAYKGTSRSDVGYGAYDLYDLGEFNQKGTVRTKYGTKAQYLQAIQAAHAAGMQVYADVVFDHKGGADGTEWVDAVEVNPSDRNQVISGTYQIQAWTKFDFPGRGNTYSSFKWRWYHFDGVDWDESRKLSRIYLFEGKAWDWEVDTEFGNYDYLMYADLDMDHPEVVTELKNWGPWYVLTTNIDGFRLDAVKHIKFQFFPDWLSYVRSSTGKPLFTVGEYWSYDINKLHNYITKTDGTMSLFDAPLHNKFYTASKSGGAFDMRTLMTNTLMKDQPTLAVTFVDNHDTEPGQALQSWVDPWFKPLAYAFILTRQEGYPCVFYGDYYGIPQYNIPSLKSKIDPLLIARRDYAYGTQHDYLDHSDIIGWTREGVTEKPGSGLAALITDGPGGSKWMYVGKQHAGKVFYDLTGNRSDTVTINSDGWGEFKVNGGSVSVWVPRKTTVS

SEQ ID NO: 18210 - protein, 488 aa, Geobacillus stearothermophilus
AAPFNGTMMQYFEWYLPDDGTLWTKVANEANNLSSLGITALWLPPAYKGTSRSDVGYGVYDLYDLGEFNQKGTVRTKYGTKAQYLQAIQAAHAAGMQVYADVVFDHKGGADGTEWVDAVEVNPSDRNQVISGTYQIQAWTKFDFPGRGNTYSSFKWRWYHFDGVDWDESRKLSRIYLFEGIGKAWDWEVDTENGNYDYLMYADLDMDHPEVVTELKNWGPWYVLTTNIDGFRLDAVKHIKFSFFPDWLSYVRSSTGKPLFTVGEYWSYDINKLHNYITKTNGTMSLFDAPLHNKFYTASKSGGAFDMRTLMTNTLMKDQPTLAVTFVDNHDTEPGQALQSWVDPWFKPLAYAFILTRQEGYPCVFYGDYYGIPQYNIPSLKSKIDPLLIARRDYAYGTQHDYLDHSDIIGWTREGVTEKPGSGLAALITDGPGGSKWMYVGKQHAGKVFYDLTGNRSDTVTINSDGWGEFKVNGGSVSVWVPRKTTVS

SEQ ID NO: 18211 - protein, 488 aa, Geobacillus stearothermophilus
AAPFNGTMMQYFEWYLPDDGTLWTKVAKEANNLSSLGITALWLPPAYKGTSRSDVGYGVYDLYDLGEFNQKGTVRTKYGTKAQYLQAIQAAHAAGMRVYADVVFDHKGGADGTEWVDAVEVNPSDRNQEISGTYQIQAWTKFDFPGRGNTYSSFKWRWYHFDGVDWDESRKLSRIYKFRGIGKAWDWEVDTENGNYDYLMYADLDMDHPEVVTELKNWGKWYVNTTNIDGFRLDAVKHIKFSFFPDWLSYVRSQTGKPLFTVGEYWSYDINKLHNYITKTNGTMSLFDAPLHNKFYTASKSGGAFDMRTLMTNTLMKNRPTLAVTFVDNHDTEPGQALQSWVDPWFKPLAYAFILTREEGYPCVFYGDYYGIPQYNIPSLKSKIDPLLIARRDYAYGTQHDYLDHSDIIGWTREGVTEKPGSGLAALITDGPGGSKWMYVGKEHAGKVFYDLTGNRSDTVTINSDGWGEFKVNGGSVSVWVPRKTTVS

SEQ ID NO: 18212 - protein, 486 aa, Geobacillus stearothermophilus
AAPFNGTMMQYFEWYLPDDGTLWTKVANEANNLSSLGITALWLPPAYKGTSRSDVGYGVYDLYDLGEFNQKGTVRTKYGTKAQYLQAIQAAHAAGMQVYADVVFDHKGGADGTEWVDAVEVNPSDRNQVISGTYQIQAWTKFDFPGRGNTYSSFKWRWYHFDGVDWDESRKLSRIYLFVGKAWDWEVDTEFGNYDYLMYADLDMDHPEVVTELKNWGPWYVLTTNIDGFRLDAVKHIKFQFFPDWLSYVRSSTGKPLFTVGEYWSYDINKLHNYITKTNGTMSLFDAPLHNKFYTASKSGGAFDMRTLMTNTLMKDQPTLAVTFVDNHDTEPGQALQSWVDPWFKPLAYAFILTRQEGYPCVFYGDYYGIPQYNIPSLKSKIDPLLIARRDYAYGTQHDYLDHSDIIGWTREGVTEKPGSGLAALITDGPGGSKWMYVGKQHAGKVFYDLTGNRSDTVTINSDGWGEFKVNGGSVSVWVPRKTTVS

SEQ ID NO: 18213 - protein, 486 aa, Geobacillus stearothermophilus
AAPFNGTMMQYFEWYLPDDGTLWTKVANEANNLSSLGITALWLPPAYKGTSRSDVGYGAYDLYDLGEFNQKGTVRTKYGTKAQYLQAIRAAHAAGMQVYADVVFDHKGGADGTEWVDAVEVNPSDRNQVISGTYQIQAWTKFDFPGRGNTYSSFKWRWYHFDGVDWDESRKLSRIYLFEGKAWDWEVDTEFGNYDYLMYADLDMDHPEVVTELKNWGKWYVNTTNIDGFRLDAVKHIKFSFFPDWLSYVRSSTGKPLFTVGEYWSYDINKLHNYITKTNGTVSLFDAPLHNKFYTASKSGGAFDMRTLMTNTLMKDQPTLAVTFVDNHDTEPGQALQSWVDPWFKPLAYAFILTRQEGYPCVFYGDYYGIPQYNIPSLKSKIDPLLIARRDYAYGTQHDYLDHSDIIGWTREGVTEKPGSGLAALITDGPGGSKWMYVGKQHAGKVFYDLTGNRSDTVTINSDGWGEFKVNGGSVSVWVPRKTTVS

SEQ ID NO: 18214 - protein, 488 aa, Geobacillus stearothermophilus
AAPFNGTMMQYFEWYLPDDGTLWTKVANEANNLSSLGITALWLPPAYKGTSRSDVGYGVYDLYDLGEFNQKGAVRTKYGRKAQYLQAIQAAHAAGMQVYADVVFDHKGGADGTEWVDAVEVNPSDRNQEISGTYQIQAWTKFDFPGRGNTYSSFKWRWYHFDGVDWDESRKLSRIYKFRGIGKAWDWEVDTENGNYDYLMYADLDMDHPEVVTELKSWGKWYVNTTNIDGFRLDAVKHIKFSFFPDWLSDVRSQTGKPLFTVGEYWSYDINKLHNYIMKTNGTMSLFDAPLHNKFYTASKSGGTFDMRTLMTNTLMKDQPTLAVTFVDNHDTEPGQALQSWVDPWFKPLAYAFILTRQEGYPCVFYGDYYGIPQYNIPSLKSKIDPLLIARRDYAYGTQHDYLDHSDIIGWTREGVTEKPGSGLAALITDGPGGSKWMYVGKQHAGKVFYDLTGNRSDTVTINSDGWGEFKVNGGSVSVWVPRKTTVS

SEQ ID NO: 18215 - protein, 486 aa, Geobacillus stearothermophilus
AAPFNGTMMQYFEWYLPDDGTLWTKVANEANNLSSLGITALWLPPAYKGTSRSDVGYGAYDLYDLGEFNQKGTVRTKYGTKAQYLQAIRAAHAAGMQVYADVVFDHKGGADGTEWVDAVEVNPSDRNQVISGTYQIQAWTKFDFPGRGNTYSSFKWRWYHFDGVDWDESRKLSRIYLFEGKAWDWEVDTEFGNYDYLMYADLDMDHPEVVTELKNWGPWYVLTTNIDGFRLDAVKHIKFSFFPDWLSYVRSSTGKPLFTVGEYWSYDINKLHNFITKTDGTMSLFDAPLHNKFYTASKSGGAFDMRTLMTNTLMKDQPTLAVTFVDNHDTEPGQALQSWVDPWFKPLAYAFILTRQEGYPCVFYGDYYGIPQYNIPSLKSKIDPLLIARRDYAYGTQHDYLDHSDIIGWTREGGTEKPGSGLAALITDGPGGSKWMYVGKQHAGKVFYDLTGNRSDTVTINSDGWGEFKVNGGSVSVWVPRKTTVS

SEQ ID NO: 18216 - protein, 488 aa, Geobacillus stearothermophilus
AAPFNGTMMQYFEWYLPDDGTLWTKVANEANNLSSLGITALWLPPAYKGTSRSDVGYGAYDLYDLGEFNQKGTVRTKYGTKAQYLQAIRAAHAAGMQVYADVVFDHKGGADGTEWVDAVEVNPSDRNQVISGTYQIQAWTKFDFPGRGNTYSSFKWRWYHFDGVDWDESRKLSRIYLFEGXXKAWDWEVDTEFGNYDYLMYADLDMDHPEVVTELKNWGKWYVNTTNIDGFRLDAVKHIKFSFFPDWLSYVRSSTGKPLFTVGEYWSYDINKLHNYITKTNGTVSLFDAPLHNKFYTASKSGGAFDMRTLMTNTLMKDQPTLAVTFVDNHDTEPGQALQSWVDPWFKPLAYAFILTRQEGYPCVFYGDYYGIPQYNIPSLKSKIDPLLIARRDYAYGTQHDYLDHSDIIGWTREGVTEKPGSGLAALITDGPGGSKWMYVGKQHAGKVFYDLTGNRSDTVTINSDGWGEFKVNGGSVSVWVPRKTTVS

SEQ ID NO: 18217 - protein, 488 aa, Geobacillus stearothermophilus
AAPFNGTMMQYFEWYLPDDGTLWTKVANEANNLSSLGITALWLPPAYKGTSRSDVGYGVYDLYDLGEFNQKGAVRTKYGTKAQYLQAIQAAHAAGMQVYADVVFDHKGGADGTEWVDAVEVNPSDRNQEISGTYQIQAWTKFDFPGRGNTYSSFKWRWYHFDGVDWDESRKLSRIYKFRGIGKAWDWEVDTENGNYDYLMYADLDMDHPEVVTELKSWGKWYVNTTNIDGFRLDAVKHIKFSFFPDWLSDVRSQTGKPLFTVGEYWSYDINKLHNYIMKTNGTMSLFDAPLHNKFYTASKSGGTFDMRTLMTNTLMKDQPTLAVTFVDNHDTEPGQALQSWVDPWFKPLAYAFILARQEGYPCVFYGDYYGIPQYNIPSLKSKIDPLLIARRDYAYGTQHDYLDHSDIIGWTREGVTEKPGSGLAALITDGPGGSKWMYVGKQHAGKVFYDLTGNRSDTVTINSDGWGEFKVNGGSVSVWVPRKTTVS

SEQ ID NO: 18218 - protein, 486 aa, Geobacillus stearothermophilus
AAPFNGTMMQYFEWYLPDDGTLWTKVANEANNLSSLGITALWLPPAYKGTSRSDVGYGVYDLYDLGEFNQKGTVRTKYGTKAQYLQAIQAAHAAGMQVYADVVFDHKGGADGTEWVDAVEVNPSDRNQVISGTYQIQAWTKFDFPGRGNTYSSFKWRWYHFDGVDWDESRKLSRIYLFEGKAWDWEVDTEFGNYDYLMYADLDMDHPEVVTELKNWGPWYVLTTNIDGFRLDAVKHIKFSFFPDWLSYVRSSTGKPLFTVGEYWSYDINKLHNYITKTNGTTSLFDAPLHNKFYTASKSGGAFDMRTLMTNTLMKDQPTLAVTFVDNHDTEPGQALQSWVDPWFKPLAYAFILTRQEGYPCVFYGDYYGIPQYNIPSLKSKIDPLLIARRDYAYGTQHDYLDHSDIIGWTREGVTEKPGSGLAALITDGPGGSKWMYVGKQHAGKVFYDLTGNRSDTVTINSDGWGEFKVNGGSVSVWVPRKTTVS

SEQ ID NO: 18219 - protein, 486 aa, Geobacillus stearothermophilus
AAPFNGTMMQYFEWYLPDDGTLWTKVANEANNLSSLGITALWLPPAYKGTSRSDVGYGAYDLYDLGEFNQKGTVRTKYGTKAQYLQAIQAAHAAGMQVYADVVFDHKGGADGTEWVDAVEVNPSDRNQVISGTYQIQAWTKFDFPGRGNTYSSFKWRWYHFDGVDWDESRKLSRIYLFEGKAWDWEVDTEFGNYDYLMYADLDMDHPEVVTELKNWGPWYVLTTNIDGFRLDAVKHIKFQFFPDWLSYVRSSTGKPLFTVGEYWSYDINKLHNYITKTNGTMSLFDAPLHNKFYTASKSGGAFDMRTLMTNTLMKDQPTLAVTFVDNHDTEPGQALQSWVDPWFKPLAYAFILTRQEGYPCVFYGDYYGIPQYNIPSLKSKIDPLLIARRDYAYGTQHDYLDHSDIIGWTREGGTEKPGSGLAALITDGPGGSKWMYVGKQHAGKVFYDLTGNRSDTVTINSDGWGEFKVNGGSVSVWVPRKTTVS

SEQ ID NO: 18220 - protein, 488 aa, Geobacillus stearothermophilus
AAPFNGTMMQYFEWYLPDDGTLWTKVANEANNLSSLGITALWLPPAYKGTSRSDVGYGVYDLYDLGEFNQKGAVRTKYGTKAQYLQAIQAAHAAGMQVYADVVFDHKGGADGTEWVDAVEVNPSDRNQEISGTYQIQAWTKFDFPGRGNTYSSFKWRWYHFDGVDWDESRKLSRIYKFRGIGKAWDWEVDTENGNYDYLMYADLDMDHPEVVTELKSWGKWYVNTTNIDGFRLDAVKHIKFSFFPDWLSNVRSQTGKPLFTVGEYWSYDINKLHNYIMKTNGTMSLFDAPLHNKFYTASKSGGTFDMRTLMTNTLMKDQPTLAVTFVDNHDTEPGQALQSWVDPWFKPLAYAFILTRQEGYPCVFYGDYYGIPQYNIPSLKSKIDPLLIARRDYAYGTQHDYLDHSDIIGWTREGVTEKPGSGLAALITDGPGGRKWMYVGKQHAGKVFYDLTGNRSDTVTINSDGWGEFKVNGGSVSVWVPRKTTVS

SEQ ID NO: 18221 - protein, 488 aa, Geobacillus stearothermophilus
AAPFNGTMMQYFEWYLPDDGTLWTKVANEANNLSSLGITALWLPPAYKGTSRSDVGYGAYDLYDLGEFNQKGTVRTKYGTKAQYLQAIQAAHAAGMQVYADVVFDHKGGADGTEWVDAVEVNPSDRNQVISGTYQIQAWTKFDFPGRGNTYSSFKWRWYHFDGVDWDESRKLSRIYLFEGXXKAWDWEVDTEFGNYDYLMYADLDMDHPEVVTELKNWGPWYVLTTNIDGFRLDAVKHIKFSFFPDWLSYVRSSTGKPLFTVGEYWSYDINKLHNYITKTNGTMSLFDAPLHNKFYTASKSGGAFDMRTLMTNTLMKDQPTLAVTFVDNHDTEPGQALQSWVDPWFKPLAYAFILTRQEGYPCVFYGDYYGIPQYNIPSLKSKIDPLLIARRDYAYGTQHDYLDHSDIIGWTREGVTEKPGSGLAALITDGPGGSKWMYVGKQHAGKVFYDLTGNRSDTVTINSDGWGEFKVNGGSVSVWVPRKTTVS

SEQ ID NO: 18222 - protein, 488 aa, Bacillus sp.
AAPFNGTMMQYFEWYLPDDGTLWTKVANEANNLSSLGITALWLPPAYKGTSRSDVGYGVYDLYDLGEFNQKGAVRTKYGTKAQYLQAIQAAHAAGMQVYADVVFDHKGGADGTEWVDAVEVNPSDRNQEISGTYQIQAWTKFDFPGRGNTYSSFKWRWYHFDGVDWDESRKLSRIYKFRGIGKAWDWEVDTENGNYDYLMYADLDMDHPEVVTQLKSWGKWYVNTTNIDGFRLDAVKHIKFSFFPDWLSDVRSQTGKPLFTVGEYWSYDINKLHNYIMKTNGTMSLFDAPLHNKFYTASKSGGTFDMRTLMTNTLMKDQPTLAVTFVDNHDTEPGQALQSWVDPWFKPLAYAFILTRQEGYPCVFYGDYYGIPQYNIPSLKSKIDPLLIARRDYAYGTQHDYLDHSDIIGWTREGVTEKPGSGLAALITDGPGGSKWMYVGKQHAGKVFYDLTGNRSDTVTINSDGWGEFKVNGGSVSVWVPRKTTVS

SEQ ID NO: 18223 - protein, 486 aa, Geobacillus stearothermophilus
AAPFNGTMMQYFEWYLPDDGTLWTKVANEANNLSSLGITALWLPPAYKGTSRSDVGYGAYDLYDLGEFNQKGTVRTKYGTKAQYLQAIQAAHAAGMQVYADVVFDHKGGADGTEWVDAVEVNPSDRNQVISGTYQIQAWTKFDFPGRGNTYSSFKWRWYHFDGVDWDESRKLSRIYLFEGKAWDWEVDTEFGNYDYLMYADLDMDHPEVVTELKNWGPWYVLTTNIDGFRLDAVKHIKFSFFPDWLSYVRSSTGKPLFTVGEYWSYDINKLHNYITKTNGTMSLFDAPLHNKFYTASKSGGAFDMRTLMTNTLMKDQPTLAVTFVDNHDTEPGQALQSWVDPWFKPLAYAFILTRQEGYPCVFYGDYYGIPQYNIPSLKSKIDPLLIARRDYAYGTQHDYLDHSDIIGWTREGVTEKPGSGLAALITDGPGGSKWMYVGKQHAGKVFYDLTGNRSDTVTINSDGWGEFKVNGGSVSVWVPRKTTVS

SEQ ID NO: 18224 - protein, 488 aa, Geobacillus stearothermophilus
AAPFNGTMMQYFEWYLPDNGTLWTKVAREANNLSSLGITALWLPPAYKGTSRSDVGYGVYDLYDLGEFNQKGTVRTKYGTKAQYLQAIQAAHAAGMQVYADVVFDHKGGADGTEWVDAVEVNPSDRNQEISGTYQIQAWTKFDFPGRGNTYSSFKWRWYHFDGVDWDESRKLSRIYKFRGIGKAWDWEVDTENGNYDYLMYADLDMDHPEVVTELKNWGKWYVRTTNIDGFRLDAVKHIKFSFFPDWLSYVRSQTGKPLFTVGEYWSYDIRKLHNYITKTNGTMSLFDAPLHNKFYTASKSGGAFNMRTLMTNTLMKNQPTLAVTFVDNHDTEPGQALQSWVDPWFKPLAYAFILTRQEGYPCVFYGDYYGIPQYNIPSLKSKIDPLLIARRDYAYGTQHDYLDHSDIIGWTREGVTEKPGSGLAALITDGPGGSKWMYVGKQHAGKVFYDLTGNRSDTVTINSDGWGEFKVNGGSVSVWVPRKTTVS

SEQ ID NO: 18225 - protein, 488 aa, Geobacillus stearothermophilus
AAPFNGTMMQYFEWYLPDDGTLWTKVANEANNLSSLGITALWLPPAYKGTSRSDVGYGVYDLYDLGEFNQKGTVRTKYGTKAQYLQAIQAAHAAGMQVYADVVFDHKGGADGTEWVDAVEVNPSDRNQVISGTYQIQAWTKFDFPGRGNTYSSFKWRWYHFDGVDWDESRKLSRIYLFVGXXKAWDWEVDTEFGNYDYLMYADLDMDHPEVVTELKNWGPWYVLTTNIDGFRLDAVKHIKFQFFPDWLSYVRSSTGKPLFTVGEYWSYDINKLHNYITKTNGTMSLFDAPLHNKFYTASKSGGAFDMRTLMTNTLMKDQPTLAVTFVDNHDTEPGQALQSWVDPWFKPLAYAFILTRQEGYPCVFYGDYYGIPQYNIPSLKSKIDPLLIARRDYAYGTQHDYLDHSDIIGWTREGVTEKPGSGLAALITDGPGGSKWMYVGKQHAGKVFYDLTGNRSDTVTINSDGWGEFKVNGGSVSVWVPRKTTVS

SEQ ID NO: 18226 - protein, 488 aa, Geobacillus stearothermophilus
AAPFNGTMMQYFEWYLPDDGTLWTKVANEANNLSSLGITALWLPPAYKGTSRSDVGYGVYDLYDLGEFNQKGAVRTKYGTKAQYLQAIQAAHAAGMQVYADVVFDHKGGADGTEWVDAVEVNPSDRNQEISGTYQIQAWTKFDFPGRGNTYSSFKWRWYHFDGVDWDESRKLSRIYKFRGIGKAWDWEVDTENGNYDYLMYADLDMDHPEVVTELKSWGKWYVNTTNIDGFRLDAVKHIKFSFFPDWLSDVRSQTGKPLFTVGEYWSYDINKLHNYIMKTNGTMSLFDAPLHNKFYTASKSGGTFDMRTLMTNTLMKDQPTLAVTFVDNHDTEPGQALQSWVDPWFKPLAYAFILTRFEGYPCVFYGDYYGIPQYNIPSLKSKIDPLLIARRDYAYGTQHDYLDHSDIIGWTREGVTEKPGSGLAALITDGPGGSKWMYVGKQHAGKVFYDLTGNRSDTVTINSDGWGEFKVNGGSVSVWVPRKTTVS

SEQ ID NO: 18227 - protein, 486 aa, Geobacillus stearothermophilus
AAPFNGTMMQYFEWYLPDDGTLWTKVANEANNLSSLGITALWLPPAYKGTSRSDVGYGVYDLYDLGEFNQKGTVRTKYGTKAQYLQAIQALHAAGIQVYADVVFDHKGGADGTEWVDAVEVNPSDRNQVISGTYQIQAWTKFDFPGRGNTYSSFKWRWYHFDGVDWDESRKLSRIYLFEGKAWDWEVDTEFGNYDYLMYADLDMDHPEVVTELKNWGPWYVLTTNIDGFRLDAVKHIKFQFFPDWLSYVRSSTGKPLFTVGEYWSYDINKLHNYITKTDGTMSLFDAPLHNKFYTASKSGGAFDMRTLMTNTLMKDQPTLAVTFVDNHDTEPGQALQSWVDPWFKPLAYAFILTRQEGYPCVFYGDYYGIPQYNIPSLKSKIDPLLIARRDYAYGTQHDYLDHSDIIGWTREGGTEKPGSGLAALITDGPGGSKWMYVGKQHAGKVFYDLTGNRSDTVTINSDGWGEFKVNGGSVSVWVPRKTTVS

SEQ ID NO: 18228 - protein, 486 aa, Geobacillus stearothermophilus
AAPFNGTMMQYFEWYLPDDGTLWTKVANEANNLSSLGITALWLPPAYKGTSRSDVGYGAYDLYDLGEFNQKGTVRTKYGTKAQYLQAIRAAHAAGMQVYADVVFDHKGGADDTEWVDAVEVNPSDRNQVISGTYQIQAWTKFDFPGRGNTYSSFKWRWYHFDGVDWDESRKLSRIYLFEGKAWDWEVDTEFGNYDYLMYADLDMDHPEVVTELKNWGPWYVLTTNIDGFRLDAVKHIKFSFFPDWLSYVRSSTGKPLFTVGEYWSYDINKLHNYITKTDGTMSLFDAPLHNKFYTASKSGGAFDMRTLMTNTLMKDQPTLAVTFVDNHDTEPGQALQSWVDPWFKPLAYAFILTRQEGYPCVFYGDYYGIPQYNIPSLKSKIDPLLIARRDYAYGTQHDYLDHSDIIGWTREGGTEKPGSGLAALITDGPGGSKWMYVGKQHAGKVFYDLTGNRSDTVTINSDGWGEFKVNGGSVSVWVPRKTTVS

SEQ ID NO: 18229 - protein, 486 aa, Bacillus licheniformis
AAPFNGTMMQYFEWYLPDDGTLWTKVANEANNLSSLGITALWLPPAYKGTSRSDVGYGAYDLYDLGEFNQKGTVRTKYGTKAQYLQAIRAAHAAGMQVYADVVFDHKGGADGTEWVDAVEVNPSDRNQVISGTYQIQAWTKFDFPGRGNTYSSFKWRWYHFDGVDWDESRKLSRIYLFEGKAWDWEVDTEFGNYDYLMYADLDMDYPEVVTELKNWGPWYVLTTNIDGFRLDAVKHIKFSFFPDWLSYVRSSTGKPLFTVGEYWSYDINKLHNYITKTDGTMSLFDAPLHNKFYTASKSGGAFDMRTLMTNTLMKDQPTLAVTFVDNHDTEPGQALQSWVDPWFKPLAYAFILTRQEGYPCVFYGDYYGIPQYNIPSLKSKIDPLLIARRDYAYGTQHDYLDHSDIIGWTREGGTEKPGSGLAALITDGPGGSKWMYVGKQHAGKVFYDLTGNRSDTVTINSDGWGEFKVNGGSVSVWVPRKTTVS

SEQ ID NO: 18230 - protein, 486 aa, Geobacillus stearothermophilus
AAPFNGTMMQYFEWYLPDDGTLWTKVANEANNLSSLGITALWLPPAYKGTSRSDVGYGVYDLYDLGEFNQKGTVRTKYGTKAQYLQAIQAAHAAGMQVYADVVFDHKGGADGTEWVDAVEVNPSDRNQVISGTYQIQAWTKFDFPGRGNTYSSFKWRWYHFDGVDWDESRKLSRIYLFEGKAWDWEVDTEFGNYDYLMYADLDMDHPEVVTELKNWGPWYVLTTNIDGFRLDAVKHIKFQFFPDWLSYVRSSTGKPLFTVGEYWSYDINKLHNYITKTNGTMSLFDAPLHNKFYTASKSGGAFDMRTLMTNTLMKDQPTLAVTFVDNHDTEPGQALQSWVDPWFKPLAYAFILTRQEGYPCVFYGDYYGIPQYNIPSLKSKIDPLLIARRDYAYGTQHDYLDHSDIIGWTREGVTEKPGSGLAALITDGPGGSKWMYVGKQHAGKVFYDLTGNRSDTVTINSDGWGEFKVNGGSVSVWVPRKTTVS

SEQ ID NO: 18231 - protein, 488 aa, Geobacillus stearothermophilus
AAPFNGTMMQYFEWYLPDDGTLWTKVADEANNLSSLGITALWLPPAYKGTSRSDVGYGVYDLYDLGEFNQKGTVRTKYGTKAQYLQAIQAAHAAGMQVYADVVFDHKGGADGTEWVDAVEVNPSDRNQEISGTYQIQAWTKFDFPGRGNTYSSFKWRWYHFDGVDWDESRQLSRIYKFRGIGKAWDWEVDTENGNYDYLMYADLDMDHPEVVTELKNWGKWYVDTTNIDGFRLDAVKHIKFSFFPDWLSYVRSQTGKPLFTVGEYWSYDIDKLHNYITKTNGTMSLFDAPLHNKFYTASKSGGAFDMQTLMTNTLMKDQPTLAVTFVDNHDTEPGQALQSWVDPWFKPLAYAFILTRQEGYPCVFYGDYYGIPQYNIPSLKSKIDPLLIARRDYAYGTQHDYLDHSDIIGWTREGVTEKPGSGLAALITDGPGGSKWMYVGKQHAGKVFYDLTGNRSDTVTINSDGWGEFKVNGGSVSVWVPQKTTVS

SEQ ID NO: 18232 - protein, 488 aa, Geobacillus stearothermophilus
AAPFNGTMMQYFEWYLPDDGTLWTKVANEANNLSSLGITALWLPPAYKGTSRSDVGYGVYDLYDLGEFNQKGTVRTKYGTKAQYLQAIQAAHAAGMQVYADVVFDHKGGADGTEWVDAVEVNPSDRNQVISGTYQIQAWTKFDFPGRGNTYSSFKWRWYHFDGVDWDESRKLSRIYLFEGXXKAWDWEVDTEFGNYDYLMYADLDMDHPEVVTELKNWGPWYVLTTNIDGFRLDAVKHIKFQFFPDWLSYVRSSTGKPLFTVGEYWSYDINKLHNYITKTNGTMSLFDAPLHNKFYTASKSGGAFDMRTLMTNTLMKDQPTLAVTFVDNHDTEPGQALQSWVDPWFKPLAYAFILTRQEGYPCVFYGDYYGIPQYNIPSLKSKIDPLLIARRDYAYGTQHDYLDHSDIIGWTREGVTEKPGSGLAALITDGPGGSKWMYVGKQHAGKVFYDLTGNRSDTVTINSDGWGEFKVNGGSVSVWVPRKTTVS

SEQ ID NO: 18233 - protein, 488 aa, Geobacillus stearothermophilus
AAPFNGTMMQYFEWYLPDDGTLWTKVANEANNLSSLGITALWLPPAYKGTSRSDVGYGVYDLYDLGEFNQKGAVRTKYGTKAQYLQAIQAAHAAGMQVYADVVFDHKGGADGTEWVDAVEVNPSDRNQEISGTYQIQAWTKFDFPGRGNTYSSFKWRWYHFDGVDWDESRKLSRIYKFRGIGKAWDWEVDTENGNYDYLMYADLDMDHPEVVTELKSWGKWYVNTTNIDGFRLDAVKHIKFSFFPDWLSDVRSQTGKPLFTVGEYWSYDINKLHNYIMKTNGTMSLFDAPLHNKFYTASKSGGTFDMRTLMTNTLMKDQPTLAVTFVDNHDTEPGQALQSWVDPWFKPLAYAFILTRQEGYPCVFYGDYYGIPQYKIPSLKSKIDPLLIARRDYAYGTQHDYLDHSDIIGWTREGVTEKPGSGLAALITDGPGGSKWMYVGKQHAGKVFYDLTGNRSDTVTINSDGWGEFKVNGGSVSVWVPRKTTVS

SEQ ID NO: 18234 - protein, 486 aa, Geobacillus stearothermophilus
AAPFNGTMMQYFEWYLPDDGTLWTKVANEANNLSSLGITALWLPPAYKGTSRSDVGYGVYDLYDLGEFNQKGTVRTKYGTKAQYLQAIQAAHAAGMQVYADVVFDHKGGADGTEWVDAVEVNPSDRNQVISGTYQIQAWTKFDFPGRGNTYSSFKWRWYHFDGVDWDESRKLSRIYLFEGKAWDWEVDTEFGNYDYLMYADLDMDHPEVVTELKNWGPWYVLTTNIDGFRLDAVKHIKFQFFPDWLSYVRSSTGKPLFTVGEYWSYDINKLHNFITKTDGTMSLFDAPLHNKFYTASKSGGAFDMRTLMTNTLMKDQPTLAVTFVDNHDTEPGQALQSWVDPWFKPLAYAFILTRQEGYPCVFYGDYYGIPQYNIPSLKSKIDPLLIARRDYAYGTQHDYLDHSDIIGWTREGGTEKPGSGLAAMITDGPGGSKWMYVGKQHAGKVFYDLTGNRSDTVTINSDGWGEFKVNGGSVSVWVPRKTTVS

SEQ ID NO: 18235 - protein, 484 aa, Geobacillus stearothermophilus
AAPFNGTMMQYFEWYLPDDGTLWTKVANEANNLSSLGITALWLPPAYKGTSRSDVGYGVYDLYDLGEFNQKGTVRTKYGTKAQYLQAIQAAHAAGMQVYADVVFDHKGGADGTEWVDAVEVNPSDRNQVISGTYQIQAWTKFDFPGRGNTYSSFKWRWYHFDGVDWDESRKLSRIYLFEGKAWDWEVDTEFGNYDYLMYADLDMDHPEVVTELKNWGPWYVLTTNIDGFRLDAVKHIKFQFFPDWLSYVRSSTGKPLFTVGEYWSYDINKLHNYITKTNGTMSLFDAPLHNKFYTASKSGGAFDMRTLMTNTLMKDQPTLAVTFVDNHDTEPGQALQSWVDPWFKPLAYAFILTRQEGYPCVFYGDYYGIPQYPSLKSKIDPLLIARRDYAYGTQHDYLDHSDIIGWTREGVTEKPGSGLAALITDGPGGSKWMYVGKQHAGKVFYDLTGNRSDTVTINSDGWGEFKVNGGSVSVWVPRKTTVS

SEQ ID NO: 18236 - protein, 483 aa, Unidentified
HHNGTNGAMMQYFEWHLPNDGNHWNRLRDDASNLRNRGITAIWIPPAWKGTSQNDVGYGAYDLYDLGEFNQKGTVRTKYGTRSQLESAIHALKNNGVQVYGDVVMNHKGGADATENVLAVEVNPNNRNQEISGDYTIEAYTKFDFPGRGNTYSDFKWRWYHFDGVDWDQSRQFQNRIYKFRGKAWDWEVDSEFGNYDYLMYADYDMDHPEVVNELRRWGEWYTNTLNLDGFRIDAVKHIKFSFTRDWLTHVRNATGKGMFAVAEFWKNDLGALENYLNKTNWNHSVFDVPLHYNLYNASNSRGNYDMAKLLNGTVVQKHPAHAVTFVDNHDSQPGESLESFVQEWFKPLAYALILTREQGYPSVFYGDYYGIPTHSVPAMKAKIDPILEARQNFAYGTQHDYFDHHNIIGWTREGNTTHPNSGLATIMSDGPGGEKWMYVGQNKAGQVWHDITGNKPGTVTINADGWANFSVNKGSVSIWVKR

SEQ ID NO: 18237 - protein, 479 aa, Aspergillus oryzae
ATPADWRSQSIYFLLTDRFARTDGSTTATCNTADKKYCGGTWQGIIDKLDYIQGMGFTAIWITPVTAQLPQTTAAGDAYHGYWQQDIYSLNENYGTADDLKALSSALHERGMYLMVDVVANHMGYDGAGSSVDYSVFKPFSSQDYFHPFCFIQNYEDQTQVEDCWFTDPAGFSLPDLDTTKDVVKNEWYDWVGSLVSNYSIDGLRIDTVKHVQKDFWPGYNKAAGVYCIGEVLGDDPAYTCPYQNVMDGVLNYPIYYPLLNAFKSTSGSMDDLYNMINTVKSDCPDSTLLGTFVENHDNPRFASYTNDIALAKNVAAFIILNDGIPIIYAGQEQHYAGGNDPANREATWLSGYPTDSELYKLIASANAIRNYAISKDTGFVTYKNWPIYKDDTTIAMRKGTDGSQIVTILSNKGASGDSYTLSLSGAGYTAGQQLTEVIGCTTVTVGSDGNVPVPMAGGLPRVLYPTEKLAGSKICSSS

SEQ ID NO: 18238 - protein, 477 aa, Aspergillus oryzae
ATPADWRSQSIYFLLTDRFARTDGSTTATCNTADQKYCGGTWQGIIDKLDYIQGMGFTAIWITPVTAQLPQDCAYGDAYTGYWQTDIYSLNENYGTADDLKALSSALHERGMYLMVDVVANHMGYDGAGSSVDYSVFKPFSSQDYFHPFCFIQNYEDQTQVEDCWLGDNTVSLPDLDTTKDVVKNEWYDWVGSLVSNYSIDGLRIDTVKHVQKDFWPGYNKAAGVYCIGEVLDGDPAYTCPYQNVMDGVLNYPIYYPLLNAFKSTSGSMDDLYNMINTVKSDCPDSTLLGTFVENHDNPRFASYTNDIALAKNVAAFIILNDGLPIIYAGQEQHYAGGNDPANREATWLSGYPTDSELYKLIASANAIRNYAISKDTGFVTYKNPYIKDDTTIAMRKGTDGSQIVTILSNKGASGDSYTLSLSGASYTAGQQLTEVIGCTTVTVGSDGNVPVPMAGGLPRVLYPTEKLAGSKICSDS

SEQ ID NO: 18239 - protein, 513 aa, Geobacillus stearothermophilus
AAPFNGTMMQYFEWYLPDDGTLWTKVANEANNLSSLGITALWLPPAYKGTSRSDVGYGAYDLYDLGEFNQKGTVRTKYGTKAQYLQAIQAAHAAGMQVYADVVFDHKGGADGTEWVDAVEVNPSDRNQVISGTYQIQAWTKFDFPGRGNTYSSFKWRWYHFDGVDWDESRKLSRIYLFEGKAWDWEVDTEFGNYDYLMYADLDMDHPEVVTELKNWGPWYVLTTNIDGFRLDAVKHIKFQFFPDWLSYVRSSTGKPLFTVGEYWSYDINKLHNYITKTNGTMSLFDAPLHNKFYTASKSGGAFDMRTLMTNTLMKDQPTLAVTFVDNHDTEPGQALQSWVDPWFKPLAYAFILTRQEGYPCVFYGDYYGIPQYNIPSLKSKIDPLLIARRDYAYGTQHDYLDHSDIIGWTREGVTEKPGSGLAALITDGPGGSKWMYVGKQHAGKVFYDLTGNRSDTVTINSDGWGEFKVNGGSVSVWVPRKTTVSTIARPITTRPWTGEFVRWTEPRLVAWP

SEQ ID NO: 18240 - protein, 513 aa, Geobacillus stearothermophilus
AAPFNGTMMQYFEWYLPDDGTLWTKVANEANNLSSLGITALWLPPAYKGTSRSDVGYGVYDLYDLGEFNQKGTVRTKYGTKAQYLQAIQAAHAAGMQVYADVVFDHKGGADGTEWVDAVEVNPSDRNQVISGTYQIQAWTKFDFPGRGNTYSSFKWRWYHFDGVDWDESRKLSRIYLFEGKAWDWEVDTEFGNYDYLMYADLDMDHPEVVTELKNWGPWYVLTTNIDGFRLDAVKHIKFQFFPDWLSYVRSSTGKPLFTVGEYWSYDINKLHNYITKTNGTTSLFDAPLHNKFYTASKSGGAFDMRTLMTNTLMKDQPTLAVTFVDNHDTEPGQALQSWVDPWFKPLAYAFILTRQEGYPCVFYGDYYGIPQYNIPSLKSKIDPLLIARRDYAYGTQHDYLDHSDIIGWTREGVTEKPGSGLAALITDGPGGSKWMYVGKQHAGKVFYDLTGNRSDTVTINSDGWGEFKVNGGSVSVWVPRKTTVSTIARPITTRPWTGEFVRWTEPRLVAWP

SEQ ID NO: 18241 - protein, 513 aa, Geobacillus stearothermophilus
AAPFNGTMMQYFEWYLPDDGTLWTKVANEANNLSSLGITALWLPPAYKGTSRSDVGYGAYDLYDLGEFNQKGTVRTKYGTKAQYLQAIQAAHAAGMQVYADVVFDHKGGADGTEWVDAVEVNPSDRNQVISGTYQIQAWTKFDFPGRGNTYSSFKWRWYHFDGVDWDESRKLSRIYLFEGKAWDWEVDTEFGNYDYLMYADLDMDHPEVVTELKNWGPWYVLTTNIDGFRLDAVKHIKFSFFPDWLSYVRSSTGKPLFTVGEYWSYDINKLHNYITKTNGTTSLFDAPLHNKFYTASKSGGAFDMRTLMTNTLMKDQPTLAVTFVDNHDTEPGQALQSWVDPWFKPLAYAFILTRQEGYPCVFYGDYYGIPQYNIPSLKSKIDPLLIARRDYAYGTQHDYLDHSDIIGWTREGVTEKPGSGLAALITDGPGGSKWMYVGKQHAGKVFYDLTGNRSDTVTINSDGWGEFKVNGGSVSVWVPRKTTVSTIARPITTRPWTGEFVRWTEPRLVAWP

SEQ ID NO: 18242 - protein, 515 aa, Geobacillus stearothermophilus
AAPFNGTMMQYFEWYLPDDGTLWTKVANEANNLSSLGITALWLPPAYKGTSRSDVGYGVYDLYDLGEFNQKGAVRTKYGTKAQYLQAIQAAHAAGMQVYADVVFDHKGGADGTEWVDAVEVNPSDRNQEISGTYQIQAWTKFDFPGRGNTYSSFKWRWYHFDGVDWDESRKLSRIYKFRGIGKAWDWEVDTENGNYDYLMYADLDMDHPEVVTELKSWGKWYVNTTNIDGFRLDAVKHIKFSFFPDWLSYVRSQTGKPLFTVGEYWSYDINKLHNYIMKTNGTMSLFDAPLHNKFYTASKSGGTFDMRTLMTNTLMKDQPTLAVTFVDNHDTEPGQALQSWVDPWFKPLAYAFILTRQEGYPCVFYGDYYGIPQYNIPSLKSKIDPLLIARRDYAYGTQHDYLDHSDIIGWTREGVTEKPGSGLAALITDGPGGSKWMYVGKQHAGKVFYDLTGNRSDTVTINSDGWGEFKVNGGSVSVWVPRKTTVSTIAWSITTRPWTDEFVRWTEPRLVAWP

SEQ ID NO: 18243 - protein, 515 aa, Geobacillus stearothermophilus
AAPFNGTMMQYFEWYLPDDGTLWTKVANEANNLSSLGITALWLPPAYKGTSRSDVGYGVYDLYDLGEFNQKGTVRTKYGTKAQYLQAIQAAHAAGMQVYADVVFDHKGGADGTEWVDAVEVNPSDRNQVISGTYQIQAWTKFDFPGRGNTYSSFKWRWYHFDGVDWDESRKLSRIYLFEGIGKAWDWEVDTENGNYDYLMYADLDMDHPEVVTELKNWGPWYVLTTNIDGFRLDAVKHIKFQFFPDWLSYVRSSTGKPLFTVGEYWSYDINKLHNYITKTNGTMSLFDAPLHNKFYTASKSGGAFDMRTLMTNTLMKDQPTLAVTFVDNHDTEPGQALQSWVDPWFKPLAYAFILTRQEGYPCVFYGDYYGIPQYNIPSLKSKIDPLLIARRDYAYGTQHDYLDHSDIIGWTREGVTEKPGSGLAALITDGPGGSKWMYVGKQHAGKVFYDLTGNRSDTVTINSDGWGEFKVNGGSVSVWVPRKTTVSTIARPITTRPWTGEFVRWTEPRLVAWP

SEQ ID NO: 18244 - protein, 515 aa, Geobacillus stearothermophilus
AAPFNGTMMQYFEWYLPDDGTLWTKVANEANNLSSLGITALWLPPAYKGTSRSDVGYGAYDLYDLGEFNQKGTVRTKYGTKAQYLQAIRAAHAAGMQVYADVVFDHKGGADGTEWVDAVEVNPSDRNQVISGTYQIQAWTKFDFPGRGNTYSSFKWRWYHFDGVDWDESRKLSRIYLFEGIGKAWDWEVDTENGNYDYLMYADLDMDHPEVVTELKNWGKWYVNTTNIDGFRLDAVKHIKFSFFPDWLSYVRSSTGKPLFTVGEYWSYDINKLHNYITKTNGTVSLFDAPLHNKFYTASKSGGAFDMRTLMTNTLMKDQPTLAVTFVDNHDTEPGQALQSWVDPWFKPLAYAFILTRQEGYPCVFYGDYYGIPQYNIPSLKSKIDPLLIARRDYAYGTQHDYLDHSDIIGWTREGVTEKPGSGLAALITDGPGGSKWMYVGKQHAGKVFYDLTGNRSDTVTINSDGWGEFKVNGGSVSVWVPRKTTVSTIARPITTRPWTGEFVRWTEPRLVAWP

SEQ ID NO: 18245 - protein, 515 aa, Geobacillus stearothermophilus
AAPFNGTMMQYFEWYLPDNGTLWTKVAREANNLSSLGITALWLPPAYKGTSRSDVGYGVYDLYDLGEFNQKGTVRTKYGTKAQYLQAIQAAHAAGMQVYADVVFDHKGGADGTEWVDAVEVNPSDRNQEISGTYQIQAWTKFDFPGRGNTYSSFKWRWYHFDGVDWDESRKLSRIYKFRGIGKAWDWEVDTENGNYDYLMYADLDMDHPEVVTELKNWGKWYVRTTNIDGFRLDAVKHIKFSFFPDWLSYVRSQTGKPLFTVGEYWSYDIRKLHNYITKTRGTMSLFDAPLHNKFYTASKSGGAFNMRTLMTNTLMKNQPTLAVTFVDNHDTEPGQALQSWVDPWFKPLAYAFILTRQEGYPCVFYGDYYGIPQYNIPSLKSKIDPLLIARRNYAYGTQHDYLDHSDIIGWTREGVTEKPGSGLAALITDGPGGSKWMYVGKQHAGKVFYDLTGNRSDTVTINSDGWGEFKVNGGSVSVWVPRKTTVSTIARPITTRPWTGEFVRWTEPRLVAWP

SEQ ID NO: 18246 - protein, 515 aa, Geobacillus stearothermophilus
AAPFNGTMMQYFEWYLPDDGTLWTKVANEANNLSSLGITALWLPPAYKGTSRSDVGYGVYDLYDLGEFNQKGTVRTKYGTKAQYLQAIQAAHAAGMQVYADVVFDHKGGADGTEWVDAVEVNPSDRNQVISGTYQIQAWTKFDFPGRGNTYSSFKWRWYHFDGVDWDESRKLSRIYLFEGIGKAWDWEVDTENGNYDYLMYADLDMDHPEVVTELKNWGPWYVLTTNIDGFRLDAVKHIKFSFFPDWTSYVRSSTGKPLFTVGEYWSYDINKLHNYITKTNGTMSLFDAPLHNKFYTASKSGGAFDMRTLMTNTLMKDQPTLAVTFVDNHDTEPGQALQSWVDPWFKPLAYAFILTRQEGYPCVFYGDYYGIPQYNIPSLKSKIDPLLIARRDYAYGTQHDYLDHSDIIGWTREGVTEKPGSGLAALITDGPGGSKWMYVGKQHAGKVFYDLTGNRSDTVTINSDGWGEFKVNGGSVSVWVPRKTTVSTIARPITTRPWTGEFVRWTEPRLVAWP

SEQ ID NO: 18247 - protein, 515 aa, Geobacillus stearothermophilus
AAPFNGTMMQYFEWYLPDDGTLWTKVANEANNLSSLGITALWLPPAYKGTSRSDVGYGVYDLYDLGEFNQKGTVRTKYGTKAQYLQAIQAAHAAGMQVYADVVFDHKGGADGTEWVDAVEVNPSDRNQVISGTYQIQAWTKFDFPGRGNTYSSFKWRWYHFDGVDWDESRKLSRIYLFEGIGKAWDWEVDTENGNYDYLMYADLDMDHPEVVTELKNWGPWYVLTTNIDGFRLDAVKHIKFSFFPDWLSYVRSSTGKPLFTVGEYWSYDINKLHNYITKTNGTTSLFDAPLHNKFYTASKSGGAFDMRTLMTNTLMKDQPTLAVTFVDNHDTEPGQALQSWVDPWFKPLAYAFILTRQEGYPCVFYGDYYGIPQYNIPSLKSKIDPLLIARRDYAYGTQHDYLDHSDIIGWTREGVTEKPGSGLAALITDGPGGSKWMYVGKQHAGKVFYDLTGNRSDTVTINSDGWGEFKVNGGSVSVWVPRKTTVSTIARPITTRPWTGEFVRWTEPRLVAWP

SEQ ID NO: 18248 - protein, 515 aa, Geobacillus stearothermophilus
AAPFNGTMMQYFEWYLPDDGTLWTKVADEANNLSSLGITALWLPPAYKGTSRSDVGYGVYDLYDLGEFNQKGTVRTKYGTKAQYLQAIQAAHAAGMRVYADVVFDHKGGADGTEWVDAVEVNPSDRNQEISGTYQIQAWTKFDFPGRGNTYSSFKWRWYHFDGVDWDESRKLSRIYKFRGIGKAWDWEVDTENGNYDYLMYADLDMDHPEVVTELKNWGKWYVNTTNIDGFRLDAVKHIKFEFFPDWLSYVRSQTGKPLFTVGEYWSYDINKLHNYITKTNGTMSLFDAPLHNKFYTASKSGGAFDMQTLMTNTLMKDRPTLAVTFVDNHDTEPGQALQSWVDPWFKPLAYAFILTREEGYPCVFYGDYYGIPQYNIPSLKSKIDPLLIARRDYAYGTQHDYLDHSDIIGWTREGVTEKPGSGLAALITDGPGGSKWMYVGKEHAGKVFYDLTGNRSDTVTINSDGWGEFKVNGGSVSVWVPRKTTVSTIARPITTRPWTGEFVRWTEPRLVAWP

SEQ ID NO: 18249 - protein, 515 aa, Geobacillus stearothermophilus
AAPFNGTMMQYFEWYLPDDGTLWTKVANEANNLSSLGITALWLPPAYKGTSRSDVGYGVYDLYDLGEFNQKGTVRTKYGTKAQYLQAIQAAHAAGMQVYADVVFDHKGGADGTEWVDAVEVNPSDRNQVISGTYQIQAWTKFDFPGRGNTYSSFKWRWYHFDGVDWDESRKLSRIYLFVGIGKAWDWEVDTENGNYDYLMYADLDMDHPEVVTELKNWGPWYVLTTNIDGFRLDAVKHIKFQFFPDWLSYVRSSTGKPLFTVGEYWSYDINKLHNYITKTNGTMSLFDAPLHNKFYTASKSGGAFDMRTLMTNTLMKDQPTLAVTFVDNHDTEPGQALQSWVDPWFKPLAYAFILTRQEGYPCVFYGDYYGIPQYNIPSLKSKIDPLLIARRDYAYGTQHDYLDHSDIIGWTREGVTEKPGSGLAALITDGPGGSKWMYVGKQHAGKVFYDLTGNRSDTVTINSDGWGEFKVNGGSVSVWVPRKTTVSTIARPITTRPWTGEFVRWTEPRLVAWP

SEQ ID NO: 18250 - protein, 515 aa, Bacillus stearothermophilus
AAPFNGTMMQYFEWYLPDDGTLWTKVANEANNLSSLGITALWLPPAYKGTSRSDVGYGAYDLYDLGEFNQKGTVRTKYGTKAQYLQAIQAAHAAGMQVYADVVFDHKGGADGTEWVDAVEVNPSDRNQVISGTYQIQAWTKFDFPGRGNTYSSFKWRWYHFDGVDWDESRKLSRIYLFEGIGKAWDWEVDTENGNYDYLMYADLDMDHPEVVTELKNWGPWYVLTTNIDGFRLDAVKHIKFSFFPDWLSYVRSSTGKPLFTVGEYWSYDINKLHNYITKTNGTMSLFDAPLHNKFYTASKSGGAFDMRTLMTNTLMKDQPTLAVTFVDNHDTEPGQALQSWVDPWFKPLAYAFILTRQEGYPCVFYGDYYGIPQYNIPSLKSKIDPLLIARRDYAYGTQHDYLDHSDIIGWTREGVTEKPGSGLAALITDGPGGSKWMYVGKQHAGKVFYDLTGNRSDTVTINSDGWGEFKVNGGSVSVWVPRKTTVSTIARPITTRPWTGEFVRWTEPRLVAWP

SEQ ID NO: 18251 - protein, 512 aa, Geobacillus stearothermophilus
AAPFNGTMMQYFEWYLPDDGTLWTKVANEANNLSSLGITALWLPPAYKGTSRSDVGYGVYDLYDLGEFNQKGAVRTKYGTKAQYLQAIQAAHAAGMQVYADVVFDHKGGADGTEWVDAVEVNPSDRNQEISGTYQIQAWTKFDFPGRGNTYSSFKWRWYHFDGVDWDESRKLSRIYKFRGKAWDWEVDTEFGNYDYLMYADLDMDHPEVVTELKSWGKWYVNTTNIDGFRLDAVKHIKFSFFPDWLSDVRSQTGKPLFTVGEYWSYDINKLHNYIMKTNGTMSLFDAPLHNKFYTASKSGGTFDMRTLMTNTLMKDQPTLAVTFVDNHDTEPGQALQSWVDPWFKPLAYAFILTRQEGYPCVFYGDYYGIPQYNIPSLKSKIDPLLIARRDYAYGTQHDYLDHSDIIGWTREGVTEKPGSGLAALITDGPGGSKWMYVGKQHAGKVFYDLTGNRSDTVTINSDGWGEFKVNGGSVSVWVPRKTTVSTIAWSITTRPWTDEFVRWTEPRLVAW

SEQ ID NO: 18252 - protein, 514 aa, Geobacillus stearothermophilus
AAPFNGTMMQYFEWYLPDDGTLWTKVANEANNLSSLITALWLPPAYKGTSRSDVGYGVYDLYDLGEFNQKGTVRTKYGTKAQYLQAIQAAHAAGMQVYADVVFDHKGGADGTEWVDAVEVNPSDRNQVISGTYQIQAWTKFDFPGRGNTYSSFKWRWYHFDGVDWDESRKLSRIYLFEGIGKAWDWEVDTENGNYDYLMYADLDMDHPEVVTELKNWGPWYVLTTNIDGFRLDAVKHIKFQFFPDWLSYVRSSTGKPLFTVGEYWSYDINKLHNYITKTNGTMSLFDAPLHNKFYTASKSGGAFDMRTLMTNTLMKDQPTLAVTFVDNHDTEPGQALQSWVDPWFKPLAYAFILTRQEGYPCVFYGDYYGIPQYNIPSLKSKIDPLLIARRDYAYGTQHDYLDHSDIIGWTREGVTEKPGSGLAALITDGPGGSKWMYVGKQHAGKVFYDLTGNRSDTVTINSDGWGEFKVNGGSVSVWVPRKTTVSTIARPITTRPWTGEFVRWTEPRLVAWP

SEQ ID NO: 18253 - protein, 513 aa, Geobacillus stearothermophilus
AAPFNGTMMQYFEWYLPDDGTLWTKVANEANNLSSLGITALWLPPAYKGTSRSDVGYGVYDLYDLGEFNQKGTVRTKYGTKAQYLQAIQAAHAAGMQVYADVVFDHKGGADGTEWVDAVEVNPSDRNQVISGTYQIQAWTKFDFPGRGNTYSSFKWRWYHFDGVDWDESRKLSRIYLFEGIGKAWDWEVDTENGNYDYLMYADLDMDHPEVVTELKNWGPWYVLTTNIDGFRLDAVKHIKFQFFPDWLSYVRSSTGKPLFTVGEYWSYDINKLHNYITKTNGTMSLFDAPLHNKFYTASKSGGAFDMRTLMTNTLMKDQPTLAVTFVDNHDTEPGQALQSWVDPWFKPLAYAFILTRQEGYPCVFYGDYYGIPQYPSLKSKIDPLLIARRDYAYGTQHDYLDHSDIIGWTREGVTEKPGSGLAALITDGPGGSKWMYVGKQHAGKVFYDLTGNRSDTVTINSDGWGEFKVNGGSVSVWVPRKTTVSTIARPITTRPWTGEFVRWTEPRLVAWP

SEQ ID NO: 18254 - protein, 498 aa, Aspergillus oryzae
MVAWWSLFLYGLQVAAPALAATPADWRSQSIYFLLTDRFARTDGSTTATCNTADQKYCGGTWQGIIDKLDYIQGMGFTAIWITPVTAQLPQTTAYGDAYHGYWQQDIYSLNENYGTADDLKALSSALHERGMYLMVDVVANHMGYDGAGSSVDYSVFVPFNSASYFHPFCFIQNYENQTQVEDCWLGDNTVSLPDLDTTKDVVKNEWYDWVGSLVSNYSIDGLRIDTVKHVQKDFWPGYNKAAGVYCIGEVLDGDPAYTCPYQKVLDGVLNYPIYYPLLNAFKSTSGSMDDLYNMINTVKSDCPDSTLLGTFVENHDNPRFASYTNDIALAKNVAAFIILNDGIPIIYAGQEQHYAGGNDPANREATWLSGYPTDSELYKLIASANAIRNYAISKDTGFVTYKNWPIYKDDTTIAMRKGTDGSQIVTILSNKGASGDSYTLSLSGAGYTAGQQLTEVIGCTTVTVDSSGDVPVPMAGGLPRVLYPTEKLAGSKICSSS

SEQ ID NO: 18255 - protein, 498 aa, Aspergillus oryzae
MVAWWSLFLYGLQVAAPALAATPADWRSQSIYFLLTDRFARTDGSTTATCNTADQKYCGGTWQGIIDKLDYIQGMGFTAIWITPVTAQLPQTTAYGDAYHGYWQQDIYSLNENYGTADDLKALSSALHERGMYLMVDVVANHMGYDGAGSSVDYSVFVPFNSASYFHPFCFIQNYENQTQVEDCWLGDNTVSLPDLDTTKDVVKNEWYDWVGSLVSNYSIDGLRIDTVKHVQKDFWPGYNKAAGVYCIGEVLDGDPAYTCPYQEVLDGVLNYPIYYPLLNAFKSTSGSMDDLYNMINTVKSDCPDSTLLGTFVENHDNPRFASYTNDIALAKNVAAFIILNDGIPIIYAGQEQHYAGGNDPANREATWLSGYPTDSELYKLIASANAIRNYAISKDTGFVTYKNWPIYKDDTTIAMRKGTDGSQIVTILSNKGASGDSYTLSLSGAGYTAGQQLTEVIGCTTVTVDSSGDVPVPMAGGLPRVLYPTEKLAGSKICSSS

SEQ ID NO: 18256 - protein, 491 aa, Geobacillus stearothermophilus
AAPFNGTMMQYFEWYLPDDGQLWTKVANEANNLSSLGITALWLPPAYKGTSRSDVGYGAYDLYDLGEFNQKGTVRTKYGTKAQYLKAIQAAHAAGMQVYADVVFDHKGGADGTEWVQAVEVNPSDRNQVISGTYQIQAWTKFDFPGRGNTYSSFKWRWYHFDGVDWDESRKLNRIYLFEGKAWDWPVDTEFGNYDYLMYADLDMDYPEVTTELKNWGKWYVNTTNIDGFRLDAVKHIKFYFFPDWLSYVRSSTGKPLFTVGEYWSGDINKLHNYITKTDGTVSLFDAPLHYKFYNASKSGGAFDMRTLMTNTLMKDQPTLAVTFVDNHDTEPGQALQSWVDPWFKPLAYAFILTRQEGYPCVFYGDYYGIPQYNIPSLKHKIDPLLIARRDYAYGTQHDYLDHSDIIGWTREGGTEKPGSGLAALITDGPGGSKWMYVGKQHAGKVFYDLTGNRSDTVTINSDGWGEFKVNGGSVSVWVPRKTTVSTIARP

SEQ ID NO: 18257 - protein, 491 aa, Geobacillus stearothermophilus
AAPFNGTMMQYFEWYTPDDGKQWDKVANEANNLSSLGITALWLPPAYKGTSRSDVGYGAYDLYDLGEFNQKGTVRTKYGTKAQYLQAIQAAHAAGMQVYADVVFDHKGGADGTEWVDAVEVNPSDRNQVISGTYQIQAWTKFDFPGRGNTYSSFKWRWYHFDGVDWDESRKLSRIYLFEGKAWDWEVDTEFGNYDYLMYADLDMDHPEVTTELKNWGKWYVNTTNIDGFRLDAVKHIKFSFFPDWLSYVRSSTGKPLFTVGEYWSGDINKLHNYITKTDGTVSLFDAPLHYKFYNASKSGGAFDMRTLMTNTLMKDQPTLAVTFVDNHDTEPGQALQSWVDPWFKPLAYAFILTRQEGYPCVFYGDYYGIPQYNIPSLKSKIDPLLIARRDYAYGTQHDYLDHSDIIGWTREGGTEKPGSGLAALITDGPGGSKWMYVGKQHAGKVFYDLTGNRSDTVTINSDGWGEFKVNGGSVSVWVPRKTTVSTIARP

SEQ ID NO: 18258 - protein, 491 aa, Geobacillus stearothermophilus
AAPFNGTMMQYFEWYLPDDGQLWNRVANDANNLSSLGITALWLPPAYKGTSRSDVGYGAYDLYDLGEFNQKGTVRTKYGTKAQYLQAIQAAHAAGMQVYADVVFDHKGGADGTEWVDAVEVNPSDRNQVISGTYQIQAWTKFDFPGRGNTYSSFKWRWYHFDGVDWDESRKLSRIYLFEGKAWDWEVDTEFGNYDYLMYADLDMDHPEVTTELKNWGKWYVNTTNIDGFRLDAVKHIKFSFFPDWLSYVRSSTGKPLFTVGEYWSGDINKLHNYITKTDGTVSLFDAPLHYKFYNASKSGGAFDMRTLMTNTLMKDQPTLAVTFVDNHDTEPGQALQSWVDPWFKPLAYAFILTRQEGYPCVFYGDYYGIPQYNIPSLKSKIDPLLIARRDYAYGTQHDYLDHSDIIGWTREGGTEKPGSGLAALITDGPGGSKWMYVGKQHAGKVFYDLTGNRSDTVTINSDGWGEFKVNGGSVSVWVPRKTTVSTIARP

SEQ ID NO: 18259 - protein, 491 aa, Geobacillus stearothermophilus
AAPFNGTMMQYFEWYLPDDGTLWTKVANEANNLSSLGITALWLPPAYKGTSRSDVGYGAYDLYDLGEFNQKGTVRTKYGTKAQYLQAIQAAHAAGMQVYADVVFDHKGGADGTEWVDAVEVNPSDRNQVISGTYQIQAWTKFDFPGRGNTYSSFKWRWYHFDGVDWDESRKLSRIYLFEGKAWDWEVDTEFGNYDYLMYADLDMDHPEVTTELKNWGKWYVNTTNIDGFRLDAVKHIKFSFFPDWLSYVRSSTGKPLFTVGEYWSGDINKLHNYITKTDGTVSLFDAPLHYKFYNASKSGGAFDMRTLMTNTLMKDQPTLAVTFVDNHDTEPGQALQSWVDPWFKPLAYAFILTRQEGYPCVFYGDYYGIPQYNIPSLKSKIDPLLIARRDYAYGTQHDYLDHSDIIGWTREGSSSVPGSGLAALITDGPGGSKWMYVGKQHAGKVFYDLTGNRSDTVTINSDGWGEFKVNGGSVSVWVPRKTTVSTIARP

SEQ ID NO: 18260 - protein, 491 aa, Geobacillus stearothermophilus
AAPFNGTMMQYFEWYLPDDGTLWTKVANEANNLSSLGITALWLPPAYKGTSRSDVGYGAYDLYDLGEFNQKGTVRTKYGTKAQYLQAIQAAHAAGMQVYADVVFDHKGGADGTEWVDAVEVNPSDRNQVISGTYQIQAWTKFDFPGRGNTYSSFKWRWYHFDGVDWDESRKLSRIYLFEGKAWDWEVDTEFGNYDYLMYADLDMDHPEVTTELKNWGKWYVNTTNIDGFRLDAVKHIKFSFFPDWLSYVRSSTGKPLFTVGEYWSGDINKLHNYITKTDGTVSLFDAPLHYKFYNASKSGGAFDMRTLMTNTLMKDQPTLAVTFVDNHDTEPGQALQSWVDPWFKPLAYAFILTRQEGYPCVFYGDYYGIPQYNIPSLKSKIEPLLKARKNYAYGTQHDYLDHSDIIGWTREGGTEKPGSGLAALITDGPGGSKWMYVGKQHAGKVFYDLTGNRSDTVTINSDGWGEFKVNGGSVSVWVPRKTTVSTIARP

SEQ ID NO: 18261 - protein, 488 aa, Geobacillus stearothermophilus
AAPFNGTMMQYFEWYLPDDGTLWTKVANEANNLSSLGITALWLPPAYKGTSRSDVGYGVYDLYDLGEFNQKGTVRTKYGTKAQYLQAIQAAHAAGMQVYADVVFDHKGGADGTEWVDAVEVNPSDRNQVISGTYQIQAWTKFDFPGRGNTYSSFKWRWYHFDGVDWDESRKLSRIYLFEGXXKAWDWEVDTEFGNYDYLMYADLDMDHPEVVTELKNWGPWYVLTTNIDGFRLDAVKHIKFQFFPDWLSYVRSSTGKPLFTVGEYWSYDINKLHNYITKTNGTTSLFDAPLHNKFYTASKSGGAFDMRTLMTNTLMKDQPTLAVTFVDNHDTEPGQALQSWVDPWFKPLAYAFILTRQEGYPCVFYGDYYGIPQYNIPSLKSKIDPLLIARRDYAYGTQHDYLDHSDIIGWTREGVTEKPGSGLAALITDGPGGSKWMYVGKQHAGKVFYDLTGNRSDTVTINSDGWGEFKVNGGSVSVWVPRKTTVS

SEQ ID NO: 18262 - protein, 486 aa, Geobacillus stearothermophilus
AAPFNGTMMQYFEWYLPDDGTLWTKVANEANNLSSLGITALWLPPAYKGTSRSDVGYGAYDLYDLGEFNQKGTVRTKYGTKAQYLQAIQAAHAAGMQVYADVVFDHKGGADGTEWVDAVEVNPSDRNQVISGTYQIQAWTKFDFPGRGNTYSSFKWRWYHFDGVNWDESRKLSRIYLFEGKAWDWEVDTEFGNYDYLMYADLDMDYPEVVTELKNWGPWYVLTTNIDGFRLDAVKHIKFQFFPDWLSYVRSSTGKPLFTVGEYWSYDINKLHNYITKTDGTMSLFDAPLHNKFYTASKSGGAFDMRTLMTNTLMKDQPTLAVTFVDNHDTEPGQALQSWVDPWFKPLAYAFILTRQEGYPCVFYGDYYGIPQYNIPSLKSKIDPLLIARRDYAYGTQHDYLDHSDIIGWTREGGTEKPGSGLAALITDGPGGSKWMYVGKQHAGKVFYDLTGNRSDTVTINSDGWGEFKVNGGSVSVWVPRKTTVS

SEQ ID NO: 18263 - protein, 486 aa, Geobacillus stearothermophilus
AAPFNGTMMQYFEWYLPDDGTLWTKVANEANNLSSLGITALWLPPAYKGTSRSDVGYGAYDLYDLGEFNQKGTVRTKYGTKAQYLQAIQAAHAAGMQVYADVVFDHKGGADGTEWVDAVEVNPSDRNQVISGTYQIQAWTKFDFPGRGNTYSSFKWRWYHFDGVDWDESRKLSRIYLFGGKAWDWEVDTEFGNYDYLMYADLDMDHPEVTTELKNWGKWYVNTTNIDGFRLDAVKHIKFSFFPDWLSYVRSSTGKPLFTVGEYWSGDINKLHNYITKTDGTVSLFDAPLHYKFYNASKSGGAFDMRTLMTNTLMKDQPTLAVTFVDNHDTEPGQALQSWVDPWFKPLAYAFILTRQEGYPCVFYGDYYGIPQYNIPSLKSKIDPLLIARRDYAYGTQHDYLDHSDIIGWTREGGTEKPGSGLAALITDGPGGSKWMYVGKQHAGKVFYDLTGNRSDTVTINSDGWGEFKVNGGSVSVWVPRKTTVS

SEQ ID NO: 18264 - protein, 486 aa, Geobacillus stearothermophilus
AAPFNGTMMQYFEWYLPDDGTLWTKVANEANNLSSLGITALWLPPAYKGTSRSDVGYGVYDLYDLGEFNQKGTVRTKYGTKAQYLQAIQALHAAGIQVYADVVFDHKGGADGTEWVDAVEVNPSDRNQVISGTYQIQAWTKFDFPGRGNTYSSFKWRWYHFDGVDWDESRKLSRIYLFEGKAWDWEVDTEFGNYDYLMYADLDMDHPEVVTELKNWGKWYVLTTNIDGFRLDAVKHIKFQFFPDWLSYVRSSTGKPLFTVGEYWSYDINKLHNYITKTNGTMSLFDAPLHNKFYTASKSGGAFDMRTLMTNTLMKDQPTLAVTFVDNHDTEPGQALQSWVDPWFKPLAYAFILTRQEGYPCVFYGDYYGIPQYNIPSLKSKIDPLLIARRDYAYGTQHDYLDHSDIIGWTREGVTEKPGSGLAALITDGPGGSKWMYVGKQHAGKVFYDLTGNRSDTVTINSDGWGEFKVNGGSVSVWVPRKTTVS

SEQ ID NO: 18265 - protein, 486 aa, Geobacillus stearothermophilus
AAPFNGTMMQYFEWYLPDDGTLWTKVANEANNLSSLGITALWLPPAYKGTSRSDVGYGAYDLYDLGEFNQKGTVRTKYGTKAQYLQAIQAAHAAGMQVYADVVFDHKGGADGTEWVDAVEVNPSDRNQVISGTYQIQAWTKFDFPGRGNTYSSFKWRWYHFDGVDWDESRELSRIYLFEGKAWDWEVDTEFGNYDYLMYADLDMDYPEVVTELKNWGPWYVLTTNIDGFRLDAVKHIKFQFFPDWLSYVRSSTGKPLFTVGEYWSYDINKLHNYITKTDGTMSLFDAPLHNKFYTASKSGGAFDMRTLMTNTLMKDQPTLAVTFVDNHDTEPGQALQSWVDPWFKPLAYAFILTRQEGYPCVFYGDYYGIPQYNIPSLKSKIDPLLIARRDYAYGTQHDYLDHSDIIGWTREGGTEKPGSGLAALITDGPGGSKWMYVGKQHAGKVFYDLTGNRSDTVTINSDGWGEFKVNGGSVSVWVPRKTTVS

SEQ ID NO: 18266 - protein, 488 aa, Geobacillus stearothermophilus
AAPFNGTMMQYFEWYLPDNGTLWTKVAREANNLSSLGITALWLPPAYKGTSRSDVGYGVYDLYDLGEFNQKGTVRTKYGTKAQYLQAIQAAHAAGMQVYADVVFDHKGGADGTEWVDAVEVNPSDRNQEISGTYQIQAWTKFDFPGRGNTYSSFKWRWYHFDGVDWDESRKLSRIYKFRGIGKAWDWEVDTENGNYDYLMYADLDMDHPEVVTELKNWGKWYVRTTNIDGFRLDAVKHIKFSFFPDWLSYVRSQTGKPLFTVGEYWSYDIRKLHNYITKTRGTMSLFDAPLHNKFYTASKSGGAFNMRTLMTNTLMKNQPTLAVTFVDNHDTEPGQALQSWVDPWFKPLAYAFILTRQEGYPCVFYGDYYGIPQYNIPSLKSKIDPLLIARRNYAYGTQHDYLDHSDIIGWTREGVTEKPGSGLAALITDGPGGSKWMYVGKQHAGKVFYDLTGNRSDTVTINSDGWGEFKVNGGSVSVWVPRKTTVS

SEQ ID NO: 18267 - protein, 486 aa, Geobacillus stearothermophilus
AAPFNGTMMQYFEWYLPDDGTLWTKVANEANNLSSLGITALWLPPAYKGTSRSDVGYGAYDLYDLGEFNQKGTVRTKYGTKAQYLQAIQAAHAAGMQVYADVVFDHKGGADGTEWVDAVEVNPSDRNQVISGTYQIQAWTKFDFPGRGNTYSSFKWRWYHFDGVDWDESRKLSRIYLFEGKSWDWEVDTEFGNYDYLMYADLDMDYPEVVTELKNWGPWYVLTTNIDGFRLDAVKHIKFQFFPDWLSYVRSSTGKPLFTVGEYWSYDINKLHNYITKTDGTMSLFDAPLHNKFYTASKSGGAFDMRTLMTNTLMKDQPTLAVTFVDNHDTEPGQALQSWVDPWFKPLAYAFILTRQEGYPCVFYGDYYGIPQYNIPSLKSKIDPLLIARRDYAYGTQHDYLDHSDIIGWTREGGTEKPGSGLAALITDGPGGSKWMYVGKQHAGKVFYDLTGNRSDTVTINSDGWGEFKVNGGSVSVWVPRKTTVS

SEQ ID NO: 18268 - protein, 488 aa, Geobacillus stearothermophilus
AAPFNGTMMQYFEWYLPDDGTLWTKVANEANNLSSLGITALWLPPAYKGTSRSDVGYGAYDLYDLGEFNQKGTVRTKYGTKAQYLQAIQAAHAAGMQVYADVVFDHKGGADGTEWVDAVEVNPSDRNQVISGTYQIQAWTKFDFPGRGNTYSSFKWRWYHFDGVDWDESRKLSRIYLFEGXXKAWDWEVDTEFGNYDYLMYADLDMDHPEVVTELKNWGPWYVLTTNIDGFRLDAVKHIKFSFFPDWLSYVRSSTGKPLFTVGEYWSYDINKLHNYITKTNGTTSLFDAPLHNKFYTASKSGGAFDMRTLMTNTLMKDQPTLAVTFVDNHDTEPGQALQSWVDPWFKPLAYAFILTRQEGYPCVFYGDYYGIPQYNIPSLKSKIDPLLIARRDYAYGTQHDYLDHSDIIGWTREGVTEKPGSGLAALITDGPGGSKWMYVGKQHAGKVFYDLTGNRSDTVTINSDGWGEFKVNGGSVSVWVPRKTTVS

SEQ ID NO: 18269 - protein, 486 aa, Geobacillus stearothermophilus
AAPFNGTMMQYFEWYLPDDGTLWTKVANEANNLSSLGITALWLPPAYKGTSRSDVGYGAYDLYDLGEFNQKGTVRTKYGTKAQYLQAIQAAHAAGMQVYADVVFDHKGGADGTEWVDAVEVNPSDRNQVISGTYQIQAWTKFDFPGRGNTYSSFKWRWYHFDGVDWDASRKLSRIYLFEGKAWDWEVDTEFGNYDYLMYADLDMDYPEVVTELKNWGPWYVLTTNIDGFRLDAVKHIKFQFFPDWLSYVRSSTGKPLFTVGEYWSYDINKLHNYITKTDGTMSLFDAPLHNKFYTASKSGGAFDMRTLMTNTLMKDQPTLAVTFVDNHDTEPGQALQSWVDPWFKPLAYAFILTRQEGYPCVFYGDYYGIPQYNIPSLKSKIDPLLIARRDYAYGTQHDYLDHSDIIGWTREGGTEKPGSGLAALITDGPGGSKWMYVGKQHAGKVFYDLTGNRSDTVTINSDGWGEFKVNGGSVSVWVPRKTTVS

SEQ ID NO: 18270 - protein, 486 aa, Geobacillus stearothermophilus
AAPFNGTMMQYFEWYLPDDGTLWTKVANEANNLSSLGITALWLPPAYKGTSRSDVGYGAYDLYDLGEFNQKGTVRTKYGTKAQYLQAIRAAHAAGMQVYADVVFDHKGGADGTEWVDAVEVNPSDRNQVISGTYQIQAWTKFDFPGRGNTYSSFKWRWYHFDGVDWDESRKLSRIYLFEGKAWDWEVDTEFGNYDYLMYADLDMDHPEVVTELKNWGPWYVLTTNIDGFRLDAVKHIKFSFFPDWLSYVRSSTGKPLFTVGEYWSYEINKLHNYITKTNGTMSLFDAPLHNKFYTASKSGGAFDMRTLMTNTLMKDQPTLAVTFVDNHDTEPGQALQSWVDPWFKPLAYAFILTRQEGYPCVFYGDYYGIPQYNIPSLKSKIDPLLIARRDYAYGTQHDYLDHSDIIGWTREGGTEKPGSGLAALITDGPGGSKWMYVGKQHAGKVFYDLTGNRSDTVTINSDGWGEFKVNGGSVSVWVPRKTTVS

SEQ ID NO: 18271 - protein, 486 aa, Geobacillus stearothermophilus
AAPFNGTMMQYFEWYLPDDGTLWTKVANEANNLSSLGITALWLPPAYKGTSRSDVGYGAYDLYDLGEFNQKGTVRTKYGTKAQYLQAIQAAHAAGMQVYADVVFDHKGGADGTEWVDAVEVNPSDRNQVISGTYQIQAWTKFDFPGRGNTYSSFKWRWYHFDGVDWDESRKLSRIYLFEGKAWDWEVDTEFGNYDYLMYADLDMDYPEVVTELKNWGPWYVLTTNIDGFRLDAVKHIKFQFFPDWLSYVRSSTGKPLFTVGEYWSYDINKLHNYITKTDGTVSLFDAPLHNKFYTASKSGGAFDMRTLMTNTLMKDQPTLAVTFVDNHDTEPGQALQSWVDPWFKPLAYAFILTRQEGYPCVFYGDYYGIPQYNIPSLKSKIDPLLIARRDYAYGTQHDYLDHSDIIGWTREGGTEKPGSGLAALITDGPGGSKWMYVGKQHAGKVFYDLTGNRSDTVTINSDGWGEFKVNGGSVSVWVPRKTTVS

SEQ ID NO: 18272 - protein, 488 aa, Geobacillus stearothermophilus
AAPFNGTMMQYFEWYLPDDGTLWTKVANEANNLSSLGITALWLPPAYKGTSRSDVGYGAYDLYDLGEFNQKGTVRTKYGTKAQYLQAIQAAHAAGMQVYADVVFDHKGGADGTEWVDAVEVNPSDRNQVISGTYQIQAWTKFDFPGRGNTYSSFKWRWYHFDGVDWDESRKLSRIYLFEGXXKAWDWEVDTEFGNYDYLMYADLDMDHPEVVTELKNWGPWYVLTTNIDGFRLDAVKHIKFQFFPDWLSYVRSSTGKPLFTVGEYWSYDINKLHNYITKTNGTMSLFDAPLHNKFYTASKSGGAFDMRTLMTNTLMKDQPTLAVTFVDNHDTEPGQALQSWVDPWFKPLAYAFILTRQEGYPCVFYGDYYGIPQYNIPSLKSKIDPLLIARRDYAYGTQHDYLDHSDIIGWTREGVTEKPGSGLAALITDGPGGSKWMYVGKQHAGKVFYDLTGNRSDTVTINSDGWGEFKVNGGSVSVWVPRKTTVS

SEQ ID NO: 18273 - protein, 488 aa, Geobacillus stearothermophilus
AAPFNGTMMQYFEWYLPDDGTLWTKVANEANNLSSLGITALWLPPAYKGTSRSDVGYGVYDLYDLGEFNQKGAVRTKYGTKAQYLQAIQAAHAAGMQVYADVVFDHKGGADGTEWVDAVEVNPSDRNQEISGTYQIQAWTKFDFPGRGNTYSSFKWRWYHFDGVDWDESRKLSRIYKFRGIGKAWDWEVDTENGNYDYLMYADLDMDHPEVVTELKSWGKWYVNTTNIDGFRLDAVKHIKFSFFPDWLSNVRSQTGKPLFTVGEYWSYDINKLHNYNMKTNGTMSLFDAPLHNKFYTASKSGGTFDMRTLMTNTLMKDQPTLAVTFVDNHDTEPGQALQSWVDPWFKPLAYAFILTRQEGYPCVFYGDYYGIPQYNIPSLKSKIDPLLIARRDYAYGTQHDYLDHSDIIGWTREGVTEKPGSGLAALITDGPGGRKWMYVGKQHAGKVFYDLTGNRSDTVTINSDGWGEFKVNGGSVSVWVPRKTTVS

SEQ ID NO: 18274 - protein, 488 aa, Geobacillus stearothermophilus
AAPFNGTMMQYFEWYLPDDGTLWTKVANEANNLSSLGITALWLPPAYKGTSRSDVGYGAYDLYDLGEFNQKGTVRTKYGTKAQYLQAIRAAHAAGMQVYADVVFDHKGGADGTEWVDAVEVNPSDRNQVISGTYQIQAWTKFDFPGRGNTYSSFKWRWYHFDGVDWDESRKLSRIYLFEGIGKAWDWEVDTENGNYDYLMYADLDMDHPEVVTELKNWGKWYVNTTNIDGFRLDAVKHIKFSFFPDWLSYVRSSTGKPLFTVGEYWSYDINKLHNYITKTNGTVSLFDAPLHNKFYTASKSGGAFDMRTLMTNTLMKDQPTLAVTFVDNHDTEPGQALQSWVDPWFKPLAYAFILTRQEGYPCVFYGDYYGIPQYNIPSLKSKIDPLLIARRDYAYGTQHDYLDHSDIIGWTREGVTEKPGSGLAALITDGPGGSKWMYVGKQHAGKVFYDLTGNRSDTVTINSDGWGEFKVNGGSVSVWVPRKTTVS

SEQ ID NO: 18275 - protein, 488 aa, Geobacillus stearothermophilus
AAPFNGTMMQYFEWYLPDDGTLWTKVADEANNLSSLGITALWLPPAYKGTSRSDVGYGVYDLYDLGEFNQKGTVRTKYGTKAQYLQAIQAAHAAGMRVYADVVFDHKGGADGTEWVDAVEVNPSDRNQEISGTYQIQAWTKFDFPGRGNTYSSFKWRWYHFDGVDWDESRKLSRIYKFRGIGKAWDWEVDTENGNYDYLMYADLDMDHPEVVTELKNWGKWYVNTTNIDGFRLDAVKHIKFEFFPDWLSYVRSQTGKPLFTVGEYWSYDINKLHNYITKTNGTMSLFDAPLHNKFYTASKSGGAFDMQTLMTNTLMKDRPTLAVTFVDNHDTEPGQALQSWVDPWFKPLAYAFILTREEGYPCVFYGDYYGIPQYNIPSLKSKIDPLLIARRDYAYGTQHDYLDHSDIIGWTREGVTEKPGSGLAALITDGPGGSKWMYVGKEHAGKVFYDLTGNRSDTVTINSDGWGEFKVNGGSVSVWVPRKTTVS

SEQ ID NO: 18276 - protein, 486 aa, Geobacillus stearothermophilus
AAPFNGTMMQYFEWYLPDDGTLWTKVANEANNLSSLGITALWLPPAYKGTSRSDVGYGAYDLYDLGEFNQKGTVRTKYGTKAQYLQAIRAAHAAGMQVYADVVFDHKGGADGTEWVDAVEVNPSDRNQVISGTYQIQAWTKFDFPGRGNTYSSFKWRWYHFDGVNWDESRKLSRIYLFEGKAWDWEVDTEFGNYDYLMYADLDMDYPEVVTELKNWGPWYVLTTNIDGFRLDAVKHIKFSFFPDWLSYVRSSTGKPLFTVGEYWSYDINKLHNYITKTDGTMSLFDAPLHNKFYTASKSGGAFDMRTLMTNTLMKDQPTLAVTFVDNHDTEPGQALQSWVDPWFKPLAYAFILTRQEGYPCVFYGDYYGIPQYNIPSLKSKIDPLLIARRDYAYGTQHDYLDHSDIIGWTREGGTEKPGSGLAALITDGPGGSKWMYVGKQHAGKVFYDLTGNRSDTVTINSDGWGEFKVNGGSVSVWVPRKTTVS

SEQ ID NO: 18277 - protein, 486 aa, Geobacillus stearothermophilus
AAPFNGTMMQYFEWYLPDDGTLWTKVANEANNLSSLGITALWLPPAYKGTSRSDVGYGAYDLYDLGEFNQKGTVRTKYGTKAQYLQAIQAAHAAGMQVYADVVFDHKGGADGTEWVDAVEVNPSDRNQVISGTYQIQAWTKFDFPGRGNTYSSFKWRWYHFDGVDWDESRKLSRIYLFEGKAWDWEVDTEFGNYDYLMYADLDMDHPEVITELKNWGKWYVNTTNIDGFRLDAVKHIKFSFFPDWLSYVRSSTGKPLFTVGEYWSGDINKLHNYITKTDGTVSLFDAPLHYKFYNASKSGGAFDMRTLMTNTLMKDQPTLAVTFVDNHDTEPGQALQSWVDPWFKPLAYAFILTRQEGYPCVFYGDYYGIPQYNIPSLKSKIDPLLIARRDYAYGTQHDYLDHSDIIGWTREGGTEKPGSGLAALITDGPGGSKWMYVGKQHAGKVFYDLTGNRSDTVTINSDGWGEFKVNGGSVSVWVPRKTTVS

SEQ ID NO: 18278 - protein, 486 aa, Geobacillus stearothermophilus
AAPFNGTMMQYFEWYLPDDGTLWTKVANEANNLSSLGITALWLPPAYKGTSRSDVGYGAYDLYDLGEFNQKGTVRTKYGTKAQYLQAIQAAHAAGMQVYADVVFDHKGGADGTEWVDAVEVNPSDRNQVISGTYQIQAWTKFDFPGRGNTYSSFKWRWYHFDGVDWDESRKLSRIYLFEGKAWDWEVDTEFGNYDYLMYADLDMDHPEVVTELKNWGPWYVLTTNIDGFRLDAVKHIKFSFFPDWLSYVRSSTGKPLFTVGEYWSYDINKLHNYITKTNGTTSLFDAPLHNKFYTASKSGGAFDMRTLMTNTLMKDQPTLAVTFVDNHDTEPGQALQSWVDPWFKPLAYAFILTRQEGYPCVFYGDYYGIPQYNIPSLKSKIDPLLIARRDYAYGTQHDYLDHSDIIGWTREGVTEKPGSGLAALITDGPGGSKWMYVGKQHAGKVFYDLTGNRSDTVTINSDGWGEFKVNGGSVSVWVPRKTTVS

SEQ ID NO: 18279 - protein, 486 aa, Geobacillus stearothermophilus
AAPFNGTMMQYFEWYLPDDGTLWTKVANEANNLSSLGITALWLPPAYKGTSRSDVGYGAYDLYDLGEFNQKGTVRTKYGTKAQYLQAIQAAHAAGMQVYADVVFDHKGGADGTEWVDAVEVNPSDRNQVISGTYQIQAWTKFDFPGRGNTYSSFKWRWYHFDGVDWDESRKLSRIYLFEGKAWDWEVDTEFGNYDYLMYADLDMDHPEVTTELKNWGKWYVNTTNIDGFRLDAVKHIKFSFFPDWLSYVRSSTGKPLFTVGEYWSGDINKLHNYITKTDGTVSLFDAPLHYKFYNASKSGGAFDMRTLMTNTLMKDQPTLAVTFVDNHDTEPGQALQSWVDPWFKPLAYAFILTRQEGYPCVFYGDYYGIPQYNIPSLKSKIDPLLIARRDYAYGTQHDYLDHSDIIGWTREGGTEKPGSGLAALITDGPGGSKWMYVGKQHAGKVFYDLTGNRSDTVTINSDGWGEFKVNGGSVSVWVPRKTTVS

SEQ ID NO: 18280 - protein, 488 aa, Geobacillus stearothermophilus
AAPFNGTMMQYFEWYLPDDGTLWTKVANEANNLSSLGITALWLPPAYKGTSRSDVGYGVYDLYDLGEFNQKGTVRTKYGTKAQYLQAIQAAHAAGMQVYADVVFDHKGGADGTEWVDAVEVNPSDRNQVISGTYQIQAWTKFDFPGRGNTYSSFKWRWYHFDGVDWDESRKLSRIYLFEGIGKAWDWEVDTENGNYDYLMYADLDMDHPEVVTELKNWGPWYVLTTNIDGFRLDAVKHIKFSFFPDWTSYVRSSTGKPLFTVGEYWSYDINKLHNYITKTNGTMSLFDAPLHNKFYTASKSGGAFDMRTLMTNTLMKDQPTLAVTFVDNHDTEPGQALQSWVDPWFKPLAYAFILTRQEGYPCVFYGDYYGIPQYNIPSLKSKIDPLLIARRDYAYGTQHDYLDHSDIIGWTREGVTEKPGSGLAALITDGPGGSKWMYVGKQHAGKVFYDLTGNRSDTVTINSDGWGEFKVNGGSVSVWVPRKTTVS

SEQ ID NO: 18281 - protein, 486 aa, Geobacillus stearothermophilus
AAPFNGTMMQYFEWYLPDDGTLWTKVANEANNLSSLGITALWLPPAYKGTSRSDVGYGVYDLYDLGEFNQKGTVRTKYGTKAQYLQAIQAAHAAGMQVYADVVFDHKGGADGTEWVDAVEVNPSDRNQVISGTYQIQAWTKFDFPGRGNTYSSFKWRWYHFDGVDWDESRKLSRIYLFEGKAWDWEVDTEFGNYDYLMYADLDMDHPEVVTELKNWGPWYVLTTNIDGFRLDAVKHIKFQFFPDWLSYVRSSTGKPLFTVGEYWSYDINKLHNYITKTNGTTSLFDAPLHNKFYTASKSGGAFDMRTLMTNTLMKDQPTLAVTFVDNHDTEPGQALQSWVDPWFKPLAYAFILTRQEGYPCVFYGDYYGIPQYNIPSLKSKIDPLLIARRDYAYGTQHDYLDHSDIIGWTREGVTEKPGSGLAALITDGPGGSKWMYVGKQHAGKVFYDLTGNRSDTVTINSDGWGEFKVNGGSVSVWVPRKTTVS

SEQ ID NO: 18282 - protein, 488 aa, Geobacillus stearothermophilus
AAPFNGTMMQYFEWYLPDDGTLWTKVANEANNLSSLGITALWLPPAYKGTSRSDVGYGVYDLYDLGEFNQKGTVRTKYGTKAQYLQAIQAAHAAGMQVYADVVFDHKGGADGTEWVDAVEVNPSDRNQVISGTYQIQAWTKFDFPGRGNTYSSFKWRWYHFDGVDWDESRKLSRIYLFVGIGKAWDWEVDTENGNYDYLMYADLDMDHPEVVTELKNWGPWYVLTTNIDGFRLDAVKHIKFQFFPDWLSYVRSSTGKPLFTVGEYWSYDINKLHNYITKTNGTMSLFDAPLHNKFYTASKSGGAFDMRTLMTNTLMKDQPTLAVTFVDNHDTEPGQALQSWVDPWFKPLAYAFILTRQEGYPCVFYGDYYGIPQYNIPSLKSKIDPLLIARRDYAYGTQHDYLDHSDIIGWTREGVTEKPGSGLAALITDGPGGSKWMYVGKQHAGKVFYDLTGNRSDTVTINSDGWGEFKVNGGSVSVWVPRKTTVS

SEQ ID NO: 18283 - protein, 488 aa, Geobacillus stearothermophilus
AAPFNGTMMQYFEWYLPDDGTLWTKVANEANNLSSLGITALWLPPAYKGTSRSDVGYGAYDLYDLGEFNQKGTVRTKYGTKAQYLQAIQAAHAAGMQVYADVVFDHKGGADGTEWVDAVEVNPSDRNQVISGTYQIQAWTKFDFPGRGNTYSSFKWRWYHFDGVDWDESRKLSRIYLFEGIGKAWDWEVDTENGNYDYLMYADLDMDHPEVVTELKNWGPWYVLTTNIDGFRLDAVKHIKFSFFPDWLSYVRSSTGKPLFTVGEYWSYDINKLHNYITKTNGTMSLFDAPLHNKFYTASKSGGAFDMRTLMTNTLMKDQPTLAVTFVDNHDTEPGQALQSWVDPWFKPLAYAFILTRQEGYPCVFYGDYYGIPQYNIPSLKSKIDPLLIARRDYAYGTQHDYLDHSDIIGWTREGVTEKPGSGLAALITDGPGGSKWMYVGKQHAGKVFYDLTGNRSDTVTINSDGWGEFKVNGGSVSVWVPRKTTVS

SEQ ID NO: 18284 - protein, 488 aa, Geobacillus stearothermophilus
AAPFNGTMMQYFEWYLPDDGTLWTKVANEANNLSSLGITALWLPPAYKGTSRSDVGYGVYDLYDLGEFNQKGTVRTKYGTKAQYLQAIQAAHAAGMQVYADVVFDHKGGADGTEWVDAVEVNPSDRNQVISGTYQIQAWTKFDFPGRGNTYSSFKWRWYHFDGVDWDESRKLSRIYLFEGIGKAWDWEVDTENGNYDYLMYADLDMDHPEVVTELKNWGPWYVLTTNIDGFRLDAVKHIKFSFFPDWLSYVRSSTGKPLFTVGEYWSYDINKLHNYITKTNGTTSLFDAPLHNKFYTASKSGGAFDMRTLMTNTLMKDQPTLAVTFVDNHDTEPGQALQSWVDPWFKPLAYAFILTRQEGYPCVFYGDYYGIPQYNIPSLKSKIDPLLIARRDYAYGTQHDYLDHSDIIGWTREGVTEKPGSGLAALITDGPGGSKWMYVGKQHAGKVFYDLTGNRSDTVTINSDGWGEFKVNGGSVSVWVPRKTTVS

SEQ ID NO: 18285 - protein, 488 aa, Geobacillus stearothermophilus
AAPFNGTMMQYFEWYLPDDGTLWTKVANEANNLSSLGITALWLPPAYKGTSRSDVGYGVYDLYDLGEFNQKGTVRTKYGTKAQYLQAIQAAHAAGMQVYADVVFDHKGGADGTEWVDAVEVNPSDRNQVISGTYQIQAWTKFDFPGRGNTYSSFKWRWYHFDGVDWDESRKLSRIYLFEGIGKAWDWEVDTENGNYDYLMYADLDMDHPEVVTELKNWGPWYVLTTNIDGFRLDAVKHIKFQFFPDWLSYVRSSTGKPLFTVGEYWSYDINKLHNYITKTNGTMSLFDAPLHNKFYTASKSGGAFDMRTLMTNTLMKDQPTLAVTFVDNHDTEPGQALQSWVDPWFKPLAYAFILTRQEGYPCVFYGDYYGIPQYNIPSLKSKIDPLLIARRDYAYGTQHDYLDHSDIIGWTREGVTEKPGSGLAALITDGPGGSKWMYVGKQHAGKVFYDLTGNRSDTVTINSDGWGEFKVNGGSVSVWVPRKTTVS

SEQ ID NO: 18286 - protein, 486 aa, Geobacillus stearothermophilus
AAPFNGTMMQYFEWYLPDDGTLWTKVANEANNLSSLGITALWLPPAYKGTSRSDVGYGAYDLYDLGEFNQKGTVRTKYGTKAQYLQAIRAAHAAGMQVYADVVFDHKGGADGTEWVDAVEVNPSDRNQVISGTYQIQAWTKFDFPGRGNTYSSFKWRWYHFDGVDWDESRKLSRIYLFEGKAWDWEVDTEFGNYDYLMYADLDMDYPEVVTELKNWGPWYVLTTNIDGFRLDAVKHIKFSFFPDWLSYVRSSTGKPLFTVGEYWSYDINKLHNYITKTDGTVSLFDAPLHNKFYTASKSGGAFDMRTLMTNTLMKDQPTLAVTFVDNHDTEPGQALQSWVDPWFKPLAYAFILTRQEGYPCVFYGDYYGIPQYNIPSLKSKIDPLLIARRDYAYGTQHDYLDHSDIIGWTREGGTEKPGSGLAALITDGPGGSKWMYVGKQHAGKVFYDLTGNRSDTVTINSDGWGEFKVNGGSVSVWVPRKTTVS

SEQ ID NO: 18287 - protein, 486 aa, Geobacillus stearothermophilus
AAPFNGTMMQYFEWYLPDDGTLWTKVANEANNLSSLGITALWLPPAYKGTSRSDVGYGAYDLYDLGEFNQKGTVRTKYGTKAQYLQAIQAAHAAGMQVYADVVFDHKGGADGTEWVDAVEVNPSDRNQVISGTYQIQAWTKFDFPGRGNTYSSFKWRWYHFDGVDWDESRKLSRIYLFEGKAWDWEVDTEFGNYDYLMYADLDMDHPEVVTELKNWGPWYVLTTNIDGFRLDAVKHIKFQFFPDWLSYVRSSTGKPLFTVGEYWSYDINKLHNYITKTNGTMSLFDAPLHNKFYTASKSGGAFDMRTLMTNTLMKDQPTLAVTFVDNHDTEPGQALQSWVDPWFKPLAYAFILTRQEGYPCVFYGDYYGIPQYNIPSLKSKIDPLLIARRDYAYGTQHDYLDHSDIIGWTREGVTEKPGSGLAALITDGPGGSKWMYVGKQHAGKVFYDLTGNRSDTVTINSDGWGEFKVNGGSVSVWVPRKTTVS

SEQ ID NO: 18288 - protein, 487 aa, Geobacillus stearothermophilus
AAPFNGTMMQYFEWYLPDDGTLWTKVANEANNLSSLITALWLPPAYKGTSRSDVGYGVYDLYDLGEFNQKGTVRTKYGTKAQYLQAIQAAHAAGMQVYADVVFDHKGGADGTEWVDAVEVNPSDRNQVISGTYQIQAWTKFDFPGRGNTYSSFKWRWYHFDGVDWDESRKLSRIYLFEGIGKAWDWEVDTENGNYDYLMYADLDMDHPEVVTELKNWGPWYVLTTNIDGFRLDAVKHIKFQFFPDWLSYVRSSTGKPLFTVGEYWSYDINKLHNYITKTNGTMSLFDAPLHNKFYTASKSGGAFDMRTLMTNTLMKDQPTLAVTFVDNHDTEPGQALQSWVDPWFKPLAYAFILTRQEGYPCVFYGDYYGIPQYNIPSLKSKIDPLLIARRDYAYGTQHDYLDHSDIIGWTREGVTEKPGSGLAALITDGPGGSKWMYVGKQHAGKVFYDLTGNRSDTVTINSDGWGEFKVNGGSVSVWVPRKTTVS

SEQ ID NO: 18289 - protein, 486 aa, Geobacillus stearothermophilus
AAPFNGTMMQYFEWYLPDDGTLWTKVANEANNLSSLGITALWLPPAYKGTSRSDVGYGVYDLYDLGEFNQKGTVRTKYGTKAQYLQAIQAAHAAGMQVYADVVFDHKGGADGTEWVDAVEVNPSDRNQVISGTYQIQAWTKFDFPGRGNTYSSFKWRWYHFDGVDWDESRKLSRIYLFEGIGKAWDWEVDTENGNYDYLMYADLDMDHPEVVTELKNWGPWYVLTTNIDGFRLDAVKHIKFQFFPDWLSYVRSSTGKPLFTVGEYWSYDINKLHNYITKTNGTMSLFDAPLHNKFYTASKSGGAFDMRTLMTNTLMKDQPTLAVTFVDNHDTEPGQALQSWVDPWFKPLAYAFILTRQEGYPCVFYGDYYGIPQYPSLKSKIDPLLIARRDYAYGTQHDYLDHSDIIGWTREGVTEKPGSGLAALITDGPGGSKWMYVGKQHAGKVFYDLTGNRSDTVTINSDGWGEFKVNGGSVSVWVPRKTTVS

SEQ ID NO: 18290 - protein, 484 aa, Aspergillus niger
AATALAATPADWRSQSIYFLLTDRFARTDGSTTATCNTADQKYCGGTWQGIIDKLDYIQGMGFTAIWITPVTAQLPQTTAYGDAYHGYWQQDIYSLNENYGTADDLKALSSALHERGMYLMVDVVANHMGYDGAGSSVDYSVFKPFSSQDYFHPFCFIQNYEDQTMVEDCWLGDNTVSLPDLDTTKDVVKNMWYDWVGSMVSNYSIDGLRIDTVKHVQKDFWPGYNKAAGVYMIGEVLDGDPAYTCPYQNVMDGVLNYPMYYPLLNAFKSTSGSMDDLYNMINTMKSDCPDSTLLGTFMENHDNPRFASYTNDMALAKNVAAFIILNDGIPIIYAGQEQHYAGGNDPANREATWLSGYPTDSELYKLIASANAIRNYAISKDTGFVTYKNWPIYKDDTTIAMRKGTDGSQIVTILSNKGASGDSYTLSLSGAGYTAGQQLMEVIGCTTVTVGSDGNVPVPMAGGLPRVLYPTEKLAGSKICSSS

SEQ ID NO: 18291 - protein, 484 aa, Aspergillus niger
AATALAATPADWRSQSIYFLLTDRFARTDGSTTATCNTADQKYCGGTWQGIIDKLDYIQGLGFTAIWITPVTAQLPQTTAYGDAYHGYWQQDIYSLNENYGTADDLKALSSALHERGIYLLVDVVANHFGYDGAGSSVDYSVFKPFSSQDYFHPFCFIQNYEDQTQVEDCWLGDNTVSLPDLDTTKDVVKNEWYDWVGSLVSNYSIDGLRIDTVKHVQKDFWPGYNKAAGVYCIGEVLDGDPAYTCPYQNVLDGVLNYPIYYPLLNAFKSTSGSIDDLYNEINTVKSDCPDSTLLGTFVENHDNPRFASYTNDIALAKNVAAFIILNDGIPIIYAGQEQHYAGGNDPANREATWLSGYPTDSELYKLIASANAIRNYAISKDTGFVTYKNWPIYKDDTTIALRKGTDGSQIVTILSNKGASGDSYTLSLSGAGYTAGQQLTEVIGCTTVTVGSDGNVPVPLAGGLPRVLYPTEKLAGSKICSSS

SEQ ID NO: 18292 - protein, 484 aa, Aspergillus niger
AATALAATPADWRSQSIYFLLTDRFARTDGSTTATCNTADQKYCGGTWQGIIDKLDYIQGMGFTAIWITPVTAQLPQTTAYGDAYHGYWQQDIYSLNENYGTADDLKALSSALHERGMYLMVDVVANHMGYDGAGSSVDYSVFNPFSSQDYFHPFCFIQNYEDQTQVEDCWLGDNTVSLPDLDTTKDVVRNEWYDWVGSLVSNYSIDGLRIDTVKHVQKDFWPGYNDAAGVYCIGEVLDGDPAYTCPYQNVLDGVLNYPIYYPLLNAFQSTSGSMDDLYNMINTVKSDCPDSTLLGTFVENHDNPRFASYTNDIALAKNVAAFIILNDGIPIIYAGQEQHYAGGNDPANREATWLSGYPTDSELYKLIASANAIRNYAISKDTGFVTYKNWPIYQDDTTIALRKGTDGSQIVTILSNKGASGDSYTLSLSGAGYTAGQQLTEVIGCTTVTVGSDGNVPVPLAGGLPRVLYPTEKLAGSGICSSS

SEQ ID NO: 18293 - protein, 484 aa, Aspergillus niger
AATALAATPADWRSQSIYFLLTDRFARTDGSTTATCNTADQKYCGGTWQGIIDHLDYIQGMGFTAIWITPVTAQLPQTTAYGDAYHGYWQQDIYSLNENYGTADDLRALSSALHERGMYLMVDVVANHMGYDGAGSSVDYSVFNPFSSQDYFHPFCFIQNYEDQTQVEDCWLGDNTVSLPDLDTTKDVVRNEWYDWVGSLVSNYSIDGLRIDTVKHVQKDFWPGYNSAAGVYCIGEVLDGDPAYTCPYQNVLDGVLNYPIYYPLLNAFQSTSGSIDDLYNEINTVKSDCPDSTLLGTFVENHDNPRFASYTNDIALAKNVAAFIILNDGIPIIYAGQEQHYAGGNDPANREATWLSGYPTDSELYKLIASANAIRNYAISKDTGFVTYKNWPIYKDDTTIAMRKGTDGSQIVTILSNKGASGDSYTLSLSGAGYTAGQQLTEVIGCTTVTVGSDGNVPVPMAGGLPRVLYPTEKLAGSKICSSS

SEQ ID NO: 18294 - protein, 485 aa, Bacillus sp.
HHNGTNGTMMQYFEWHLPNDGNHWNRLRDDASNLRNRGITAIWIPPAWKGIQQKDVGYGAYDLYDLGEFNQKGTVRTKYGTRSQLESAIHALKNNGVQVYGDVVMNHKAGADATENVLAVEVNPNNRNQEISGDYTIEAYTKFDFPGRGNTYSDFKWRWYHFDGVDWDQSRQFQNRIYKFRGDGKAWDWEVDSEFGNYDYLMYADYDMDHPEVVNELRRWGEWYTNTLNLDGFRIDAVKHIKFSFTRDWLTHVRNATGKGMFAVAEFWKNDLGALENYLNKTNWNHSVFDVPLHYNLYNASNSGGNYDMAKLLNGTVVQKHPMHAVTFVDNHDSQPGESLESFVQEWFKPLAYALILTREQGYPSVFYGDYYGIPTHSVPAMKAKIDPILEARQNFAYGTQHDYFDHHNIIGWTREGNTTHPNSGLATIMSDGPGGEKWMYVGQNKAGQVWHDITGNKPGTVTINADGWANFSVNEGSVSIWVKR

SEQ ID NO: 18295 - protein, 483 aa, Bacillus sp.
HHNGTNGTMMQYFEWHLPNDGNHWNRLRDDASNLRNRGITAIWIPPAWKGIQQKDVGYGAYDLYDLGEFNQKGTVRTKYGTRSQLESAIHALKNNGVQVYGDVVMNHKAGADATENVLAVEVNPNNRNQEISGDYTIEAYTKFDFPGRGNTYSDFKWRWYHFDGVDWDQSRQFQNRIYKFRGKAWDWEVDSEFGNYDYLMYADYDMDHPEVVNELRRWGEWYTNTLNLDGFRIDAVKHIKFSFTRDWLTHVRNATGKGMFAVAEFWKNDLGALENYLNKTNWNHSVFDVPLHYNLYNASNSGGNYDMAKLLNGTVVQKHPMHAVTFVDNHDSQPGESLESFVQEWFKPLAYALILTREQGYPSVFYGDYYGIPTHSVPAMKAKIDPILEARQNFAYGTQHDYFDHHNIIGWTREGNTTHPNSGLATIMSDGPGGEKWMYVGQNKAGQVWHDITGNKPGTVTINADGWANFSVNEGSVSIWVKR

SEQ ID NO: 18296 - protein, 483 aa, Unidentified
HHNGTNGAMMQYFEWHLPNDGNHWNRLRDDASNLRNRGITAIWIPPAWKGTSQNDVGYGAYDLYDLGEFNQKGTVRTKYGTRSQLESAIHALKNNGVQVYGDVVMNHKGGADATENVLAVEVNPNNRNQEISGDYTIEAYTKFDFPGRGNTYSDFKWRWYHFDGVDWDQSRQFQNRIYKFRGKAWDWEVDSEFGNYDYLMYADYDMDHPEVVNELRRWGEWYTNTLNLDGFRIDAVKHIKFSFTRDWLTHVRNATGKGMFAVAEFWKNDLGALENYLNKTNWNHSVFDVPLHYNLYNASNSRGNYDMAKLLNGTVVQKHPAHANTFVDNHDSQPGESLESFVQEWFKPLAYALILTREQGYPSVFYGDYYGIPTHSVPAMKAKIDPILEARQNFAYGTQHDYFDHHNIIGWTREGNTTHPNSGLATIMSDGPGGEKWMYVGQNKAGQVWHDITGNKPGTVTINADGWANFSVNKGSVSIWVKR

SEQ ID NO: 18297 - protein, 482 aa, Unidentified
HNGTNGTMMQYFEWHLPNDGNHWNRLRDDASNLRNRGITAIWIPPAWKGTSQNDVGYGAYDLYDLGEFNQKGTVRTKYGTRSQLESAIHALKNNGVQVYGDVVMNHKGAADATENVLAVEVNPNNRNQEISGDYTIEAYTKFDFPGRGNTYSDFKWRWYHFDGVDWDQSRQFQNRIYKFRGKAWDWEVDSEFGNYDYLMYADYDMDHPEVVNELRRWGEWYTNTLNLDGFRIDAVKHIKFSFTRDWLTHVRNATGKGMFAVAEFWKNDLGALENYLNKTNWNHHVFDVPLHYNLYNASNSRGNYDMAKLLNGTVVQKHPMHAVTFVDNHDSQPGESLESFVQEWFKPLAYALILTREQGYPSVFYGDYYGIPTHSVPAMKAKIDPILEARANFAYGTQHDYFDHHNIIGWTREGNTTHPNSGLATIMSDGPGGEKWMYVGQNKAGQVWHDITGNKPGTVTINADGWANFSVNKGSVSIWVKR

SEQ ID NO: 18298 - protein, 482 aa, Unidentified
HNGTNGTMMQYFEWHLPNDGNHWNRLRDDASNLRNRGITAIWIPPAWKGTSQNDVGYGAYDLYDLGEFNQKGTVRTKYGTRSQLESAIHALKNNGVQVYGDVVMNHKGAADATENVLAVEVNPNNRNQEISGDYTIEAYTKFDFPGRGNTYSDFKWRWYHFDGVDWDQSRQFQNRIYKFRGKAWDWEVDSEFGNYDYLMYADYDMDHPEVVNELRRWGEWYTNTLNLDGFRIDAVKHIKFSFTRDWLTHVRNATGKGMFAVAEFWKNDLGALENYLNKTNWNHRVFDVPLHYNLYNASNSRGNYDMAKLLNGTVVQKHPMHAVTFVDNHDSQPGESLESFVQEWFKPLAYALILTREQGYPSVFYGDYYGIPTHSVPAMKAKIDPILEARANFAYGTQHDYFDHHNIIGWTREGNTTHPNSGLATIMSDGPGGEKWMYVGQNKAGQVWHDITGNKPGTVTINADGWANFSVNKGSVSIWVKR

SEQ ID NO: 18299 - protein, 482 aa, Unidentified
HNGTNGTMMQYFEWHLPNDGNHWNRLRDDASNLRNRGITAIWIPPAWKGTSQNDVGYGAYDLYDLGEFNQKGTVRTKYGTRSQLESAIHALKNNGVQVYGDVVMNHKGSADATENVLAVEVNPNNRNQEISGDYTIEAYTKFDFPGRGNTYSDFKWRWYHFDGVDWDQSRQFQNRIYKFRGKAWDWEVDSEFGNYDYLMYADYDMDHPEVVNELRRWGEWYTNTLNLDGFRIDAVKHIKFSFTRDWLTHVRNATGKGMFAVAEFWKNDLGALENYLNKTSWNHSVFDVPLHYNLYNASNSRGNYDMAKLLNGTVVQKHPMHAVTFVDNHDSQPGESLESFVQEWFKPLAYALILTREQGYPSVFYGDYYGIPTHSVPAMKAKIDPILEARANFAYGTQHDYFDHHNIIGWTREGNTTHPNSGLATIMSDGPGGEKWMYVGQNKAGQVWHDITGNKPGTVTINADGWANFSVNKGSVSIWVKR

SEQ ID NO: 18300 - protein, 482 aa, Unidentified
HNGTNGTMMQYFEWHLPNDGNHWNRLRDDASNLRNRGITAIWIPPAWKGTSQNDVGYGAYDLYDLGEFNQKGTVRTKYGTRSQLESAIHALKNNGVQVYGDVVMNHKGAADATENVLAVEVNPNNRNQEISGDYTIEAYTKFDFPGRGNTYSDFKWRWYHFDGVDWDQSRQFQNRIYKFRGKAWDWEVDSEFGNYDYLMYADYDMDHPEVVNELRRWGEWYTNTLNLDGFRIDAVKHIKFSFTRDWLTHVRNATGKGMFAVAEFWKNDLGALENYLNKTSWNHSVFDVPLHYNLYNASNSRGNYDMAKLLNGTVVQKHPMHAVTFVDNHDSQPGESLESFVQEWFKPLAYALILTREQGYPSVFYGDYYGIPTHSVPAMKAKIDPILEARANFAYGTQHDYFDHHNIIGWTREGNTTHPNSGLATIMSDGPGGEKWMYVGQNKAGQVWHDITGNKPGTVTINADGWANFSVNKGSVSIWVKR

SEQ ID NO: 18301 - protein, 482 aa, Unidentified
HNGTNGTMMQYFEWHLPNDGNHWNRLRDDASNLRNRGITAIWIPPAWKGTSQNDVGYGAYDLYDLGEFNQKGTVRTKYGTRSQLESAIHALKNNGVQVYGDVVMNHKGAADATENVLAVEVNPNNRNQEISGDYTIEAYTKFDFPGRGNTYSDFKWRWYHFDGVDWDQSRQFQNRIYKFRGKAWDWEVDSEFGNYDYLMYADYDMDHPEVVNELRRWGEWYTNTLNLDGFRIDAVKHIKFSFTRDWLTHVRNATGKGMFAVAEFWKNDLGALENYLNKTSWNHSVFDVPLHYNLYNASNSRGNYDMAKLLNGTVVQKHPMHAVTFVDNHDSQPGESLESFVQEWFKPLAYALILTREQGYPSVFYGDYYGIPTHSVPAMKAKIDPILEARVNFAYGTQHDYFDHHNIIGWTREGNTTHPNSGLATIMSDGPGGEKWMYVGQNKAGQVWHDITGNKPGTVTINADGWANFSVNKGSVSIWVKR

SEQ ID NO: 18302 - protein, 482 aa, Unidentified
HNGTNGTMMQYFEWHLPNDGNHWNRLRDDASNLRNRGITAIWIPPAWKGTSQNDVGYGAYDLYDLGEFNQKGTVRTKYGTRSQLESAIHALKNNGVQVYGDVVMNHKGAADATENVLAVEVNPNNRNQEISGDYTIEAYTKFDFPGRGNTYSDFKWRWYHFDGVDWDQSRQFQNRIYKFRGKAWDWEVDSEFGNYDYLMYADYDMDHPEVVNELRRWGEWYTNTLNLDGFRIDAVKHIKFSFTRDWLTHVRNATGKGMFAVAEFWKNDLGALENYLNKTNWNHFVFDVPLHYNLYNASNSRGNYDMAKLLNGTVVQKHPMHAVTFVDNHDSQPGESLESFVQEWFKPLAYALILTREQGYPSVFYGDYYGIPTHSVPAMKAKIDPILEARANFAYGTQHDYFDHHNIIGWTREGNTTHPNSGLATIMSDGPGGEKWMYVGQNKAGQVWHDITGNKPGTVTINADGWANFSVNKGSVSIWVKR

SEQ ID NO: 18303 - protein, 513 aa, Geobacillus stearothermophilus
AAPFNGTMMQYFEWYLPDDGTLWTKVANEANNLSSLGITALWLPPAYKGTSRSDVGYGAYDLYDLGEFNQKGTVRTKYGTKAQYLQAIRAAHAAGMQVYADVVFDHKGGADGTEWVDAVEVNPSDRNQVISGTYQIQAWTKFDFPGRGNTYSSFKWRWYHFDGVDWDESRKLSRIYLFEGKAWDWEVDTEFGNYDYLMYADLDMDHPEVVTELKNWGPWYVLTTNIDGFRLDAVKHIKFSFFPDWLSYVRSSTGKPLFTVGEYWSYDLNKLHNYITKTNGTMSLFDAPLHNKFYTASKSGGAFDMRTLMTNTLMKDQPTLAVTFVDNHDTEPGQALQSWVDPWFKPLAYAFILTRQEGYPCVFYGDYYGIPQYNIPSLKSKIDPLLIARRDYAYGTQHDYLDHSDIIGWTREGVTEKPGSGLAALITDGPGGSKWMYVGKQHAGKVFYDLTGNRSDTVTINSDGWGEFKVNGGSVSVWVPRKTTVSTIARPITTRPWTGEFVRWTEPRLVAWP

SEQ ID NO: 18304 - protein, 513 aa, Geobacillus stearothermophilus
AAPFNGTMMQYFEWYLPDDGTLWTKVANEANNLSSLGITALWLPPAYKGTSRSDVGYGAYDLYDLGEFNQKGTVRTKYGTKAQYLQAIQAAHAAGMQVYADVVFDHKGGADGTEWVDAVEVNPSDRNQVISGTYQIQAWTKFDFPGRGNTYSSFKWRWYHFDGVDWDESRKLSRIYLFEGKAWDWEVDTEFGNYDYLMYADLDMDHPEVVTELKNWGPWYVLTTNIDGFRLDAVKHIKFQFFPDWLSYVRSSTGKPLFTVGEYWSYDINKLHNYITKTNGTTSLFDAPLHNKFYTASKSGGAFDMRTLMTNTLMKDQPTLAVTFVDNHDTEPGQALQSWVDPWFKPLAYAFILTRQEGYPCVFYGDYYGIPQYNIPSLKSKIDPLLIARRDYAYGTQHDYLDHSDIIGWTREGVTEKPGSGLAALITDGPGGSKWMYVGKQHAGKVFYDLTGNRSDTVTINSDGWGEFKVNGGSVSVWVPRKTTVSTIARPITTRPWTGEFVRWTEPRLVAWP

SEQ ID NO: 18305 - protein, 513 aa, Geobacillus stearothermophilus
AAPFNGTMMQYFEWYLPDDGTLWTKVANEANNLSSLGITALWLPPAYKGTSRSDVGYGAYDLYDLGEFNQKGTVRTKYGTKAQYLQAIRAAHAAGMQVYADVVFDHKGGADGTEWVDAVEVNPSDRNQVISGTYQIQAWTKFDFPGRGNTYSSFKWRWYHFDGVDWDESRKLSRIYLFEGKAWDWEVDTEFGNYDYLMYADLDMDYPEVVTELKNWGPWYVLTTNIDGFRLDAVKHIKFSFFPDWLSYVRSSTGKPLFTVGEYWSYDINKLHNYITKTNGTMSLFDAPLHNKFYTASKSGGAFDMRTLMTNTLMKDQPTLAVTFVDNHDTEPGQALQSWVDPWFKPLAYAFILTRQEGYPCVFYGDYYGIPQYNIPSLKSKIDPLLIARRDYAYGTQHDYLDHSDIIGWTREGVTEKPGSGLAALITDGPGGSKWMYVGKQHAGKVFYDLTGNRSDTVTINSDGWGEFKVNGGSVSVWVPRKTTVSTIARPITTRPWTGEFVRWTEPRLVAWP

SEQ ID NO: 18306 - protein, 513 aa, Geobacillus stearothermophilus
AAPFNGTMMQYFEWYLPDDGTLWTKVANEANNLSSLGITALWLPPAYKGTSRSDVGYGAYDLYDLGEFNQKGTVRTKYGTKAQYLQAIQAAHAAGMQVYADVVFDHKGGADGTEWVDAVEVNPSDRNQVISGTYQIQAWTKFDFPGRGNTYSSFKWRWYHFDGVDWDESRKLSRIYLFEGKAWDWEVDTEFGNYDYLMYADLDMDHPEVVTELKNWGPWYVLTTNIDGFRLDAVKHIKFQFFPDWLSYVRSSTGKPLFTVGEYWSYDINKLKNYITKTNGTMSLFDAPLHNKFYTASKSGGAFDMRTLMTNTLMKDQPTLAVTFVDNHDTEPGQALQSWVDPWFKPLAYAFILTRQEGYPCVFYGDYYGIPQYNIPSLKSKIDPLLIARRDYAYGTQHDYLDHSDIIGWTREGVTEKPGSGLAALITDGPGGSKWMYVGKQHAGKVFYDLTGNRSDTVTINSDGWGEFKVNGGSVSVWVPRKTTVSTIARPITTRPWTGEFVRWTEPRLVAWP

SEQ ID NO: 18307 - protein, 513 aa, Geobacillus stearothermophilus
AAPFNGTMMQYFEWYLPDDGTLWTKVANEANNLSSLGITALWLPPAYKGTSRSDVGYGAYDLYDLGEFNQKGTVRTKYGTKAQYLQAIQAAHAAGMQVYADVVFDHKGGADGTEWVDAVEVNPSDRNQVISGTYQIQAWTKFDFPGRGNTYSSFKWRWYHFDGVDWDESRKLSRIYLFEGKAWDWEVDTEFGNYDYLMYADLDMDYPEVVTELKNWGPWYVLTTNIDGFRLDAVKHIKFQFFPDWLSYVRSSTGKPLFTVGEYWSYDINKLHNYITKTNGTMSLFDAPLHNKFYTASKSGGAFDMRTLMTNTLMKDQPTLAVTFVDNHDTEPGQALQSWVDPWFKPLAYAFILTRQEGYPCVFYGDYYGIPQYNIPSLKSKIDPLLIARRDYAYGTQHDYLDHSDIIGWTREGVTEKPGSGLAALITDGPGGSKWMYVGKQHAGKVFYDLTGNRSDTVTINSDGWGEFKVNGGSVSVWVPRKTTVSTIARPITTRPWTGEFVRWTEPRLVAWP

SEQ ID NO: 18308 - protein, 513 aa, Geobacillus stearothermophilus
AAPFNGTMMQYFEWYLPDDGTLWTKVANEANNLSSLGITALWLPPAYKGTSRSDVGYGAYDLYDLGEFNQKGTVRTKYGTKAQYLQAIQAAHAAGMQVYADVVFDHKGGADGTEWVDAVEVNPSDRNQVISGTYQIQAWTKFDFPGRGNTYSSFKWRWYHFDGVDWDESRKLSRIYLFEGKAWDWEVDTEFGNYDYLMYADLDMDHPEVVTELKNWGPWYVLTTNIDGFRLDAVKHIKFQFFPDWLSYVRSSTGKPLFTVGEYWSYDINKLHNFITKTNGTMSLFDAPLHNKFYTASKSGGAFDMRTLMTNTLMKDQPTLAVTFVDNHDTEPGQALQSWVDPWFKPLAYAFILTRQEGYPCVFYGDYYGIPQYNIPSLKSKIDPLLIARRDYAYGTQHDYLDHSDIIGWTREGVTEKPGSGLAALITDGPGGSKWMYVGKQHAGKVFYDLTGNRSDTVTINSDGWGEFKVNGGSVSVWVPRKTTVSTIARPITTRPWTGEFVRWTEPRLVAWP

SEQ ID NO: 18309 - protein, 513 aa, Geobacillus stearothermophilus
AAPFNGTMMQYFEWYLPDDGTLWTKVANEANNLSSLGITALWLPPAYKGTSRSDVGYGAYDLYDLGEFNQKGTVRTKYGTKAQYLQAIRAAHAAGMQVYADVVFDHKGGADGTEWVDAVEVNPSDRNQVISGTYQIQAWTKFDFPGRGNTYSSFKWRWYHFDGVDWDESRKLSRIYLFEGKAWDWEVDTEFGNYDYLMYADLDMDHPEVVTELKNWGPWYVLTTNIDGFRLDAVKHIKFSFFPDWLSYVRSSTGKPLFTVGEYWSYEINKLHNYITKTNGTMSLFDAPLHNKFYTASKSGGAFDMRTLMTNTLMKDQPTLAVTFVDNHDTEPGQALQSWVDPWFKPLAYAFILTRQEGYPCVFYGDYYGIPQYNIPSLKSKIDPLLIARRDYAYGTQHDYLDHSDIIGWTREGVTEKPGSGLAALITDGPGGSKWMYVGKQHAGKVFYDLTGNRSDTVTINSDGWGEFKVNGGSVSVWVPRKTTVSTIARPITTRPWTGEFVRWTEPRLVAWP

SEQ ID NO: 18310 - protein, 513 aa, Geobacillus stearothermophilus
AAPFNGTMMQYFEWYLPDDGTLWTKVANEANNLSSLGITALWLPPAYKGTSRSDVGYGAYDLYDLGEFNQKGTVRTKYGTKAQYLQAIRAAHAAGMQVYADVVFDHKGGADGTEWVDAVEVNPSDRNQVISGTYQIQAWTKFDFPGRGNTYSSFKWRWYHFDGVDWDESRKLSRIYLFEGKAWDWEVDTEFGNYDYLMYADLDMDHPEVVTELKNWGPWYVLTTNIDGFRLDAVKHIKFSFFPDWLSYVRSSTGKPLFTVGEYWSYDINKLHNFITKTNGTMSLFDAPLHNKFYTASKSGGAFDMRTLMTNTLMKDQPTLAVTFVDNHDTEPGQALQSWVDPWFKPLAYAFILTRQEGYPCVFYGDYYGIPQYNIPSLKSKIDPLLIARRDYAYGTQHDYLDHSDIIGWTREGVTEKPGSGLAALITDGPGGSKWMYVGKQHAGKVFYDLTGNRSDTVTINSDGWGEFKVNGGSVSVWVPRKTTVSTIARPITTRPWTGEFVRWTEPRLVAWP

SEQ ID NO: 18311 - protein, 513 aa, Homo sapiens
AAPFNGTMMQYFEWYLPDDGTLWTKVANEANNLSSLGITALWLPPAYKGTSRSDVGYGAYDLYDLGEFNQKGTVRTKYGTKAQYLQAIRAAHAAGMQVYADVVFDHKGGADDTEWVDAVEVNPSDRNQVISGTYQIQAWTKFDFPGRGNTYSSFKWRWYHFDGVDWDESRKLSRIYLFEGKAWDWEVDTEFGNYDYLMYADLDMDHPEVVTELKNWGPWYVLTTNIDGFRLDAVKHIKFSFFPDWLSYVRSSTGKPLFTVGEYWSYDINKLHNYITKTNGTMSLFDAPLHNKFYTASKSGGAFDMRTLMTNTLMKDQPTLAVTFVDNHDTEPGQALQSWVDPWFKPLAYAFILTRQEGYPCVFYGDYYGIPQYNIPSLKSKIDPLLIARRDYAYGTQHDYLDHSDIIGWTREGVTEKPGSGLAALITDGPGGSKWMYVGKQHAGKVFYDLTGNRSDTVTINSDGWGEFKVNGGSVSVWVPRKTTVSTIARPITTRPWTGEFVRWTEPRLVAWP

SEQ ID NO: 18312 - protein, 513 aa, Geobacillus stearothermophilus
AAPFNGTMMQYFEWYLPDDGTLWTKVANEANNLSSLGITALWLPPAYKGTSRSDVGYGAYDLYDLGEFNQKGTVRTKYGTKAQYLQAIRAAHAAGMQVYADVVFDHKGGADGTEWVDAVEVNPSDRNQVISGTYQIQAWTKFDFPGRGNTYSSFKWRWYHFDGVDWDESRKLSRIYLFEGKAWDWEVDTEFGNYDYLMYADLDMDHPEVVTELKNWGPWYVLTTNIDGFRLDAVKHIKFSFFPDWLSYVRSSTGKPLFTVGEYWSYDINKLKNYITKTNGTMSLFDAPLHNKFYTASKSGGAFDMRTLMTNTLMKDQPTLAVTFVDNHDTEPGQALQSWVDPWFKPLAYAFILTRQEGYPCVFYGDYYGIPQYNIPSLKSKIDPLLIARRDYAYGTQHDYLDHSDIIGWTREGVTEKPGSGLAALITDGPGGSKWMYVGKQHAGKVFYDLTGNRSDTVTINSDGWGEFKVNGGSVSVWVPRKTTVSTIARPITTRPWTGEFVRWTEPRLVAWP

SEQ ID NO: 18313 - protein, 513 aa, Geobacillus stearothermophilus
AAPFNGTMMQYFEWYLPDDGTLWTKVANEANNLSSLGITALWLPPAYKGTSRSDVGYGVYDLYDLGEFNQKGTVRTKYGTKAQYLQAIQAAHAAGMQVYADVVFDHKGGADGTEWVDAVEVNPSDRNQVISGTYQIQAWTKFDFPGRGNTYSSFKWRWYHFDGVDWDESRKLSRIYLFEGKAWDWEVDTEFGNYDYLMYADLDMDHPEVVTELKNWGPWYVLTTNIDGFRLDAVKHIKFQFFPDWLSYVRSSTGKPLFTVGEYWSYDINKLHNFITKTNGTMSLFDAPLHNKFYTASKSGGAFDMRTLMTNTLMKDQPTLAVTFVDNHDTEPGQALQSWVDPWFKPLAYAFILTRQEGYPCVFYGDYYGIPQYNIPSLKSKIDPLLIARRDYAYGTQHDYLDHSDIIGWTREGVTEKPGSGLAAMITDGPGGSKWMYVGKQHAGKVFYDLTGNRSDTVTINSDGWGEFKVNGGSVSVWVPRKTTVSTIARPITTRPWTGEFVRWTEPRLVAWP

SEQ ID NO: 18314 - protein, 513 aa, Geobacillus stearothermophilus
AAPFNGTMMQYFEWYLPDDGTLWTKVANEANNLSSLGITALWLPPAYKGTSRSDVGYGAYDLYDLGEFNQKGTVRTKYGTKAQYLQAIQAAHAAGMQVYADVVFDHKGGADGTEWVDAVEVNPSDRNQVISGTYQIQAWTKFDFPGRGNTYSSFKWYWYHFDGVDWDESRKLSRIYLFEGKAWDWEVDTEFGNYDYLMYADLDMDHPEVVTELKNWGPWYVLTTNIDGFRLDAVKHIKFQFFPDWLSYVRSSTGKPLFTVGEYWSYDINKLHNYITKTNGTMSLFDAPLHNKFYTASKSGGAFDMRTLMTNTLMKDQPTLAVTFVDNHDTEPGQALQSWVDPWFKPLAYAFILTRQEGYPCVFYGDYYGIPQYNIPSLKSKIDPLLIARRDYAYGTQHDYLDHSDIIGWTREGVTEKPGSGLAALITDGPGGSKWMYVGKQHAGKVFYDLTGNRSDTVTINSDGWGEFKVNGGSVSVWVPRKTTVSTIARPITTRPWTGEFVRWTEPRLVAWP

SEQ ID NO: 18315 - protein, 513 aa, Geobacillus stearothermophilus
AAPFNGTMMQYFEWYLPDDGTLWTKVANEANNLSSLGITALWLPPAYKGTSRSDVGYGVYDLYDLGEFNQKGTVRTKYGTKAQYLQAIQALHAAGLQVYADVVFDHKGGADGTEWVDAVEVNPSDRNQVISGTYQIQAWTKFDFPGRGNTYSSFKWRWYHFDGVDWDESRKLSRIYLFEGKAWDWEVDTEFGNYDYLMYADLDMDHPEVVTELKNWGPWYVLTTNIDGFRLDAVKHIKFQFFPDWLSYVRSSTGKPLFTVGEYWSYDINKLHNYITKTNGTMSLFDAPLHNKFYTASKSGGAFDMRTLMTNTLMKDQPTLAVTFVDNHDTEPGQALQSWVDPWFKPLAYAFILTRQEGYPCVFYGDYYGIPQYNIPSLKSKIDPLLIARRDYAYGTQHDYLDHSDIIGWTREGVTEKPGSGLAALITDGPGGSKWMYVGKQHAGKVFYDLTGNRSDTVTINSDGWGEFKVNGGSVSVWVPRKTTVSTIARPITTRPWTGEFVRWTEPRLVAWP

SEQ ID NO: 18316 - protein, 515 aa, Geobacillus stearothermophilus
AAPFNGTMMQYFEWYLPDDGTLWTKVANEANNLSSLGITALWLPPAYKGTSRSDVGYGAYDLYDLGEFNQKGTVRTKYGTKAQYLQAIQAAHAAGMQVYADVVFDHKGGADGTEWVDAVEVNPSDRNQVISGTYQIQAWTKFDFPGRGNTYSSFKWRWYHFDGVDWDESRKLSRIYLFEGIGKAWDWEVDTENGNYDYLMYADLDMDHPEVVTELKNWGPWYVLTTNIDGFRLDAVKHIKFSFFPDWTSYVRSSTGKPLFTVGEYWSYDINKLHNYITKTNGTMSLFDAPLHNKFYTASKSGGAFDMRTLMTNTLMKDQPTLAVTFVDNHDTEPGQALQSWVDPWFKPLAYAFILTRQEGYPCVFYGDYYGIPQYNIPSLKSKIDPLLIARRDYAYGTQHDYLDHSDIIGWTREGVTEKPGSGLAALITDGPGGSKWMYVGKQHAGKVFYDLTGNRSDTVTINSDGWGEFKVNGGSVSVWVPRKTTVSTIARPITTRPWTGEFVRWTEPRLVAWP

SEQ ID NO: 18317 - protein, 515 aa, Geobacillus stearothermophilus
AAPFNGTMMQYFEWYLPDDGTLWTKVANEANNLSSLGITALWLPPAYKGTSRSDVGYGAYDLYDLGEFNQKGTVRTKYGTKAQYLQAIRAAHAAGMQVYADVVFDHKGGADGTEWVDAVEVNPSDRNQVISGTYQIQAWTKFDFPGRGNTYSSFKWRWYHFDGVDWDESRKLSRIYLFEGIGKAWDWEVDTENGNYDYLMYADLDMDHPEVVTELKNWGPWYVLTTNIDGFRLDAVKHIKFSFFPDWLSYVRSSTGKPLFTVGEYWSYDINKLHNYITKTNGTMSLFDAPLHNKFYTASKSGGAFDMRTLMTNTLMKDQPTLAVTFVDNHDTEPGQALQSWVDPWFKPLAYAFILTRQEGYPCVFYGDYYGIPQYNIPSLKSKIDPLLIARRDYAYGTQHDYLDHSDIIGWTREGVTEKPGSGLAALITDGPGGSKWMYVGKQHAGKVFYDLTGNRSDTVTINSDGWGEFKVNGGSVSVWVPRKTTVSTIARPITTRPWTGEFVRWTEPRLVAWP

SEQ ID NO: 18318 - protein, 515 aa, Geobacillus stearothermophilus
AAPFNGTMMQYFEWYLPDDGTLWTKVANEANNLSSLGITALWLPPAYKGTSRSDVGYGVYDLYDLGEFNQKGTVRTKYGTKAQYLQAIQALHAAGIQVYADVVFDHKGGADGTEWVDAVEVNPSDRNQVISGTYQIQAWTKFDFPGRGNTYSSFKWRWYHFDGVDWDESRKLSRIYEFRGIGKAWDWEVDTENGNYDYLMYADLDMDHPEVVTELKNWGPWYVLTTNIDGFRLDAVKHIKFQFFPDWLSYVRSSTGKPLFTVGEYWSYDINKLHNYITKTNGTMSLFDAPLHNKFYTASKSGGAFDMRTLMTNTLMKDQPTLAVTFVDNHDTEPGQALQSWVDPWFKPLAYAFILTRQEGYPCVFYGDYYGIPQYNIPSLKSKIDPLLIARRDYAYGTQHDYLDHSDIIGWTREGVTEKPGSGLAALITDGPGGSKWMYVGKQHAGKVFYDLTGNRSDTVTINSDGWGEFKVNGGSVSVWVPRKTTVSTIARPITTRPWTGEFVRWTEPRLVAWP

SEQ ID NO: 18319 - protein, 515 aa, Geobacillus stearothermophilus
AAPFNGTMMQYFEWYLPDDGTLWTKVANEANNLSSLGITALWLPPAYKGTSRSDVGYGVYDLYDLGEFNQKGTVRTKYGTKAQYLQAIQAAHAAGMQVYADVVFDHKGGADGTEWVDAVEVNPSDRNQVISGTYQIQAWTKFDFPGRGNTYSSFKWRWYHFDGVDWDESRKLSRIYLFEGIGKAWDWEVDTENGNYDYLMYADLDMDHPEVVTELKNWGPWYVLTTNIDGFRLDAVKHIKFQFFPDWTSYVRSSTGKPLFTVGEYWSYDINKLHNYITKTNGTMSLFDAPLHNKFYTASKSGGAFDMRTLMTNTLMKDQPTLAVTFVDNHDTEPGQALQSWVDPWFKPLAYAFILTRQEGYPCVFYGDYYGIPQYNIPSLKSKIDPLLIARRDYAYGTQHDYLDHSDIIGWTREGVTEKPGSGLAALITDGPGGSKWMYVGKQHAGKVFYDLTGNRSDTVTINSDGWGEFKVNGGSVSVWVPRKTTVSTIARPITTRPWTGEFVRWTEPRLVAWP

SEQ ID NO: 18320 - protein, 515 aa, Geobacillus stearothermophilus
AAPFNGTMMQYFEWYLPDDGTLWTKVADEANNLSSLGITALWLPPAYKGTSRSDVGYGVYDLYDLGEFNQKGTVRTKYGTKAQYLEAIQAAHAAGMQVYADVVFDHKGGADGTEWVDAVEVNPSDRNQEISGTYQIQAWTKFDFPGRGNTYSSFKWRWYHFDGVDWDESRQLSRIYKFRGIGKAWDWEVDTENGNYDYLMYADLDMDHPEVVTELKNWGKWYVDTTNIDGFRLDAVKHIKFSFFPDWLSYVRSQTGKPLFTVGEYWSYDIDKLHNYITKTDGTMSLFDAPLHNKFYTASKSGGAFDMQTLMTNTLMKDQPTLAVTFVDNHDTEPGQALQSWVDPWFKPLAYAFILTRQEGYPCVFYGDYYGIPQYNIPSLKSQIDPLLIARRDYAYGTQHDYLDHSDIIGWTREGVTEKPGSGLAALITDGPGGSKWMYVGKQHAGQVFYDLTGNRSDTVTINSDGWGEFKVNGGSVSVWVPQKTTVSTIARPITTRPWTGEFVRWTEPRLVAWP

SEQ ID NO: 18321 - protein, 515 aa, Geobacillus stearothermophilus
AAPFNGTMMQYFEWYLPDDGTLWTKVANEANNLSSLGITALWLPPAYKGTSRSDVGYGAYDLYDLGEFNQKGTVRTKYGTKAQYLQAIQAAHAAGMQVYADVVFDHKGGADDTEWVDAVEVNPSDRNQVISGTYQIQAWTKFDFPGRGNTYSSFKWRWYHFDGVDWDESRKLSRIYLFEGIGKAWDWEVDTENGNYDYLMYADLDMDHPEVVTELKNWGPWYVLTTNIDGFRLDAVKHIKFSFFPDWLSYVRSSTGKPLFTVGEYWSYDINKLHNYITKTNGTMSLFDAPLHNKFYTASKSGGAFDMRTLMTNTLMKDQPTLAVTFVDNHDTEPGQALQSWVDPWFKPLAYAFILTRQEGYPCVFYGDYYGIPQYNIPSLKSKIDPLLIARRDYAYGTQHDYLDHSDIIGWTREGVTEKPGSGLAALITDGPGGSKWMYVGKQHAGKVFYDLTGNRSDTVTINSDGWGEFKVNGGSVSVWVPRKTTVSTIARPITTRPWTGEFVRWTEPRLVAWP

SEQ ID NO: 18322 - protein, 515 aa, Geobacillus stearothermophilus
AAPFNGTMMQYFEWYLPDDGTLWTKVANEANNLSSLGITALWLPPAYKGTSRSDVGYGAYDLYDLGEFNQKGTVRTKYGTKAQYLQAIQAAHAAGMQVYADVVFDHKGGADGTEWVDAVEVNPSDRNQVISGTYQIQAWTKFDFPGRGNTYSSFKWRWYHFDGVDWDESRKLSRIYDFEGIGKAWDWEVDTENGNYDYLMYADLDMDHPEVVTELKNWGPWYVLTTNIDGFRLDAVKHIKFQFFPDWLSYVRSSTGKPLFTVGEYWSYDINKLHNYITKTNGTMSLFDAPLHNKFYTASKSGGAFDMRTLMTNTLMKDQPTLAVTFVDNHDTEPGQALQSWVDPWFKPLAYAFILTRQEGYPCVFYGDYYGIPQYNIPSLKSKIDPLLIARRDYAYGTQHDYLDHSDIIGWTREGVTEKPGSGLAALITDGPGGSKWMYVGKQHAGKVFYDLTGNRSDTVTINSDGWGEFKVNGGSVSVWVPRKTTVSTIARPITTRPWTGEFVRWTEPRLVAWP

SEQ ID NO: 18323 - protein, 515 aa, Geobacillus stearothermophilus
AAPFNGTMMQYFEWYLPDDGTLWTKVADEANNLSSLGITALWLPPAYKGTSRSDVGYGVYDLYDLGEFNQKGTVRTKYGTKAQYLQAIQAAHAAGMRVYADVVFDHKGGADGTEWVDAVEVNPSDRNQEISGTYQIQAWTKFDFPGRGNTYSSFKWRWYHFDGVDWDESRKLSRIYKFRGIGKAWDWEVDTENGNYDYLMYADLDMDHPEVVTELKNWGKWYVDTTNIDGFRLDAVKHIKFEFFPDWLSYVRSQTGKPLFTVGEYWSYDINKLHNYITKTNGTMSLFDAPLHNKFYTASKSGGAFDMQTLMTNTLMKDRPTLAVTFVDNHDTEPGQALQSWVDPWFKPLAYAFILTREEGYPCVFYGDYYGIPQYNIPSLKSKIDPLLIARRDYAYGTQHDYLDHSDIIGWTREGVTEKPGSGLAALITDGPGGSKWMYVGKEHAGKVFYDLTGNRSDTVTINSDGWGEFKVNGGSVSVWVPRKTTVSTIARPITTRPWTGEFVRWTEPRLVAWP

SEQ ID NO: 18324 - protein, 515 aa, Geobacillus stearothermophilus
AAPFNGTMMQYFEWYLPDDGTLWTKVADEANNLSSLGITALWLPPAYKGTSRSDVGYGVYDLYDLGEFNQKGTVRTKYGTKAQYLQAIQAAHAAGMRVYADVVFDHKGGADGTEWVDAVEVNPSDRNQEISGTYQIQAWTKFDFPGRGNTYSSFKWRWYHFDGVDWDESRKLSRIYKFRGIGKAWDWEVDTENGNYDYLMYADLDMDHPEVVTELKNWGKWYVDTTNIDGFRLDAVKHIKFQFFPDWLSYVRSQTGKPLFTVGEYWSYDINKLHNYITKTNGTMSLFDAPLHNKFYTASKSGGAFDMQTLMTNTLMKDRPTLAVTFVDNHDTEPGQALQSWVDPWFKPLAYAFILTREEGYPCVFYGDYYGIPQYNIPSLKSKIDPLLIARRDYAYGTQHDYLDHSDIIGWTREGVTEKPGSGLAALITDGPGGSKWMYVGKEHAGKVFYDLTGNRSDTVTINSDGWGEFKVNGGSVSVWVPRKTTVSTIARPITTRPWTGEFVRWTEPRLVAWP

SEQ ID NO: 18325 - protein, 515 aa, Geobacillus stearothermophilus
AAPFNGTMMQYFEWYLPDDGTLWTKVANEANNLSSLGITALWLPPAYKGTSRSDVGYGVYDLYDLGEFNQKGAVRTKYGTKAQYLQAIQAAHAAGMQVYADVVFDHKGGADGTEWVDAVEVNPSDRNQEISGTYQIQAWTKFDFPGRGNTYSSFKWRWYHFDGVDWDESRKLSRIYKFRGIGKAWDWEVDTENGNYDYLMYADLDMDHPEVVTELKSWGKWYVNTTNIDGFRLDAVKHIKFSFFPDWLSDVRSQTGKPLFTVGEYWSYDINKLHNYIMKTNGTMSLFDAPLHNKFYTASKSGGTFDMRTLMTNTLMKDQPTLAVTFVDNHDTEPGQALQSWVDPWFKPLAYAFILTRQEGYPCVFYGDYYGIPQYNIPSLKSKIDPLLIARRDYAYGTQHDYLDHSDIIGWTREGVTEKPGSGLAALITDGPGGSKWMYVGKQHAGKVFYDLTGNRSDTVTINSDGWGEFKVNGGSVSVWVPRKTTVSTIAWSITTRPWTDEFVRWTEPRLVAWP

SEQ ID NO: 18326 - protein, 515 aa, Geobacillus stearothermophilus
AAPFNGTMMQYFEWYLPDDGTLWTKVANEANNLSSLGITALWLPPAYKGTSRSDVGYGAYDLYDLGEFNQKGTVRTKYGTKAQYLQAIQAAHAAGMQVYADVVFDHKGGADGTEWVDAVEVNPSDRNQVISGTYQIQAWTKFDFPGRGNTYSSFKWRWYHFDGVDWDESRKLSRIYLFEGIGKAWDWEVDTENGNYDYLMYADLDMDHPEVVTELKNWGPWYVLTTNIDGFRLDAVKHIKFQFFPDWLSYVRSSTGKPLFTVGEYWSYDINKLHNYITKTNGTMSLFDAPLHNKFYTASKSGGAFDMRTLMTNTLMKDQPTLAVTFVDNHDTEPGQALQSWVDPWFKPLAYAFILTRQEGYPCVFYGDYYGIPQYNIPSLKSKIDPLLIARRDYAYGTQHDYLDHSDIIGWTREGVTEKPGSGLAALITDGPGGSKWMYVGKQHAGKVFYDLTGNRSDTVTINSDGWGEFKVNGGSVSVWVPRKTTVSTIARPITTRPWTGEFVRWTEPRLVAWP

SEQ ID NO: 18327 - protein, 515 aa, Geobacillus stearothermophilus
AAPFNGTMMQYFEWYLPDDGTLWTKVAKEANNLSSLGITALWLPPAYKGTSRSDVGYGVYDLYDLGEFNQKGTVRTKYGTKAQYLQAIQAAHAAGMRVYADVVFDHKGGADGTEWVDAVEVNPSDRNQEISGTYQIQAWTKFDFPGRGNTYSSFKWRWYHFDGVDWDESRKLSRIYKFRGIGKAWDWEVDTENGNYDYLMYADLDMDHPEVVTELKNWGKWYVKTTNIDGFRLDAVKHIKFSFFPDWLSYVRSQTGKPLFTVGEYWSYDINKLHNYITKTNGTMSLFDAPLHNKFYTASKSGGAFNMRTLMTNTLMKNRPTLAVTFVDNHDTEPGQALQSWVDPWFKPLAYAFILTREEGYPCVFYGDYYGIPQYNIPSLKSKIDPLLIARRDYAYGTQHDYLDHSDIIGWTREGVTEKPGSGLAALITDGPGGSKWMYVGKEHAGKVFYDLTGNRSDTVTINSDGWGEFKVNGGSVSVWVPRKTTVSTIARPITTRPWTGEFVRWTEPRLVAWP

SEQ ID NO: 18328 - protein, 515 aa, Geobacillus stearothermophilus
AAPFNGTMMQYFEWYLPDDGTLWTKVANEANNLSSLGITALWLPPAYKGTSRSDVGYGVYDLYDLGEFNQKGTVRTKYGTKAQYLQAIQAAHAAGMQVYADVVFDHKGGADGTEWVDAVEVNPSDRNQVISGTYQIQAWTKFDFPGRGNTYSSFKWRWYHFDGVDWDESRKLSRIYLFEGIGKAWDWEVDTENGNYDYLMYADLDMDHPEVVTELKNWGPWYVLTTNIDGFRLDAVKHIKFQFFPDWLSYVRSSTGKPLFTVGEYWSYDINKLHNYITKTNGTTSLFDAPLHNKFYTASKSGGAFDMRTLMTNTLMKDQPTLAVTFVDNHDTEPGQALQSWVDPWFKPLAYAFILTRQEGYPCVFYGDYYGIPQYNIPSLKSKIDPLLIARRDYAYGTQHDYLDHSDIIGWTREGVTEKPGSGLAALITDGPGGSKWMYVGKQHAGKVFYDLTGNRSDTVTINSDGWGEFKVNGGSVSVWVPRKTTVSTIARPITTRPWTGEFVRWTEPRLVAWP

SEQ ID NO: 18329 - protein, 515 aa, Geobacillus stearothermophilus
AAPFNGTMMQYFEWYLPDDGTLWTKVADEANNLSSLGITALWLPPAYKGTSRSDVGYGVYDLYDLGEFNQKGTVRTKYGTKAQYLQAIQAAHAAGMRVYADVVFDHKGGADGTEWVDAVEVNPSDRNQEISGTYQIQAWTKFDFPGRGNTYSSFKWRWYHFDGVDWDESRKLSRIYKFRGIGKAWDWEVDTENGNYDYLMYADLDMDHPEVVTELKNWGKWYVDTTNIDGFRLDAVKHIKFSFFPDWLSYVRSQTGKPLFTVGEYWSYDINKLHNYITKTNGTMSLFDAPLHNKFYTASKSGGAFDMQTLMTNTLMKDRPTLAVTFVDNHDTEPGQALQSWVDPWFKPLAYAFILTREEGYPCVFYGDYYGIPQYNIPSLKSKIDPLLIARRDYAYGTQHDYLDHSDIIGWTREGVTEKPGSGLAALITDGPGGSKWMYVGKEHAGKVFYDLTGNRSDTVTINSDGWGEFKVNGGSVSVWVPQKTTVSTIARPITTRPWTGEFVRWTEPRLVAWP

SEQ ID NO: 18330 - protein, 515 aa, Geobacillus stearothermophilus
AAPFNGTMMQYFEWYLPDDGTLWTKVANEANNLSSLGITALWLPPAYKGTSRSDVGYGAYDLYDLGEFNQKGTVRTKYGTKAQYLQAIQAAHAAGMQVYADVVFDHKGGADGTEWVDAVEVNPSDRNQVISGTYQIQAWTKFDFPGRGNTYSSFKWRWYHFDGVDWDESRKLSRIYLFEGIGKAWDWEVDTENGNYDYLMYADLDMDHPEVVTELKNWGPWYVLTTNIDGFRLDAVKHIKFSFFPDWLSYVRSSTGKPLFTVGEYWSYDINKLHNYITKTNGTTSLFDAPLHNKFYTASKSGGAFDMRTLMTNTLMKDQPTLAVTFVDNHDTEPGQALQSWVDPWFKPLAYAFILTRQEGYPCVFYGDYYGIPQYNIPSLKSKIDPLLIARRDYAYGTQHDYLDHSDIIGWTREGVTEKPGSGLAALITDGPGGSKWMYVGKQHAGKVFYDLTGNRSDTVTINSDGWGEFKVNGGSVSVWVPRKTTVSTIARPITTRPWTGEFVRWTEPRLVAWP

SEQ ID NO: 18331 - protein, 512 aa, Geobacillus stearothermophilus
AAPFNGTMMQYFEWYLPDDGTLWTKVANEANNLSSLGITALWLPPAYKGTSRSDVGYGVYDLYDLGEFNQKGAVRTKYGTKAQYLQAIQAAHAAGMQVYADVVFDHKGGADGTEWVDAVEVNPSDRNQEISGTYQIQAWTKFDFPGRGNTYSSFKWRWYHFDGVDWDESRKLSRIYKFRGKAWDWEVDTENGNYDYLMYADLDMDHPEVVTELKSWGKWYVNTTNIDGFRLDAVKHIKFSFFPDWLSDVRSQTGKPLFTVGEYWSYDINKLHNYIMKTNGTMSLFDAPLHNKFYTASKSGGTFDMRTLMTNTLMKDQPTLAVTFVDNHDTEPGQALQSWVDPWFKPLAYAFILTRQEGYPCVFYGDYYGIPQYNIPSLKSKIDPLLIARRDYAYGTQHDYLDHSDIIGWTREGVTEKPGSGLAALITDGPGGSKWMYVGKQHAGKVFYDLTGNRSDTVTINSDGWGEFKVNGGSVSVWVPRKTTVSTIAWSITTRPWTDEFVRWTEPRLVAW

SEQ ID NO: 18332 - protein, 514 aa, Bacillus stearothermophilus
AAPFNGTMMQYFEWYLPDDGTLWTKVANEANNLSSLGITALWLPPAYKGTSRSDVGYGVYDLYDLGEFNQKGTVRTKYGTKAQYLQAIQALHAAGQVYADVVFDHKGGADGTEWVDAVEVNPSDRNQVISGTYQIQAWTKFDFPGRGNTYSSFKWRWYHFDGVDWDESRKLSRIYLFEGIGKAWDWEVDTENGNYDYLMYADLDMDHPEVVTELKNWGPWYVLTTNIDGFRLDAVKHIKFQFFPDWLSYVRSSTGKPLFTVGEYWSYDINKLHNYITKTNGTMSLFDAPLHNKFYTASKSGGAFDMRTLMTNTLMKDQPTLAVTFVDNHDTEPGQALQSWVDPWFKPLAYAFILTRQEGYPCVFYGDYYGIPQYNIPSLKSKIDPLLIARRDYAYGTQHDYLDHSDIIGWTREGVTEKPGSGLAALITDGPGGSKWMYVGKQHAGKVFYDLTGNRSDTVTINSDGWGEFKVNGGSVSVWVPRKTTVSTIARPITTRPWTGEFVRWTEPRLVAWP

SEQ ID NO: 18333 - protein, 514 aa, Geobacillus stearothermophilus
AAPFNGTMMQYFEWYLPDDGTLWTKVANEANNLSSLGITALWLPPAYKGTSRSDVGYGVYDLYDLGEFNQKGAVRTKYGTKAQYLQAIQAAHAAGMQVYADVVFDHKGGADGTEWVDAVEVNPSDRNQEISGTYQIQAWTKFDFPGRGNTYSSFKWRWYHFDGVDWDESRKLSRIYKFRGIGKAWDWEVDTENGNYDYLMYADLDMDHPEVVTELKSWGKWYVNTTNIDGFRLDAVKHIKFSFFPDWLSDVRSQTGKPLFTVGEYWSYDINKLHNYIMKTNGTMSLFDAPLHNKFYTASKSGGTFDMRTLMTNTLMKDQPTLAVTFVDNHDTEPGQALQSWVDPWFKPLAYAFILTRQEGYPCVFYGDYYGIPQYNIPSLKSKIDPLLIARRDYAYGTQHDYLDHSDIIGWTREGVTEKPGSGLAALITDGPGGSKWMYVGKQHAGKVFYDLTGNRSDTVTINSDGWGEFKVNGGSVSVWVPRKTTVSTIAWSITTRPWTDEFVRWTEPRLVAW

SEQ ID NO: 18334 - protein, 498 aa, Aspergillus oryzae
MVAWWSLFLYGLQVAAPALAATPADWRSQSIYFLLTDRFARTDGSTTATCNTADQKYCGGTWQGIIDKLDYIQGMGFTAIWITPVTAQLPQTTAYGDAYHGYWQQDIYSLNENYGTADDLKALSSALHERGMYLMVDVVANHMGYDGAGSSVDYSVFDPFDSSSYFHPFCFIQNWDDQTQVEDCWLGDNTVSLPDLDTTKDVVKNEWYDWVGSLVSNYSIDGLRIDTVKHVQKDFWPGYNKAAGVYCIGEVLDGDPAYTCPYQKVLDGVLNYPIYYPLLNAFKSTSGSMDDLYNMINTVKSDCPDSTLLGTFVENHDNPRFASYTNDIALAKNVAAFIILNDGIPIIYAGQEQHYAGGNDPANREATWLSGYPTDSELYKLIASANAIRNYAISKDTGFVTYKNWPIYKDDTTIAMRKGTDGSQIVTILSNKGASGDSYTLSLSGAGYTAGQQLTEVIGCTTVTVDSSGDVPVPMAGGLPRVLYPTEKLAGSKICSSS

SEQ ID NO: 18335 - protein, 498 aa, Aspergillus oryzae
MVAWWSLFLYGLQVAAPALAATPADWRSQSIYFLLTDRFARTDGSTTATCNTADQKYCGGTWQGIIDKLDYIQGMGFTAIWITPVTAQLPQTTAYGDAYHGYWQQDIYSLNENYGTADDLKALSSALHERGMYLMVDVVANHMGYDGAGSSVDYSVFDPFDSSSYFHPFCFIQNWDDQTQVEDCWLGDNTVSLPDLDTTKDVVKNEWYDWVGSLVSNYSIDGLRIDTVKHVQKDFWPGYNKAAGVYCIGEVLDGDPAYTCPYQEVLDGVLNYPIYYPLLNAFKSTSGSMDDLYNMINTVKSDCPDSTLLGTFVENHDNPRFASYTNDIALAKNVAAFIILNDGIPIIYAGQEQHYAGGNDPANREATWLSGYPTDSELYKLIASANAIRNYAISKDTGFVTYKNWPIYKDDTTIAMRKGTDGSQIVTILSNKGASGDSYTLSLSGAGYTAGQQLTEVIGCTTVTVDSSGDVPVPMAGGLPRVLYPTEKLAGSKICSSS

SEQ ID NO: 18336 - protein, 491 aa, Pyrococcus furiosus
AAPFNGTMMQYFEWYLPDDGTLWTKVANEANNLSSLGITALWLPPAYKGTSRSDVGYGAYDLYDLGEFNQKGTVRTKYGTKAQYLQAIRAAHAAGMQVYADVVFDHKGGADGTEWVDAVEVNPSDRNQVISGTYQIQAWTKFDFPGRGNTYSSFKWRWYHFDGVDWDESRKLSRIYLFEGKAWDWEVDTEFGNYDYLMYADLDMDHPEVVTELKNWGKWYVNTTNIDGFRLDAVKHIKFSFFPDWLSYVRSSTGKPLFTVGEYWSYDINKLHNYITKTDGTVSLFDAPLHNKFYTASKSGGAFDMRTLMTNTLMKDQPTLAVTFVDNHDTEPGQALQSWVDPWFKPLAYAFILTRQEGYPCVFYGDYYGIPQYNIPSLKSKIDPLLIARRDYAYGTQHDYLDHSDIIGWTREGGTEKPGSGLAALITDGPGGSKWMYVGKQHAGKVFYDLTGNRSDTVTINSDGWGEFKVNGGSVSVWVPRKTTVSTIARP

SEQ ID NO: 18337 - protein, 488 aa, Geobacillus stearothermophilus
AAPFNGTMMQYFEWYLPDDGTLWTKVANEANNLSSLGITALWLPPAYKGTSRSDVGYGAYDLYDLGEFNQKGTVRTKYGTKAQYLQAIQAAHAAGMQVYADVVFDHKGGADGTEWVDAVEVNPSDRNQVISGTYQIQAWTKFDFPGRGNTYSSFKWRWYHFDGVDWDESRKLSRIYLFEGIGKAWDWEVDTENGNYDYLMYADLDMDHPEVVTELKNWGPWYVLTTNIDGFRLDAVKHIKFSFFPDWTSYVRSSTGKPLFTVGEYWSYDINKLHNYITKTNGTMSLFDAPLHNKFYTASKSGGAFDMRTLMTNTLMKDQPTLAVTFVDNHDTEPGQALQSWVDPWFKPLAYAFILTRQEGYPCVFYGDYYGIPQYNIPSLKSKIDPLLIARRDYAYGTQHDYLDHSDIIGWTREGVTEKPGSGLAALITDGPGGSKWMYVGKQHAGKVFYDLTGNRSDTVTINSDGWGEFKVNGGSVSVWVPRKTTVS

SEQ ID NO: 18338 - protein, 488 aa, Geobacillus stearothermophilus
AAPFNGTMMQYFEWYLPDDGTLWTKVADEANNLSSLGITALWLPPAYKGTSRSDVGYGVYDLYDLGEFNQKGTVRTKYGTKAQYLQAIQAAHAAGMRVYADVVFDHKGGADGTEWVDAVEVNPSDRNQEISGTYQIQAWTKFDFPGRGNTYSSFKWRWYHFDGVDWDESRKLSRIYKFRGIGKAWDWEVDTENGNYDYLMYADLDMDHPEVVTELKNWGKWYVDTTNIDGFRLDAVKHIKFQFFPDWLSYVRSQTGKPLFTVGEYWSYDINKLHNYITKTNGTMSLFDAPLHNKFYTASKSGGAFDMQTLMTNTLMKDRPTLAVTFVDNHDTEPGQALQSWVDPWFKPLAYAFILTREEGYPCVFYGDYYGIPQYNIPSLKSKIDPLLIARRDYAYGTQHDYLDHSDIIGWTREGVTEKPGSGLAALITDGPGGSKWMYVGKEHAGKVFYDLTGNRSDTVTINSDGWGEFKVNGGSVSVWVPRKTTVS

SEQ ID NO: 18339 - protein, 488 aa, Geobacillus stearothermophilus
AAPFNGTMMQYFEWYLPDDGTLWTKVADEANNLSSLGITALWLPPAYKGTSRSDVGYGVYDLYDLGEFNQKGTVRTKYGTKAQYLQAIQAAHAAGMRVYADVVFDHKGGADGTEWVDAVEVNPSDRNQEISGTYQIQAWTKFDFPGRGNTYSSFKWRWYHFDGVDWDESRKLSRIYKFRGIGKAWDWEVDTENGNYDYLMYADLDMDHPEVVTELKNWGKWYVDTTNIDGFRLDAVKHIKFSFFPDWLSYVRSQTGKPLFTVGEYWSYDINKLHNYITKTNGTMSLFDAPLHNKFYTASKSGGAFDMQTLMTNTLMKDRPTLAVTFVDNHDTEPGQALQSWVDPWFKPLAYAFILTREEGYPCVFYGDYYGIPQYNIPSLKSKIDPLLIARRDYAYGTQHDYLDHSDIIGWTREGVTEKPGSGLAALITDGPGGSKWMYVGKEHAGKVFYDLTGNRSDTVTINSDGWGEFKVNGGSVSVWVPQKTTVS

SEQ ID NO: 18340 - protein, 486 aa, Geobacillus stearothermophilus
AAPFNGTMMQYFEWYLPDDGTLWTKVANEANNLSSLGITALWLPPAYKGTSRSDVGYGAYDLYDLGEFNQKGTVRTKYGTKAQYLQAIQAAHAAGMQVYADVVFDHKGGADGTEWVDAVEVNPSDRNQVISGTYQIQAWTKFDFPGRGNTYSSFKWRWYHFDGVDWDESRKLSRIYLFEGKAWDWEVDTEFGNYDYLMYADLDMDHPEVTTELKNWGKWYVNTTNIDGFRLDAVKHIKFSFFPDWLSYVRSSTGKPLFTVGEYWSGDINKLHNYITKTDGTVSLFDAPLHYKFYNASKSGGNFDMRTLMTNTLMKDQPTLAVTFVDNHDTEPGQALQSWVDPWFKPLAYAFILTRQEGYPCVFYGDYYGIPQYNIPSLKSKIDPLLIARRDYAYGTQHDYLDHSDIIGWTREGGTEKPGSGLAALITDGPGGSKWMYVGKQHAGKVFYDLTGNRSDTVTINSDGWGEFKVNGGSVSVWVPRKTTVS

SEQ ID NO: 18341 - protein, 486 aa, Geobacillus stearothermophilus
AAPFNGTMMQYFEWYLPDDGTLWTKVANEANNLSSLGITALWLPPAYKGTSRSDVGYGAYDLYDLGEFNQKGTVRTKYGTKAQYLQAIQAAHAAGMQVYADVVFDHKGGADGTEWVDAVEVNPSDRNQVISGTYQIQAWTKFDFPGRGNTYSSFKWRWYHFDGVDWDESRKLSRIYLFEGKAWDWEVDTEFGNYDYLMYADLDMDHPEVTTELKNWGKWYVNTTNIDGFRLDAVKHIKFSFFPDWLSYVRSSTGKPLFTVGEYWSGDINKLHNYITKTDGTVSLFDAPLHYKFYNASKSGGAFDMRTLMTNTLMKDQPTLAVTFVDNHDTEPGQALQSWVDPWFKPLAYAFILTRQEGYPCVFYGDYYGIPQYNIPSLKSKIDPLLIARRDYAYGTQHDYLDHWDIIGWTREGGTEKPGSGLAALITDGPGGSKWMYVGKQHAGKVFYDLTGNRSDTVTINSDGWGEFKVNGGSVSVWVPRKTTVS

SEQ ID NO: 18342 - protein, 488 aa, Geobacillus stearothermophilus
AAPFNGTMMQYFEWYLPDDGTLWTKVANEANNLSSLGITALWLPPAYKGTSRSDVGYGVYDLYDLGEFNQKGTVRTKYGTKAQYLQAIQALHAAGIQVYADVVFDHKGGADGTEWVDAVEVNPSDRNQVISGTYQIQAWTKFDFPGRGNTYSSFKWRWYHFDGVDWDESRKLSRIYLFEGXXKAWDWEVDTEFGNYDYLMYADLDMDHPEVVTELKNWGPWYVLTTNIDGFRLDAVKHIKFQFFPDWLSYVRSSTGKPLFTVGEYWSYDINKLHNYITKTNGTMSLFDAPLHNKFYTASKSGGAFDMRTLMTNTLMKDQPTLAVTFVDNHDTEPGQALQSWVDPWFKPLAYAFILTRQEGYPCVFYGDYYGIPQYNIPSLKSKIDPLLIARRDYAYGTQHDYLDHSDIIGWTREGVTEKPGSGLAALITDGPGGSKWMYVGKQHAGKVFYDLTGNRSDTVTINSDGWGEFKVNGGSVSVWVPRKTTVS

SEQ ID NO: 18343 - protein, 486 aa, Geobacillus stearothermophilus
AAPFNGTMMQYFEWYLPDDGTLWTKVANEANNLSSLGITALWLPPAYKGTSRSDVGYGAYDLYDLGEFNQKGTVRTKYGTKAQYLQAIQAAHAAGMQVYADVVFDHKGGADGTEWVDAVEVNPSDRNQVISGTYQIQAWTKFDFPGRGNTYSSFKWRWYHFDGVDWDESRKLSRIYLFEGKAWDWEVDTEFGNYDYLMYADLDMDHPEVVTELKNWGPWYVLTTNIDGFRLDAVKHIKFQFFPDWLSYVRSSTGKPLFTVGEYWSYDINKLHNYITKTNGTTSLFDAPLHNKFYTASKSGGAFDMRTLMTNTLMKDQPTLAVTFVDNHDTEPGQALQSWVDPWFKPLAYAFILTRQEGYPCVFYGDYYGIPQYNIPSLKSKIDPLLIARRDYAYGTQHDYLDHSDIIGWTREGVTEKPGSGLAALITDGPGGSKWMYVGKQHAGKVFYDLTGNRSDTVTINSDGWGEFKVNGGSVSVWVPRKTTVS

SEQ ID NO: 18344 - protein, 486 aa, Geobacillus stearothermophilus
AAPFNGTMMQYFEWYLPDDGTLWTKVANEANNLSSLGITALWLPPAYKGTSRSDVGYGAYDLYDLGEFNQKGTVRTKYGTKAQYLQAIQAAHAAGMQVYADVVFDHKGGADGTEWVDAVEVNPSDRNQVISGTYQIQAWTHFDFPGRGNTYSSFKWRWYHFDGVDWDESRKLSRIYLFEGKAWDWEVDTEFGNYDYLMYADLDMDHPEVTTELKNWGKWYVNTTNIDGFRLDAVKHIKFSFFPDWLSYVRSSTGKPLFTVGEYWSGDINKLHNYITKTDGTVSLFDAPLHYKFYNASKSGGAFDMRTLMTNTLMKDQPTLAVTFVDNHDTEPGQALQSWVDPWFKPLAYAFILTRQEGYPCVFYGDYYGIPQYNIPSLKSKIDPLLIARRDYAYGTQHDYLDHSDIIGWTREGGTEKPGSGLAALITDGPGGSKWMYVGKQHAGKVFYDLTGNRSDTVTINSDGWGEFKVNGGSVSVWVPRKTTVS

SEQ ID NO: 18345 - protein, 486 aa, Geobacillus stearothermophilus
AAPFNGTMMQYFEWYLPDDGTLWTKVANEANNLSSLGITALWLPPAYKGTSRSDVGYGAYDLYDLGEFNQKGTVRTKYGTKAQYLQAIRAAHAAGMQVYADVVFDHKGGADGTEWVDAVEVNPSDRNQVISGTYQIQAWTKFDFPGRGNTYSSFKFRWYHFDGVDFDESRKLSRIYLFEGKAWDWEVDTEFGNYDYLMYADLDMDYPEVVTELKNWGPWYVLTTNIDGFRLDAVKHIKFSFFPDWLSYVRSSTGKPLFTVGEYWSYDINKLHNYITKTDGTMSLFDAPLHNKFYTASKSGGAFDMRTLMTNTLMKDQPTLAVTFVDNHDTEPGQALQSWVDPWFKPLAYAFILTRQEGYPCVFYGDYYGIPQYNIPSLKSKIDPLLIARRDYAYGTQHDYLDHSDIIGWTREGGTEKPGSGLAALITDGPGGSKWMYVGKQHAGKVFYDLTGNRSDTVTINSDGWGEFKVNGGSVSVWVPRKTTVS

SEQ ID NO: 18346 - protein, 488 aa, Geobacillus stearothermophilus
AAPFNGTMMQYFEWYLPDDGTLWTKVANEANNLSSLGITALWLPPAYKGTSRSDVGYGVYDLYDLGEFNQKGTVRTKYGTKAQYLQAIQAAHAAGMQVYADVVFDHKGGADGTEWVDAVEVNPSDRNQVISGTYQIQAWTKFDFPGRGNTYSSFKWRWYHFDGVDWDESRKLSRIYLFEGXXKAWDWEVDTEFGNYDYLMYADLDMDHPEVVTELKNWGPWYVLTTNIDGFRLDAVKHIKFQFFPDWLSYVRSSTGKPLFTVGEYWSYDINKLHNFITKTNGTMSLFDAPLHNKFYTASKSGGAFDMRTLMTNTLMKDQPTLAVTFVDNHDTEPGQALQSWVDPWFKPLAYAFILTRQEGYPCVFYGDYYGIPQYNIPSLKSKIDPLLIARRDYAYGTQHDYLDHSDIIGWTREGVTEKPGSGLAAMITDGPGGSKWMYVGKQHAGKVFYDLTGNRSDTVTINSDGWGEFKVNGGSVSVWVPRKTTVS

SEQ ID NO: 18347 - protein, 486 aa, Geobacillus stearothermophilus
AAPFNGTMMQYFEWYLPDDGTLWTKVANEANNLSSLGITALWLPPAYKGTSRSDVGYGAYDLYDLGEFNQKGTVRTKYGTKAQYLQAIQAAHAAGMQVYADVVFDHKGGADGTEWVDAVEVNPSDRNQVISGTYQIQAWTKFDFPGRGNTYSSFKWRWYHFDGVDWDESRKLSRIYLFEGKAWDWEVDTEFGNYDYLMYADLDMDHPEVTTELKNWGKWYVNTTNIDGFRLDAVKHIKFSFFPDWLSYVRSSTGKPLFTVGEYWSGDINKLHNYITKTDGTVSLFDAPLHYKFYNASKSGGAFDMRTLMTNTLMKDQATLAVTFVDNHDTEPGQALQSWVDPWFKPLAYAFILTRQEGYPCVFYGDYYGIPQYNIPSLKSKIDPLLIARRDYAYGTQHDYLDHSDIIGWTREGGTEKPGSGLAALITDGPGGSKWMYVGKQHAGKVFYDLTGNRSDTVTINSDGWGEFKVNGGSVSVWVPRKTTVS

SEQ ID NO: 18348 - protein, 488 aa, Geobacillus stearothermophilus
AAPFNGTMMQYFEWYLPDDGTLWTKVANEANNLSSLGITALWLPPAYKGTSRSDVGYGAYDLYDLGEFNQKGTVRTKYGTKAQYLQAIQAAHAAGMQVYADVVFDHKGGADDTEWVDAVEVNPSDRNQVISGTYQIQAWTKFDFPGRGNTYSSFKWRWYHFDGVDWDESRKLSRIYLFEGIGKAWDWEVDTENGNYDYLMYADLDMDHPEVVTELKNWGPWYVLTTNIDGFRLDAVKHIKFSFFPDWLSYVRSSTGKPLFTVGEYWSYDINKLHNYITKTNGTMSLFDAPLHNKFYTASKSGGAFDMRTLMTNTLMKDQPTLAVTFVDNHDTEPGQALQSWVDPWFKPLAYAFILTRQEGYPCVFYGDYYGIPQYNIPSLKSKIDPLLIARRDYAYGTQHDYLDHSDIIGWTREGVTEKPGSGLAALITDGPGGSKWMYVGKQHAGKVFYDLTGNRSDTVTINSDGWGEFKVNGGSVSVWVPRKTTVS

SEQ ID NO: 18349 - protein, 488 aa, Geobacillus stearothermophilus
AAPFNGTMMQYFEWYLPDDGTLWTKVANEANNLSSLGITALWLPPAYKGTSRSDVGYGAYDLYDLGEFNQKGTVRTKYGTKAQYLQAIQAAHAAGMQVYADVVFDHKGGADGTEWVDAVEVNPSDRNQVISGTYQIQAWTKFDFPGRGNTYSSFKWRWYHFDGVDWDESRKLSRIYLFEGXXKAWDWEVDTEFGNYDYLMYADLDMDHPEVVTELKNWGPWYVLTTNIDGFRLDAVKHIKFQFFPDWLSYVRSSTGKPLFTVGEYWSYDINKLHNYITKTNGTTSLFDAPLHNKFYTASKSGGAFDMRTLMTNTLMKDQPTLAVTFVDNHDTEPGQALQSWVDPWFKPLAYAFILTRQEGYPCVFYGDYYGIPQYNIPSLKSKIDPLLIARRDYAYGTQHDYLDHSDIIGWTREGVTEKPGSGLAALITDGPGGSKWMYVGKQHAGKVFYDLTGNRSDTVTINSDGWGEFKVNGGSVSVWVPRKTTVS

SEQ ID NO: 18350 - protein, 486 aa, Geobacillus stearothermophilus
AAPFNGTMMQYFEWYLPDDGTLWTKVANEANNLSSLGITALWLPPAYKGTSRSDVGYGAYDLYDLGEFNQKGTVRTKYGTKAQYLQAIQAAHAAGMQVYADVVFDHKGGADGTEWVDAVEVNPSDRNQVISGTYQIQAWTKFDFPGRGNTYSSFKWRWYHFDGVDWDESRKLSRIYLFEGKAWDWEVDTEFGNYDYLMYADLDMDHPEVTTELKNWGKWYVNTTNIDGFRLDAVKHIKFSFFPDWLSYVRSSTGKPLFTVGEYWSGDINKLHNYITKTDGTVSLFDAPLHYKFYNASKSGGAFDMRWLMTNTLMKDQPTLAVTFVDNHDTEPGQALQSWVDPWFKPLAYAFILTRQEGYPCVFYGDYYGIPQYNIPSLKSKIDPLLIARRDYAYGTQHDYLDHSDIIGWTREGGTEKPGSGLAALITDGPGGSKWMYVGKQHAGKVFYDLTGNRSDTVTINSDGWGEFKVNGGSVSVWVPRKTTVS

SEQ ID NO: 18351 - protein, 486 aa, Geobacillus stearothermophilus
AAPFNGTMMQYFEWYLPDDGTLWTKVANEANNLSSLGITALWLPPAYKGISRSDVGYGAYDLYDLGEFNQKGTVRTKYGTKAQYLQAIQAAHAAGMQVYADVVFDHKGGADGTEWVDAVEVNPSDRNQVISGTYQIQAWTKFDFPGRGNTYSSFKWRWYHFDGVDWDESRKLSRIYLFEGKAWDWEVDTEFGNYDYLMYADLDMDHPEVTTELKNWGKWYVNTTNIDGFRLDAVKHIKFSFFPDWLSYVRSSTGKPLFTVGEYWSGDINKLHNYITKTDGTVSLFDAPLHYKFYNASKSGGAFDMRTLMTNTLMKDQPTLAVTFVDNHDTEPGQALQSWVDPWFKPLAYAFILTRQEGYPCVFYGDYYGIPQYNIPSLKSKIDPLLIARRDYAYGTQHDYLDHSDIIGWTREGGTEKPGSGLAALITDGPGGSKWMYVGKQHAGKVFYDLTGNRSDTVTINSDGWGEFKVNGGSVSVWVPRKTTVS

SEQ ID NO: 18352 - protein, 488 aa, Geobacillus stearothermophilus
AAPFNGTMMQYFEWYLPDDGTLWTKVANEANNLSSLGITALWLPPAYKGTSRSDVGYGAYDLYDLGEFNQKGTVRTKYGTKAQYLQAIRAAHAAGMQVYADVVFDHKGGADGTEWVDAVEVNPSDRNQVISGTYQIQAWTKFDFPGRGNTYSSFKWRWYHFDGVDWDESRKLSRIYLFEGXXKAWDWEVDTEFGNYDYLMYADLDMDHPEVVTELKNWGPWYVLTTNIDGFRLDAVKHIKFSFFPDWLSYVRSSTGKPLFTVGEYWSYDINKLKNYITKTNGTMSLFDAPLHNKFYTASKSGGAFDMRTLMTNTLMKDQPTLAVTFVDNHDTEPGQALQSWVDPWFKPLAYAFILTRQEGYPCVFYGDYYGIPQYNIPSLKSKIDPLLIARRDYAYGTQHDYLDHSDIIGWTREGVTEKPGSGLAALITDGPGGSKWMYVGKQHAGKVFYDLTGNRSDTVTINSDGWGEFKVNGGSVSVWVPRKTTVS

SEQ ID NO: 18353 - protein, 486 aa, Geobacillus stearothermophilus
AAPFNGTMMQYFEWYLPDDGTLWTKVANEANNLSSLGITALWLPPAYKGTSRSDVGYGAYDLYDLGEFNQKGTVRTKYGTKAQYLQAIQAAHAAGMQVYADVVFDHKGGADGTEWVDAVEVNPSDRNQVISGTYQIQAWTKFDFPGRGNTYSSFKWRWYHFDGVDWDESRKLSRIYLFEGKAWDWEVDTEFGNYDYLMYADLDMDHPEVTTELKNWGKWYVNTTNIDGFRLDAVKHIKFSFFPDWLSYVRSSTGKPLFTVGEYWSGDINKLHNYITKTDGTVSLFDAPLHYKFYNASKSGGAFDMRTLMTNTLMKDQPTLAVTFVDNHDTEPGQALQSWVDPWFKPLAYAFILTRQEGYPCVFYGDYYGIPQYNIPSLKHKIDPLLIARRDYAYGTQHDYLDHSDIIGWTREGGTEKPGSGLAALITDGPGGSKWMYVGKQHAGKVFYDLTGNRSDTVTINSDGWGEFKVNGGSVSVWVPRKTTVS

SEQ ID NO: 18354 - protein, 488 aa, Geobacillus stearothermophilus
AAPFNGTMMQYFEWYLPDDGTLWTKVANEANNLSSLGITALWLPPAYKGTSRSDVGYGAYDLYDLGEFNQKGTVRTKYGTKAQYLQAIRAAHAAGMQVYADVVFDHKGGADGTEWVDAVEVNPSDRNQVISGTYQIQAWTKFDFPGRGNTYSSFKWRWYHFDGVDWDESRKLSRIYLFEGXXKAWDWEVDTEFGNYDYLMYADLDMDHPEVVTELKNWGPWYVLTTNIDGFRLDAVKHIKFSFFPDWLSYVRSSTGKPLFTVGEYWSYDINKLHNFITKTNGTMSLFDAPLHNKFYTASKSGGAFDMRTLMTNTLMKDQPTLAVTFVDNHDTEPGQALQSWVDPWFKPLAYAFILTRQEGYPCVFYGDYYGIPQYNIPSLKSKIDPLLIARRDYAYGTQHDYLDHSDIIGWTREGVTEKPGSGLAALITDGPGGSKWMYVGKQHAGKVFYDLTGNRSDTVTINSDGWGEFKVNGGSVSVWVPRKTTVS

SEQ ID NO: 18355 - protein, 488 aa, Geobacillus stearothermophilus
AAPFNGTMMQYFEWYLPDDGTLWTKVANEANNLSSLGITALWLPPAYKGTSRSDVGYGAYDLYDLGEFNQKGTVRTKYGTKAQYLQAIQAAHAAGMQVYADVVFDHKGGADGTEWVDAVEVNPSDRNQVISGTYQIQAWTKFDFPGRGNTYSSFKWRWYHFDGVDWDESRKLSRIYLFEGXXKAWDWEVDTEFGNYDYLMYADLDMDYPEVVTELKNWGPWYVLTTNIDGFRLDAVKHIKFQFFPDWLSYVRSSTGKPLFTVGEYWSYDINKLHNYITKTNGTMSLFDAPLHNKFYTASKSGGAFDMRTLMTNTLMKDQPTLAVTFVDNHDTEPGQALQSWVDPWFKPLAYAFILTRQEGYPCVFYGDYYGIPQYNIPSLKSKIDPLLIARRDYAYGTQHDYLDHSDIIGWTREGVTEKPGSGLAALITDGPGGSKWMYVGKQHAGKVFYDLTGNRSDTVTINSDGWGEFKVNGGSVSVWVPRKTTVS

SEQ ID NO: 18356 - protein, 488 aa, Geobacillus stearothermophilus
AAPFNGTMMQYFEWYLPDDGTLWTKVANEANNLSSLGITALWLPPAYKGTSRSDVGYGAYDLYDLGEFNQKGTVRTKYGTKAQYLQAIQAAHAAGMQVYADVVFDHKGGADGTEWVDAVEVNPSDRNQVISGTYQIQAWTKFDFPGRGNTYSSFKWRWYHFDGVDWDESRKLSRIYLFEGXXKAWDWEVDTEFGNYDYLMYADLDMDHPEVVTELKNWGPWYVLTTNIDGFRLDAVKHIKFQFFPDWLSYVRSSTGKPLFTVGEYWSYDINKLHNFITKTNGTMSLFDAPLHNKFYTASKSGGAFDMRTLMTNTLMKDQPTLAVTFVDNHDTEPGQALQSWVDPWFKPLAYAFILTRQEGYPCVFYGDYYGIPQYNIPSLKSKIDPLLIARRDYAYGTQHDYLDHSDIIGWTREGVTEKPGSGLAALITDGPGGSKWMYVGKQHAGKVFYDLTGNRSDTVTINSDGWGEFKVNGGSVSVWVPRKTTVS

SEQ ID NO: 18357 - protein, 488 aa, Geobacillus stearothermophilus
AAPFNGTMMQYFEWYLPDDGTLWTKVANEANNLSSLGITALWLPPAYKGTSRSDVGYGAYDLYDLGEFNQKGTVRTKYGTKAQYLQAIRAAHAAGMQVYADVVFDHKGGADGTEWVDAVEVNPSDRNQVISGTYQIQAWTKFDFPGRGNTYSSFKWRWYHFDGVDWDESRKLSRIYLFEGIGKAWDWEVDTENGNYDYLMYADLDMDHPEVVTELKNWGPWYVLTTNIDGFRLDAVKHIKFSFFPDWLSYVRSSTGKPLFTVGEYWSYDINKLHNYITKTNGTMSLFDAPLHNKFYTASKSGGAFDMRTLMTNTLMKDQPTLAVTFVDNHDTEPGQALQSWVDPWFKPLAYAFILTRQEGYPCVFYGDYYGIPQYNIPSLKSKIDPLLIARRDYAYGTQHDYLDHSDIIGWTREGVTEKPGSGLAALITDGPGGSKWMYVGKQHAGKVFYDLTGNRSDTVTINSDGWGEFKVNGGSVSVWVPRKTTVS

SEQ ID NO: 18358 - protein, 486 aa, Geobacillus stearothermophilus
AAPFNGTMMQYFEWYLPDDGTLWTKVANEANNLSSLGITALWLPPAYKGTSRSDVGYGAYDLYDLGEFNQKGTVRTKYGTKAQYLQAIQAAHAAGMQVYADVVFDHKGGADGTEWVDAVEVNPSDRNQVISGTYQIQAWTKFDFPGRGNTYSSFKWRWYHFDGVDWDESRKLNRIYLFEGKAWDWEVDTEFGNYDYLMYADLDMDHPEVTTELKNWGKWYVNTTNIDGFRLDAVKHIKFSFFPDWLSYVRSSTGKPLFTVGEYWSGDINKLHNYITKTDGTVSLFDAPLHYKFYNASKSGGAFDMRTLMTNTLMKDQPTLAVTFVDNHDTEPGQALQSWVDPWFKPLAYAFILTRQEGYPCVFYGDYYGIPQYNIPSLKSKIDPLLIARRDYAYGTQHDYLDHSDIIGWTREGGTEKPGSGLAALITDGPGGSKWMYVGKQHAGKVFYDLTGNRSDTVTINSDGWGEFKVNGGSVSVWVPRKTTVS

SEQ ID NO: 18359 - protein, 488 aa, Geobacillus stearothermophilus
AAPFNGTMMQYFEWYLPDDGTLWTKVADEANNLSSLGITALWLPPAYKGTSRSDVGYGVYDLYDLGEFNQKGTVRTKYGTKAQYLEAIQAAHAAGMQVYADVVFDHKGGADGTEWVDAVEVNPSDRNQEISGTYQIQAWTKFDFPGRGNTYSSFKWRWYHFDGVDWDESRQLSRIYKFRGIGKAWDWEVDTENGNYDYLMYADLDMDHPEVVTELKNWGKWYVDTTNIDGFRLDAVKHIKFSFFPDWLSYVRSQTGKPLFTVGEYWSYDIDKLHNYITKTDGTMSLFDAPLHNKFYTASKSGGAFDMQTLMTNTLMKDQPTLAVTFVDNHDTEPGQALQSWVDPWFKPLAYAFILTRQEGYPCVFYGDYYGIPQYNIPSLKSQIDPLLIARRDYAYGTQHDYLDHSDIIGWTREGVTEKPGSGLAALITDGPGGSKWMYVGKQHAGQVFYDLTGNRSDTVTINSDGWGEFKVNGGSVSVWVPQKTTVS

SEQ ID NO: 18360 - protein, 488 aa, Geobacillus stearothermophilus
AAPFNGTMMQYFEWYLPDDGTLWTKVANEANNLSSLGITALWLPPAYKGTSRSDVGYGVYDLYDLGEFNQKGTVRTKYGTKAQYLQAIQAAHAAGMQVYADVVFDHKGGADGTEWVDAVEVNPSDRNQVISGTYQIQAWTKFDFPGRGNTYSSFKWRWYHFDGVDWDESRKLSRIYLFEGXXKAWDWEVDTEFGNYDYLMYADLDMDHPEVVTELKNWGPWYVLTTNIDGFRLDAVKHIKFQFFPDWLSYVRSSTGKPLFTVGEYWSYDINKLHNYITKTNGTMSLFDAPLHNKFYTASKSGGAFDMRTLMTNTLMKDQPTLAVTFVDNHDTEPGQALQSWVDPWFKPLAYAFILTRQEGYPCVFYGDYYGIPQYXXPSLKSKIDPLLIARRDYAYGTQHDYLDHSDIIGWTREGVTEKPGSGLAALITDGPGGSKWMYVGKQHAGKVFYDLTGNRSDTVTINSDGWGEFKVNGGSVSVWVPRKTTVS

SEQ ID NO: 18361 - protein, 486 aa, Geobacillus stearothermophilus
AAPFNGTMMQYFEWYLPDDGTLWTKVANEANNLSSLGITALWLPPAYKGTSRSDVGYGVYDLYDLGEFNQKGTVRTKYGTKAQYLQAIQALHAAGLQVYADVVFDHKGGADGTEWVDAVEVNPSDRNQVISGTYQIQAWTKFDFPGRGNTYSSFKWRWYHFDGVDWDESRKLSRIYLFEGKAWDWEVDTEFGNYDYLMYADLDMDHPEVVTELKNWGPWYVLTTNIDGFRLDAVKHIKFQFFPDWLSYVRSSTGKPLFTVGEYWSYDINKLHNYITKTNGTMSLFDAPLHNKFYTASKSGGAFDMRTLMTNTLMKDQPTLAVTFVDNHDTEPGQALQSWVDPWFKPLAYAFILTRQEGYPCVFYGDYYGIPQYNIPSLKSKIDPLLIARRDYAYGTQHDYLDHSDIIGWTREGVTEKPGSGLAALITDGPGGSKWMYVGKQHAGKVFYDLTGNRSDTVTINSDGWGEFKVNGGSVSVWVPRKTTVS

SEQ ID NO: 18362 - protein, 486 aa, Geobacillus stearothermophilus
AAPFNGTMMQYFEWYLPDDGTLWTKVANEANNLSSLGITALWLPPAYKGTSRSDVGYGAYDLYDLGEFNQKGTVRTKYGTKAQYLQAIRAAHAAGMQVYADVVFDHKGGADGTEWVDAVEVNPSDRNQVISGTYQIQAWTKFDFPGRGNTYSSFKWRWYHFDGVDWDESRKLSRIYLFEGKAWDWEVDTEFGNYDYLMYADLDMDHPEVVTELKNWGPWYVLTTNIDGFRLDAVKHIKFSFFPDWLSYVRSSTGKPLFTVGEYWSYDINKLHNFITKTNGTMSLFDAPLHNKFYTASKSGGAFDMRTLMTNTLMKDQPTLAVTFVDNHDTEPGQALQSWVDPWFKPLAYAFILTRQEGYPCVFYGDYYGIPQYNIPSLKSKIDPLLIARRDYAYGTQHDYLDHSDIIGWTREGVTEKPGSGLAALITDGPGGSKWMYVGKQHAGKVFYDLTGNRSDTVTINSDGWGEFKVNGGSVSVWVPRKTTVS

SEQ ID NO: 18363 - protein, 486 aa, Geobacillus stearothermophilus
AAPFNGTMMQYFEWYLPDDGTLWTKVANEANNLSSLGITALWLPPAYKGTSRSDVGYGAYDLYDLGEFNQKGTVRTKYGTKAQYLQAIRAAHAAGMQVYADVVFDHKGGADGTEWVDAVEVNPSDRNQVISGTYQIQAWTKFDFPGRGNTYSSFKWRWYHFDGVDWDESRKLSRIYLFEGKAWDWEVDTEFGNYDYLMYADLDMDYPEVVTELKNWGPWYVLTTNIDGFRLDAVKHIKFSFFPDWLSYVRSSTGKPLFTVGEYWSYDINKLHNYITKTNGTMSLFDAPLHNKFYTASKSGGAFDMRTLMTNTLMKDQPTLAVTFVDNHDTEPGQALQSWVDPWFKPLAYAFILTRQEGYPCVFYGDYYGIPQYNIPSLKSKIDPLLIARRDYAYGTQHDYLDHSDIIGWTREGVTEKPGSGLAALITDGPGGSKWMYVGKQHAGKVFYDLTGNRSDTVTINSDGWGEFKVNGGSVSVWVPRKTTVS

SEQ ID NO: 18364 - protein, 486 aa, Geobacillus stearothermophilus
AAPFNGTMMQYFEWYLPDDGTLWTKVANEANNLSSLGITALWLPPAYKGTSRSDVGYGAYDLYDLGEFNQKGTVRTKYGTKAQYLQAIQAAHAAGMQVYADVVFDHKGGADATEWVDAVEVNPSDRNQVISGTYQIQAWTKFDFPGRGNTYSSFKWRWYHFDGVDWDESRKLSRIYLFEGKAWDWEVDTEFGNYDYLMYADLDMDHPEVTTELKNWGKWYVNTTNIDGFRLDAVKHIKFSFFPDWLSYVRSSTGKPLFTVGEYWSGDINKLHNYITKTDGTVSLFDAPLHYKFYNASKSGGAFDMRTLMTNTLMKDQPTLAVTFVDNHDTEPGQALQSWVDPWFKPLAYAFILTRQEGYPCVFYGDYYGIPQYNIPSLKSKIDPLLIARRDYAYGTQHDYLDHSDIIGWTREGGTEKPGSGLAALITDGPGGSKWMYVGKQHAGKVFYDLTGNRSDTVTINSDGWGEFKVNGGSVSVWVPRKTTVS

SEQ ID NO: 18365 - protein, 486 aa, Geobacillus stearothermophilus
AAPFNGTMMQYFEWYLPDDGTLWTKVANEANNLSSLGITALWLPPAYKGTSRSDVGYGAYDLYDLGEFNQKGTVRTKYGTKAQYLQAIQAAHAAGMQVYADVVFDHKGGADGTEWVDAVEVNPSDRNQVISGTYQIQAWTKFDFPGRGNTYSSFKWRWYHFDGVDWDESRKLSRIYLFEGKAWDWEVDTEFGNYDYLMYADLDMDHPEVVTELKNWGPWYVLTTNIDGFRLDAVKHIKFQFFPDWLSYVRSSTGKPLFTVGEYWSYDINKLHNFITKTNGTMSLFDAPLHNKFYTASKSGGAFDMRTLMTNTLMKDQPTLAVTFVDNHDTEPGQALQSWVDPWFKPLAYAFILTRQEGYPCVFYGDYYGIPQYNIPSLKSKIDPLLIARRDYAYGTQHDYLDHSDIIGWTREGVTEKPGSGLAALITDGPGGSKWMYVGKQHAGKVFYDLTGNRSDTVTINSDGWGEFKVNGGSVSVWVPRKTTVS

SEQ ID NO: 18366 - protein, 488 aa, Geobacillus stearothermophilus
AAPFNGTMMQYFEWYLPDDGTLWTKVAKEANNLSSLGITALWLPPAYKGTSRSDVGYGVYDLYDLGEFNQKGTVRTKYGTKAQYLQAIQAAHAAGMRVYADVVFDHKGGADGTEWVDAVEVNPSDRNQEISGTYQIQAWTKFDFPGRGNTYSSFKWRWYHFDGVDWDESRKLSRIYKFRGIGKAWDWEVDTENGNYDYLMYADLDMDHPEVVTELKNWGKWYVKTTNIDGFRLDAVKHIKFSFFPDWLSYVRSQTGKPLFTVGEYWSYDINKLHNYITKTNGTMSLFDAPLHNKFYTASKSGGAFNMRTLMTNTLMKNRPTLAVTFVDNHDTEPGQALQSWVDPWFKPLAYAFILTREEGYPCVFYGDYYGIPQYNIPSLKSKIDPLLIARRDYAYGTQHDYLDHSDIIGWTREGVTEKPGSGLAALITDGPGGSKWMYVGKEHAGKVFYDLTGNRSDTVTINSDGWGEFKVNGGSVSVWVPRKTTVS

SEQ ID NO: 18367 - protein, 486 aa, Geobacillus stearothermophilus
AAPFNGTMMQYFEWYLPDDGTLWTKVANEANNLSSLGITALWLPPAYKGTSRSDVGYGAYDLYDLGEFNQKGTVRTKYGTKAQYLQAIQAAHAAGMQVYADVVFDHKGGADGTEWVDAVEVNPSDRNQVISGTYQIQAWTKFDFPGRGNTYSSFKWYWYHFDGVDWDESRKLSRIYLFEGKAWDWEVDTEFGNYDYLMYADLDMDHPEVVTELKNWGPWYVLTTNIDGFRLDAVKHIKFQFFPDWLSYVRSSTGKPLFTVGEYWSYDINKLHNYITKTNGTMSLFDAPLHNKFYTASKSGGAFDMRTLMTNTLMKDQPTLAVTFVDNHDTEPGQALQSWVDPWFKPLAYAFILTRQEGYPCVFYGDYYGIPQYNIPSLKSKIDPLLIARRDYAYGTQHDYLDHSDIIGWTREGVTEKPGSGLAALITDGPGGSKWMYVGKQHAGKVFYDLTGNRSDTVTINSDGWGEFKVNGGSVSVWVPRKTTVS

SEQ ID NO: 18368 - protein, 488 aa, Geobacillus stearothermophilus
AAPFNGTMMQYFEWYLPDDGTLWTKVANEANNLSSLGITALWLPPAYKGTSRSDVGYGVYDLYDLGEFNQKGTVRTKYGTKAQYLQAIQALHAAGIQVYADVVFDHKGGADGTEWVDAVEVNPSDRNQVISGTYQIQAWTKFDFPGRGNTYSSFKWRWYHFDGVDWDESRKLSRIYEFRGIGKAWDWEVDTENGNYDYLMYADLDMDHPEVVTELKNWGPWYVLTTNIDGFRLDAVKHIKFQFFPDWLSYVRSSTGKPLFTVGEYWSYDINKLHNYITKTNGTMSLFDAPLHNKFYTASKSGGAFDMRTLMTNTLMKDQPTLAVTFVDNHDTEPGQALQSWVDPWFKPLAYAFILTRQEGYPCVFYGDYYGIPQYNIPSLKSKIDPLLIARRDYAYGTQHDYLDHSDIIGWTREGVTEKPGSGLAALITDGPGGSKWMYVGKQHAGKVFYDLTGNRSDTVTINSDGWGEFKVNGGSVSVWVPRKTTVS

SEQ ID NO: 18369 - protein, 486 aa, Geobacillus stearothermophilus
AAPFNGTMMQYFEWYLPDDGTLWTKVANEANNLSSLGITALWLPPAYKGTSRSDVGYGVYDLYDLGEFNQKGTVRTKYGTKAQYLQAIQAAHAAGMQVYADVVFDHKGGADGTEWVDAVEVNPSDRNQVISGTYQIQAWTKFDFPGRGNTYSSFKWRWYHFDGVDWDESRKLSRIYLFEGKAWDWEVDTEFGNYDYLMYADLDMDHPEVVTELKNWGPWYVLTTNIDGFRLDAVKHIKFQFFPDWLSYVRSSTGKPLFTVGEYWSYDINKLHNFITKTNGTMSLFDAPLHNKFYTASKSGGAFDMRTLMTNTLMKDQPTLAVTFVDNHDTEPGQALQSWVDPWFKPLAYAFILTRQEGYPCVFYGDYYGIPQYNIPSLKSKIDPLLIARRDYAYGTQHDYLDHSDIIGWTREGVTEKPGSGLAAMITDGPGGSKWMYVGKQHAGKVFYDLTGNRSDTVTINSDGWGEFKVNGGSVSVWVPRKTTVS

SEQ ID NO: 18370 - protein, 488 aa, Geobacillus stearothermophilus
AAPFNGTMMQYFEWYLPDDGTLWTKVANEANNLSSLGITALWLPPAYKGTSRSDVGYGVYDLYDLGEFNQKGTVRTKYGTKAQYLQAIQAAHAAGMQVYADVVFDHKGGADGTEWVDAVEVNPSDRNQVISGTYQIQAWTKFDFPGRGNTYSSFKWRWYHFDGVDWDESRKLSRIYLFEGIGKAWDWEVDTENGNYDYLMYADLDMDHPEVVTELKNWGPWYVLTTNIDGFRLDAVKHIKFQFFPDWTSYVRSSTGKPLFTVGEYWSYDINKLHNYITKTNGTMSLFDAPLHNKFYTASKSGGAFDMRTLMTNTLMKDQPTLAVTFVDNHDTEPGQALQSWVDPWFKPLAYAFILTRQEGYPCVFYGDYYGIPQYNIPSLKSKIDPLLIARRDYAYGTQHDYLDHSDIIGWTREGVTEKPGSGLAALITDGPGGSKWMYVGKQHAGKVFYDLTGNRSDTVTINSDGWGEFKVNGGSVSVWVPRKTTVS

SEQ ID NO: 18371 - protein, 486 aa, Geobacillus stearothermophilus
AAPFNGTMMQYFEWYLPDDGTLWTKVANEANNLSSLGITALWLPPAYKGTSRSDVGYGAYDLYDLGEFNQKGTVRTKYGTKAQYLQAIQAAHAAGMQVYADVVFDHKGGADGTEWVDAVEVNPSDRNQVISGTYQIQAWTKFDFPGRGNTYSSFKWRWYHFDGVDWDESRKLSRIYLFEGKAWDWPVDTEFGNYDYLMYADLDMDHPEVTTELKNWGKWYVNTTNIDGFRLDAVKHIKFSFFPDWLSYVRSSTGKPLFTVGEYWSGDINKLHNYITKTDGTVSLFDAPLHYKFYNASKSGGAFDMRTLMTNTLMKDQPTLAVTFVDNHDTEPGQALQSWVDPWFKPLAYAFILTRQEGYPCVFYGDYYGIPQYNIPSLKSKIDPLLIARRDYAYGTQHDYLDHSDIIGWTREGGTEKPGSGLAALITDGPGGSKWMYVGKQHAGKVFYDLTGNRSDTVTINSDGWGEFKVNGGSVSVWVPRKTTVS

SEQ ID NO: 18372 - protein, 488 aa, Geobacillus stearothermophilus
AAPFNGTMMQYFEWYLPDDGTLWTKVANEANNLSSLGITALWLPPAYKGTSRSDVGYGAYDLYDLGEFNQKGTVRTKYGTKAQYLQAIRAAHAAGMQVYADVVFDHKGGADGTEWVDAVEVNPSDRNQVISGTYQIQAWTKFDFPGRGNTYSSFKWRWYHFDGVDWDESRKLSRIYLFEGXXKAWDWEVDTEFGNYDYLMYADLDMDHPEVVTELKNWGPWYVLTTNIDGFRLDAVKHIKFSFFPDWLSYVRSSTGKPLFTVGEYWSYEINKLHNYITKTNGTMSLFDAPLHNKFYTASKSGGAFDMRTLMTNTLMKDQPTLAVTFVDNHDTEPGQALQSWVDPWFKPLAYAFILTRQEGYPCVFYGDYYGIPQYNIPSLKSKIDPLLIARRDYAYGTQHDYLDHSDIIGWTREGVTEKPGSGLAALITDGPGGSKWMYVGKQHAGKVFYDLTGNRSDTVTINSDGWGEFKVNGGSVSVWVPRKTTVS

SEQ ID NO: 18373 - protein, 488 aa, Geobacillus stearothermophilus
AAPFNGTMMQYFEWYLPDDGTLWTKVADEANNLSSLGITALWLPPAYKGTSRSDVGYGVYDLYDLGEFNQKGTVRTKYGTKAQYLQAIQAAHAAGMRVYADVVFDHKGGADGTEWVDAVEVNPSDRNQEISGTYQIQAWTKFDFPGRGNTYSSFKWRWYHFDGVDWDESRKLSRIYKFRGIGKAWDWEVDTENGNYDYLMYADLDMDHPEVVTELKNWGKWYVDTTNIDGFRLDAVKHIKFEFFPDWLSYVRSQTGKPLFTVGEYWSYDINKLHNYITKTNGTMSLFDAPLHNKFYTASKSGGAFDMQTLMTNTLMKDRPTLAVTFVDNHDTEPGQALQSWVDPWFKPLAYAFILTREEGYPCVFYGDYYGIPQYNIPSLKSKIDPLLIARRDYAYGTQHDYLDHSDIIGWTREGVTEKPGSGLAALITDGPGGSKWMYVGKEHAGKVFYDLTGNRSDTVTINSDGWGEFKVNGGSVSVWVPRKTTVS

SEQ ID NO: 18374 - protein, 488 aa, Geobacillus stearothermophilus
AAPFNGTMMQYFEWYLPDDGTLWTKVANEANNLSSLGITALWLPPAYKGTSRSDVGYGAYDLYDLGEFNQKGTVRTKYGTKAQYLQAIRAAHAAGMQVYADVVFDHKGGADGTEWVDAVEVNPSDRNQVISGTYQIQAWTKFDFPGRGNTYSSFKWRWYHFDGVDWDESRKLSRIYLFEGXXKAWDWEVDTEFGNYDYLMYADLDMDYPEVVTELKNWGPWYVLTTNIDGFRLDAVKHIKFSFFPDWLSYVRSSTGKPLFTVGEYWSYDINKLHNYITKTNGTMSLFDAPLHNKFYTASKSGGAFDMRTLMTNTLMKDQPTLAVTFVDNHDTEPGQALQSWVDPWFKPLAYAFILTRQEGYPCVFYGDYYGIPQYNIPSLKSKIDPLLIARRDYAYGTQHDYLDHSDIIGWTREGVTEKPGSGLAALITDGPGGSKWMYVGKQHAGKVFYDLTGNRSDTVTINSDGWGEFKVNGGSVSVWVPRKTTVS

SEQ ID NO: 18375 - protein, 486 aa, Geobacillus stearothermophilus
AAPFNGTMMQYFEWYLPDDGTLWTKVANEANNLSSLGITALWLPPAYKGTSRSDVGYGAYDLYDLGEFNQKGTVRTKYGTKAQYLQAIQAAHAAGMQVYADVVFDHKGGADGTEWVDAVEVNPSDRNQVISGTYQIQAWTKFDFPGRGNTYSSFKWRWYHFDGVDWDESRKLSRIYLFEGKAWDWEVDTEFGNYDYLMYADLDMDHPEVVTELKNWGPWYVLTTNIDGFRLDAVKHIKFQFFPDWLSYVRSSTGKPLFTVGEYWSYDINKLKNYITKTNGTMSLFDAPLHNKFYTASKSGGAFDMRTLMTNTLMKDQPTLAVTFVDNHDTEPGQALQSWVDPWFKPLAYAFILTRQEGYPCVFYGDYYGIPQYNIPSLKSKIDPLLIARRDYAYGTQHDYLDHSDIIGWTREGVTEKPGSGLAALITDGPGGSKWMYVGKQHAGKVFYDLTGNRSDTVTINSDGWGEFKVNGGSVSVWVPRKTTVS

SEQ ID NO: 18376 - protein, 486 aa, Geobacillus stearothermophilus
AAPFNGTMMQYFEWYLPDDGTLWTKVANEANNLSSLGITALWLPPAYKGTSRSDVGYGAYDLYDLGEFNQKGTVRTKYGTKAQYLQAIQAAHAAGMQVYADVVFDHKGGADGTEWVDAVEVNPSDRNQVISGTYQIQAWTKFDFPGRGNTYSSFKWRWYHFDGVDWDESRKLSRIYLFEGKAWDWEVDTEFGNYDYLMYADLDMDHPEVTTELKNWGKWYVNNTNIDGFRLDAVKHIKFSFFPDWLSYVRSSTGKPLFTVGEYWSGDINKLHNYITKTDGTVSLFDAPLHYKFYNASKSGGAFDMRTLMTNTLMKDQPTLAVTFVDNHDTEPGQALQSWVDPWFKPLAYAFILTRQEGYPCVFYGDYYGIPQYNIPSLKSKIDPLLIARRDYAYGTQHDYLDHSDIIGWTREGGTEKPGSGLAALITDGPGGSKWMYVGKQHAGKVFYDLTGNRSDTVTINSDGWGEFKVNGGSVSVWVPRKTTVS

SEQ ID NO: 18377 - protein, 486 aa, Geobacillus stearothermophilus
AAPFNGTMMQYFEWYLPDDGTLWTKVANEANNLSSLGITALWLPPAYKGTSRSDVGYGAYDLYDLGEFNQKGTVRTKYGTKAQYLQAIRAAHAAGMQVYADVVFDHKGGADGTEWVDAVEVNPSDRNQVISGTYQIQAWTKFDFPGRGNTYSSFKWRWYHFDGVDWDESRKLSRIYLFEGKAWDWEVDTEFGNYDYLMYADLDMDHPEVVTELKNWGPWYVLTTNIDGFRLDAVKHIKFSFFPDWLSYVRSSTGKPLFTVGEYWSYEINKLHNYITKTNGTMSLFDAPLHNKFYTASKSGGAFDMRTLMTNTLMKDQPTLAVTFVDNHDTEPGQALQSWVDPWFKPLAYAFILTRQEGYPCVFYGDYYGIPQYNIPSLKSKIDPLLIARRDYAYGTQHDYLDHSDIIGWTREGVTEKPGSGLAALITDGPGGSKWMYVGKQHAGKVFYDLTGNRSDTVTINSDGWGEFKVNGGSVSVWVPRKTTVS

SEQ ID NO: 18378 - protein, 488 aa, Geobacillus stearothermophilus
AAPFNGTMMQYFEWYLPDDGTLWTKVANEANNLSSLGITALWLPPAYKGTSRSDVGYGAYDLYDLGEFNQKGTVRTKYGTKAQYLQAIRAAHAAGMQVYADVVFDHKGGADGTEWVDAVEVNPSDRNQVISGTYQIQAWTKFDFPGRGNTYSSFKWRWYHFDGVDWDESRKLSRIYLFEGXXKAWDWEVDTEFGNYDYLMYADLDMDHPEVVTELKNWGPWYVLTTNIDGFRLDAVKHIKFSFFPDWLSYVRSSTGKPLFTVGEYWSYDLNKLHNYITKTNGTMSLFDAPLHNKFYTASKSGGAFDMRTLMTNTLMKDQPTLAVTFVDNHDTEPGQALQSWVDPWFKPLAYAFILTRQEGYPCVFYGDYYGIPQYNIPSLKSKIDPLLIARRDYAYGTQHDYLDHSDIIGWTREGVTEKPGSGLAALITDGPGGSKWMYVGKQHAGKVFYDLTGNRSDTVTINSDGWGEFKVNGGSVSVWVPRKTTVS

SEQ ID NO: 18379 - protein, 486 aa, Geobacillus stearothermophilus
AAPFNGTMMQYFEWYLPDDGTLWTKVANEANNLSSLGITALWLPPAYKGTSRSDVGYGAYDLYDLGEFNQKGTVRTKYGTKAQYLQAIQAAHAAGMQVYADVVFDHKGGADGTEWVDAVEVNPSDRNQVISGTYQIQAWTKFDFPGRGNTYSSFKWRWYHFDGVDWDESRKLSRIYLFEGKAWDWEVDTEFGNYDYLMYADLDMDHPEVTTELKNWGKWYVNTTNIDGFRLDAVKHIKFSFFPDWLSYVRSSTGKELFTVGEYWSGDINKLHNYITKTDGTVSLFDAPLHYKFYNASKSGGAFDMRTLMTNTLMKDQPTLAVTFVDNHDTEPGQALQSWVDPWFKPLAYAFILTRQEGYPCVFYGDYYGIPQYNIPSLKSKIDPLLIARRDYAYGTQHDYLDHSDIIGWTREGGTEKPGSGLAALITDGPGGSKWMYVGKQHAGKVFYDLTGNRSDTVTINSDGWGEFKVNGGSVSVWVPRKTTVS

SEQ ID NO: 18380 - protein, 486 aa, Geobacillus stearothermophilus
AAPFNGTMMQYFEWYLPDDGQLWTKVANEANNLSSLGITALWLPPAYKGTSRSDVGYGAYDLYDLGEFNQKGTVRTKYGTKAQYLQAIQAAHAAGMQVYADVVFDHKGGADGTEWVDAVEVNPSDRNQVISGTYQIQAWTKFDFPGRGNTYSSFKWRWYHFDGVDWDESRKLSRIYLFEGKAWDWEVDTEFGNYDYLMYADLDMDHPEVTTELKNWGKWYVNTTNIDGFRLDAVKHIKFSFFPDWLSYVRSSTGKPLFTVGEYWSGDINKLHNYITKTDGTVSLFDAPLHYKFYNASKSGGAFDMRTLMTNTLMKDQPTLAVTFVDNHDTEPGQALQSWVDPWFKPLAYAFILTRQEGYPCVFYGDYYGIPQYNIPSLKSKIDPLLIARRDYAYGTQHDYLDHSDIIGWTREGGTEKPGSGLAALITDGPGGSKWMYVGKQHAGKVFYDLTGNRSDTVTINSDGWGEFKVNGGSVSVWVPRKTTVS

SEQ ID NO: 18381 - protein, 486 aa, Geobacillus stearothermophilus
AAPFNGTMMQYFEWYLPDDGTLWTKVANEANNLSSLGITALWLPPAYKGTSRSDVGYGAYDLYDLGEFNQKGTVRTKYGTKAQYLQAIQAAHAAGMQVYADVVFDHKAGADGTEWVDAVEVNPSDRNQVISGTYQIQAWTKFDFPGRGNTYSSFKWRWYHFDGVDWDESRKLSRIYLFEGKAWDWEVDTEFGNYDYLMYADLDMDHPEVTTELKNWGKWYVNTTNIDGFRLDAVKHIKFSFFPDWLSYVRSSTGKPLFTVGEYWSGDINKLHNYITKTDGTVSLFDAPLHYKFYNASKSGGAFDMRTLMTNTLMKDQPTLAVTFVDNHDTEPGQALQSWVDPWFKPLAYAFILTRQEGYPCVFYGDYYGIPQYNIPSLKSKIDPLLIARRDYAYGTQHDYLDHSDIIGWTREGGTEKPGSGLAALITDGPGGSKWMYVGKQHAGKVFYDLTGNRSDTVTINSDGWGEFKVNGGSVSVWVPRKTTVS

SEQ ID NO: 18382 - protein, 486 aa, Geobacillus stearothermophilus
AAPFNGTMMQYFEWYLPDDGTLWTKVANEANNLSSLGITALWLPPAYKGTSRSDVGYGAYDLYDLGEFNQKGTVRTKYGTKAQYLQAIQAAHAAGMQVYADVVFDHKGGADGTEWVDAVEVNPSDRNQVISGPYQIQAWTKFDFPGRGNTYSSFKWRWYHFDGVDWDESRKLSRIYLFGGKAWDWEVDTEFGNYDYLMYADLDMDHPEVTTELKNWGKWYVNTTNIDGFRLDAVKHIKFSFFPDWLSYVRSSTGKPLFTVGEYWSGDINKLHNYITKTDGTVSLFDAPLHYKFYNASKSGGAFDMRTLMTNTLMKDQPTLAVTFVDNHDTEPGQALQSWVDPWFKPLAYAFILTRQEGYPCVFYGDYYGIPQYNIPSLKSKIDPLLIARRDYAYGTQHDYLDHSDIIGWTREGGTEKPGSGLAALITDGPGGSKWMYVGKQHAGKVFYDLTGNRSDTVTINSDGWGEFKVNGGSVSVWVPRKTTVS

SEQ ID NO: 18383 - protein, 488 aa, Geobacillus stearothermophilus
AAPFNGTMMQYFEWYLPDDGTLWTKVANEANNLSSLGITALWLPPAYKGTSRSDVGYGAYDLYDLGEFNQKGTVRTKYGTKAQYLQAIQAAHAAGMQVYADVVFDHKGGADGTEWVDAVEVNPSDRNQVISGTYQIQAWTKFDFPGRGNTYSSFKWRWYHFDGVDWDESRKLSRIYLFEGIGKAWDWEVDTENGNYDYLMYADLDMDHPEVVTELKNWGPWYVLTTNIDGFRLDAVKHIKFQFFPDWLSYVRSSTGKPLFTVGEYWSYDINKLHNYITKTNGTMSLFDAPLHNKFYTASKSGGAFDMRTLMTNTLMKDQPTLAVTFVDNHDTEPGQALQSWVDPWFKPLAYAFILTRQEGYPCVFYGDYYGIPQYNIPSLKSKIDPLLIARRDYAYGTQHDYLDHSDIIGWTREGVTEKPGSGLAALITDGPGGSKWMYVGKQHAGKVFYDLTGNRSDTVTINSDGWGEFKVNGGSVSVWVPRKTTVS

SEQ ID NO: 18384 - protein, 488 aa, Geobacillus stearothermophilus
AAPFNGTMMQYFEWYLPDDGTLWTKVANEANNLSSLGITALWLPPAYKGTSRSDVGYGAYDLYDLGEFNQKGTVRTKYGTKAQYLQAIQAAHAAGMQVYADVVFDHKGGADGTEWVDAVEVNPSDRNQVISGTYQIQAWTKFDFPGRGNTYSSFKWRWYHFDGVDWDESRKLSRIYDFEGIGKAWDWEVDTENGNYDYLMYADLDMDHPEVVTELKNWGPWYVLTTNIDGFRLDAVKHIKFQFFPDWLSYVRSSTGKPLFTVGEYWSYDINKLHNYITKTNGTMSLFDAPLHNKFYTASKSGGAFDMRTLMTNTLMKDQPTLAVTFVDNHDTEPGQALQSWVDPWFKPLAYAFILTRQEGYPCVFYGDYYGIPQYNIPSLKSKIDPLLIARRDYAYGTQHDYLDHSDIIGWTREGVTEKPGSGLAALITDGPGGSKWMYVGKQHAGKVFYDLTGNRSDTVTINSDGWGEFKVNGGSVSVWVPRKTTVS

SEQ ID NO: 18385 - protein, 486 aa, Geobacillus stearothermophilus
AAPFNGTMMQYFEWYLPDDGTLWTKVANEANNLSSLGITALWLPPAYKGTSRSDVGYGAYDLYDLGEFNQKGTVRTKYGTKAQYLQAIQAIHAAGMQVYADVVFDHKGGADGTEWVDAVEVNPSDRNQVISGTYQIQAWTKFDFPGRGNTYSSFKWRWYHFDGVDWDESRKLSRIYLFEGKAWDWEVDTEFGNYDYLMYADLDMDHPEVTTELKNWGKWYVNTTNIDGFRLDAVKHIKFSFFPDWLSYVRSSTGKPLFTVGEYWSGDINKLHNYITKTDGTVSLFDAPLHYKFYNASKSGGAFDMRTLMTNTLMKDQPTLAVTFVDNHDTEPGQALQSWVDPWFKPLAYAFILTRQEGYPCVFYGDYYGIPQYNIPSLKSKIDPLLIARRDYAYGTQHDYLDHSDIIGWTREGGTEKPGSGLAALITDGPGGSKWMYVGKQHAGKVFYDLTGNRSDTVTINSDGWGEFKVNGGSVSVWVPRKTTVS

SEQ ID NO: 18386 - protein, 486 aa, Geobacillus stearothermophilus
AAPFNGTMMQYFEWYLPDDGTLWTKVANEANNLSSLGITALWLPPAYKGTSRSDVGYGAYDLYDLGEFNQKGTVRTKYGTKAQYLQAIQAAHAAGMQVYADVVFDHKGGADGTEWVDAVEVNPSDRNQVISGTYQIQAWTKFDFPGRGNTYSSFKWRWYHFDGVDWDESRKLSRIYLFEGKAWDWEVDTEFGNYDYLMYADLDMDHPDVTTELKNWGKWYVNTTNIDGFRLDAVKHIKFSFFPDWLSYVRSSTGKPLFTVGEYWSGDINKLHNYITKTDGTVSLFDAPLHYKFYNASKSGGAFDMRTLMTNTLMKDQPTLAVTFVDNHDTEPGQALQSWVDPWFKPLAYAFILTRQEGYPCVFYGDYYGIPQYNIPSLKSKIDPLLIARRDYAYGTQHDYLDHSDIIGWTREGGTEKPGSGLAALITDGPGGSKWMYVGKQHAGKVFYDLTGNRSDTVTINSDGWGEFKVNGGSVSVWVPRKTTVS

SEQ ID NO: 18387 - protein, 486 aa, Geobacillus stearothermophilus
AAPFNGTMMQYFEWYLPDDGTLWTKVANEANNLSSLGITALWLPPAYKGTSRSDVGYGVYDLYDLGEFNQKGTVRTKYGTKAQYLQAIQALHAAGIQVYADVVFDHKGGADGTEWVDAVEVNPSDRNQVISGTYQIQAWTKFDFPGRGNTYSSFKWRWYHFDGVDWDESRKLSRIYLFEGKAWDWEVDTEFGNYDYLMYADLDMDHPEVVTELKNWGPWYVLTTNIDGFRLDAVKHIKFQFFPDWLSYVRSSTGKPLFTVGEYWSYDINKLHNYITKTNGTMSLFDAPLHNKFYTASKSGGAFDMRTLMTNTLMKDQPTLAVTFVDNHDTEPGQALQSWVDPWFKPLAYAFILTRQEGYPCVFYGDYYGIPQYNIPSLKSKIDPLLIARRDYAYGTQHDYLDHSDIIGWTREGVTEKPGSGLAALITDGPGGSKWMYVGKQHAGKVFYDLTGNRSDTVTINSDGWGEFKVNGGSVSVWVPRKTTVS

SEQ ID NO: 18388 - protein, 486 aa, Geobacillus stearothermophilus
AAPFNGTMMQYFEWYLPDDGTLWTKVANEANNLSSLGITALWLPPAYKGTSRSDVGYGAYDLYDLGEFNQKGTVRTKYGTKAQYLQAIQAAHAAGMQVYADVVFDHKGGADGTEWVDAVEVNPSDRNQVISGTYQIQAWTKFDFPGRGNTYSSFKWRWYHFDGVDWDESRKLSRIYLFEGKAWDWEVDTEFGNYDYLMYADLDMDHPEVTTELKNWGKWYVNTTNIDGFRLDAVKHIKFSFFPDWLSYVRSSTGKPLFTVGEYWSGDINKLHNYITKTDGTVSLFDAPLHYKFYNASKSGGAFDMRTLMTNTLMKDQPTLAVTFVDNHDTEPGQALQSWVDPWFKPLAYAFILTRQEGYPCVFYGDYYGIPQYNIPSLKSKIDPLLIARRDYAYGRQHDYLDHSDIIGWTREGGTEKPGSGLAALITDGPGGSKWMYVGKQHAGKVFYDLTGNRSDTVTINSDGWGEFKVNGGSVSVWVPRKTTVS

SEQ ID NO: 18389 - protein, 488 aa, Geobacillus stearothermophilus
AAPFNGTMMQYFEWYLPDDGTLWTKVANEANNLSSLGITALWLPPAYKGTSRSDVGYGAYDLYDLGEFNQKGTVRTKYGTKAQYLQAIQAAHAAGMQVYADVVFDHKGGADGTEWVDAVEVNPSDRNQVISGTYQIQAWTKFDFPGRGNTYSSFKWYWYHFDGVDWDESRKLSRIYLFEGXXKAWDWEVDTEFGNYDYLMYADLDMDHPEVVTELKNWGPWYVLTTNIDGFRLDAVKHIKFQFFPDWLSYVRSSTGKPLFTVGEYWSYDINKLHNYITKTNGTMSLFDAPLHNKFYTASKSGGAFDMRTLMTNTLMKDQPTLAVTFVDNHDTEPGQALQSWVDPWFKPLAYAFILTRQEGYPCVFYGDYYGIPQYNIPSLKSKIDPLLIARRDYAYGTQHDYLDHSDIIGWTREGVTEKPGSGLAALITDGPGGSKWMYVGKQHAGKVFYDLTGNRSDTVTINSDGWGEFKVNGGSVSVWVPRKTTVS

SEQ ID NO: 18390 - protein, 486 aa, Geobacillus stearothermophilus
AAPFNGTMMQYFEWYLPDDGTLWTKVANEANNLSSLGITALWLPPAYKGTSRSDVGYGAYDLYDLGEFNQKGTVRTKYGTKAQYLQAIQAAHAAGMQVYADVVFDHKGGADGTEWVDAVEVNPSDRNQVISGTYQIQAWTKFDFPGRGNTYSSFKWRWYHFDGVDWDESRKLSRIYLFEGKAWDWEVDTEFGNYDYLMYADLDMDHPEVTTELKNWGKWYVNTTNIDGFRLDAVKHIKFSFFPDWLSYVRSSTGKPLFTVGEYWSGDINKLHNYITKTDGTVSLFDAPLHYKFYNASKSGGAFDMRTLMWNTLMKDQPTLAVTFVDNHDTEPGQALQSWVDPWFKPLAYAFILTRQEGYPCVFYGDYYGIPQYNIPSLKSKIDPLLIARRDYAYGTQHDYLDHSDIIGWTREGGTEKPGSGLAALITDGPGGSKWMYVGKQHAGKVFYDLTGNRSDTVTINSDGWGEFKVNGGSVSVWVPRKTTVS

SEQ ID NO: 18391 - protein, 488 aa, Geobacillus stearothermophilus
AAPFNGTMMQYFEWYLPDDGTLWTKVANEANNLSSLGITALWLPPAYKGTSRSDVGYGVYDLYDLGEFNQKGTVRTKYGTKAQYLQAIQAAHAAGMQVYADVVFDHKGGADGTEWVDAVEVNPSDRNQVISGTYQIQAWTKFDFPGRGNTYSSFKWRWYHFDGVDWDESRKLSRIYLFEGIGKAWDWEVDTENGNYDYLMYADLDMDHPEVVTELKNWGPWYVLTTNIDGFRLDAVKHIKFQFFPDWLSYVRSSTGKPLFTVGEYWSYDINKLHNYITKTNGTTSLFDAPLHNKFYTASKSGGAFDMRTLMTNTLMKDQPTLAVTFVDNHDTEPGQALQSWVDPWFKPLAYAFILTRQEGYPCVFYGDYYGIPQYNIPSLKSKIDPLLIARRDYAYGTQHDYLDHSDIIGWTREGVTEKPGSGLAALITDGPGGSKWMYVGKQHAGKVFYDLTGNRSDTVTINSDGWGEFKVNGGSVSVWVPRKTTVS

SEQ ID NO: 18392 - protein, 488 aa, Geobacillus stearothermophilus
AAPFNGTMMQYFEWYLPDDGTLWTKVANEANNLSSLGITALWLPPAYKGTSRSDVGYGAYDLYDLGEFNQKGTVRTKYGTKAQYLQAIQAAHAAGMQVYADVVFDHKGGADGTEWVDAVEVNPSDRNQVISGTYQIQAWTKFDFPGRGNTYSSFKWRWYHFDGVDWDESRKLSRIYLFEGXXKAWDWEVDTEFGNYDYLMYADLDMDHPEVVTELKNWGPWYVLTTNIDGFRLDAVKHIKFQFFPDWLSYVRSSTGKPLFTVGEYWSYDINKLKNYITKTNGTMSLFDAPLHNKFYTASKSGGAFDMRTLMTNTLMKDQPTLAVTFVDNHDTEPGQALQSWVDPWFKPLAYAFILTRQEGYPCVFYGDYYGIPQYNIPSLKSKIDPLLIARRDYAYGTQHDYLDHSDIIGWTREGVTEKPGSGLAALITDGPGGSKWMYVGKQHAGKVFYDLTGNRSDTVTINSDGWGEFKVNGGSVSVWVPRKTTVS

SEQ ID NO: 18393 - protein, 486 aa, Geobacillus stearothermophilus
AAPFNGTMMQYFEWYLPDDGTLWTKVANEANNLSSLGITALWLPPAYKGTSRSDVGYGAYDLYDLGEFNQKGTVRTKYGTKAQYLQAIRAAHAAGMQVYADVVFDHKGGADGTEWVDAVEVNPSDRNQVISGTYQIQAWTKFDFPGRGNTYSSFKWRWYHFDGVDWDESRKLSRIYLFEGKAWDWEVDTEFGNYDYLMYADLDMDHPEVVTELKNWGPWYVLTTNIDGFRLDAVKHIKFSFFPDWLSYVRSSTGKPLFTVGEYWSYDLNKLHNYITKTNGTMSLFDAPLHNKFYTASKSGGAFDMRTLMTNTLMKDQPTLAVTFVDNHDTEPGQALQSWVDPWFKPLAYAFILTRQEGYPCVFYGDYYGIPQYNIPSLKSKIDPLLIARRDYAYGTQHDYLDHSDIIGWTREGVTEKPGSGLAALITDGPGGSKWMYVGKQHAGKVFYDLTGNRSDTVTINSDGWGEFKVNGGSVSVWVPRKTTVS

SEQ ID NO: 18394 - protein, 486 aa, Geobacillus stearothermophilus
AAPFNGTMMQYFEWYLPDDGTLWTKVANEANNLSSLGITALWLPPAYKGTSRSDVGYGAYDLYDLGEFNQKGTVRTKYGTKAQYLQAIQAAHAAGMQVYADVVFDHKGGADGTEWVDAVEVNPSDRNQVISGTYQIQAWTKFDFPGRGNTYSSFKWRWYHFDGVDWDESRKLSRIYLFEGKAWDWEVDTEFGNYDYLMYADLDMDYPEVVTELKNWGPWYVLTTNIDGFRLDAVKHIKFQFFPDWLSYVRSSTGKPLFTVGEYWSYDINKLHNYITKTNGTMSLFDAPLHNKFYTASKSGGAFDMRTLMTNTLMKDQPTLAVTFVDNHDTEPGQALQSWVDPWFKPLAYAFILTRQEGYPCVFYGDYYGIPQYNIPSLKSKIDPLLIARRDYAYGTQHDYLDHSDIIGWTREGVTEKPGSGLAALITDGPGGSKWMYVGKQHAGKVFYDLTGNRSDTVTINSDGWGEFKVNGGSVSVWVPRKTTVS

SEQ ID NO: 18395 - protein, 486 aa, Geobacillus stearothermophilus
AAPFNGTMMQYFEWYLPDDGTLWTKVANEANNLSSQGITALWLPPAYKGTSRSDVGYGAYDLYDLGEFNQKGTVRTKYGTKAQYLQAIQAAHAAGMQVYADVVFDHKGGADGTEWVDAVEVNPSDRNQVISGTYQIQAWTKFDFPGRGNTYSSFKWRWYHFDGVDWDESRKLSRIYLFEGKAWDWEVDTEFGNYDYLMYADLDMDHPEVTTELKNWGKWYVNTTNIDGFRLDAVKHIKFSFFPDWLSYVRSSTGKPLFTVGEYWSGDINKLHNYITKTDGTVSLFDAPLHYKFYNASKSGGAFDMRTLMTNTLMKDQPTLAVTFVDNHDTEPGQALQSWVDPWFKPLAYAFILTRQEGYPCVFYGDYYGIPQYNIPSLKSKIDPLLIARRDYAYGTQHDYLDHSDIIGWTREGGTEKPGSGLAALITDGPGGSKWMYVGKQHAGKVFYDLTGNRSDTVTINSDGWGEFKVNGGSVSVWVPRKTTVS

SEQ ID NO: 18396 - protein, 486 aa, Geobacillus stearothermophilus
AAPFNGTMMQYFEWYLPDDGTLWTKVANEANNLSSLGITALWLPPAYKGTSRSDVGYGAYDLYDLGEFNQKGTVRTKYGTKAQYLQAIRAAHAAGMQVYADVVFDHKGGADGTEWVDAVEVNPSDRNQVISGTYQIQAWTKFDFPGRGNTYSSFKWRWYHFDGVDWDESRKLSRIYLFEGKAWDWEVDTEFGNYDYLMYADLDMDHPEVVTELKNWGPWYVLTTNIDGFRLDAVKHIKFSFFPDWLSYVRSSTGKPLFTVGEYWSYDINKLKNYITKTNGTMSLFDAPLHNKFYTASKSGGAFDMRTLMTNTLMKDQPTLAVTFVDNHDTEPGQALQSWVDPWFKPLAYAFILTRQEGYPCVFYGDYYGIPQYNIPSLKSKIDPLLIARRDYAYGTQHDYLDHSDIIGWTREGVTEKPGSGLAALITDGPGGSKWMYVGKQHAGKVFYDLTGNRSDTVTINSDGWGEFKVNGGSVSVWVPRKTTVS

SEQ ID NO: 18397 - protein, 488 aa, Geobacillus stearothermophilus
AAPFNGTMMQYFEWYLPDDGTLWTKVANEANNLSSLGITALWLPPAYKGTSRSDVGYGAYDLYDLGEFNQKGTVRTKYGTKAQYLQAIQAAHAAGMQVYADVVFDHKGGADGTEWVDAVEVNPSDRNQVISGTYQIQAWTKFDFPGRGNTYSSFKWRWYHFDGVDWDESRKLSRIYLFEGIGKAWDWEVDTENGNYDYLMYADLDMDHPEVVTELKNWGPWYVLTTNIDGFRLDAVKHIKFSFFPDWLSYVRSSTGKPLFTVGEYWSYDINKLHNYITKTNGTTSLFDAPLHNKFYTASKSGGAFDMRTLMTNTLMKDQPTLAVTFVDNHDTEPGQALQSWVDPWFKPLAYAFILTRQEGYPCVFYGDYYGIPQYNIPSLKSKIDPLLIARRDYAYGTQHDYLDHSDIIGWTREGVTEKPGSGLAALITDGPGGSKWMYVGKQHAGKVFYDLTGNRSDTVTINSDGWGEFKVNGGSVSVWVPRKTTVS

SEQ ID NO: 18398 - protein, 486 aa, Geobacillus stearothermophilus
AAPFNGTMMQYFEWYLPDDGTLWTKVANEANNLSSLGITALWLPPAYKGTSRSDVGYGAYDLYDLGEFNQKGTVRTKYGTKAQYLQAIRAAHAAGMQVYADVVFDHKGGADDTEWVDAVEVNPSDRNQVISGTYQIQAWTKFDFPGRGNTYSSFKWRWYHFDGVDWDESRKLSRIYLFEGKAWDWEVDTEFGNYDYLMYADLDMDHPEVVTELKNWGPWYVLTTNIDGFRLDAVKHIKFSFFPDWLSYVRSSTGKPLFTVGEYWSYDINKLHNYITKTNGTMSLFDAPLHNKFYTASKSGGAFDMRTLMTNTLMKDQPTLAVTFVDNHDTEPGQALQSWVDPWFKPLAYAFILTRQEGYPCVFYGDYYGIPQYNIPSLKSKIDPLLIARRDYAYGTQHDYLDHSDIIGWTREGVTEKPGSGLAALITDGPGGSKWMYVGKQHAGKVFYDLTGNRSDTVTINSDGWGEFKVNGGSVSVWVPRKTTVS

SEQ ID NO: 18399 - protein, 488 aa, Geobacillus stearothermophilus
AAPFNGTMMQYFEWYLPDDGTLWTKVANEANNLSSLGITALWLPPAYKGTSRSDVGYGAYDLYDLGEFNQKGTVRTKYGTKAQYLQAIRAAHAAGMQVYADVVFDHKGGADDTEWVDAVEVNPSDRNQVISGTYQIQAWTKFDFPGRGNTYSSFKWRWYHFDGVDWDESRKLSRIYLFEGXXKAWDWEVDTEFGNYDYLMYADLDMDHPEVVTELKNWGPWYVLTTNIDGFRLDAVKHIKFSFFPDWLSYVRSSTGKPLFTVGEYWSYDINKLHNYITKTNGTMSLFDAPLHNKFYTASKSGGAFDMRTLMTNTLMKDQPTLAVTFVDNHDTEPGQALQSWVDPWFKPLAYAFILTRQEGYPCVFYGDYYGIPQYNIPSLKSKIDPLLIARRDYAYGTQHDYLDHSDIIGWTREGVTEKPGSGLAALITDGPGGSKWMYVGKQHAGKVFYDLTGNRSDTVTINSDGWGEFKVNGGSVSVWVPRKTTVS

SEQ ID NO: 18400 - protein, 487 aa, Geobacillus stearothermophilus
AAPFNGTMMQYFEWYLPDDGTLWTKVANEANNLSSLGITALWLPPAYKGTSRSDVGYGVYDLYDLGEFNQKGTVRTKYGTKAQYLQAIQALHAAGQVYADVVFDHKGGADGTEWVDAVEVNPSDRNQVISGTYQIQAWTKFDFPGRGNTYSSFKWRWYHFDGVDWDESRKLSRIYLFEGIGKAWDWEVDTENGNYDYLMYADLDMDHPEVVTELKNWGPWYVLTTNIDGFRLDAVKHIKFQFFPDWLSYVRSSTGKPLFTVGEYWSYDINKLHNYITKTNGTMSLFDAPLHNKFYTASKSGGAFDMRTLMTNTLMKDQPTLAVTFVDNHDTEPGQALQSWVDPWFKPLAYAFILTRQEGYPCVFYGDYYGIPQYNIPSLKSKIDPLLIARRDYAYGTQHDYLDHSDIIGWTREGVTEKPGSGLAALITDGPGGSKWMYVGKQHAGKVFYDLTGNRSDTVTINSDGWGEFKVNGGSVSVWVPRKTTVS

SEQ ID NO: 18401 - protein, 484 aa, Aspergillus niger
AATALAATPADWRSQSIYFLLTDRFARTDGSTTATCNTADQKYCGGTWQGIIDKLDYIQGMGFTAIWITPVTAQLPQTTAYGDAYHGYWQQDIYSLNENYGTADDLRALSSALHERGMYLMVDVVANHMGYDGAGSSVDYSVFNPFSSQDYFHPFCFIQNYEDQTQVEDCWLGDNTVSLPDLDTTKDVVKNEWYDWVGSLVSNYSIDGLRIDTVKHVQKDFWPGYNSAAGVYCIGEVLDGDPAYTCPYQNVMDGVLNYPIYYPLLNAFQSTSGSMDDLYNMINTVASDCPDSTLLGTFVENHDNPRFASYTNDIALAKNVAAFIILNDGIPIIYAGQEQHYAGGNDPANREATWLSGYPTDSELYQLIASANAIRNYAISQDTGFVTYQNWPIYQDDTTIAMRKGTDGSQIVTILSNKGASGDSYTLSLSGAGYTAGQQLTEVIGCTTVTVGSDGNVPVPMAGGLPRVLYPTEKLAGSGICSSS

SEQ ID NO: 18402 - protein, 484 aa, Aspergillus niger
AATALAATPADWRSQSIYFLLTDRFARTDGSTTATCNTADQKYCGGTWQGIIDHLDYIQGMGFTAIWITPVTAQLPQTTAYGDAYHGYWQQDIYSLNENYGTADDLKALSSALHERGMYLMVDVVANHMGYDGAGSSVDYSVFNPFSSQDYFHPFCFIQNYEDQTQVEDCWLGDNTVSLPDLDTTKDVVRNEWYDWVGSLVSNYSIDGLRIDTVKHVQKDFWPGYNDAAGVYCIGEVLDGDPAYTCPYQNVMDGVLNYPIYYPLLNAFQSTSGSMDDLYNMINTVKSDCPDSTLLGTFVENHDNPRFASYTNDIALAKNVAAFIILNDGIPIIYAGQEQHYAGGNDPANREATWLSGYPTDSELYQLIASANAIRNYAISADTGFVTYKNWPIYQDDTTIAMRKGTDGSQIVTILSNLGASGDSYTLSLSGAGYTAGQQLTEVIGCTTVTVGSDGNVPVPMAGGLPRVLYPTEKLAGSGICSSS

SEQ ID NO: 18403 - protein, 483 aa, Unidentified
HHNGTNGAMMQYFEWHLPNDGNHWNRLRDDASNLRNRGITAIWIPPAWKGTSQNDVGYGAYDLYDLGEFNQKGTVRTKYGTRSQLESAIHALKNNGVQVYGDVVMNHKGGADATENVLAVEVNPNNRNQEISGDYTIEAYTKFDFPGRGNTYSDFKWRWYHFDGVDWDQSRQFQNRIYKFRGKAWDWEVDSEFGNYDYLMYADYDMDHPEVVNELRRWGEWYTNTLNLDGFRIDAVKHIKFSFTRDWLTHVRNATGKGMFAVAEFWKNDLGALENYLNKTNWNHHVFDVPLHYNLYNASNSRGNYDMAKLLNGTVVQKHPAHANTFVDNHDSQPGESLESFVQEWFKPLAYALILTREQGYPSVFYGDYYGIPTHSVPAMKAKIDPILEARQNFAYGTQHDYFDHHNIIGWTREGNTTHPNSGLATIMSDGPGGEKWMYVGQNKAGQVWHDITGNKPGTVTINADGWANFSVNKGSVSIWVKR

SEQ ID NO: 18404 - protein, 482 aa, Unidentified
HNGTNGTMMQYFEWHLPNDGNHWNRLRDDASNLRNRGITAIWIPPAWKGTSQNDVGYGAYDLYDLGEFNQKGTVRTKYGTRSQLESAIHALKNNGVQVYGDVVMNHKGAADATENVLAVEVNPNNRNQEISGDYTIEAYTKFDFPGRGNTYSDFKWRWYHFDGVDWDQSRQFQNRIYKFRGKAWDWEVDSEFGNYDYLMYADYDMDHPEVVNELRRWGEWYTNTLNLDGFRIDAVKHIKFSFTRDWLTHVRNATGKGMFAVAEFWKNDLGALENYLNKTSWNHSVFDVPLHYNLYNASNSRGNYDMAKLLNGTVVQKHPMHASTFVDNHDSQPGESLESFVQEWFKPLAYALILTREQGYPSVFYGDYYGIPTHSVPAMKAKIDPILEARANFAYGTQHDYFDHHNIIGWTREGNTTHPNSGLATIMSDGPGGEKWMYVGQNKAGQVWHDITGNKPGTVTINADGWANFSVNKGSVSIWVKR

SEQ ID NO: 18405 - protein, 482 aa, Unidentified
HNGTNGEMMQYFEWHLPNDGNHWNRLRDDASNLRNRGITAIWIPPAWKGTSQNDVGYGAYDLYDLGEFNQKGTVRTKYGTRSQLESAIHALKNNGVQVYGDVVMNHKGAADATENVLAVEVNPNNRNQEISGDYTIEAYTKFDFPGRGNTYSDFKWRWYHFDGVDWDQSRQFQNRIYKFRGKAWDWEVDSEFGNYDYLMYADYDMDHPEVVNELRRWGEWYTNTLNLDGFRIDAVKHIKFSFTRDWLTHVRNATGKGMFAVAEFWKNDLGALENYLNKTSWNHSVFDVPLHYNLYNASNSRGNYDMAKLLNGTVVQKHPMHAVTFVDNHDSQPGESLESFVQEWFKPLAYALILTREQGYPSVFYGDYYGIPTHSVPAMKAKIDPILEARANFAYGTQHDYFDHHNIIGWTREGNTTHPNSGLATIMSDGPGGEKWMYVGQNKAGQVWHDITGNKPGTVTINADGWANFSVNKGSVSIWVKR

SEQ ID NO: 18406 - protein, 482 aa, Unidentified
HNGTNGQMMQYFEWHLPNDGNHWNRLRDDASNLRNRGITAIWIPPAWKGTSQNDVGYGAYDLYDLGEFNQKGTVRTKYGTRSQLESAIHALKNNGVQVYGDVVMNHKGAADATENVLAVEVNPNNRNQEISGDYTIEAYTKFDFPGRGNTYSDFKWRWYHFDGVDWDQSRQFQNRIYKFRGKAWDWEVDSEFGNYDYLMYADYDMDHPEVVNELRRWGEWYTNTLNLDGFRIDAVKHIKFSFTRDWLTHVRNATGKGMFAVAEFWKNDLGALENYLNKTSWNHSVFDVPLHYNLYNASNSRGNYDMAKLLNGTVVQKHPMHAVTFVDNHDSQPGESLESFVQEWFKPLAYALILTREQGYPSVFYGDYYGIPTHSVPAMKAKIDPILEARANFAYGTQHDYFDHHNIIGWTREGNTTHPNSGLATIMSDGPGGEKWMYVGQNKAGQVWHDITGNKPGTVTINADGWANFSVNKGSVSIWVKR

SEQ ID NO: 18407 - protein, 482 aa, Unidentified
HNGTNGTMMQYFEWHLPNDGNHWNRLRDDASNLRNRGITAIWIPPAWKGTSQNDVGYGAYDLYDLGEFNQKGTVRTKYGTRSQLESAIHALKNNGVQVYGDVVMNHKGAADATENVLAVEVNPNNRNQEISGDYTIEAYTKFDFPGRGNTYSDFKWRWYHFDGVDWDQSRQFQNRIYKFRGKAWDWEVDSEFGNYDYLMYADYDMDHPEVVNELRRWGEWYTNTLNLDGFRIDAVKHIKFSFTRDWLTHVRNATGKGMFAVAEFWKNDLGALENYLNKTSWNHSVFDVPLHYNLYNASNSRGNYDMAKLLNGTVVQKHPAHAVTFVDNHDSQPGESLESFVQEWFKPLAYALILTREQGYPSVFYGDYYGIPTHSVPAMKAKIDPILEARANFAYGTQHDYFDHHNIIGWTREGNTTHPNSGLATIMSDGPGGEKWMYVGQNKAGQVWHDITGNKPGTVTINADGWANFSVNKGSVSIWVKR

SEQ ID NO: 18408 - protein, 482 aa, Bacillus sp.
HNGTNATMMQYFEWHLPNDGNHWNRLRDDASNLRNRGITAIWIPPAWKGTSQNDVGYGAYDLYDLGEFNQKGTVRTKYGTRSQLESAIHALKNNGVQVYGDVVMNHKAGADATENVLAVEVNPNNRNQEISGDYTIEAYTKFDFPGRGNTYSDFKWRWYHFDGVDWDQSRQFQNRIYKFRGKAWDWEVDSEFGNYDYLMYADYDMDHPEVVNELRRWGEWYTNTLNLDGFRIDAVKHIKFSFTRDWLTHVRNATGKGMFAVAEFWKNDLGALENYLSKTNWNHSVFDVPLHYNLYNASNSRGNYDMAKLLNGTVVQKHPMHAVTFVDNHDSQPGESLESFVQEWFKPLAYALILTREQGYPSVFYGDYYGIPTHSVPAMKAKIDPILAARQNFAYGTQHDYFDHHNIIGWTREGNTTHPNSGLATIMSDGPGGEKWMYVGQNKAGQVWHDITGNKPGTVTINADGWANFSVNKGSVSIWVKR

SEQ ID NO: 18409 - protein, 482 aa, Unidentified
HNGTNGTMMQYFEWHLPNDGNHWNRLRDDASNLRNRGITAIWIPPAWKGTSQNDVGYGAYDLYDLGEFNQKGTVRTKYGTRSQLESAIHALKNNGVQVYGDVVMNHKGAADATENVLAVEVNPNNRNQEISGDYTIEAYTKFDFPGRGNTYSDFKWRWYHFDGVDWDQSRQFQNRIYKFRGKAWDWEVDSEFGNYDYLMYADYDMDHPEVVNELRRWGEWYTNTLNLDGFRIDAVKHIKFSFTRDWLTHVRNATGKGMFAVAEFWKNDLGALENYLNKTSWNHHVFDVPLHYNLYNASNSRGNYDMAKLLNGTVVQKHPMHAVTFVDNHDSQPGESLESFVQEWFKPLAYALILTREQGYPSVFYGDYYGIPTHSVPAMKAKIDPILEARANFAYGTQHDYFDHHNIIGWTREGNTTHPNSGLATIMSDGPGGEKWMYVGQNKAGQVWHDITGNKPGTVTINADGWANFSVNKGSVSIWVKR

SEQ ID NO: 18410 - protein, 482 aa, Unidentified
HNGTNGAMMQYFEWHLPNDGNHWNRLRDDASNLRNRGITAIWIPPAWKGTSQNDVGYGAYDLYDLGEFNQKGTVRTKYGTRSQLESAIHALKNNGVQVYGDVVMNHKGAADATENVLAVEVNPNNRNQEISGDYTIEAYTKFDFPGRGNTYSDFKWRWYHFDGVDWDQSRQFQNRIYKFRGKAWDWEVDSEFGNYDYLMYADYDMDHPEVVNELRRWGEWYTNTLNLDGFRIDAVKHIKFSFTRDWLTHVRNATGKGMFAVAEFWKNDLGALENYLNKTSWNHSVFDVPLHYNLYNASNSRGNYDMAKLLNGTVVQKHPMHAVTFVDNHDSQPGESLESFVQEWFKPLAYALILTREQGYPSVFYGDYYGIPTHSVPAMKAKIDPILEARANFAYGTQHDYFDHHNIIGWTREGNTTHPNSGLATIMSDGPGGEKWMYVGQNKAGQVWHDITGNKPGTVTINADGWANFSVNKGSVSIWVKR

SEQ ID NO: 18411 - protein, 482 aa, Unidentified
HNGTNGAMMQYFEWHLPNDGNHWNRLRDDASNLRNRGITAIWIPPAWKGTSQNDVGYGAYDLYDLGEFNQKGTVRTKYGTRSQLESAIHALKNNGVQVYGDVVMNHKGAADATENVLAVEVNPNNRNQEISGDYTIEAYTKFDFPGRGNTYSDFKWRWYHFDGVDWDQSRQFQNRIYKFRGKAWDWEVDSEFGNYDYLMYADYDMDHPEVVNELRRWGEWYTNTLNLDGFRIDAVKHIKFSFTRDWLTHVRNATGKGMFAVAEFWKNDLGALENYLNKTNWNHRVFDVPLHYNLYNASNSRGNYDMAKLLNGTVVQKHPMHAVTFVDNHDSQPGESLESFVQEWFKPLAYALILTREQGYPSVFYGDYYGIPTHSVPAMKAKIDPILEARANFAYGTQHDYFDHHNIIGWTREGNTTHPNSGLATIMSDGPGGEKWMYVGQNKAGQVWHDITGNKPGTVTINADGWANFSVNKGSVSIWVKR

SEQ ID NO: 18412 - protein, 482 aa, Unidentified
HNGTNGTMMQYFEWHLPNDGNHWNRLRDDASNLRNRGITAIWIPPAWKGTSQNDVGYGAYDLYDLGEFNQKGTVRTKYGTRSQLESAIHALKNNGVQVYGDVVMNHKGAADATENVLAVEVNPNNRNQEISGDYTIEAYTKFDFPGRGNTYSDFKWRWYHFDGVDWDQSRQFQNRIYKFRGKAWDWEVDSEFGNYDYLMYADYDMDHPEVVNELRRWGEWYTNTLNLDGFRIDAVKHIKFSFTRDWLTHVRNATGKGMFAVAEFWKNDLGALENYLNKTSWNHSVFDVPLHYNLYNASNSRGNYDMAKLLNGTVVQKHPTHAVTFVDNHDSQPGESLESFVQEWFKPLAYALILTREQGYPSVFYGDYYGIPTHSVPAMKAKIDPILEARANFAYGTQHDYFDHHNIIGWTREGNTTHPNSGLATIMSDGPGGEKWMYVGQNKAGQVWHDITGNKPGTVTINADGWANFSVNKGSVSIWVKR

SEQ ID NO: 18413 - protein, 482 aa, Unidentified
HNGTNGTMMQYFEWHLPNDGNHWNRLRDDASNLRNRGITAIWIPPAWKGTSQNDVGYGAYDLYDLGEFNQKGTVRTKYGTRSQLESAIHALKNNGVQVYGDVVMNHKGAADATENVLAVEVNPNNRNQEISGDYTIEAYTKFDFPGRGNTYSDFKWRWYHFDGVDWDQSRQFQNRIYKFRGKAWDWEVDSEFGNYDYLMYADYDMDHPEVVNELRRWGEWYTNTLNLDGFRIDAVKHIKFSFTRDWLTHVRNATGKGMFAVAEFWKNDLGALENYLNKTSWNHSVFDVPLHYNLYNASNSRGNYDMAKLLNGTVVQKHPMHAKTFVDNHDSQPGESLESFVQEWFKPLAYALILTREQGYPSVFYGDYYGIPTHSVPAMKAKIDPILEARANFAYGTQHDYFDHHNIIGWTREGNTTHPNSGLATIMSDGPGGEKWMYVGQNKAGQVWHDITGNKPGTVTINADGWANFSVNKGSVSIWVKR

SEQ ID NO: 18414 - protein, 482 aa, Unidentified
HNGTNGTMMQYFEWHLPNDGNHWNRLRDDASNLRNRGITAIWIPPAWKGTSQNDVGYGAYDLYDLGEFNQKGTVRTKYGTRSQLESAIHALKNNGVQVYGDVVMNHKGAADATENVLAVEVNPNNRNQEISGDYTIEAYTKFDFPGRGNTYSDFKWRWYHFDGVDWDQSRQFQNRIYKFRGKAWDWEVDSEFGNYDYLMYADYDMDHPEVVNELRRWGEWYTNTLNLDGFRIDAVKHIKFSFTRDWLTHVRNATGKGMFAVAEFWKNDLGALENYLNKTSWNHFVFDVPLHYNLYNASNSRGNYDMAKLLNGTVVQKHPMHAVTFVDNHDSQPGESLESFVQEWFKPLAYALILTREQGYPSVFYGDYYGIPTHSVPAMKAKIDPILEARANFAYGTQHDYFDHHNIIGWTREGNTTHPNSGLATIMSDGPGGEKWMYVGQNKAGQVWHDITGNKPGTVTINADGWANFSVNKGSVSIWVKR

SEQ ID NO: 18415 - protein, 482 aa, Unidentified
HNGTNGTMMQYFEWHLPNDGNHWNRLRDDASNLRNRGITAIWIPPAWKGTSQNDVGYGAYDLYDLGEFNQKGTVRTKYGTRSQLESAIHALKNNGVQVYGDVVMNHKGAADATENVLAVEVNPNNRNQEISGDYTIEAYTKFDFPGRGNTYSDFKWRWYHFDGVDWDQSRQFQNRIYKFRGKAWDWEVDSEFGNYDYLMYADYDMDHPEVVNELRRWGEWYTNTLNLDGFRIDAVKHIKFSFTRDWLTHVRNATGKGMFAVAEFWKNDLGALENYLNKTSWNHSVFDVPLHYNLYNASNSRGNYDMAKLLNGTVVQKHPMHARTFVDNHDSQPGESLESFVQEWFKPLAYALILTREQGYPSVFYGDYYGIPTHSVPAMKAKIDPILEARANFAYGTQHDYFDHHNIIGWTREGNTTHPNSGLATIMSDGPGGEKWMYVGQNKAGQVWHDITGNKPGTVTINADGWANFSVNKGSVSIWVKR

SEQ ID NO: 18416 - protein, 482 aa, Unidentified
HNGTNGTMMQYFEWHLPNDGNHWNRLRDDASNLRNRGITAIWIPPAWKGTSQNDVGYGAYDLYDLGEFNQKGTVRTKYGTRSQLESAIHALKNNGVQVYGDVVMNHKGAADATENVLAVEVNPNNRNQEISGDYTIEAYTKFDFPGRGNTYSDFKWRWYHFDGVDWDQSRQFQNRIYKFRGKAWDWEVDSEFGNYDYLMYADYDMDHPEVVNELRRWGEWYTNTLNLDGFRIDAVKHIKFSFTRDWLTHVRNATGKGMFAVAEFWKNDLGALENYLNKTSWNHSVFDVPLHYNLYNASNSRGNYDMAKLLNGTVVQKHPMHANTFVDNHDSQPGESLESFVQEWFKPLAYALILTREQGYPSVFYGDYYGIPTHSVPAMKAKIDPILEARANFAYGTQHDYFDHHNIIGWTREGNTTHPNSGLATIMSDGPGGEKWMYVGQNKAGQVWHDITGNKPGTVTINADGWANFSVNKGSVSIWVKR

SEQ ID NO: 18417 - protein, 482 aa, Unidentified
HNGTNGNMMQYFEWHLPNDGNHWNRLRDDASNLRNRGITAIWIPPAWKGTSQNDVGYGAYDLYDLGEFNQKGTVRTKYGTRSQLESAIHALKNNGVQVYGDVVMNHKGAADATENVLAVEVNPNNRNQEISGDYTIEAYTKFDFPGRGNTYSDFKWRWYHFDGVDWDQSRQFQNRIYKFRGKAWDWEVDSEFGNYDYLMYADYDMDHPEVVNELRRWGEWYTNTLNLDGFRIDAVKHIKFSFTRDWLTHVRNATGKGMFAVAEFWKNDLGALENYLNKTSWNHSVFDVPLHYNLYNASNSRGNYDMAKLLNGTVVQKHPMHAVTFVDNHDSQPGESLESFVQEWFKPLAYALILTREQGYPSVFYGDYYGIPTHSVPAMKAKIDPILEARANFAYGTQHDYFDHHNIIGWTREGNTTHPNSGLATIMSDGPGGEKWMYVGQNKAGQVWHDITGNKPGTVTINADGWANFSVNKGSVSIWVKR

SEQ ID NO: 18418 - protein, 482 aa, Unidentified
HNGTNGDMMQYFEWHLPNDGNHWNRLRDDASNLRNRGITAIWIPPAWKGTSQNDVGYGAYDLYDLGEFNQKGTVRTKYGTRSQLESAIHALKNNGVQVYGDVVMNHKGAADATENVLAVEVNPNNRNQEISGDYTIEAYTKFDFPGRGNTYSDFKWRWYHFDGVDWDQSRQFQNRIYKFRGKAWDWEVDSEFGNYDYLMYADYDMDHPEVVNELRRWGEWYTNTLNLDGFRIDAVKHIKFSFTRDWLTHVRNATGKGMFAVAEFWKNDLGALENYLNKTSWNHSVFDVPLHYNLYNASNSRGNYDMAKLLNGTVVQKHPMHAVTFVDNHDSQPGESLESFVQEWFKPLAYALILTREQGYPSVFYGDYYGIPTHSVPAMKAKIDPILEARANFAYGTQHDYFDHHNIIGWTREGNTTHPNSGLATIMSDGPGGEKWMYVGQNKAGQVWHDITGNKPGTVTINADGWANFSVNKGSVSIWVKR

SEQ ID NO: 18419 - protein, 482 aa, Unidentified
HNGTNGTMMQYFEWHLPNDGNHWNRLRDDASNLRNRGITAIWIPPAWKGTSQNDVGYGAYDLYDLGEFNQKGTVRTKYGTRSQLESAIHALKNNGVQVYGDVVMNHKGAADATENVLAVEVNPNNRNQEISGDYTIEAYTKFDFPGRGNTYSDFKWRWYHFDGVDWDQSRQFQNRIYKFRGKAWDWEVDSEFGNYDYLMYADYDMDHPEVVNELRRWGEWYTNTLNLDGFRIDAVKHIKFSFTRDWLTHVRNATGKGMFAVAEFWKNDLGALENYLNKTSWNHSVFDVPLHYNLYNASNSRGNYDMAKLLNGTVVQKHPSHAVTFVDNHDSQPGESLESFVQEWFKPLAYALILTREQGYPSVFYGDYYGIPTHSVPAMKAKIDPILEARANFAYGTQHDYFDHHNIIGWTREGNTTHPNSGLATIMSDGPGGEKWMYVGQNKAGQVWHDITGNKPGTVTINADGWANFSVNKGSVSIWVKR

SEQ ID NO: 18420 - protein, 482 aa, Unidentified
HNGTNGLMMQYFEWHLPNDGNHWNRLRDDASNLRNRGITAIWIPPAWKGTSQNDVGYGAYDLYDLGEFNQKGTVRTKYGTRSQLESAIHALKNNGVQVYGDVVMNHKGAADATENVLAVEVNPNNRNQEISGDYTIEAYTKFDFPGRGNTYSDFKWRWYHFDGVDWDQSRQFQNRIYKFRGKAWDWEVDSEFGNYDYLMYADYDMDHPEVVNELRRWGEWYTNTLNLDGFRIDAVKHIKFSFTRDWLTHVRNATGKGMFAVAEFWKNDLGALENYLNKTSWNHSVFDVPLHYNLYNASNSRGNYDMAKLLNGTVVQKHPMHAVTFVDNHDSQPGESLESFVQEWFKPLAYALILTREQGYPSVFYGDYYGIPTHSVPAMKAKIDPILEARANFAYGTQHDYFDHHNIIGWTREGNTTHPNSGLATIMSDGPGGEKWMYVGQNKAGQVWHDITGNKPGTVTINADGWANFSVNKGSVSIWVKR

SEQ ID NO: 18421 - protein, 482 aa, Unidentified
HNGTNGTMMQYFEWHLPNDGNHWNRLRDDASNLRNRGITAIWIPPAWKGTSQNDVGYGAYDLYDLGEFNQKGTVRTKYGTRSQLESAIHALKNNGVQVYGDVVMNHKGAADATENVLAVEVNPNNRNQEISGDYTIEAYTKFDFPGRGNTYSDFKWRWYHFDGVDWDQSRQFQNRIYKFRGKAWDWEVDSEFGNYDYLMYADYDMDHPEVVNELRRWGEWYTNTLNLDGFRIDAVKHIKFSFTRDWLTHVRNATGKGMFAVAEFWKNDLGALENYLNKTSWNHSVFDVPLHYNLYNASNSRGNYDMAKLLNGTVVQKHPVHAVTFVDNHDSQPGESLESFVQEWFKPLAYALILTREQGYPSVFYGDYYGIPTHSVPAMKAKIDPILEARANFAYGTQHDYFDHHNIIGWTREGNTTHPNSGLATIMSDGPGGEKWMYVGQNKAGQVWHDITGNKPGTVTINADGWANFSVNKGSVSIWVKR

SEQ ID NO: 18422 - protein, 482 aa, Unidentified
HNGTNGKMMQYFEWHLPNDGNHWNRLRDDASNLRNRGITAIWIPPAWKGTSQNDVGYGAYDLYDLGEFNQKGTVRTKYGTRSQLESAIHALKNNGVQVYGDVVMNHKGAADATENVLAVEVNPNNRNQEISGDYTIEAYTKFDFPGRGNTYSDFKWRWYHFDGVDWDQSRQFQNRIYKFRGKAWDWEVDSEFGNYDYLMYADYDMDHPEVVNELRRWGEWYTNTLNLDGFRIDAVKHIKFSFTRDWLTHVRNATGKGMFAVAEFWKNDLGALENYLNKTSWNHSVFDVPLHYNLYNASNSRGNYDMAKLLNGTVVQKHPMHAVTFVDNHDSQPGESLESFVQEWFKPLAYALILTREQGYPSVFYGDYYGIPTHSVPAMKAKIDPILEARANFAYGTQHDYFDHHNIIGWTREGNTTHPNSGLATIMSDGPGGEKWMYVGQNKAGQVWHDITGNKPGTVTINADGWANFSVNKGSVSIWVKR

SEQ ID NO: 18423 - protein, 483 aa, Synthetic construct
AAPFNGTMMQYFEWYLPDDGTLWTKVANEANNLSSLGITALWLPPAYKGTSRSDVGYGVYDLYDLGEFNQKGAVRTKYGTKAQYLQAIQAAHAAGMQVYADVVFNHKAGADGTELVDAVEVNPSDRNQEISGTYQIQAWTKFDFPGRGNTYSSFKWRWYHFDGTDWDESRKLNRIYKFRGTGKAWDWEVDTENGNYDYLMYADLDMDHPEVVTELKNWGKWYVNTTNIDGFRLDAVKHIKFSFFPDWLSYVRSQTGKPLFTVGEYWSYDINKLHNYIMKTNGTMSLFDAPLHNKFYTASKSGGTFDMRTLMTNTLMKDQPTLAVTFVDNHDTEPGQALQSWVDPWFKPLAYAFILTRQEGYPCVFYGDYYGIPQYNIPSLKSKIDPLLIARRDYAYGTQHDYLDHSDIIGWTREGVTEKPGSGLAALITDGPGGSKWMYVGKQHAGKVFYDLTGNRSDTVTINSDGWGEFKVNGGSVSVWVPR

SEQ ID NO: 18424 - protein, 515 aa, Geobacillus stearothermophilus
AAPFNGTMMQYFEWYLPDNGTLWTKVAREANNLSSLGITALWLPPAYKGTSRSDVGYGVYDLYDLGEFNQKGTVRTKYGTKAQYLRAIQAAHAAGMQVYADVVFDHKGGADGTEWVDAVEVNPSDRNQEISGTYQIQAWTKFDFPGRGNTYSSFKWRWYHFDGVDWDESRKLSRIYKFRGIGKAWDWEVDTENGNYDYLMYADLDMDHPEVVTELKNWGKWYVRTTNIDGFRLDAVKHIKFSFFPDWLSYVRSQTGKPLFTVGEYWSYDIRKLHNYITKTRGTMSLFDAPLHNKFYTASKSGGAFNMRTLMTNTLMKNQPTLAVTFVDNHDTEPGQALQSWVDPWFKPLAYAFILTRQEGYPCVFYGDYYGIPQYNIPSLKSKIDPLLIARRNYAYGTQHDYLDHSDIIGWTREGVTEKPGSGLAALITDGPGGSKWMYVGKQHAGKVFYDLTGNRSNTVTINSDGWGEFKVNGGSVSVWVPRKTTVSTIARPITTRPWTGEFVRWTEPRLVAWP

SEQ ID NO: 18425 - protein, 515 aa, Geobacillus stearothermophilus
AAPFNGTMMQYFEWYLPDDGTLWTKVANEANNLSSLGITALWLPPAYKGTSRSDVGYGAYDLYDLGEFNQKGTVRTKYGTKAQYLQAIQAAHAAGMQVYADVVFDHKGGADGTEWVDAVEVNPSDRNQVISGTYQIQAWTKFDFPGRGNTYSSFKWRWYHFDGVDWDESRKLSRIYLFEGIGKAWDWEVDTENGNYDYLMYADLDMDHPEVVTELKNWGPWYVLTTNIDGFRLDAVKHIKFQFFPDWTSYVRSSTGKPLFTVGEYWSYDINKLHNYITKTNGTMSLFDAPLHNKFYTASKSGGAFDMRTLMTNTLMKDQPTLAVTFVDNHDTEPGQALQSWVDPWFKPLAYAFILTRQEGYPCVFYGDYYGIPQYNIPSLKSKIDPLLIARRDYAYGTQHDYLDHSDIIGWTREGVTEKPGSGLAALITDGPGGSKWMYVGKQHAGKVFYDLTGNRSDTVTINSDGWGEFKVNGGSVSVWVPRKTTVSTIARPITTRPWTGEFVRWTEPRLVAWP

SEQ ID NO: 18426 - protein, 515 aa, Geobacillus stearothermophilus
AAPFNGTMMQYFEWYLPDDGTLWTKVANEANNLSSLGITALWLPPAYKGTSRSDVGYGAYDLYDLGEFNQKGTVRTKYGTKAQYLQAIRAAHAAGMQVYADVVFDHKGGADGTEWVDAVEVNPSDRNQVISGTYQIQAWTKFDFPGRGNTYSSFKWRWYHFDGVDWDESRKLSRIYLFEGIGKAWDWEVDTENGNYDYLMYADLDMDYPEVVTELKNWGPWYVLTTNIDGFRLDAVKHIKFSFFPDWLSYVRSSTGKPLFTVGEYWSYDINKLHNYITKTNGTMSLFDAPLHNKFYTASKSGGAFDMRTLMTNTLMKDQPTLAVTFVDNHDTEPGQALQSWVDPWFKPLAYAFILTRQEGYPCVFYGDYYGIPQYNIPSLKSKIDPLLIARRDYAYGTQHDYLDHSDIIGWTREGVTEKPGSGLAALITDGPGGSKWMYVGKQHAGKVFYDLTGNRSDTVTINSDGWGEFKVNGGSVSVWVPRKTTVSTIARPITTRPWTGEFVRWTEPRLVAWP

SEQ ID NO: 18427 - protein, 515 aa, Geobacillus stearothermophilus
AAPFNGTMMQYFEWYLPDDGTLWTKVANEANNLSSLGITALWLPPAYKGTSRSDVGYGAYDLYDLGEFNQKGTVRTKYGTKAQYLQAIRAAHAAGMQVYADVVFDHKGGADGTEWVDAVEVNPSDRNQVISGTYQIQAWTKFDFPGRGNTYSSFKWRWYHFDGVDWDESRKLSRIYLFEGIGKAWDWEVDTENGNYDYLMYADLDMDHPEVVTELKNWGPWYVLTTNIDGFRLDAVKHIKFSFFPDWLSYVRSSTGKPLFTVGEYWSYDINKLHNFITKTNGTMSLFDAPLHNKFYTASKSGGAFDMRTLMTNTLMKDQPTLAVTFVDNHDTEPGQALQSWVDPWFKPLAYAFILTRQEGYPCVFYGDYYGIPQYNIPSLKSKIDPLLIARRDYAYGTQHDYLDHSDIIGWTREGVTEKPGSGLAALITDGPGGSKWMYVGKQHAGKVFYDLTGNRSDTVTINSDGWGEFKVNGGSVSVWVPRKTTVSTIARPITTRPWTGEFVRWTEPRLVAWP

SEQ ID NO: 18428 - protein, 515 aa, Geobacillus stearothermophilus
AAPFNGTMMQYFEWYLPDDGTLWTKVANEANNLSSLGITALWLPPAYKGTSRSDVGYGAYDLYDLGEFNQKGTVRTKYGTKAQYLQAIQAAHAAGMQVYADVVFDHKGGADGTEWVDAVEVNPSDRNQVISGTYQIQAWTKFDFPGRGNTYSSFKWRWYHFDGVDWDESRKLSRIYLFEGIGKAWDWEVDTENGNYDYLMYADLDMDHPEVVTELKNWGPWYVLTTNIDGFRLDAVKHIKFQFFPDWLSYVRSSTGKPLFTVGEYWSYDINKLHNYITKTNGTTSLFDAPLHNKFYTASKSGGAFDMRTLMTNTLMKDQPTLAVTFVDNHDTEPGQALQSWVDPWFKPLAYAFILTRQEGYPCVFYGDYYGIPQYNIPSLKSKIDPLLIARRDYAYGTQHDYLDHSDIIGWTREGVTEKPGSGLAALITDGPGGSKWMYVGKQHAGKVFYDLTGNRSDTVTINSDGWGEFKVNGGSVSVWVPRKTTVSTIARPITTRPWTGEFVRWTEPRLVAWP

SEQ ID NO: 18429 - protein, 515 aa, Geobacillus stearothermophilus
AAPFNGTMMQYFEWYLPDDGTLWTKVANEANNLSSLGITALWLPPAYKGTSRSDVGYGVYDLYDLGEFNQKGTVRTKYGTKAQYLQAIQAAHAAGMQVYADVVFDHKGGADGTEWVDAVEVNPSDRNQVISGTYQIQAWTKFDFPGRGNTYSSFKWRWYHFDGVDWDESRKLSRIYLFEGIGKAWDWEVDTENGNYDYLMYADLDMDHPEVVTELKNWGPWYVLTTNIDGFRLDAVKHIKFQFFPDWLSYVRSSTGKPLFTVGEYWSYDINKLHNYITKTNGTMSLFDAPLHNKFYTASKSGGAFDMRTLMTNTLMKDQPTLAVTFVDNHDTEPGQALQSWVDPWFKPLAYAFILTRQEGYPCVFYGDYYGIPQYXXPSLKSKIDPLLIARRDYAYGTQHDYLDHSDIIGWTREGVTEKPGSGLAALITDGPGGSKWMYVGKQHAGKVFYDLTGNRSDTVTINSDGWGEFKVNGGSVSVWVPRKTTVSTIARPITTRPWTGEFVRWTEPRLVAWP

SEQ ID NO: 18430 - protein, 515 aa, Geobacillus stearothermophilus
AAPFNGTMMQYFEWYLPDDGTLWTKVANEANNLSSLGITALWLPPAYKGTSRSDVGYGVYDLYDLGEFNQKGTVRTKYGTKAQYLQAIQAAHAAGMQVYADVVFDHKGGADGTEWVDAVEVNPSDRNQVISGTYQIQAWTKFDFPGRGNTYSSFKWRWYHFDGVDWDESRKLSRIYLFEGIGKAWDWEVDTENGNYDYLMYADLDMDHPEVVTELKNWGPWYVLTTNIDGFRLDAVKHIKFQFFPDWLSYVRSSTGKPLFTVGEYWSYDINKLHNFITKTNGTMSLFDAPLHNKFYTASKSGGAFDMRTLMTNTLMKDQPTLAVTFVDNHDTEPGQALQSWVDPWFKPLAYAFILTRQEGYPCVFYGDYYGIPQYNIPSLKSKIDPLLIARRDYAYGTQHDYLDHSDIIGWTREGVTEKPGSGLAAMITDGPGGSKWMYVGKQHAGKVFYDLTGNRSDTVTINSDGWGEFKVNGGSVSVWVPRKTTVSTIARPITTRPWTGEFVRWTEPRLVAWP

SEQ ID NO: 18431 - protein, 515 aa, Geobacillus stearothermophilus
AAPFNGTMMQYFEWYLPDDGTLWTKVANEANNLSSLGITALWLPPAYKGTSRSDVGYGAYDLYDLGEFNQKGTVRTKYGTKAQYLQAIRAAHAAGMQVYADVVFDHKGGADGTEWVDAVEVNPSDRNQVISGTYQIQAWTKFDFPGRGNTYSSFKWRWYHFDGVDWDESRKLSRIYLFEGIGKAWDWEVDTENGNYDYLMYADLDMDHPEVVTELKNWGPWYVLTTNIDGFRLDAVKHIKFSFFPDWLSYVRSSTGKPLFTVGEYWSYEINKLHNYITKTNGTMSLFDAPLHNKFYTASKSGGAFDMRTLMTNTLMKDQPTLAVTFVDNHDTEPGQALQSWVDPWFKPLAYAFILTRQEGYPCVFYGDYYGIPQYNIPSLKSKIDPLLIARRDYAYGTQHDYLDHSDIIGWTREGVTEKPGSGLAALITDGPGGSKWMYVGKQHAGKVFYDLTGNRSDTVTINSDGWGEFKVNGGSVSVWVPRKTTVSTIARPITTRPWTGEFVRWTEPRLVAWP

SEQ ID NO: 18432 - protein, 515 aa, Geobacillus stearothermophilus
AAPFNGTMMQYFEWYLPDDGTLWTKVANEANNLSSLGITALWLPPAYKGTSRSDVGYGVYDLYDLGEFNQKGTVRTKYGTKAQYLQAIQALHAAGIQVYADVVFDHKGGADGTEWVDAVEVNPSDRNQVISGTYQIQAWTKFDFPGRGNTYSSFKWRWYHFDGVDWDESRKLSRIYLFEGIGKAWDWEVDTENGNYDYLMYADLDMDHPEVVTELKNWGPWYVLTTNIDGFRLDAVKHIKFQFFPDWLSYVRSSTGKPLFTVGEYWSYDINKLHNYITKTNGTMSLFDAPLHNKFYTASKSGGAFDMRTLMTNTLMKDQPTLAVTFVDNHDTEPGQALQSWVDPWFKPLAYAFILTRQEGYPCVFYGDYYGIPQYNIPSLKSKIDPLLIARRDYAYGTQHDYLDHSDIIGWTREGVTEKPGSGLAALITDGPGGSKWMYVGKQHAGKVFYDLTGNRSDTVTINSDGWGEFKVNGGSVSVWVPRKTTVSTIARPITTRPWTGEFVRWTEPRLVAWP

SEQ ID NO: 18433 - protein, 515 aa, Geobacillus stearothermophilus
AAPFNGTMMQYFEWYLPDDGTLWTKVANEANNLSSLGITALWLPPAYKGTSRSDVGYGAYDLYDLGEFNQKGTVRTKYGTKAQYLQAIQAAHAAGMQVYADVVFDHKGGADGTEWVDAVEVNPSDRNQVISGTYQIQAWTKFDFPGRGNTYSSFKWYWYHFDGVDWDESRKLSRIYLFEGIGKAWDWEVDTENGNYDYLMYADLDMDHPEVVTELKNWGPWYVLTTNIDGFRLDAVKHIKFQFFPDWLSYVRSSTGKPLFTVGEYWSYDINKLHNYITKTNGTMSLFDAPLHNKFYTASKSGGAFDMRTLMTNTLMKDQPTLAVTFVDNHDTEPGQALQSWVDPWFKPLAYAFILTRQEGYPCVFYGDYYGIPQYNIPSLKSKIDPLLIARRDYAYGTQHDYLDHSDIIGWTREGVTEKPGSGLAALITDGPGGSKWMYVGKQHAGKVFYDLTGNRSDTVTINSDGWGEFKVNGGSVSVWVPRKTTVSTIARPITTRPWTGEFVRWTEPRLVAWP

SEQ ID NO: 18434 - protein, 515 aa, Bacillus stearothermophilus
AAPFNGTMMQYFEWYLPDDGTLWTKVANEANNLSSLGITALWLPPAYKGTSRSDVGYGAYDLYDLGEFNQKGTVRTKYGTKAQYLQAIRAAHAAGMQVYADVVFDHKGGADDTEWVDAVEVNPSDRNQVISGTYQIQAWTKFDFPGRGNTYSSFKWRWYHFDGVDWDESRKLSRIYLFEGIGKAWDWEVDTENGNYDYLMYADLDMDHPEVVTELKNWGPWYVLTTNIDGFRLDAVKHIKFSFFPDWLSYVRSSTGKPLFTVGEYWSYDINKLHNYITKTNGTMSLFDAPLHNKFYTASKSGGAFDMRTLMTNTLMKDQPTLAVTFVDNHDTEPGQALQSWVDPWFKPLAYAFILTRQEGYPCVFYGDYYGIPQYNIPSLKSKIDPLLIARRDYAYGTQHDYLDHSDIIGWTREGVTEKPGSGLAALITDGPGGSKWMYVGKQHAGKVFYDLTGNRSDTVTINSDGWGEFKVNGGSVSVWVPRKTTVSTIARPITTRPWTGEFVRWTEPRLVAWP

SEQ ID NO: 18435 - protein, 515 aa, Geobacillus stearothermophilus
AAPFNGTMMQYFEWYLPDDGTLWTKVANEANNLSSLGITALWLPPAYKGTSRSDVGYGAYDLYDLGEFNQKGTVRTKYGTKAQYLQAIQAAHAAGMQVYADVVFDHKGGADGTEWVDAVEVNPSDRNQVISGTYQIQAWTKFDFPGRGNTYSSFKWRWYHFDGVDWDESRKLSRIYLFEGIGKAWDWEVDTENGNYDYLMYADLDMDYPEVVTELKNWGPWYVLTTNIDGFRLDAVKHIKFQFFPDWLSYVRSSTGKPLFTVGEYWSYDINKLHNYITKTNGTMSLFDAPLHNKFYTASKSGGAFDMRTLMTNTLMKDQPTLAVTFVDNHDTEPGQALQSWVDPWFKPLAYAFILTRQEGYPCVFYGDYYGIPQYNIPSLKSKIDPLLIARRDYAYGTQHDYLDHSDIIGWTREGVTEKPGSGLAALITDGPGGSKWMYVGKQHAGKVFYDLTGNRSDTVTINSDGWGEFKVNGGSVSVWVPRKTTVSTIARPITTRPWTGEFVRWTEPRLVAWP

SEQ ID NO: 18436 - protein, 515 aa, Geobacillus stearothermophilus
AAPFNGTMMQYFEWYLPDDGTLWTKVANEANNLSSLGITALWLPPAYKGTSRSDVGYGAYDLYDLGEFNQKGTVRTKYGTKAQYLQAIQAAHAAGMQVYADVVFDHKGGADGTEWVDAVEVNPSDRNQVISGTYQIQAWTKFDFPGRGNTYSSFKWRWYHFDGVDWDESRKLSRIYLFEGIGKAWDWEVDTENGNYDYLMYADLDMDHPEVVTELKNWGPWYVLTTNIDGFRLDAVKHIKFQFFPDWLSYVRSSTGKPLFTVGEYWSYDINKLHNFITKTNGTMSLFDAPLHNKFYTASKSGGAFDMRTLMTNTLMKDQPTLAVTFVDNHDTEPGQALQSWVDPWFKPLAYAFILTRQEGYPCVFYGDYYGIPQYNIPSLKSKIDPLLIARRDYAYGTQHDYLDHSDIIGWTREGVTEKPGSGLAALITDGPGGSKWMYVGKQHAGKVFYDLTGNRSDTVTINSDGWGEFKVNGGSVSVWVPRKTTVSTIARPITTRPWTGEFVRWTEPRLVAWP

SEQ ID NO: 18437 - protein, 515 aa, Bacillus stearothermophilus
AAPFNGTMMQYFEWYLPDDGTLWTKVANEANNLSSLGITALWLPPAYKGTSRSDVGYGAYDLYDLGEFNQKGTVRTKYGTKAQYLQAIQAAHAAGMQVYADVVFDHKGGADGTEWVDAVEVNPSDRNQVISGTYQIQAWTKFDFPGRGNTYSSFKWRWYHFDGVDWDESRKLSRIYLFEGIGKAWDWEVDTENGNYDYLMYADLDMDHPEVVTELKNWGPWYVLTTNIDGFRLDAVKHIKFQFFPDWLSYVRSSTGKPLFTVGEYWSYDINKLKNYITKTNGTMSLFDAPLHNKFYTASKSGGAFDMRTLMTNTLMKDQPTLAVTFVDNHDTEPGQALQSWVDPWFKPLAYAFILTRQEGYPCVFYGDYYGIPQYNIPSLKSKIDPLLIARRDYAYGTQHDYLDHSDIIGWTREGVTEKPGSGLAALITDGPGGSKWMYVGKQHAGKVFYDLTGNRSDTVTINSDGWGEFKVNGGSVSVWVPRKTTVSTIARPITTRPWTGEFVRWTEPRLVAWP

SEQ ID NO: 18438 - protein, 515 aa, Geobacillus stearothermophilus
AAPFNGTMMQYFEWYLPDDGTLWTKVANEANNLSSLGITALWLPPAYKGTSRSDVGYGAYDLYDLGEFNQKGTVRTKYGTKAQYLQAIRAAHAAGMQVYADVVFDHKGGADGTEWVDAVEVNPSDRNQVISGTYQIQAWTKFDFPGRGNTYSSFKWRWYHFDGVDWDESRKLSRIYLFEGIGKAWDWEVDTENGNYDYLMYADLDMDHPEVVTELKNWGPWYVLTTNIDGFRLDAVKHIKFSFFPDWLSYVRSSTGKPLFTVGEYWSYDINKLKNYITKTNGTMSLFDAPLHNKFYTASKSGGAFDMRTLMTNTLMKDQPTLAVTFVDNHDTEPGQALQSWVDPWFKPLAYAFILTRQEGYPCVFYGDYYGIPQYNIPSLKSKIDPLLIARRDYAYGTQHDYLDHSDIIGWTREGVTEKPGSGLAALITDGPGGSKWMYVGKQHAGKVFYDLTGNRSDTVTINSDGWGEFKVNGGSVSVWVPRKTTVSTIARPITTRPWTGEFVRWTEPRLVAWP

SEQ ID NO: 18439 - protein, 515 aa, Geobacillus stearothermophilus
AAPFNGTMMQYFEWYLPDDGTLWTKVANEANNLSSLGITALWLPPAYKGTSRSDVGYGAYDLYDLGEFNQKGTVRTKYGTKAQYLQAIRAAHAAGMQVYADVVFDHKGGADGTEWVDAVEVNPSDRNQVISGTYQIQAWTKFDFPGRGNTYSSFKWRWYHFDGVDWDESRKLSRIYLFEGIGKAWDWEVDTENGNYDYLMYADLDMDHPEVVTELKNWGPWYVLTTNIDGFRLDAVKHIKFSFFPDWLSYVRSSTGKPLFTVGEYWSYDLNKLHNYITKTNGTMSLFDAPLHNKFYTASKSGGAFDMRTLMTNTLMKDQPTLAVTFVDNHDTEPGQALQSWVDPWFKPLAYAFILTRQEGYPCVFYGDYYGIPQYNIPSLKSKIDPLLIARRDYAYGTQHDYLDHSDIIGWTREGVTEKPGSGLAALITDGPGGSKWMYVGKQHAGKVFYDLTGNRSDTVTINSDGWGEFKVNGGSVSVWVPRKTTVSTIARPITTRPWTGEFVRWTEPRLVAWP

SEQ ID NO: 18440 - protein, 514 aa, Geobacillus stearothermophilus
AAPFNGTMMQYFEWYLPDDGTLWTKVANEANNLSSLGITALWLPPAYKGTSRSDVGYGVYDLYDLGEFNQKGAVRTKYGTKAQYLQAIQAAHAAGMQVYADVVFDHKGGADGTEWVDAVEVNPSDRNQEISGTYQIQAWTKFDFPGRGNTYSSFKWRWYHFDGVDWDESRKLSRIYKFRGIGKAWDWEVDTENGNYDYLMYADLDMDHPEVVTELKSWGKWYVNTTNIDGFRLDAVKHIKFSFFPDWLSDVRSQTGKPLFTVGEYWSYDINKLHNYIMKTNGTMSLFDAPLHNKFYTASKSGGTFDMRTLMTNTLMKDQPTLAVTFVDNHDTEPGQALQSWVDPWFKPLAYAFILTRFEGYPCVFYGDYYGIPQYNIPSLKSKIDPLLIARRDYAYGTQHDYLDHSDIIGWTREGVTEKPGSGLAALITDGPGGSKWMYVGKQHAGKVFYDLTGNRSDTVTINSDGWGEFKVNGGSVSVWVPRKTTVSTIAWSITTRPWTDEFVRWTEPRLVAW

SEQ ID NO: 18441 - protein, 514 aa, Geobacillus stearothermophilus
AAPFNGTMMQYFEWYLPDDGTLWTKVANEANNLSSLGITALWLPPAYKGTSRSDVGYGVYDLYDLGEFNQKGAVRTKYGTKAQYLQAIQAAHAAGMQVYADVVFDHKGGADGTEWVDAVEVNPSDRNQEISGTYQIQAWTKFDFPGRGNTYSSFKWRWYHFDGVDWDESRKLSRIYKFRGIGKAWDWEVDTENGNYDYLMYADLDMDHPEVVTELKSWGKWYVNTTNIDGFRLDAVKHIKFSFFPDWLSDVRSQTGKPLFTVGEYWSYDINKLHNYIMKTNGTMSLFDAPLHNKFYTASKSGGTFDMRTLMTNTLMKDQPTLAVTFVDNHDTEPGQALQSWVDPWFKPLAYAFILARQEGYPCVFYGDYYGIPQYNIPSLKSKIDPLLIARRDYAYGTQHDYLDHSDIIGWTREGVTEKPGSGLAALITDGPGGSKWMYVGKQHAGKVFYDLTGNRSDTVTINSDGWGEFKVNGGSVSVWVPRKTTVSTIAWSITTRPWTDEFVRWTEPRLVAW

SEQ ID NO: 18442 - protein, 514 aa, Geobacillus stearothermophilus
AAPFNGTMMQYFEWYLPDDGTLWTKVANEANNLSSLGITALWLPPAYKGTSRSDVGYGVYDLYDLGEFNQKGAVRTKYGTKAQYLQAIQAAHAAGMQVYADVVFDHKGGADGTEWVDAVEVNPSDRNQEISGTYQIQAWTKFDFPGRGNTYSSFKWRWYHFDGVDWDESRKLSRIYKFRGIGKAWDWEVDTENGNYDYLMYADLDMDHPEVVTELKSWGKWYVNTTNIDGFRLDAVKHIKFSFFPDWLSDVRSQTGKPLFTVGEYWSYDINKLHNYIMKTNGTMSLFDAPLHNKFYTASKSGGTFDMRTLMTNTLMKDQPTLAVTFVDNHDTEPGQALQSWVDPWFKPLAYAFILTRQEGYPCVFYGDYYGIPQYKIPSLKSKIDPLLIARRDYAYGTQHDYLDHSDIIGWTREGVTEKPGSGLAALITDGPGGSKWMYVGKQHAGKVFYDLTGNRSDTVTINSDGWGEFKVNGGSVSVWVPRKTTVSTIAWSITTRPWTDEFVRWTEPRLVAW

SEQ ID NO: 18443 - protein, 514 aa, Bacillus sp.
AAPFNGTMMQYFEWYLPDDGTLWTKVANEANNLSSLGITALWLPPAYKGTSRSDVGYGVYDLYDLGEFNQKGAVRTKYGTKAQYLQAIQAAHAAGMQVYADVVFDHKGGADGTEWVDAVEVNPSDRNQEISGTYQIQAWTKFDFPGRGNTYSSFKWRWYHFDGVDWDESRKLSRIYKFRGIGKAWDWEVDTENGNYDYLMYADLDMDHPEVVTQLKSWGKWYVNTTNIDGFRLDAVKHIKFSFFPDWLSDVRSQTGKPLFTVGEYWSYDINKLHNYIMKTNGTMSLFDAPLHNKFYTASKSGGTFDMRTLMTNTLMKDQPTLAVTFVDNHDTEPGQALQSWVDPWFKPLAYAFILTRQEGYPCVFYGDYYGIPQYNIPSLKSKIDPLLIARRDYAYGTQHDYLDHSDIIGWTREGVTEKPGSGLAALITDGPGGSKWMYVGKQHAGKVFYDLTGNRSDTVTINSDGWGEFKVNGGSVSVWVPRKTTVSTIAWSITTRPWTDEFVRWTEPRLVAW

SEQ ID NO: 18444 - protein, 498 aa, Aspergillus oryzae
MVAWWSLFLYGLQVAAPALAATPADWRSQSIYFLLTDRFARTDGSTTATCNTADQKYCGGTWQGIIDKLDYIQGMGFTAIWITPVTAQLPQTTAYGDAYHGYWQQDIYSLNENYGTADDLKALSSALHERGMYLMVDVVANHMGYDGAGSSVDYSVFVPFNSASYFHPFCFIQNWDNQTQVEDCWLGDNTVSLPDLDTTKDVVKNEWYDWVGSLVSNYSIDGLRIDTVKHVQKDFWPGYNKAAGVYCIGEVLDGDPAYTCPYQEVLDGVLNYPIYYPLLNAFKSTSGSMDDLYNMINTVKSDCPDSTLLGTFVENHDNPRFASYTNDIALAKNVAAFIILNDGIPIIYAGQEQHYAGGNDPANREATWLSGYPTDSELYKLIASANAIRNYAISKDTGFVTYKNWPIYKDDTTIAMRKGTDGSQIVTILSNKGASGDSYTLSLSGAGYTAGQQLTEVIGCTTVTVDSSGDVPVPMAGGLPRVLYPTEKLAGSKICSSS

SEQ ID NO: 18445 - protein, 498 aa, Aspergillus oryzae
MVAWWSLFLYGLQVAAPALAATPADWRSQSIYFLLTDRFARTDGSTTATCNTADQKYCGGTWQGIIDKLDYIQGMGFTAIWITPVTAQLPQTTAYGDAYHGYWQQDIYSLNENYGTADDLKALSSALHERGMYLMVDVVANHMGYDGAGSSVDYSVFVPFNSASYFHPFCFIQNWDNQTQVEDCWLGDNTVSLPDLDTTKDVVKNEWYDWVGSLVSNYSIDGLRIDTVKHVQKDFWPGYNKAAGVYCIGEVLDGDPAYTCPYQKVLDGVLNYPIYYPLLNAFKSTSGSMDDLYNMINTVKSDCPDSTLLGTFVENHDNPRFASYTNDIALAKNVAAFIILNDGIPIIYAGQEQHYAGGNDPANREATWLSGYPTDSELYKLIASANAIRNYAISKDTGFVTYKNWPIYKDDTTIAMRKGTDGSQIVTILSNKGASGDSYTLSLSGAGYTAGQQLTEVIGCTTVTVDSSGDVPVPMAGGLPRVLYPTEKLAGSKICSSS

SEQ ID NO: 18446 - protein, 496 aa, Geobacillus stearothermophilus
FNGTMMQYFEWYLPDDGTLWTKVANEANNLSSLGITALWLPPAYKGTSRSDVGYGVYDLYDLGEFNQKGTVRTKYGTKAQYLQAIQAAHAAGMQVYADVVFDHKGGADGTEWVDAVEVNPSDRNQEISGTYQIQAWTKFDFPGRGNTYSSFKWRWYHFDGVDWDESRKLSRIYKFRGKAWDWEVDTEFGNYDYLMYADLDMDHPEVVTELKNWGKWYVNTTNIDGFRLDAVKHIKFSFFPDWLSYVRSQTGKPLFTVGEYWSYDINKLHNYITKTDGTMSLFDAPLHNKFYTASKSGGAFDMRTLMTNTLMKDQPTLAVTFVDNHDTEPGQALQSWVDPWFKPLAYAFILTRQEGYPCVFYGDYYGIPQYNIPSLKSKIDPLLIARRDYAYGTQHDYLDHSDIIGWTREGGTEKPGSGLAALITDGPGGSKWMYVGKQHAGKVFYDLTGNRSDTVTINSDGWGEFKVNGGSVSVWVPKISTTSQITFTVNNATTVW

SEQ ID NO: 18447 - protein, 491 aa, Geobacillus stearothermophilus
AAPFNGTMMQYFEWYLPDDGQLWTKVANEANNLSSLGITALWLPPAYKGTSRSDVGYGAYDLYDLGEFNQKGTVRTKYGTKAQYLKAIQAAHAAGMQVYADVVFDHKGGADGTEWVQAVEVNPSDRNQVISGTYQIQAWTKFDFPGRGNTYSSFKWRWYHFDGVDWDESRKLNRIYLFEGKAWDWEVDTEFGNYDYLMYADLDMDYPEVTTELKNWGKWYVNTTNIDGFRLDAVKHIKFSFFPDWLSYVRSSTGKPLFTVGEYWSGDINKLHNYITKTDGTVSLFDAPLHYKFYNASKSGGAFDMRTLMTNTLMKDQPTLAVTFVDNHDTEPGQALQSWVDPWFKPLAYAFILTRQEGYPCVFYGDYYGIPQYNIPSLKHKIDPLLIARRDYAYGTQHDYLDHSDIIGWTREGGTEKPGSGLAALITDGPGGSKWMYVGKQHAGKVFYDLTGNRSDTVTINSDGWGEFKVNGGSVSVWVPRKTTVSTIARP

SEQ ID NO: 18448 - protein, 486 aa, Geobacillus stearothermophilus
AAPFNGTMMQYFEWYLPDDGTLWTKVANEANNLSSLGITALWLPPAYKGTSRSDVGYGAYDLYDLGEFNQKGTVRTKYGTKAQYLQAIQAAHAAGMQVYADVVFDHKGGADGTEWVDAVEVNPSDRNQVISGTYQIQAWTKFDFPGRGNTYSSFKWRWYHFDGVDWDESRKLSRIYLFEGKAWDWEVDTEFGNYDYLMYADLDMDHPEVTTELKNWGKWYVNTTNIDGFRLDAVKHIKFSFFPDWLSYVRSSTGKPLFTVGEYWSGDINKLHNYITKTDGTVSLFDAPLHYKFYNASKSGGAFDMRWLMWNTLMKDQPTLAVTFVDNHDTEPGQALQSWVDPWFKPLAYAFILTRQEGYPCVFYGDYYGIPQYNIPSLKSKIDPLLIARRDYAYGTQHDYLDHSDIIGWTREGGTEKPGSGLAALITDGPGGSKWMYVGKQHAGKVFYDLTGNRSDTVTINSDGWGEFKVNGGSVSVWVPRKTTVS

SEQ ID NO: 18449 - protein, 486 aa, Geobacillus stearothermophilus
AAPFNGTMMQYFEWYLPDDGTLWTKVANEANNLSSLGITALWLPPAYKGTSRSDVGYGAYDLYDLGEFNQKGTVRTKYGTKAQYLQAIQAAHAAGMQVYADVVFDHKGGADGTEWVDAVEVNPSDRNQVISGTYQIQAWTKFDFPGRGNTYSSFKWRWYHFDGVDWDESRKLSRIYLFEGKAWDWPVDTEFGNYDYLMYADLDMDHPEVTTELKNWGKWYVNTTNIDGFRLDAVKHIKFSFFPDWLSYVRSSTGKPLFTVGEYWSGDINKLHNYITITDGTVSLFDAPLHYKFYNASKSGGAFDMRTLMTNTLMKDQPTLAVTFVDNHDTEPGQALQSWVDPWFKPLAYAFILTRQEGYPCVFYGDYYGIPQYNIPSLKSKIDPLLIARRDYAYGTQHDYLDHSDIIGWTREGGTEKPGSGLAALITDGPGGSKWMYVGKQHAGKVFYDLTGNRSDTVTINSDGWGEFKVNGGSVSVWVPRKTTVS

SEQ ID NO: 18450 - protein, 488 aa, Geobacillus stearothermophilus
AAPFNGTMMQYFEWYLPDDGTLWTKVANEANNLSSLGITALWLPPAYKGTSRSDVGYGAYDLYDLGEFNQKGTVRTKYGTKAQYLQAIQAAHAAGMQVYADVVFDHKGGADGTEWVDAVEVNPSDRNQVISGTYQIQAWTKFDFPGRGNTYSSFKWRWYHFDGVDWDESRKLSRIYLFEGIGKAWDWEVDTENGNYDYLMYADLDMDHPEVVTELKNWGPWYVLTTNIDGFRLDAVKHIKFQFFPDWTSYVRSSTGKPLFTVGEYWSYDINKLHNYITKTNGTMSLFDAPLHNKFYTASKSGGAFDMRTLMTNTLMKDQPTLAVTFVDNHDTEPGQALQSWVDPWFKPLAYAFILTRQEGYPCVFYGDYYGIPQYNIPSLKSKIDPLLIARRDYAYGTQHDYLDHSDIIGWTREGVTEKPGSGLAALITDGPGGSKWMYVGKQHAGKVFYDLTGNRSDTVTINSDGWGEFKVNGGSVSVWVPRKTTVS

SEQ ID NO: 18451 - protein, 486 aa, Geobacillus stearothermophilus
AAPFNGTMMQYFEWYLPDDGTLWTKVANEANNLSSLGITALWLPPAYKGTSRSDVGYGAYDLYDLGEFNQKGTVRTKYGTKAQYLQAIQAAHAAGMQVYADVVFDHKGGADGTEWVDAVEVNPSDRNQVISGTYQIQAWTKFDFPGRGNTYSSFKWRWYHFDGVDWDESRKLSRIYLFEGKAWDWPVDTEFGNYDYLMYADLDMDHPEVTTELKNWGKWYVNTTNIDGFRLDAVKHIKFSFFPDWLSYVRSSTGKPLFTVGEYWSGDINKLHFYITKTDGTVSLFDAPLHYKFYNASKSGGAFDMRTLMTNTLMKDQPTLAVTFVDNHDTEPGQALQSWVDPWFKPLAYAFILTRQEGYPCVFYGDYYGIPQYNIPSLKSKIDPLLIARRDYAYGTQHDYLDHSDIIGWTREGGTEKPGSGLAALITDGPGGSKWMYVGKQHAGKVFYDLTGNRSDTVTINSDGWGEFKVNGGSVSVWVPRKTTVS

SEQ ID NO: 18452 - protein, 486 aa, Geobacillus stearothermophilus
AAPFNGTMMQYFEWYLPDDGTLWTKVANEANNLSSLGITALWLPPAYKGTSRSDVGYGAYDLYDLGEFNQKGTVRTKYGTKAQYLQAIQAAHAAGMQVYADVVFDHKGGADGTEWVDAVEVNPSDRNQVISGTYQIQAWTKFDFPGRGNTYSSFKWRWYHFDGVDWDESRKLSRIYLFEGKAWDWEVDTEFGNYDYLMYADLDMDYPEVTTELKRWGKWYVNTTNIDGFRLDAVKHIKFSFFPDWLSYVRSSTGKPLFTVGEYWSGDINKLHNYITKTDGTVSLFDAPLHYKFYNASKSGGAFDMRTLMTNTLMKDQPTLAVTFVDNHDTEPGQALQSWVDPWFKPLAYAFILTRQEGYPCVFYGDYYGIPQYNIPSLKSKIDPLLIARRDYAYGTQHDYLDHSDIIGWTREGGTEKPGSGLAALITDGPGGSKWMYVGKQHAGKVFYDLTGNRSDTVTINSDGWGEFKVNGGSVSVWVPRKTTVS

SEQ ID NO: 18453 - protein, 486 aa, Geobacillus stearothermophilus
AAPFNGTMMQYFEWYLPDDGTLWTKVANEANNLSSLGITALWLPPAYKGTSRSDVGYGAYDLYDLGEFNQKGTVRTKYGTKAQYLQAIQAAHAAGMQVYADVVFDHKGGADGTEWVDAVEVNPSDRYQVISGTYQIQAWTKFDFPGRGNTYSSFKWRWYHFDGVDWDESRKLSRIYLFEGKAWDWPVDTEFGNYDYLMYADLDMDHPEVTTELKNWGKWYVNTTNIDGFRLDAVKHIKFSFFPDWLSYVRSSTGKPLFTVGEYWSGDINKLHNYITKTDGTVSLFDAPLHYKFYNASKSGGAFDMRTLMTNTLMKDQPTLAVTFVDNHDTEPGQALQSWVDPWFKPLAYAFILTRQEGYPCVFYGDYYGIPQYNIPSLKSKIDPLLIARRDYAYGTQHDYLDHSDIIGWTREGGTEKPGSGLAALITDGPGGSKWMYVGKQHAGKVFYDLTGNRSDTVTINSDGWGEFKVNGGSVSVWVPRKTTVS

SEQ ID NO: 18454 - protein, 486 aa, Geobacillus stearothermophilus
AAPFNGTMMQYFEWYLPDDGTLWTKVANEANNLSSLGITALWLPPAYKGTSRSDVGYGAYDLYDLGEFNQKGTVRTKYGTKAQYLQAIQAAHAAGMQVYADVVFDHKGGADGTEWVDAVEVNPSDRNQVISGTYQIQAWTKFDFPGRGNTYSSFKWRWYHFDGVDWDESRKLSRIYLFEGKAWDWPVDTEFGNYDYLMYADLDMDHPEVTTELKNWGKWYVNTTNIDGFRLDAVKHIKFSFFPDWLSYVRSSTGKPLFTVGEYWSGDINKLHNYITYTDGTVSLFDAPLHYKFYNASKSGGAFDMRTLMTNTLMKDQPTLAVTFVDNHDTEPGQALQSWVDPWFKPLAYAFILTRQEGYPCVFYGDYYGIPQYNIPSLKSKIDPLLIARRDYAYGTQHDYLDHSDIIGWTREGGTEKPGSGLAALITDGPGGSKWMYVGKQHAGKVFYDLTGNRSDTVTINSDGWGEFKVNGGSVSVWVPRKTTVS

SEQ ID NO: 18455 - protein, 486 aa, Geobacillus stearothermophilus
AAPFNGTMMQYFEWYLPDDGTLWTKVANEANNLSSLGITALWLPPAYKGTSRSDVGYGAYDLYDLGEFNQKGTVRTKYGTKAQYLQAIQAAHAAGMQVYADVVFDHKGGADGTEWVDAVEVNPSDRNQVISGTYQIQAWTKFDFPGRGNTYSSFKWRWYHFDGVDWDESRKLSRIYLFEGKAWDWPVDTEFGNYDYLMYADLDMDHPEVTTELKNWGKWYVNTTNIDGFRLDAVKHIKFSFFPDWLSYVRSSTGKPLFTVGEYWSGDINKLHWYITKTDGTVSLFDAPLHYKFYNASKSGGAFDMRTLMTNTLMKDQPTLAVTFVDNHDTEPGQALQSWVDPWFKPLAYAFILTRQEGYPCVFYGDYYGIPQYNIPSLKSKIDPLLIARRDYAYGTQHDYLDHSDIIGWTREGGTEKPGSGLAALITDGPGGSKWMYVGKQHAGKVFYDLTGNRSDTVTINSDGWGEFKVNGGSVSVWVPRKTTVS

SEQ ID NO: 18456 - protein, 488 aa, Geobacillus stearothermophilus
AAPFNGTMMQYFEWYLPDDGTLWTKVANEANNLSSLGITALWLPPAYKGTSRSDVGYGVYDLYDLGEFNQKGTVRTKYGTKAQYLQAIQAAHAAGMQVYADVVFDHKGGADGTEWVDAVEVNPSDRNQVISGTYQIQAWTKFDFPGRGNTYSSFKWRWYHFDGVDWDESRKLSRIYLFEGIGKAWDWEVDTENGNYDYLMYADLDMDHPEVVTELKNWGPWYVLTTNIDGFRLDAVKHIKFQFFPDWLSYVRSSTGKPLFTVGEYWSYDINKLHNYITKTNGTMSLFDAPLHNKFYTASKSGGAFDMRTLMTNTLMKDQPTLAVTFVDNHDTEPGQALQSWVDPWFKPLAYAFILTRQEGYPCVFYGDYYGIPQYXXPSLKSKIDPLLIARRDYAYGTQHDYLDHSDIIGWTREGVTEKPGSGLAALITDGPGGSKWMYVGKQHAGKVFYDLTGNRSDTVTINSDGWGEFKVNGGSVSVWVPRKTTVS

SEQ ID NO: 18457 - protein, 486 aa, Geobacillus stearothermophilus
AAPFNGTMMQYFEWYLPDDGTLWTKVANEANNLSSLGITALWLPPAYKGTSRSDVGYGAYDLYDLGEFNQKGTVRTKYGTKAQYLQAIQAAHAAGMQVYADVVFDHKGGADGTEWVDAVEVNPSDRNQVISGTYQIQAWTKFDFPGRGNTYSSFKWRWYHFDGVDWDESRKLSRIYLFEGKAWDWPVDTEFGNYDYLMYADLDMDHPEVTTELKNWGKWYVNTTNIDGFRLDAVKHIKFYFFPDWLSYVRSSTGKPLFTVGEYWSGDINKLHNYITKTDGTVSLFDAPLHYKFYNASKSGGAFDMRTLMTNTLMKDQPTLAVTFVDNHDTEPGQALQSWVDPWFKPLAYAFILTRQEGYPCVFYGDYYGIPQYNIPSLKSKIDPLLIARRDYAYGTQHDYLDHSDIIGWTREGGTEKPGSGLAALITDGPGGSKWMYVGKQHAGKVFYDLTGNRSDTVTINSDGWGEFKVNGGSVSVWVPRKTTVS

SEQ ID NO: 18458 - protein, 488 aa, Geobacillus stearothermophilus
AAPFNGTMMQYFEWYLPDDGTLWTKVANEANNLSSLGITALWLPPAYKGTSRSDVGYGAYDLYDLGEFNQKGTVRTKYGTKAQYLQAIRAAHAAGMQVYADVVFDHKGGADGTEWVDAVEVNPSDRNQVISGTYQIQAWTKFDFPGRGNTYSSFKWRWYHFDGVDWDESRKLSRIYLFEGIGKAWDWEVDTENGNYDYLMYADLDMDHPEVVTELKNWGPWYVLTTNIDGFRLDAVKHIKFSFFPDWLSYVRSSTGKPLFTVGEYWSYEINKLHNYITKTNGTMSLFDAPLHNKFYTASKSGGAFDMRTLMTNTLMKDQPTLAVTFVDNHDTEPGQALQSWVDPWFKPLAYAFILTRQEGYPCVFYGDYYGIPQYNIPSLKSKIDPLLIARRDYAYGTQHDYLDHSDIIGWTREGVTEKPGSGLAALITDGPGGSKWMYVGKQHAGKVFYDLTGNRSDTVTINSDGWGEFKVNGGSVSVWVPRKTTVS

SEQ ID NO: 18459 - protein, 486 aa, Geobacillus stearothermophilus
AAPFNGTMMQYFEWYLPDDGTLWTKVANEANNLSSLGITALWLPPAYKGTSRSDVGYGAYDLYDLGEFNQKGTVRTKYGTKAQYLQAIRAAHAAGMQVYADVVFDHKGGADGTEWVDAVEVNPSDRNQVISGTYQIQAWTKFDFPGRGNTYSSFKWYWYHFDGVDWDESRKLSRIYLFEGKAWDWEVDTEFGNYDYLMYADLDMDHPEVVTELKNWGPWYVLTTNIDGFRLDAVKHIKFSFFPDWLSYVRSSTGKPLFTVGEYWSYDINKLHNFITKTNGTMSLFDAPLHNKFYTASKSGGAFDMRTLMTNTLMKDQPTLAVTFVDNHDTEPGQALQSWVDPWFKPLAYAFILTRQEGYPCVFYGDYYGIPQYNIPSLKSKIDPLLIARRDYAYGTQHDYLDHSDIIGWTREGVTEKPGSGLAALITDGPGGSKWMYVGKQHAGKVFYDLTGNRSDTVTINSDGWGEFKVNGGSVSVWVPRKTTVS

SEQ ID NO: 18460 - protein, 488 aa, Geobacillus stearothermophilus
AAPFNGTMMQYFEWYLPDDGTLWTKVANEANNLSSLGITALWLPPAYKGTSRSDVGYGAYDLYDLGEFNQKGTVRTKYGTKAQYLQAIQAAHAAGMQVYADVVFDHKGGADGTEWVDAVEVNPSDRNQVISGTYQIQAWTKFDFPGRGNTYSSFKWRWYHFDGVDWDESRKLSRIYLFEGIGKAWDWEVDTENGNYDYLMYADLDMDHPEVVTELKNWGPWYVLTTNIDGFRLDAVKHIKFQFFPDWLSYVRSSTGKPLFTVGEYWSYDINKLHNYITKTNGTTSLFDAPLHNKFYTASKSGGAFDMRTLMTNTLMKDQPTLAVTFVDNHDTEPGQALQSWVDPWFKPLAYAFILTRQEGYPCVFYGDYYGIPQYNIPSLKSKIDPLLIARRDYAYGTQHDYLDHSDIIGWTREGVTEKPGSGLAALITDGPGGSKWMYVGKQHAGKVFYDLTGNRSDTVTINSDGWGEFKVNGGSVSVWVPRKTTVS

SEQ ID NO: 18461 - protein, 488 aa, Geobacillus stearothermophilus
AAPFNGTMMQYFEWYLPDDGTLWTKVANEANNLSSLGITALWLPPAYKGTSRSDVGYGVYDLYDLGEFNQKGTVRTKYGTKAQYLQAIQALHAAGIQVYADVVFDHKGGADGTEWVDAVEVNPSDRNQVISGTYQIQAWTKFDFPGRGNTYSSFKWRWYHFDGVDWDESRKLSRIYLFEGIGKAWDWEVDTENGNYDYLMYADLDMDHPEVVTELKNWGPWYVLTTNIDGFRLDAVKHIKFQFFPDWLSYVRSSTGKPLFTVGEYWSYDINKLHNYITKTNGTMSLFDAPLHNKFYTASKSGGAFDMRTLMTNTLMKDQPTLAVTFVDNHDTEPGQALQSWVDPWFKPLAYAFILTRQEGYPCVFYGDYYGIPQYNIPSLKSKIDPLLIARRDYAYGTQHDYLDHSDIIGWTREGVTEKPGSGLAALITDGPGGSKWMYVGKQHAGKVFYDLTGNRSDTVTINSDGWGEFKVNGGSVSVWVPRKTTVS

SEQ ID NO: 18462 - protein, 486 aa, Geobacillus stearothermophilus
AAPFNGTMMQYFEWYLPDDGTLWTKVANEANNLSSLGITALWLPPAYKGTSRSDVGYGAYDLYDLGEFNQKGTVRTKYGTKAQYLQAIQAAHAAGMQVYADVVFDHKGGADGTEWVDAVEVNPSDRNQVISGTYQIQAWTKFDFPGRGNTYSSFKWRWYHFDGVDWDESRKLSRIYLFEGKAWDWPVDTEFGNYDYLMYADLDMDHPEVTTELKNWGKWYVNTTNIDGFRLDAVKHIKFSFFPDWLSYVRSSTGKPLFTVGEYWSGDINKLHNYITHTDGTVSLFDAPLHYKFYNASKSGGAFDMRTLMTNTLMKDQPTLAVTFVDNHDTEPGQALQSWVDPWFKPLAYAFILTRQEGYPCVFYGDYYGIPQYNIPSLKSKIDPLLIARRDYAYGTQHDYLDHSDIIGWTREGGTEKPGSGLAALITDGPGGSKWMYVGKQHAGKVFYDLTGNRSDTVTINSDGWGEFKVNGGSVSVWVPRKTTVS

SEQ ID NO: 18463 - protein, 488 aa, Geobacillus stearothermophilus
AAPFNGTMMQYFEWYLPDDGTLWTKVANEANNLSSLGITALWLPPAYKGTSRSDVGYGAYDLYDLGEFNQKGTVRTKYGTKAQYLQAIRAAHAAGMQVYADVVFDHKGGADGTEWVDAVEVNPSDRNQVISGTYQIQAWTKFDFPGRGNTYSSFKWRWYHFDGVDWDESRKLSRIYLFEGIGKAWDWEVDTENGNYDYLMYADLDMDHPEVVTELKNWGPWYVLTTNIDGFRLDAVKHIKFSFFPDWLSYVRSSTGKPLFTVGEYWSYDINKLKNYITKTNGTMSLFDAPLHNKFYTASKSGGAFDMRTLMTNTLMKDQPTLAVTFVDNHDTEPGQALQSWVDPWFKPLAYAFILTRQEGYPCVFYGDYYGIPQYNIPSLKSKIDPLLIARRDYAYGTQHDYLDHSDIIGWTREGVTEKPGSGLAALITDGPGGSKWMYVGKQHAGKVFYDLTGNRSDTVTINSDGWGEFKVNGGSVSVWVPRKTTVS

SEQ ID NO: 18464 - protein, 486 aa, Geobacillus stearothermophilus
AAPFNGTMMQYFEWYLPDDGTLWTKVANEANNLSSLGITALWLPPAYKGTSRSDVGYGAYDLYDLGEFNQKGTVRTKYGTKAQYLQAIQAAHAAGMQVYADVVFDHKGGADGTEWVDAVEVNPSDRNQVISGTYQIQAWTKFDFPGRGNTYSSFKWRWYHFDGVDWDESRKLSRIYLFEGKAWDWPVDTEFGNYDYLMYADLDMDHPEVTTELKNWGKWYVNTTNIDGFRLDAVKHIKFSFFPDWLSYVRSSTGKPLFTVGEYWSGDINKLHNYITWTDGTVSLFDAPLHYKFYNASKSGGAFDMRTLMTNTLMKDQPTLAVTFVDNHDTEPGQALQSWVDPWFKPLAYAFILTRQEGYPCVFYGDYYGIPQYNIPSLKSKIDPLLIARRDYAYGTQHDYLDHSDIIGWTREGGTEKPGSGLAALITDGPGGSKWMYVGKQHAGKVFYDLTGNRSDTVTINSDGWGEFKVNGGSVSVWVPRKTTVS

SEQ ID NO: 18465 - protein, 488 aa, Geobacillus stearothermophilus
AAPFNGTMMQYFEWYLPDDGTLWTKVANEANNLSSLGITALWLPPAYKGTSRSDVGYGAYDLYDLGEFNQKGTVRTKYGTKAQYLQAIQAAHAAGMQVYADVVFDHKGGADGTEWVDAVEVNPSDRNQVISGTYQIQAWTKFDFPGRGNTYSSFKWRWYHFDGVDWDESRKLSRIYLFEGIGKAWDWEVDTENGNYDYLMYADLDMDHPEVVTELKNWGPWYVLTTNIDGFRLDAVKHIKFQFFPDWLSYVRSSTGKPLFTVGEYWSYDINKLHNFITKTNGTMSLFDAPLHNKFYTASKSGGAFDMRTLMTNTLMKDQPTLAVTFVDNHDTEPGQALQSWVDPWFKPLAYAFILTRQEGYPCVFYGDYYGIPQYNIPSLKSKIDPLLIARRDYAYGTQHDYLDHSDIIGWTREGVTEKPGSGLAALITDGPGGSKWMYVGKQHAGKVFYDLTGNRSDTVTINSDGWGEFKVNGGSVSVWVPRKTTVS

SEQ ID NO: 18466 - protein, 486 aa, Geobacillus stearothermophilus
AAPFNGTMMQYFEWYLPDDGTLWTKVANEANNLSSLGITALWLPPAYKGTSRSDVGYGAYDLYDLGEFNQKGTVRTKYGTKAQYLQAIQAAHAAGMQVYADVVFDHKGGADGTEWVDAVEVNPSDRNQVISGTYQIQAWTKFDFPGRGNTYSSFKWRWYHFDGVDWDESRKLSRIYLFEGKAWDWEVDTEFGNYDYLMYADLDMDHPEVTTELKNWGKWYVNTTNIDGFRLDAVKHIKFSFFPDWLSYVRSSTGKPLFTVGEYWSGDINKLHNYITKTDGTVSLFDAPLHYKFYNASKSGGAFDMRTLMTNTLMKDQPTLAVTFVENHDTQPGQALQSWVDPWFKPLAYAFILTRQEGYPCVFYGDYYGIPQYNIPSLKSKIDPLLIARRDYAYGTQHDYLDHSDIIGWTREGGTEKPGSGLAALITDGPGGSKWMYVGKQHAGKVFYDLTGNRSDTVTINSDGWGEFKVNGGSVSVWVPRKTTVS

SEQ ID NO: 18467 - protein, 486 aa, Geobacillus stearothermophilus
AAPFNGTMMQYFEWYLPDDGTLWTKVANEANNLSSLGITALWLPPAYKGTSRSDVGYGAYDLYDLGEFNQKGTVRTKYGTKAQYLQAIQAAHAAGMQVYADVVFDHKGGADGTEWVDAVEVNPSDRNQVISGTYQIQAWTKFDFPGRGNTYSSFKWRWYHFDGVDWDESRKLSRIYLFEGKAWDWPVDTEFGNYDYLMYADLDMDHPEVTTELKNWGKWYVNTTNIDGFRLDAVKHIKFSFFPDWLSYVRSSTGKPLFTVGEYWSGDINKLHHYITKTDGTVSLFDAPLHYKFYNASKSGGAFDMRTLMTNTLMKDQPTLAVTFVDNHDTEPGQALQSWVDPWFKPLAYAFILTRQEGYPCVFYGDYYGIPQYNIPSLKSKIDPLLIARRDYAYGTQHDYLDHSDIIGWTREGGTEKPGSGLAALITDGPGGSKWMYVGKQHAGKVFYDLTGNRSDTVTINSDGWGEFKVNGGSVSVWVPRKTTVS

SEQ ID NO: 18468 - protein, 486 aa, Geobacillus stearothermophilus
AAPFNGTMMQYFEWYLPDDGTLWTKVANEANNLSSLGITALWLPPAYKGTSRSDVGYGAYDLYDLGEFNQKGTVRTKYGTKAQYLQAIQAAHAAGMQVYADVVFDHKGGADGTEWVDAVEVNPSDRNQVISGTYQIQAWTKFDFPGRGNTYSSFKWRWYHFDGVDWDESRKLSRIYLFEGKAWDWPVDTEFGNYDYLMYADLDMDHPEVTTELKNWGKWYVNTTNIDGFRLDAVKHIKFSFFPDWLSYVRSSTGKPLFTVGEYWSGDINKLHNYITFTDGTVSLFDAPLHYKFYNASKSGGAFDMRTLMTNTLMKDQPTLAVTFVDNHDTEPGQALQSWVDPWFKPLAYAFILTRQEGYPCVFYGDYYGIPQYNIPSLKSKIDPLLIARRDYAYGTQHDYLDHSDIIGWTREGGTEKPGSGLAALITDGPGGSKWMYVGKQHAGKVFYDLTGNRSDTVTINSDGWGEFKVNGGSVSVWVPRKTTVS

SEQ ID NO: 18469 - protein, 486 aa, Geobacillus stearothermophilus
AAPFNGTMMQYFEWYLPDDGTLWTKVANEANNLSSLGITALWLPPAYKGTSRSDVGYGAYDLYDLGEFNQKGTVRTKYGTKAQYLQAIQAAHAAGMQVYADVVFDHKGGADGTEWVDAVEVNPSDRNQVISGTYQIQAWTKFDFPGRGNTYSSFKWRWYHFDGVDWDESRKLSRIYLFEGKAWDWEVDTEFGNYDYLMYADLDMDHPEVTTELKNWGKWYVNTTNIDGFRLDAVKHIKFSFFPDWLSYVRSSTGKPLFTVGEYWSGDINKLHNYLTKTDHTVSLFDAPLHYKFYNASKSGGAFDMRTLMTNTLMKDQPTLAVTFVDNHDTEPGQALQSWVDPWFKPLAYAFILTRQEGYPCVFYGDYYGIPQYNIPSLKSKIDPLLIARRDYAYGTQHDYLDHSDIIGWTREGGTEKPGSGLAALITDGPGGSKWMYVGKQHAGKVFYDLTGNRSDTVTINSDGWGEFKVNGGSVSVWVPRKTTVS

SEQ ID NO: 18470 - protein, 488 aa, Geobacillus stearothermophilus
AAPFNGTMMQYFEWYLPDNGTLWTKVAREANNLSSLGITALWLPPAYKGTSRSDVGYGVYDLYDLGEFNQKGTVRTKYGTKAQYLRAIQAAHAAGMQVYADVVFDHKGGADGTEWVDAVEVNPSDRNQEISGTYQIQAWTKFDFPGRGNTYSSFKWRWYHFDGVDWDESRKLSRIYKFRGIGKAWDWEVDTENGNYDYLMYADLDMDHPEVVTELKNWGKWYVRTTNIDGFRLDAVKHIKFSFFPDWLSYVRSQTGKPLFTVGEYWSYDIRKLHNYITKTRGTMSLFDAPLHNKFYTASKSGGAFNMRTLMTNTLMKNQPTLAVTFVDNHDTEPGQALQSWVDPWFKPLAYAFILTRQEGYPCVFYGDYYGIPQYNIPSLKSKIDPLLIARRNYAYGTQHDYLDHSDIIGWTREGVTEKPGSGLAALITDGPGGSKWMYVGKQHAGKVFYDLTGNRSNTVTINSDGWGEFKVNGGSVSVWVPRKTTVS

SEQ ID NO: 18471 - protein, 488 aa, Geobacillus stearothermophilus
AAPFNGTMMQYFEWYLPDDGTLWTKVANEANNLSSLGITALWLPPAYKGTSRSDVGYGAYDLYDLGEFNQKGTVRTKYGTKAQYLQAIQAAHAAGMQVYADVVFDHKGGADGTEWVDAVEVNPSDRNQVISGTYQIQAWTKFDFPGRGNTYSSFKWRWYHFDGVDWDESRKLSRIYLFEGIGKAWDWEVDTENGNYDYLMYADLDMDHPEVVTELKNWGPWYVLTTNIDGFRLDAVKHIKFQFFPDWLSYVRSSTGKPLFTVGEYWSYDINKLKNYITKTNGTMSLFDAPLHNKFYTASKSGGAFDMRTLMTNTLMKDQPTLAVTFVDNHDTEPGQALQSWVDPWFKPLAYAFILTRQEGYPCVFYGDYYGIPQYNIPSLKSKIDPLLIARRDYAYGTQHDYLDHSDIIGWTREGVTEKPGSGLAALITDGPGGSKWMYVGKQHAGKVFYDLTGNRSDTVTINSDGWGEFKVNGGSVSVWVPRKTTVS

SEQ ID NO: 18472 - protein, 488 aa, Geobacillus stearothermophilus
AAPFNGTMMQYFEWYLPDDGTLWTKVANEANNLSSLGITALWLPPAYKGTSRSDVGYGVYDLYDLGEFNQKGTVRTKYGTKAQYLQAIQAAHAAGMQVYADVVFDHKGGADGTEWVDAVEVNPSDRNQVISGTYQIQAWTKFDFPGRGNTYSSFKWRWYHFDGVDWDESRKLSRIYLFEGIGKAWDWEVDTENGNYDYLMYADLDMDHPEVVTELKNWGPWYVLTTNIDGFRLDAVKHIKFQFFPDWLSYVRSSTGKPLFTVGEYWSYDINKLHNFITKTNGTMSLFDAPLHNKFYTASKSGGAFDMRTLMTNTLMKDQPTLAVTFVDNHDTEPGQALQSWVDPWFKPLAYAFILTRQEGYPCVFYGDYYGIPQYNIPSLKSKIDPLLIARRDYAYGTQHDYLDHSDIIGWTREGVTEKPGSGLAAMITDGPGGSKWMYVGKQHAGKVFYDLTGNRSDTVTINSDGWGEFKVNGGSVSVWVPRKTTVS

SEQ ID NO: 18473 - protein, 488 aa, Geobacillus stearothermophilus
AAPFNGTMMQYFEWYLPDDGTLWTKVANEANNLSSLGITALWLPPAYKGTSRSDVGYGAYDLYDLGEFNQKGTVRTKYGTKAQYLQAIQAAHAAGMQVYADVVFDHKGGADGTEWVDAVEVNPSDRNQVISGTYQIQAWTKFDFPGRGNTYSSFKWRWYHFDGVDWDESRKLSRIYLFEGIGKAWDWEVDTENGNYDYLMYADLDMDYPEVVTELKNWGPWYVLTTNIDGFRLDAVKHIKFQFFPDWLSYVRSSTGKPLFTVGEYWSYDINKLHNYITKTNGTMSLFDAPLHNKFYTASKSGGAFDMRTLMTNTLMKDQPTLAVTFVDNHDTEPGQALQSWVDPWFKPLAYAFILTRQEGYPCVFYGDYYGIPQYNIPSLKSKIDPLLIARRDYAYGTQHDYLDHSDIIGWTREGVTEKPGSGLAALITDGPGGSKWMYVGKQHAGKVFYDLTGNRSDTVTINSDGWGEFKVNGGSVSVWVPRKTTVS

SEQ ID NO: 18474 - protein, 486 aa, Geobacillus stearothermophilus
AAPFNGTMMQYFEWYLPDDGTLWTKVANEANNLSSLGITALWLPPAYKGTSRSDVGYGAYDLYDLGEFNQKGTVRTKYGTKAQYLQAIQAAHAAGMQVYADVVFDHKGGADGTEWVDAVEVNPSDRNQVISGTYQIQAWTKFDFPGRGNTYSSFKWRWYHFDGVDWDESRKLSRIYLFEGKAWDWPVDTEFGNYDYLMYADLDMDHPEVTTELKNWGKWYVNTTNIDGFRLDAVKHIKFSFFPDWLSYVRSSTGKPLFTVGEYWSGDINKLHYYITKTDGTVSLFDAPLHYKFYNASKSGGAFDMRTLMTNTLMKDQPTLAVTFVDNHDTEPGQALQSWVDPWFKPLAYAFILTRQEGYPCVFYGDYYGIPQYNIPSLKSKIDPLLIARRDYAYGTQHDYLDHSDIIGWTREGGTEKPGSGLAALITDGPGGSKWMYVGKQHAGKVFYDLTGNRSDTVTINSDGWGEFKVNGGSVSVWVPRKTTVS

SEQ ID NO: 18475 - protein, 488 aa, Geobacillus stearothermophilus
AAPFNGTMMQYFEWYLPDDGTLWTKVANEANNLSSLGITALWLPPAYKGTSRSDVGYGAYDLYDLGEFNQKGTVRTKYGTKAQYLQAIQAAHAAGMQVYADVVFDHKGGADGTEWVDAVEVNPSDRNQVISGTYQIQAWTKFDFPGRGNTYSSFKWYWYHFDGVDWDESRKLSRIYLFEGIGKAWDWEVDTENGNYDYLMYADLDMDHPEVVTELKNWGPWYVLTTNIDGFRLDAVKHIKFQFFPDWLSYVRSSTGKPLFTVGEYWSYDINKLHNYITKTNGTMSLFDAPLHNKFYTASKSGGAFDMRTLMTNTLMKDQPTLAVTFVDNHDTEPGQALQSWVDPWFKPLAYAFILTRQEGYPCVFYGDYYGIPQYNIPSLKSKIDPLLIARRDYAYGTQHDYLDHSDIIGWTREGVTEKPGSGLAALITDGPGGSKWMYVGKQHAGKVFYDLTGNRSDTVTINSDGWGEFKVNGGSVSVWVPRKTTVS

SEQ ID NO: 18476 - protein, 488 aa, Bacillus stearothermophilus
AAPFNGTMMQYFEWYLPDDGTLWTKVANEANNLSSLGITALWLPPAYKGTSRSDVGYGAYDLYDLGEFNQKGTVRTKYGTKAQYLQAIRAAHAAGMQVYADVVFDHKGGADGTEWVDAVEVNPSDRNQVISGTYQIQAWTKFDFPGRGNTYSSFKWRWYHFDGVDWDESRKLSRIYLFEGIGKAWDWEVDTENGNYDYLMYADLDMDHPEVVTELKNWGPWYVLTTNIDGFRLDAVKHIKFSFFPDWLSYVRSSTGKPLFTVGEYWSYDLNKLHNYITKTNGTMSLFDAPLHNKFYTASKSGGAFDMRTLMTNTLMKDQPTLAVTFVDNHDTEPGQALQSWVDPWFKPLAYAFILTRQEGYPCVFYGDYYGIPQYNIPSLKSKIDPLLIARRDYAYGTQHDYLDHSDIIGWTREGVTEKPGSGLAALITDGPGGSKWMYVGKQHAGKVFYDLTGNRSDTVTINSDGWGEFKVNGGSVSVWVPRKTTVS

SEQ ID NO: 18477 - protein, 488 aa, Geobacillus stearothermophilus
AAPFNGTMMQYFEWYLPDDGTLWTKVANEANNLSSLGITALWLPPAYKGTSRSDVGYGAYDLYDLGEFNQKGTVRTKYGTKAQYLQAIRAAHAAGMQVYADVVFDHKGGADGTEWVDAVEVNPSDRNQVISGTYQIQAWTKFDFPGRGNTYSSFKWRWYHFDGVDWDESRKLSRIYLFEGIGKAWDWEVDTENGNYDYLMYADLDMDHPEVVTELKNWGPWYVLTTNIDGFRLDAVKHIKFSFFPDWLSYVRSSTGKPLFTVGEYWSYDINKLHNFITKTNGTMSLFDAPLHNKFYTASKSGGAFDMRTLMTNTLMKDQPTLAVTFVDNHDTEPGQALQSWVDPWFKPLAYAFILTRQEGYPCVFYGDYYGIPQYNIPSLKSKIDPLLIARRDYAYGTQHDYLDHSDIIGWTREGVTEKPGSGLAALITDGPGGSKWMYVGKQHAGKVFYDLTGNRSDTVTINSDGWGEFKVNGGSVSVWVPRKTTVS

SEQ ID NO: 18478 - protein, 488 aa, Geobacillus stearothermophilus
AAPFNGTMMQYFEWYLPDDGTLWTKVANEANNLSSLGITALWLPPAYKGTSRSDVGYGAYDLYDLGEFNQKGTVRTKYGTKAQYLQAIRAAHAAGMQVYADVVFDHKGGADGTEWVDAVEVNPSDRNQVISGTYQIQAWTKFDFPGRGNTYSSFKWRWYHFDGVDWDESRKLSRIYLFEGIGKAWDWEVDTENGNYDYLMYADLDMDYPEVVTELKNWGPWYVLTTNIDGFRLDAVKHIKFSFFPDWLSYVRSSTGKPLFTVGEYWSYDINKLHNYITKTNGTMSLFDAPLHNKFYTASKSGGAFDMRTLMTNTLMKDQPTLAVTFVDNHDTEPGQALQSWVDPWFKPLAYAFILTRQEGYPCVFYGDYYGIPQYNIPSLKSKIDPLLIARRDYAYGTQHDYLDHSDIIGWTREGVTEKPGSGLAALITDGPGGSKWMYVGKQHAGKVFYDLTGNRSDTVTINSDGWGEFKVNGGSVSVWVPRKTTVS

SEQ ID NO: 18479 - protein, 488 aa, Geobacillus stearothermophilus
AAPFNGTMMQYFEWYLPDDGTLWTKVANEANNLSSLGITALWLPPAYKGTSRSDVGYGAYDLYDLGEFNQKGTVRTKYGTKAQYLQAIRAAHAAGMQVYADVVFDHKGGADDTEWVDAVEVNPSDRNQVISGTYQIQAWTKFDFPGRGNTYSSFKWRWYHFDGVDWDESRKLSRIYLFEGIGKAWDWEVDTENGNYDYLMYADLDMDHPEVVTELKNWGPWYVLTTNIDGFRLDAVKHIKFSFFPDWLSYVRSSTGKPLFTVGEYWSYDINKLHNYITKTNGTMSLFDAPLHNKFYTASKSGGAFDMRTLMTNTLMKDQPTLAVTFVDNHDTEPGQALQSWVDPWFKPLAYAFILTRQEGYPCVFYGDYYGIPQYNIPSLKSKIDPLLIARRDYAYGTQHDYLDHSDIIGWTREGVTEKPGSGLAALITDGPGGSKWMYVGKQHAGKVFYDLTGNRSDTVTINSDGWGEFKVNGGSVSVWVPRKTTVS

SEQ ID NO: 18480 - protein, 482 aa, Unidentified
HNGTNGAMMQYFEWHLPNDGNHWNRLRDDASNLRNRGITAIWIPPAWKGTSQNDVGYGAYDLYDLGEFNQKGTVRTKYGTRSQLESAIHALKNNGVQVYGDVVMNHKGAADATENVLAVEVNPNNRNQEISGDYTIEAYTKFDFPGRGNTYSDFKWRWYHFDGVDWDQSRQFQNRIYKFRGKAWDWEVDSEFGNYDYLMYADYDMDHPEVVNELRRWGEWYTNTLNLDGFRIDAVKHIKFSFTRDWLTHVRNATGKGMFAVAEFWKNDLGALENYLNKTSWNHSVFDVPLHYNLYNASNSRGNYDMAKLLNGTVVQKHPAHAVTFVDNHDSQPGESLESFVQEWFKPLAYALILTREQGYPSVFYGDYYGIPTHSVPAMKAKIDPILEARANFAYGTQHDYFDHHNIIGWTREGNTTHPNSGLATIMSDGPGGEKWMYVGQNKAGQVWHDITGNKPGTVTINADGWANFSVNKGSVSIWVKR

SEQ ID NO: 18481 - protein, 482 aa, Unidentified
HNGTNGAMMQYFEWHLPNDGNHWNRLRDDASNLRNRGITAIWIPPAWKGTSQNDVGYGAYDLYDLGEFNQKGTVRTKYGTRSQLESAIHALKNNGVQVYGDVVMNHKGAADATENVLAVEVNPNNRNQEISGDYTIEAYTKFDFPGRGNTYSDFKWRWYHFDGVDWDQSRQFQNRIYKFRGKAWDWEVDSEFGNYDYLMYADYDMDHPEVVNELRRWGEWYTNTLNLDGFRIDAVKHIKFSFTRDWLTHVRNATGKGMFAVAEFWKNDLGALENYLNKTSWNHSVFDVPLHYNLYNASNSRGNYDMAKLLNGTVVQKHPMHANTFVDNHDSQPGESLESFVQEWFKPLAYALILTREQGYPSVFYGDYYGIPTHSVPAMKAKIDPILEARANFAYGTQHDYFDHHNIIGWTREGNTTHPNSGLATIMSDGPGGEKWMYVGQNKAGQVWHDITGNKPGTVTINADGWANFSVNKGSVSIWVKR

SEQ ID NO: 18482 - protein, 482 aa, Unidentified
HNGTNGTMMQYFEWHLPNDGNHWNRLRDDASNLRNRGITAIWIPPAWKGTSQNDVGYGAYDLYDLGEFNQKGTVRTKYGTRSQLESAIHALKNNGVQVYGDVVMNHKGAADATENVLAVEVNPNNRNQEISGDYTIEAYTKFDFPGRGNTYSDFKWRWYHFDGVDWDQSRQFQNRIYKFRGKAWDWEVDSEFGNYDYLMYADYDMDHPEVVNELRRWGEWYTNTLNLDGFRIDAVKHIKFSFTRDWLTHVRNATGKGMFAVAEFWKNDLGALENYLNKTSWNHSVFDVPLHYNLYNASNSRGNYDMAKLLNGTVVQKHPAHASTFVDNHDSQPGESLESFVQEWFKPLAYALILTREQGYPSVFYGDYYGIPTHSVPAMKAKIDPILEARANFAYGTQHDYFDHHNIIGWTREGNTTHPNSGLATIMSDGPGGEKWMYVGQNKAGQVWHDITGNKPGTVTINADGWANFSVNKGSVSIWVKR

SEQ ID NO: 18483 - protein, 482 aa, Unidentified
HNGTNGAMMQYFEWHLPNDGNHWNRLRDDASNLRNRGITAIWIPPAWKGTSQNDVGYGAYDLYDLGEFNQKGTVRTKYGTRSQLESAIHALKNNGVQVYGDVVMNHKGAADATENVLAVEVNPNNRNQEISGDYTIEAYTKFDFPGRGNTYSDFKWRWYHFDGVDWDQSRQFQNRIYKFRGKAWDWEVDSEFGNYDYLMYADYDMDHPEVVNELRRWGEWYTNTLNLDGFRIDAVKHIKFSFTRDWLTHVRNATGKGMFAVAEFWKNDLGALENYLNKTSWNHRVFDVPLHYNLYNASNSRGNYDMAKLLNGTVVQKHPMHAVTFVDNHDSQPGESLESFVQEWFKPLAYALILTREQGYPSVFYGDYYGIPTHSVPAMKAKIDPILEARANFAYGTQHDYFDHHNIIGWTREGNTTHPNSGLATIMSDGPGGEKWMYVGQNKAGQVWHDITGNKPGTVTINADGWANFSVNKGSVSIWVKR

SEQ ID NO: 18484 - protein, 482 aa, Unidentified
HNGTNGAMMQYFEWHLPNDGNHWNRLRDDASNLRNRGITAIWIPPAWKGTSQNDVGYGAYDLYDLGEFNQKGTVRTKYGTRSQLESAIHALKNNGVQVYGDVVMNHKGAADATENVLAVEVNPNNRNQEISGDYTIEAYTKFDFPGRGNTYSDFKWRWYHFDGVDWDQSRQFQNRIYKFRGKAWDWEVDSEFGNYDYLMYADYDMDHPEVVNELRRWGEWYTNTLNLDGFRIDAVKHIKFSFTRDWLTHVRNATGKGMFAVAEFWKNDLGALENYLNKTSWNHSVFDVPLHYNLYNASNSRGNYDMAKLLNGTVVQKHPMHASTFVDNHDSQPGESLESFVQEWFKPLAYALILTREQGYPSVFYGDYYGIPTHSVPAMKAKIDPILEARANFAYGTQHDYFDHHNIIGWTREGNTTHPNSGLATIMSDGPGGEKWMYVGQNKAGQVWHDITGNKPGTVTINADGWANFSVNKGSVSIWVKR

SEQ ID NO: 18485 - protein, 482 aa, Unidentified
HNGTNGTMMQYFEWHLPNDGNHWNRLRDDASNLRNRGITAIWIPPAWKGTSQNDVGYGAYDLYDLGEFNQKGTVRTKYGTRSQLESAIHALKNNGVQVYGDVVMNHKGAADATENVLAVEVNPNNRNQEISGDYTIEAYTKFDFPGRGNTYSDFKWRWYHFDGVDWDQSRQFQNRIYKFRGKAWDWEVDSEFGNYDYLMYADYDMDHPEVVNELRRWGEWYTNTLNLDGFRIDAVKHIKFSFTRDWLTHVRNATGKGMFAVAEFWKNDLGALENYLNKTSWNHSVFDVPLHYNLYNASNSRGNYDMAKLLNGTVVQKHPAHANTFVDNHDSQPGESLESFVQEWFKPLAYALILTREQGYPSVFYGDYYGIPTHSVPAMKAKIDPILEARANFAYGTQHDYFDHHNIIGWTREGNTTHPNSGLATIMSDGPGGEKWMYVGQNKAGQVWHDITGNKPGTVTINADGWANFSVNKGSVSIWVKR

SEQ ID NO: 18486 - protein, 482 aa, Unidentified
HNGTNATMMQYFEWHLPNDGNHWNRLRDDASNLRNRGITAIWIPPAWKGTSQNDVGYGAYDLYDLGEFNQKGTVRTKYGTRSQLESAIHALKNNGVQVYGDVVMNHKAGADATENVLAVEVNPNNRNQEISGDYTIEAYTKFDFPGRGNTYSDFKWRWYHFDGVDWDQSRQFQNRIYKFRGKAWDWPVDSENGNYDYLMYADYDMDHPEVVNELRRWGEWYTNTLNLDGFRIDAVKHIKFSFTRDWLTHVRNATGKGMFAVAEYWKNDLGALENYLSKTNWNHSVFDVPLHYNLYNASNSRGNYDMAKLLNGTVVQKHPMHAVTFVDNHDSQPGESLESFVQEWFKPLAYALILTREQGYPSVFYGDYYGIPTHSVPAMKAKIDPILAARQNFAYGTQHDYFDHHNIIGWTREGNTTHPNSGLATIMSDGPGGEKWMYVGQNKAGQVWHDITGNKPGTVTINADGWANFSVNKGSVSIWVKR

SEQ ID NO: 18487 - protein, 482 aa, Unidentified
HNGTNGAMMQYFEWHLPNDGNHWNRLRDDASNLRNRGITAIWIPPAWKGTSQNDVGYGAYDLYDLGEFNQKGTVRTKYGTRSQLESAIHALKNNGVQVYGDVVMNHKGAADATENVLAVEVNPNNRNQEISGDYTIEAYTKFDFPGRGNTYSDFKWRWYHFDGVDWDQSRQFQNRIYKFRGKAWDWEVDSEFGNYDYLMYADYDMDHPEVVNELRRWGEWYTNTLNLDGFRIDAVKHIKFSFTRDWLTHVRNATGKGMFAVAEFWKNDLGALENYLNKTSWNHFVFDVPLHYNLYNASNSRGNYDMAKLLNGTVVQKHPMHAVTFVDNHDSQPGESLESFVQEWFKPLAYALILTREQGYPSVFYGDYYGIPTHSVPAMKAKIDPILEARANFAYGTQHDYFDHHNIIGWTREGNTTHPNSGLATIMSDGPGGEKWMYVGQNKAGQVWHDITGNKPGTVTINADGWANFSVNKGSVSIWVKR

SEQ ID NO: 18488 - protein, 481 aa, Bacillus sp. (in: firmicutes)
HNGTNATMMQYFEWHLPNDGNHWNRLRDDASNLRNRGITAIWIPPAWKGTSQNDVGYGAYDLYDLGEFNQKGTVRTKYGTRSQLESAIHALKNNGVQVYGDVVMNHKAGADATENVLAVEVNPNNRNQEISGDYTIEAYTKFDFPGRGNTYSDFKWRWYHFDGVDWDQSRQFQNRIYKFRKAWDWEVDSEFGNYDYLMYADYDMDHPEVVNELRRWGEWYTNTLNLDGFRIDAVKHIKFSFTRDWLTHVRNATGKGMFAVAEFWKNDLGALENYLSKTNWNHSVFDVPLHYNLYNASNSRGNYDMAKLLNGTVVQKHPMHAVTFVDNHDSQPGESLESFVQEWFKPLAYALILTREQGYPSVFYGDYYGIPTHSVPAMKAKIDPILAARQNFAYGTQHDYFDHHNIIGWTREGNTTHPNSGLATIMSDGPGGEKWMYVGQDKAGQVWHDITGNKPGTVTINADGWANFSVNKGSVSIWVKR

SEQ ID NO: 18489 - protein, 478 aa, Aspergillus oryzae
ATPADWRSQSIYFLLTDRFARTDGSTTATCNTADQKYCGGTWQGIIDKLDYIQGMGFTAIWITPVTAQLPQTTAYGDAYHGYWQQDIYSLNENYGTADDLKALSSALHERGMYLMVDVVANHMGYDGPGSSVDYSVFVPFNSASYFHPFCFIQNWNDQTQVEDCWLGDNTVSLPDLDTTKDVVKNEWYDWVGSLVSNYSIDGLRIDTVKHVQKDFWPGYNKAAGVYCIGEVLDGDPAYTCPYQEVLDGVLNYPIYYPLLNAFKSTSGSMDDLYNMINTVKSDCPDSTLLGTFVENHDNPRFASYTNDIALAKNVAAFIILNDGIPIIYAGQEQHYAGGNDPANREATWLSGYPTDSELYKLIASANAIRNYAISKDTGFVTYKNWPIYKDDTTIAMRKGTDGSQIVTILSNKGASGDSYTLSLSGAGYTAGQQLTEVIGCTTVTVDSSGDVPVPMAGGLPRVLYPTEKLAGSKICSSS

SEQ ID NO: 18490 - protein, 517 aa, Geobacillus stearothermophilus
ACAAPFNGTMMQYFEWYLPDDGTLWTKVANEANNLSSLGITALWLPPAYKGTSRSDVGYGVYDLYDLGEFNQKGAVRTKYGTKAQYLQAIQAAHAAGMQVYADVVFDHKGGADGTEWVDAVEVNPSDRNQEISGTYQIQAWTKFDFPGRGNTYSSFKWRWYHFDGVDWDESRKLSRIYKFRGIGKAWDWEVDTENGNYDYLMYADLDMDHPEVVTELKSWGKWYVNTTNIDGFRLDAVKHIKFSFFPDWLSNVRSQTGKPLFTVGEYWSYDINKLHNYIMKTNGTMSLFDAPLHNKFYTASKSGGTFDMRTLMTNTLMKDQPTLAVTFVDNHDTEPGQALQSWVDPWFKPLAYAFILTRQEGYPCVFYGDYYGIPQYNIPSLKSKIDPLLIARRDYAYGTQHDYLDHSDIIGWTREGVTEKPGSGLAALITDGPGGRKWMYVGKQHAGKVFYDLTGNRSDTVTINSDGWGEFKVNGGSVSVWVPRKTTVSTIAWSITTRPWTDEFVRWTEPRLVAWP

SEQ ID NO: 18491 - protein, 516 aa, Geobacillus stearothermophilus
AAAPFNGTMMQYFEWYLPDDGTLWTKVANEANNLSSLGITALWLPPAYKGTSRSDVGYGVYDLYDLGEFNQKGAVRTKYGTKAQYLQAIQAAHAAGMQVYADVVFDHKGGADGTEWVDAVEVNPSDRNQEISGTYQIQAWTKFDFPGRGNTYSSFKWRWYHFDGVDWDESRKLSRIYKFRGIGKAWDWEVDTENGNYDYLMYADLDMDHPEVVTELKSWGKWYVNTTNIDGFRLDAVKHIKFSFFPDWLSNVRSQTGKPLFTVGEYWSYDINKLHNYNMKTNGTMSLFDAPLHNKFYTASKSGGTFDMRTLMTNTLMKDQPTLAVTFVDNHDTEPGQALQSWVDPWFKPLAYAFILTRQEGYPCVFYGDYYGIPQYNIPSLKSKIDPLLIARRDYAYGTQHDYLDHSDIIGWTREGVTEKPGSGLAALITDGPGGRKWMYVGKQHAGKVFYDLTGNRSDTVTINSDGWGEFKVNGGSVSVWVPRKTTVSTIAWSITTRPWTDEFVRWTEPRLVAWP

SEQ ID NO: 18492 - protein, 515 aa, Geobacillus stearothermophilus
AAPFNGTMMQYFEWYLPDDGTLWTKVADEANNLSSLGITALWLPPAYKGTSRSDVGYGVYDLYDLGEFNQKGTVRTKYGTKAQYLQAIQAAHAAGMRVYADVVFDHKGGADGTEWVDAVEVNPSDRNQEISGTYQIQAWTKFDFPGRGNTYSSFKWRWYHFDGVDWDESRQLSRIYKFRGIGKAWDWEVDTENGNYDYLMYADLDMDHPEVVTELKNWGKWYVDTTNIDGFRLDAVKHIKFSFFPDWLSYVRSQTGKPLFTVGEYWSYDIDKLHNYITKTNGTMSLFDAPLHNKFYTASKSGGAFDMQTLMTNTLMKDRPTLAVTFVDNHDTEPGQALQSWVDPWFKPLAYAFILTREEGYPCVFYGDYYGIPQYNIPSLKSKIDPLLIARRDYAYGTQHDYLDHSDIIGWTREGVTEKPGSGLAALITDGPGGSKWMYVGKEHAGKVFYDLTGNRSDTVTINSDGWGEFKVNGGSVSVWVPQKTTVSTIARPITTRPWTGEFVRWTEPRLVAWP

SEQ ID NO: 18493 - protein, 515 aa, Geobacillus stearothermophilus
AAPFNGTMMQYFEWYLPDDGTLWTKVANEANNLSSLGITALWLPPAYKGTSRSDVGYGAYDLYDLGEFNQKGTVRTKYGTKAQYLQAIRAAHAAGMQVYADVVFDHKGGADDTEWVDAVEVNPSDRNQVISGTYQIQAWTKFDFPGRGNTYSSFKWRWYHFDGVDWDESRKLSRIYLFEGIGKAWDWEVDTENGNYDYLMYADLDMDYPEVVTELKNWGPWYVLTTNIDGFRLDAVKHIKFSFFPDWLSYVRSSTGKPLFTVGEYWSYDINKLHNYITKTNGTMSLFDAPLHNKFYTASKSGGAFDMRTLMTNTLMKDQPTLAVTFVDNHDTEPGQALQSWVDPWFKPLAYAFILTRQEGYPCVFYGDYYGIPQYNIPSLKSKIDPLLIARRDYAYGTQHDYLDHSDIIGWTREGVTEKPGSGLAALITDGPGGSKWMYVGKQHAGKVFYDLTGNRSDTVTINSDGWGEFKVNGGSVSVWVPRKTTVSTIARPITTRPWTGEFVRWTEPRLVAWP

SEQ ID NO: 18494 - protein, 515 aa, Geobacillus stearothermophilus
AAPFNGTMMQYFEWYLPDDGTLWTKVADEANNLSSLGITALWLPPAYKGTSRSDVGYGVYDLYDLGEFNQKGTVRTKYGTKAQYLEAIEAAHAAGMQVYADVVFDHKGGADGTEWVDAVEVNPSDRNQEISGTYQIQAWTKFDFPGRGNTYSSFKWRWYHFDGVDWDESRQLSRIYKFRGIGKAWDWEVDTENGNYDYLMYADLDMDHPEVVTELKNWGKWYVDTTNIDGFRLDAVKHIKFSFFPDWLSYVRSQTGKPLFTVGEYWSYDIDKLHNYITKTDGTMSLFDAPLHNKFYTASKSGGAFDMQTLMTNTLMKDQPTLAVTFVDNHDTEPGQALQSWVDPWFKPLAYAFILTRQEGYPCVFYGDYYGIPQYNIPSLKSQIDPLLIARRDYAYGTQHDYLDHSDIIGWTREGVTEKPGSGLAALITDGPGGSKWMYVGKQHAGQVFYDLTGNRSDTVTINSDGWGEFQVNGGSVSVWVPQKTTVSTIARPITTRPWTGEFVRWTEPRLVAWP

SEQ ID NO: 18495 - protein, 515 aa, Geobacillus stearothermophilus
AAPFNGTMMQYFEWYLPDDGTLWTKVANEANNLSSLGITALWLPPAYKGTSRSDVGYGAYDLYDLGEFNQKGTVRTKYGTKAQYLQAIQAAHAAGMQVYADVVFDHKGGADGTEWVDAVEVNPSDRNQVISGTYQIQAWTKFDFPGRGNTYSSFKWRWYHFDGVDWDESRKLSRIYLFEGIGKAWDWEVDTENGNYDYLMYADLDMDYPEVVTELKNWGPWYVLTTNIDGFRLDAVKHIKFQFFPDWLSYVRSSTGKPLFTVGEYWSYDINKLHNYITKTNGTTSLFDAPLHNKFYTASKSGGAFDMRTLMTNTLMKDQPTLAVTFVDNHDTEPGQALQSWVDPWFKPLAYAFILTRQEGYPCVFYGDYYGIPQYNIPSLKSKIDPLLIARRDYAYGTQHDYLDHSDIIGWTREGVTEKPGSGLAALITDGPGGSKWMYVGKQHAGKVFYDLTGNRSDTVTINSDGWGEFKVNGGSVSVWVPRKTTVSTIARPITTRPWTGEFVRWTEPRLVAWP

SEQ ID NO: 18496 - protein, 515 aa, Geobacillus stearothermophilus
AAPFNGTMMQYFEWYLPDDGTLWTKVANEANNLSSLGITALWLPPAYKGTSRSDVGYGAYDLYDLGEFNQKGTVRTKYGTKAQYLQAIRAAHAAGMQVYADVVFDHKGGADGTEWVDAVEVNPSDRNQVISGTYQIQAWTKFDFPGRGNTYSSFKWRWYHFDGVDWDESRKLSRIYLFEGIGKAWDWEVDTENGNYDYLMYADLDMDHPEVVTELKNWGPWYVLTTNIDGFRLDAVKHIKFSFFPDWLSYVRSSTGKPLFTVGEYWSYDLNKLKNYITKTNGTMSLFDAPLHNKFYTASKSGGAFDMRTLMTNTLMKDQPTLAVTFVDNHDTEPGQALQSWVDPWFKPLAYAFILTRQEGYPCVFYGDYYGIPQYNIPSLKSKIDPLLIARRDYAYGTQHDYLDHSDIIGWTREGVTEKPGSGLAALITDGPGGSKWMYVGKQHAGKVFYDLTGNRSDTVTINSDGWGEFKVNGGSVSVWVPRKTTVSTIARPITTRPWTGEFVRWTEPRLVAWP

SEQ ID NO: 18497 - protein, 515 aa, Geobacillus stearothermophilus
AAPFNGTMMQYFEWYLPDDGTLWTKVANEANNLSSLGITALWLPPAYKGTSRSDVGYGAYDLYDLGEFNQKGTVRTKYGTKAQYLQAIQAAHAAGMQVYADVVFDHKGGADGTEWVDAVEVNPSDRNQVISGTYQIQAWTKFDFPGRGNTYSSFKWRWYHFDGVDWDESRKLSRIYLFEGIGKAWDWEVDTENGNYDYLMYADLDMDYPEVVTELKNWGPWYVLTTNIDGFRLDAVKHIKFQFFPDWLSYVRSSTGKPLFTVGEYWSYDINKLHNFITKTNGTMSLFDAPLHNKFYTASKSGGAFDMRTLMTNTLMKDQPTLAVTFVDNHDTEPGQALQSWVDPWFKPLAYAFILTRQEGYPCVFYGDYYGIPQYNIPSLKSKIDPLLIARRDYAYGTQHDYLDHSDIIGWTREGVTEKPGSGLAALITDGPGGSKWMYVGKQHAGKVFYDLTGNRSDTVTINSDGWGEFKVNGGSVSVWVPRKTTVSTIARPITTRPWTGEFVRWTEPRLVAWP

SEQ ID NO: 18498 - protein, 515 aa, Geobacillus stearothermophilus
AAPFNGTMMQYFEWYLPDDGTLWTKVANEANNLSSLGITALWLPPAYKGTSRSDVGYGAYDLYDLGEFNQKGTVRTKYGTKAQYLQAIQAAHAAGMQVYADVVFDHKGGADGTEWVDAVEVNPSDRNQVISGTYQIQAWTKFDFPGRGNTYSSFKWRWYHFDGVDWDESRKLSRIYLFEGIGKAWDWEVDTENGNYDYLMYADLDMDYPEVVTELKNWGPWYVLTTNIDGFRLDAVKHIKFQFFPDWLSYVRSSTGKPLFTVGEYWSYDINKLKNYITKTNGTMSLFDAPLHNKFYTASKSGGAFDMRTLMTNTLMKDQPTLAVTFVDNHDTEPGQALQSWVDPWFKPLAYAFILTRQEGYPCVFYGDYYGIPQYNIPSLKSKIDPLLIARRDYAYGTQHDYLDHSDIIGWTREGVTEKPGSGLAALITDGPGGSKWMYVGKQHAGKVFYDLTGNRSDTVTINSDGWGEFKVNGGSVSVWVPRKTTVSTIARPITTRPWTGEFVRWTEPRLVAWP

SEQ ID NO: 18499 - protein, 515 aa, Geobacillus stearothermophilus
AAPFNGTMMQYFEWYLPDNGTLWTKVAKEANNLSSLGITALWLPPAYKGTSRSDVGYGVYDLYDLGEFNQKGTVRTKYGTKAQYLQAIQAAHAAGMRVYADVVFDHKGGADGTEWVDAVEVNPSDRNQEISGTYQIQAWTKFDFPGRGNTYSSFKWRWYHFDGVDWDESRKLSRIYKFRGIGKAWDWEVDTENGNYDYLMYADLDMDHPEVVTELKNWGKWYVKTTNIDGFRLDAVKHIKFSFFPDWLSYVRSQTGKPLFTVGEYWSYDIKKLHNYITKTNGTMSLFDAPLHNKFYTASKSGGAFNMRTLMTNTLMKNRPTLAVTFVDNHDTEPGQALQSWVDPWFKPLAYAFILTREEGYPCVFYGDYYGIPQYNIPSLKSKIDPLLIARRDYAYGTQHDYLDHSDIIGWTREGVTEKPGSGLAALITDGPGGSKWMYVGKEHAGKVFYDLTGNRSDTVTINSDGWGEFKVNGGSVSVWVPRKTTVSTIARPITTRPWTGEFVRWTEPRLVAWP

SEQ ID NO: 18500 - protein, 515 aa, Geobacillus stearothermophilus
AAPFNGTMMQYFEWYLPDDGTLWTKVADEANNLSSLGITALWLPPAYKGTSRSDVGYGVYDLYDLGEFNQKGTVRTKYGTKAQYLQAIQAAHAAGMRVYADVVFDHKGGADGTEWVDAVEVNPSDRNQEISGTYQIQAWTKFDFPGRGNTYSSFKWRWYHFDGVDWDESRQLSRIYKFRGIGKAWDWEVDTENGNYDYLMYADLDMDHPEVVTELKNWGKWYVDTTNIDGFRLDAVKHIKFSFFPDWLSYVRSQTGKPLFTVGEYWSYDIDKLHNYITKTDGTMSLFDAPLHNKFYTASKSGGAFDMQTLMTNTLMKDRPTLAVTFVDNHDTEPGQALQSWVDPWFKPLAYAFILTREEGYPCVFYGDYYGIPQYNIPSLKSQIDPLLIARRDYAYGTQHDYLDHSDIIGWTREGVTEKPGSGLAALITDGPGGSKWMYVGKEHAGKVFYDLTGNRSDTVTINSDGWGEFKVNGGSVSVWVPQKTTVSTIARPITTRPWTGEFVRWTEPRLVAWP

SEQ ID NO: 18501 - protein, 535 aa, unidentified
LLAFLLTASLFCPTGQHAKAAAPFNGTMMQYFEWYLPDDGTLWTKVANEANNLSSLGITALWLPPAYKGTSRSDVGYGVYDLYDLGEFNQKGTVRTKYGTKAQYLQAIQAAHAAGMQVYADVVFDHKGGADGTEWVDAVEVNPSDRNQEISGTYQIQAWTKFDFPGRGNTYSSFKWRWYHFDGVDWDESRKLSRIYKFRGIGKAWDWEVDTENGNYDYLMYADLDMDHPEVVTELKNWGKWYVNTTNIDGFRLDAVKHIKFSFFPDWLSYVRSQTGKPLFTVGEYWSYDINKLHNYITKTNGTMSLFDAPLHNKFYTASKSGGAFDMRTLMTNTLMKDQPTLAVTFVDNHDTEPGQALQSWVDPWFKPLAYAFILTRQEGYPCVFYGDYYGIPQYNIPSLKSKIDPLLIARRDYAYGTQHDYLDHSDIIGWTREGVTEKPGSGLAALITDGPGGSKWMYVGKQHAGKVFYDLTGNRSDTVTINSDGWGEFKVNGGSVSVWVPRKTTVSTIARPITTRPWTGEFVRWTEPRLVAWP

SEQ ID NO: 18502 - protein, 491 aa, Geobacillus stearothermophilus
AAPFNGTMMQYFEWYLPDDGTLWTKVANEANNLSSLGITALWLPPAYKGTSRSDVGYGVYDLYDLGEFNQKGTVRTKYGTKAQYLQAIQAAHAAGMQVYADVVFDHKGGADGTEWVDAVEVNPSDRNQVISGTYQIQAWTKFDFPGRGNTYSSFKWRWYHFDGVDWDESRKLSRIYLFEGKAWDWEVDTEFGNYDYLMYADLDMDHPEVVTELKNWGKWYVNTTNIDGFRLDAVKHIKFQFFPDWLSYVRSQTGKPLFTVGEYWSYDINKLHNYITKTDGTMSLFDAPLHNKFYTASKSGGAFDMRTLMTNTLMKDQPTLAVTFVDNHDTEPGQALQSWVDPWFKPLAYAFILTRQEGYPCVFYGDYYGIPQYNIPSLKSKIDPLLIARRDYAYGTQHDYLDHSDIIGWTREGGTEKPGSGLAALITDGPGGSKWMYVGKQHAGKVFYDLTGNRSDTVTINSDGWGEFKVNGGSVSVWVPRKTTVSTIARP

SEQ ID NO: 18503 - protein, 491 aa, Geobacillus stearothermophilus
AAPFNGTMMQYFEWYLPDDGTLWTKVANEANNLSSLGITALWLPPAYKGTSRSDVGYGAYDLYDLGEFNQKGTVRTKYGTKAQYLQAIQAAHAAGMQVYADVVFDHKGGADGTEWVDAVEVNPSDRNQVISGTYQIQAWTKFDFPGRGNTYSSFKWRWYHFDGVDWDESRKLSRIYLFEGKAWDWEVDTEFGNYDYLMYADLDMDHPEVVTELKNWGPWYVLTTNIDGFRLDAVKHIKFQFFPDWLSYVRSSTGKPLFTVGEYWSYDINKLHNYITKTDGTTSLFDAPLHNKFYTASKSGGAFDMRTLMTNTLMKDQPTLAVTFVDNHDTEPGQALQSWVDPWFKPLAYAFILTRQEGYPCVFYGDYYGIPQYNIPSLKSKIDPLLIARRDYAYGTQHDYLDHSDIIGWTREGGTEKPGSGLAALITDGPGGSKWMYVGKQHAGKVFYDLTGNRSDTVTINSDGWGEFKVNGGSVSVWVPRKTTVSTIARP

SEQ ID NO: 18504 - protein, 491 aa, Geobacillus stearothermophilus
AAPFNGTMMQYFEWYLPDDGTLWTKVANEANNLSSLGITALWLPPAYKGTSRSDVGYGVYDLYDLGEFNQKGTVRTKYGTKAQYLQAIQAAHAAGMQVYADVVFDHKGGADGTEWVDAVEVNPSDRNQVISGTYQIQAWTKFDFPGRGNTYSSFKWRWYHFDGVDWDESRKLSRIYLFEGKAWDWEVDTEFGNYDYLMYADLDMDHPEVVTELKNWGKWYVNTTNIDGFRLDAVKHIKFSFFPDWLSYVRSQTGKPLFTVGEYWSYDINKLHNYITKTDGTMSLFDAPLHNKFYTASKSGGAFDMRTLMTNTLMKDQPTLAVTFVDNHDTEPGQALQSWVDPWFKPLAYAFILTRQEGYPCVFYGDYYGIPQYNIPSLKSKIDPLLIARRDYAYGTQHDYLDHSDIIGWTREGGTEKPGSGLAALITDGPGGSKWMYVGKQHAGKVFYDLTGNRSDTVTINSDGWGEFKVNGGSVSVWVPRKTTVSTIARP

SEQ ID NO: 18505 - protein, 491 aa, Geobacillus stearothermophilus
AAPFNGTMMQYFEWYLPDDGTLWTKVANEANNLSSLGITALWLPPAYKGTSRSDVGYGAYDLYDLGEFNQKGTVRTKYGTKAQYLQAIQAAHAAGMQVYADVVFDHKGGADGTEWVDAVEVNPSDRNQVISGTYQIQAWTKFDFPGRGNTYSSFKWRWYHFDGVDWDESRKLSRIYLFEGKAWDWEVDTEFGNYDYLMYADLDMDHPEVVTELKNWGPWYVLTTNIDGFRLDAVKHIKFSFFPDWLSYVRSSTGKPLFTVGEYWSYDINKLHNYITKTDGTMSLFDAPLHNKFYTASKSGGAFDMRTLMTNTLMKDQPTLAVTFVDNHDTEPGQALQSWVDPWFKPLAYAFILTRQEGYPCVFYGDYYGIPQYNIPSLKSKIDPLLIARRDYAYGTQHDYLDHSDIIGWTREGGTEKPGSGLAALITDGPGGSKWMYVGKQHAGKVFYDLTGNRSDTVTINSDGWGEFKVNGGSVSVWVPRKTTVSTIARP

SEQ ID NO: 18506 - protein, 491 aa, Geobacillus stearothermophilus
AAPFNGTMMQYFEWYLPDDGTLWTKVANEANNLSSLGITALWLPPAYKGTSRSDVGYGAYDLYDLGEFNQKGTVRTKYGTKAQYLQAIQAAHAAGMQVYADVVFDHKGGADGTEWVDAVEVNPSDRNQVISGTYQIQAWTKFDFPGRGNTYSSFKWRWYHFDGVDWDESRKLSRIYLFEGKAWDWEVDTEFGNYDYLMYADLDMDYPEVVTELKNWGPWYVLTTNIDGFRLDAVKHIKFQFFPDWLSYVRSSTGKPLFTVGEYWSYDINKLHNYITKTDGTVSLFDAPLHNKFYTASKSGGAFDMRTLMTNTLMKDQPTLAVTFVDNHDTEPGQALQSWVDPWFKPLAYAFILTRQEGYPCVFYGDYYGIPQYNIPSLKSKIDPLLIARRDYAYGTQHDYLDHSDIIGWTREGGTEKPGSGLAALITDGPGGSKWMYVGKQHAGKVFYDLTGNRSDTVTINSDGWGEFKVNGGSVSVWVPRKTTVSTIARP

SEQ ID NO: 18507 - protein, 491 aa, Geobacillus stearothermophilus
AAPFNGTMMQYFEWYLPDDGTLWTKVANEANNLSSLGITALWLPPAYKGTSRSDVGYGAYDLYDLGEFNQKGTVRTKYGTKAQYLQAIQAAHAAGMQVYADVVFDHKGGADGTEWVDAVEVNPSDRNQVISGTYQIQAWTKFDFPGRGNTYSSFKWRWYHFDGVDWDESRKLSRIYLFEGKAWDWEVDTEFGNYDYLMYADLDMDHPEVVTELKNWGPWYVLTTNIDGFRLDAVKHIKFSFFPDWLSYVRSSTGKPLFTVGEYWSYDINKLHNYITKTDGTTSLFDAPLHNKFYTASKSGGAFDMRTLMTNTLMKDQPTLAVTFVDNHDTEPGQALQSWVDPWFKPLAYAFILTRQEGYPCVFYGDYYGIPQYNIPSLKSKIDPLLIARRDYAYGTQHDYLDHSDIIGWTREGGTEKPGSGLAALITDGPGGSKWMYVGKQHAGKVFYDLTGNRSDTVTINSDGWGEFKVNGGSVSVWVPRKTTVSTIARP

SEQ ID NO: 18508 - protein, 491 aa, Geobacillus stearothermophilus
AAPFNGTMMQYFEWYLPDDGTLWTKVANEANNLSSLGITALWLPPAYKGTSRSDVGYGAYDLYDLGEFNQKGTVRTKYGTKAQYLQAIQAAHAAGMQVYADVVFDHKGGADGTEWVDAVEVNPSDRNQVISGTYQIQAWTKFDFPGRGNTYSSFKWRWYHFDGVDWDESRKLSRIYLFEGKAWDWEVDTEFGNYDYLMYADLDMDHPEVVTELKNWGPWYVLTTNIDGFRLDAVKHIKFQFFPDWLSYVRSSTGKPLFTVGEYWSYDINKLHNYITKTDGTMSLFDAPLHNKFYTASKSGGAFDMRTLMTNTLMKDQPTLAVTFVDNHDTEPGQALQSWVDPWFKPLAYAFILTRQEGYPCVFYGDYYGIPQYNIPSLKSKIDPLLIARRDYAYGTQHDYLDHSDIIGWTREGGTEKPGSGLAALITDGPGGSKWMYVGKQHAGKVFYDLTGNRSDTVTINSDGWGEFKVNGGSVSVWVPRKTTVSTIARP

SEQ ID NO: 18509 - protein, 491 aa, Geobacillus stearothermophilus
AAPFNGTMMQYFEWYLPDDGTLWTKVANEANNLSSLGITALWLPPAYKGTSRSDVGYGVYDLYDLGEFNQKGTVRTKYGTKAQYLQAIQAAHAAGMQVYADVVFDHKGGADGTEWVDAVEVNPSDRNQVISGTYQIQAWTKFDFPGRGNTYSSFKWRWYHFDGVDWDESRKLSRIYLFVGKAWDWEVDTEFGNYDYLMYADLDMDHPEVVTELKNWGKWYVNTTNIDGFRLDAVKHIKFSFFPDWLSYVRSQTGKPLFTVGEYWSYDINKLHNYITKTDGTMSLFDAPLHNKFYTASKSGGAFDMRTLMTNTLMKDQPTLAVTFVDNHDTEPGQALQSWVDPWFKPLAYAFILTRQEGYPCVFYGDYYGIPQYNIPSLKSKIDPLLIARRDYAYGTQHDYLDHSDIIGWTREGGTEKPGSGLAALITDGPGGSKWMYVGKQHAGKVFYDLTGNRSDTVTINSDGWGEFKVNGGSVSVWVPRKTTVSTIARP

SEQ ID NO: 18510 - protein, 491 aa, Geobacillus stearothermophilus
AAPFNGTMMQYFEWYLPDDGTLWTKVANEANNLSSLGITALWLPPAYKGTSRSDVGYGAYDLYDLGEFNQKGTVRTKYGTKAQYLQAIRAAHAAGMQVYADVVFDHKGGADGTEWVDAVEVNPSDRNQVISGTYQIQAWTKFDFPGRGNTYSSFKWRWYHFDGVDWDESRKLSRIYLFEGKAWDWEVDTEFGNYDYLMYADLDMDHPEVVTELKNWGKWYVNTTNIDGFRLDAVKHIKFSFFPDWLSYVRSSTGKPLFTVGEYWSYDINKLHNYITKTNGTVSLFDAPLHNKFYTASKSGGAFDMRTLMTNTLMKDQPTLAVTFVDNHDTEPGQALQSWVDPWFKPLAYAFILTRQEGYPCVFYGDYYGIPQYNIPSLKSKIDPLLIARRDYAYGTQHDYLDHSDIIGWTREGVTEKPGSGLAALITDGPGGSKWMYVGKQHAGKVFYDLTGNRSDTVTINSDGWGEFKVNGGSVSVWVPRKTTVSTIARP

SEQ ID NO: 18511 - protein, 491 aa, Geobacillus stearothermophilus
AAPFNGTMMQYFEWYLPDDGTLWTKVANEANNLSSLGITALWLPPAYKGTSRSDVGYGAYDLYDLGEFNQKGTVRTKYGTKAQYLQAIRAAHAAGMQVYADVVFDHKGGADGTEWVDAVEVNPSDRNQVISGTYQIQAWTKFDFPGRGNTYSSFKWRWYHFDGVDWDESRKLSRIYLFEGXXKAWDWEVDTEFGNYDYLMYADLDMDHPEVVTELKNWGKWYVNTTNIDGFRLDAVKHIKFSFFPDWLSYVRSSTGKPLFTVGEYWSYDINKLHNYITKTNGTVSLFDAPLHNKFYTASKSGGAFDMRTLMTNTLMKDQPTLAVTFVDNHDTEPGQALQSWVDPWFKPLAYAFILTRQEGYPCVFYGDYYGIPQYNIPSLKSKIDPLLIARRDYAYGTQHDYLDHSDIIGWTREGVTEKPGSGLAALITDGPGGSKWMYVGKQHAGKVFYDLTGNRSDTVTINSDGWGEFKVNGGSVSVWVPRKTTVSTIA

SEQ ID NO: 18512 - protein, 486 aa, Geobacillus stearothermophilus
AAPFNGTMMQYFEWYLPDDGTLWTKVANEANNLSSLGITALWLPPAYKGTSRSDVGYGAYDLYDLGEFNQKGTVRTKYGTKAQYLQAIQAAHAAGMQVYADVVFDHKGGADGTEWVDAVEVNPSDRNQVISGTYQIQAWTKFDFPGRGNTYSSFKWRWYHFDGVDWDESRKLSRIYLFSGKQWPWEVDNEFGNYDYLMYADLDMDHPEVTTELKNWGKWYVNTTNIDGFRLDAVKHIKFSFFPDWLSYVRSSTGKPLFTVGEYWSGDINKLHNYITKTDGTVSLFDAPLHYKFYNASKSGGAFDMRTLMTNTLMKDQPTLAVTFVDNHDTEPGQALQSWVDPWFKPLAYAFILTRQEGYPCVFYGDYYGIPQYNIPSLKSKIDPLLIARRDYAYGTQHDYLDHSDIIGWTREGGTEKPGSGLAALITDGPGGSKWMYVGKQHAGKVFYDLTGNRSDTVTINSDGWGEFKVNGGSVSVWVPRKTTVS

SEQ ID NO: 18513 - protein, 486 aa, Geobacillus stearothermophilus
AAPFNGTMMQYFEWYLPDDGTLWTKVANEANNLSSLGITALWLPPAYKGTSRSDVGYGAYDLYDLGEFNQKGTVRTKYGTKAQYLQAIQAAHAAGMQVYADVVFDHKGGADGTEWVDAVEVNPSDRNQVISGTYQIQAWTKFDFPGRGNTYSSFKWRWYHFDGVDWDESRKLSRIYLFEGKAWDWPVDTEFGNYDYLMYADLDMDHPEVTTELKNWGKWYVNTTNIDGFRLDAVKHIKFYFFPDWLSYVRSSTGKPLFTVGEYWSGDINKLHNYITFTDGTVSLFDAPLHYKFYNASKSGGAFDMRTLMTNTLMKDQPTLAVTFVDNHDTEPGQALQSWVDPWFKPLAYAFILTRQEGYPCVFYGDYYGIPQYNIPSLKSKIDPLLIARRDYAYGTQHDYLDHSDIIGWTREGGTEKPGSGLAALITDGPGGSKWMYVGKQHAGKVFYDLTGNRSDTVTINSDGWGEFKVNGGSVSVWVPRKTTVS

SEQ ID NO: 18514 - protein, 488 aa, Geobacillus stearothermophilus
AAPFNGTMMQYFEWYLPDDGTLWTKVANEANNLSSLGITALWLPPAYKGTSRSDVGYGAYDLYDLGEFNQKGTVRTKYGTKAQYLQAIRAAHAAGMQVYADVVFDHKGGADDTEWVDAVEVNPSDRNQVISGTYQIQAWTKFDFPGRGNTYSSFKWRWYHFDGVDWDESRKLSRIYLFEGIGKAWDWEVDTENGNYDYLMYADLDMDYPEVVTELKNWGPWYVLTTNIDGFRLDAVKHIKFSFFPDWLSYVRSSTGKPLFTVGEYWSYDINKLHNYITKTNGTMSLFDAPLHNKFYTASKSGGAFDMRTLMTNTLMKDQPTLAVTFVDNHDTEPGQALQSWVDPWFKPLAYAFILTRQEGYPCVFYGDYYGIPQYNIPSLKSKIDPLLIARRDYAYGTQHDYLDHSDIIGWTREGVTEKPGSGLAALITDGPGGSKWMYVGKQHAGKVFYDLTGNRSDTVTINSDGWGEFKVNGGSVSVWVPRKTTVS

SEQ ID NO: 18515 - protein, 486 aa, Geobacillus stearothermophilus
AAPFNGTMMQYFEWYLPDDGTLWTKVANEANNLSSLGITALWLPPAYKGTSRSDVGYGAYDLYDLGEFNQKGTVRTKYGTKAQYLQAIQAAHAAGMQVYADVVFDHKGGADGTEWVDAVEVNPSDRNQVISGTYQIQAWTKFDFPGRGNTYSSFKWRWYHFDGVDWDESRKLSRIYLFEGKAWDWPVDTEFGNYDYLMYADLDMDHPEVTTELKNWGKWYVNTTNIDGFRLDAVKHIKFYFFPDWLSYVRSSTGKPLFTVGEYWSGDINKLHNYITYTDGTVSLFDAPLHYKFYNASKSGGAFDMRTLMTNTLMKDQPTLAVTFVDNHDTEPGQALQSWVDPWFKPLAYAFILTRQEGYPCVFYGDYYGIPQYNIPSLKSKIDPLLIARRDYAYGTQHDYLDHSDIIGWTREGGTEKPGSGLAALITDGPGGSKWMYVGKQHAGKVFYDLTGNRSDTVTINSDGWGEFKVNGGSVSVWVPRKTTVS

SEQ ID NO: 18516 - protein, 488 aa, Geobacillus stearothermophilus
AAPFNGTMMQYFEWYLPDDGTLWTKVANEANNLSSLGITALWLPPAYKGTSRSDVGYGAYDLYDLGEFNQKGTVRTKYGTKAQYLQAIQAAHAAGMQVYADVVFDHKGGADGTEWVDAVEVNPSDRNQVISGTYQIQAWTKFDFPGRGNTYSSFKWRWYHFDGVDWDESRKLSRIYLFEGIGKAWDWEVDTENGNYDYLMYADLDMDYPEVVTELKNWGPWYVLTTNIDGFRLDAVKHIKFQFFPDWLSYVRSSTGKPLFTVGEYWSYDINKLHNYITKTNGTTSLFDAPLHNKFYTASKSGGAFDMRTLMTNTLMKDQPTLAVTFVDNHDTEPGQALQSWVDPWFKPLAYAFILTRQEGYPCVFYGDYYGIPQYNIPSLKSKIDPLLIARRDYAYGTQHDYLDHSDIIGWTREGVTEKPGSGLAALITDGPGGSKWMYVGKQHAGKVFYDLTGNRSDTVTINSDGWGEFKVNGGSVSVWVPRKTTVS

SEQ ID NO: 18517 - protein, 486 aa, Geobacillus stearothermophilus
AAPFNGTMMQYFEWYLPDDGTLWTKVANEANNLSSLGITALWLPPAYKGTSRSDVGYGAYDLYDLGEFNQKGTVRTKYGTKAQYLQAIQAAHAAGMQVYADVVFDHKGGADGTEWVDAVEVNPSDRNQVISGTYQIQAWTKFDFPGRGNTYSSFKWRWYHFDGVDWDESRKLSRIYLFEGKAWDWEVDTEFGNYDYLMYADLDMDHPEVTTELKNWGKWYVNTTNIDGFRLDAVKHIKFSFFPDWLSYVRSSTGKPLFTVGEYWSGDINKLHNYITKTDGTVSLFDAPLHYKFYNASKSGGAFDMRTLMTNTLMKDQPTLAVTFVDNHDTEPGQALQSWVDPWFKPLAYAFILTRQEGYPCVFYGDYYGIPQYNIPSLKSKIDPLLKARKLYAYGTQHDYLDHSDIIGWTREGGTEKPGSGLAALITDGPGGSKWMYVGKQHAGKVFYDLTGNRSDTVTINSDGWGEFKVNGGSVSVWVPRKTTVS

SEQ ID NO: 18518 - protein, 488 aa, Geobacillus stearothermophilus
AAPFNGTMMQYFEWYLPDDGTLWTKVANEANNLSSLGITALWLPPAYKGTSRSDVGYGAYDLYDLGEFNQKGTVRTKYGTKAQYLQAIQAAHAAGMQVYADVVFDHKGGADGTEWVDAVEVNPSDRNQVISGTYQIQAWTKFDFPGRGNTYSSFKWRWYHFDGVDWDESRKLSRIYLFEGIGKAWDWEVDTENGNYDYLMYADLDMDYPEVVTELKNWGPWYVLTTNIDGFRLDAVKHIKFQFFPDWLSYVRSSTGKPLFTVGEYWSYDINKLHNFITKTNGTMSLFDAPLHNKFYTASKSGGAFDMRTLMTNTLMKDQPTLAVTFVDNHDTEPGQALQSWVDPWFKPLAYAFILTRQEGYPCVFYGDYYGIPQYNIPSLKSKIDPLLIARRDYAYGTQHDYLDHSDIIGWTREGVTEKPGSGLAALITDGPGGSKWMYVGKQHAGKVFYDLTGNRSDTVTINSDGWGEFKVNGGSVSVWVPRKTTVS

SEQ ID NO: 18519 - protein, 486 aa, Geobacillus stearothermophilus
AAPFNGTMMQYFEWYLPDDGTLWTKVANEANNLSSLGITALWLPPAYKGTSRSDVGYGAYDLYDLGEFNQKGTVRTKYGTKAQYLQAIQAAHAAGMQVYADVVFDHKGGADGTEWVDAVEVNPSDRNQVISGTYQIQAWTKFDFPGRGNTYSSFKWRWYHFDGVDWDESRKLSRIYLFEGKAWDWPVDTEFGNYDYLMYADLDMDHPEVTTELKNWGKWYVNTTNIDGFRLDAVKHIKFYFFPDWLSYVRSSTGKPLFTVGEYWSGDINKLHNYITITDGTVSLFDAPLHYKFYNASKSGGAFDMRTLMTNTLMKDQPTLAVTFVDNHDTEPGQALQSWVDPWFKPLAYAFILTRQEGYPCVFYGDYYGIPQYNIPSLKSKIDPLLIARRDYAYGTQHDYLDHSDIIGWTREGGTEKPGSGLAALITDGPGGSKWMYVGKQHAGKVFYDLTGNRSDTVTINSDGWGEFKVNGGSVSVWVPRKTTVS

SEQ ID NO: 18520 - protein, 488 aa, unidentified
AAPFNGTMMQYFEWYLPDDGTLWTKVANEANNLSSLGITALWLPPAYKGTSRSDVGYGVYDLYDLGEFNQKGAVRTKYGTKAQYLQAIQAAHAAGMQVYADVVFDHKGGADGTEWVDAVEVNPSDRNQEISGIYQIQAWTKFDFPGRGNTYSSFKWRWYHFDGVDWDESRKLSRIYKFRGIGKAWDWEVDTENGNYDYLMYADLDMDHPEVVTELKAGAKWYVNTRTLDGFRLDAVKHIKFSFFPDWLSYVRSQTGKPLFTVGEYWSYDINKLHNYIMKTNGTMSLFDAPLHNKFYTASKSGGTFDMRTLMTNTLMKDQPTLAVTFVDNHDTEPGQALQSWVDPWFKPLAYAFILTRQEGYPCVFYGDYYGIPQYNIPSLKSKIDPLLIARRDYAYGTQHDYLDHSDIIGWTREGVTEKPGSGLAALITDGPGGSKWMYVGKQHAGKVFYDLTGNRSDTVTINSDGWGEFKVNGGSVSVWVPRKTTVS

SEQ ID NO: 18521 - protein, 486 aa, Geobacillus stearothermophilus
AAPFNGTMMQYFEWYLPDDGTLWTKVANEANNLSSLGITALWLPPAYKGTSRSDVGYGAYDLYDLGEFNQKGTVRTKYGTKAQYLQAIQAAHAAGMQVYADVVFDHKGGADGTEWVDAVEVNPSDRNQVISGTYQIQAWTKFDFPGRGNTYSSFKWRWYHFDGVDWDESRKLSRIYLFEGKAWDWPVDTEFGNYDYLMYADLDMDHPEVTTELKNWGKWYVNTTNIDGFRLDAVKHIKFYFFPDWLSYVRSSTGKPLFTVGEYWSGDINKLHNYITHTDGTVSLFDAPLHYKFYNASKSGGAFDMRTLMTNTLMKDQPTLAVTFVDNHDTEPGQALQSWVDPWFKPLAYAFILTRQEGYPCVFYGDYYGIPQYNIPSLKSKIDPLLIARRDYAYGTQHDYLDHSDIIGWTREGGTEKPGSGLAALITDGPGGSKWMYVGKQHAGKVFYDLTGNRSDTVTINSDGWGEFKVNGGSVSVWVPRKTTVS

SEQ ID NO: 18522 - protein, 486 aa, Geobacillus stearothermophilus
AAPFNGTMMQYFEWYLPDDGQLWNRVANEANNLSSLGITALWLPPAYKGTSRSDVGYGAYDLYDLGEFNQKGTVRTKYGTKAQYLQAIQAAHAAGMQVYADVVFDHKGGADGTEWVDAVEVNPSDRNQVISGTYQIQAWTKFDFPGRGNTYSSFKWRWYHFDGVDWDESRKLSRIYLFEGKAWDWEVDTEFGNYDYLMYADLDMDHPEVTTELKNWGKWYVNTTNIDGFRLDAVKHIKFSFFPDWLSYVRSSTGKPLFTVGEYWSGDINKLHNYITKTDGTVSLFDAPLHYKFYNASKSGGAFDMRTLMTNTLMKDQPTLAVTFVDNHDTEPGQALQSWVDPWFKPLAYAFILTRQEGYPCVFYGDYYGIPQYNIPSLKSKIDPLLIARRDYAYGTQHDYLDHSDIIGWTREGGTEKPGSGLAALITDGPGGSKWMYVGKQHAGKVFYDLTGNRSDTVTINSDGWGEFKVNGGSVSVWVPRKTTVS

SEQ ID NO: 18523 - protein, 488 aa, Geobacillus stearothermophilus
AAPFNGTMMQYFEWYLPDNGTLWTKVAKEANNLSSLGITALWLPPAYKGTSRSDVGYGVYDLYDLGEFNQKGTVRTKYGTKAQYLQAIQAAHAAGMRVYADVVFDHKGGADGTEWVDAVEVNPSDRNQEISGTYQIQAWTKFDFPGRGNTYSSFKWRWYHFDGVDWDESRKLSRIYKFRGIGKAWDWEVDTENGNYDYLMYADLDMDHPEVVTELKNWGKWYVKTTNIDGFRLDAVKHIKFSFFPDWLSYVRSQTGKPLFTVGEYWSYDIKKLHNYITKTNGTMSLFDAPLHNKFYTASKSGGAFNMRTLMTNTLMKNRPTLAVTFVDNHDTEPGQALQSWVDPWFKPLAYAFILTREEGYPCVFYGDYYGIPQYNIPSLKSKIDPLLIARRDYAYGTQHDYLDHSDIIGWTREGVTEKPGSGLAALITDGPGGSKWMYVGKEHAGKVFYDLTGNRSDTVTINSDGWGEFKVNGGSVSVWVPRKTTVS

SEQ ID NO: 18524 - protein, 486 aa, Geobacillus stearothermophilus
AAPFNGTMMQYFEWYLPDDGTLWTKVANEANNLSSLGITALWLPPAYKGTSRSDVGYGAYDLYDLGEFNQKGTVRTKYGTKAQYLQAIQAAHAAGMQVYADVVFDHKGGADGTEWVDAVEVNPSDRNQVISGTYQIQAWTKFDFPGRGNTYSSFKWRWYHFDGVDWDESRKLNRIYLFEGKAWDWPVDTEFGNYDYLMYADLDMDHPEVTTELKNWGKWYVNTTNIDGFRLDAVKHIKFYFFPDWLSYVRSSTGKPLFTVGEYWSGDINKLHNYITKTDGTVSLFDAPLHYKFYNASKSGGAFDMRTLMTNTLMKDQPTLAVTFVDNHDTEPGQALQSWVDPWFKPLAYAFILTRQEGYPCVFYGDYYGIPQYNIPSLKSKIDPLLIARRDYAYGTQHDYLDHSDIIGWTREGGTEKPGSGLAALITDGPGGSKWMYVGKQHAGKVFYDLTGNRSDTVTINSDGWGEFKVNGGSVSVWVPRKTTVS

SEQ ID NO: 18525 - protein, 488 aa, Geobacillus stearothermophilus
AAPFNGTMMQYFEWYLPDDGTLWTKVADEANNLSSLGITALWLPPAYKGTSRSDVGYGVYDLYDLGEFNQKGTVRTKYGTKAQYLQAIQAAHAAGMRVYADVVFDHKGGADGTEWVDAVEVNPSDRNQEISGTYQIQAWTKFDFPGRGNTYSSFKWRWYHFDGVDWDESRQLSRIYKFRGIGKAWDWEVDTENGNYDYLMYADLDMDHPEVVTELKNWGKWYVDTTNIDGFRLDAVKHIKFSFFPDWLSYVRSQTGKPLFTVGEYWSYDIDKLHNYITKTDGTMSLFDAPLHNKFYTASKSGGAFDMQTLMTNTLMKDRPTLAVTFVDNHDTEPGQALQSWVDPWFKPLAYAFILTREEGYPCVFYGDYYGIPQYNIPSLKSQIDPLLIARRDYAYGTQHDYLDHSDIIGWTREGVTEKPGSGLAALITDGPGGSKWMYVGKEHAGKVFYDLTGNRSDTVTINSDGWGEFKVNGGSVSVWVPQKTTVS

SEQ ID NO: 18526 - protein, 488 aa, Geobacillus stearothermophilus
AAPFNGTMMQYFEWYLPDDGTLWTKVANEANNLSSLGITALWLPPAYKGTSRSDVGYGAYDLYDLGEFNQKGTVRTKYGTKAQYLQAIRAAHAAGMQVYADVVFDHKGGADGTEWVDAVEVNPSDRNQVISGTYQIQAWTKFDFPGRGNTYSSFKWRWYHFDGVDWDESRKLSRIYLFEGIGKAWDWEVDTENGNYDYLMYADLDMDHPEVVTELKNWGPWYVLTTNIDGFRLDAVKHIKFSFFPDWLSYVRSSTGKPLFTVGEYWSYDLNKLKNYITKTNGTMSLFDAPLHNKFYTASKSGGAFDMRTLMTNTLMKDQPTLAVTFVDNHDTEPGQALQSWVDPWFKPLAYAFILTRQEGYPCVFYGDYYGIPQYNIPSLKSKIDPLLIARRDYAYGTQHDYLDHSDIIGWTREGVTEKPGSGLAALITDGPGGSKWMYVGKQHAGKVFYDLTGNRSDTVTINSDGWGEFKVNGGSVSVWVPRKTTVS

SEQ ID NO: 18527 - protein, 488 aa, Geobacillus stearothermophilus
AAPFNGTMMQYFEWYLPDDGTLWTKVADEANNLSSLGITALWLPPAYKGTSRSDVGYGVYDLYDLGEFNQKGTVRTKYGTKAQYLQAIQAAHAAGMRVYADVVFDHKGGADGTEWVDAVEVNPSDRNQEISGTYQIQAWTKFDFPGRGNTYSSFKWRWYHFDGVDWDESRQLSRIYKFRGIGKAWDWEVDTENGNYDYLMYADLDMDHPEVVTELKNWGKWYVDTTNIDGFRLDAVKHIKFSFFPDWLSYVRSQTGKPLFTVGEYWSYDIDKLHNYITKTNGTMSLFDAPLHNKFYTASKSGGAFDMQTLMTNTLMKDRPTLAVTFVDNHDTEPGQALQSWVDPWFKPLAYAFILTREEGYPCVFYGDYYGIPQYNIPSLKSKIDPLLIARRDYAYGTQHDYLDHSDIIGWTREGVTEKPGSGLAALITDGPGGSKWMYVGKEHAGKVFYDLTGNRSDTVTINSDGWGEFKVNGGSVSVWVPQKTTVS

SEQ ID NO: 18528 - protein, 486 aa, Geobacillus stearothermophilus
AAPFNGTMMQYFEWYLPDDGTLWTKVANEANNLSSLGITALWLPPAYKGTSRSDVGYGAYDLYDLGEFNQKGTVRTKYGTKAQYLSAIQSAHSAGMQVYADVVFDHKGGADGTEWVDAVEVNPSDRNQVISGTYQIQAWTKFDFPGRGNTYSSFKWRWYHFDGVDWDESRKLSRIYLFEGKAWDWEVDTEFGNYDYLMYADLDMDHPEVTTELKNWGKWYVNTTNIDGFRLDAVKHIKFSFFPDWLSYVRSSTGKPLFTVGEYWSGDINKLHNYITKTDGTVSLFDAPLHYKFYNASKSGGAFDMRTLMTNTLMKDQPTLAVTFVDNHDTEPGQALQSWVDPWFKPLAYAFILTRQEGYPCVFYGDYYGIPQYNIPSLKSKIDPLLIARRDYAYGTQHDYLDHSDIIGWTREGGTEKPGSGLAALITDGPGGSKWMYVGKQHAGKVFYDLTGNRSDTVTINSDGWGEFKVNGGSVSVWVPRKTTVS

SEQ ID NO: 18529 - protein, 488 aa, Geobacillus stearothermophilus
AAPFNGTMMQYFEWYLPDDGTLWTKVANEANNLSSLGITALWLPPAYKGTSRSDVGYGAYDLYDLGEFNQKGTVRTKYGTKAQYLQAIQAAHAAGMQVYADVVFDHKGGADGTEWVDAVEVNPSDRNQVISGTYQIQAWTKFDFPGRGNTYSSFKWRWYHFDGVDWDESRKLSRIYLFEGIGKAWDWEVDTENGNYDYLMYADLDMDYPEVVTELKNWGPWYVLTTNIDGFRLDAVKHIKFQFFPDWLSYVRSSTGKPLFTVGEYWSYDINKLKNYITKTNGTMSLFDAPLHNKFYTASKSGGAFDMRTLMTNTLMKDQPTLAVTFVDNHDTEPGQALQSWVDPWFKPLAYAFILTRQEGYPCVFYGDYYGIPQYNIPSLKSKIDPLLIARRDYAYGTQHDYLDHSDIIGWTREGVTEKPGSGLAALITDGPGGSKWMYVGKQHAGKVFYDLTGNRSDTVTINSDGWGEFKVNGGSVSVWVPRKTTVS

SEQ ID NO: 18530 - protein, 488 aa, Geobacillus stearothermophilus
AAPFNGTMMQYFEWYLPDDGTLWTKVADEANNLSSLGITALWLPPAYKGTSRSDVGYGVYDLYDLGEFNQKGTVRTKYGTKAQYLEAIEAAHAAGMQVYADVVFDHKGGADGTEWVDAVEVNPSDRNQEISGTYQIQAWTKFDFPGRGNTYSSFKWRWYHFDGVDWDESRQLSRIYKFRGIGKAWDWEVDTENGNYDYLMYADLDMDHPEVVTELKNWGKWYVDTTNIDGFRLDAVKHIKFSFFPDWLSYVRSQTGKPLFTVGEYWSYDIDKLHNYITKTDGTMSLFDAPLHNKFYTASKSGGAFDMQTLMTNTLMKDQPTLAVTFVDNHDTEPGQALQSWVDPWFKPLAYAFILTRQEGYPCVFYGDYYGIPQYNIPSLKSQIDPLLIARRDYAYGTQHDYLDHSDIIGWTREGVTEKPGSGLAALITDGPGGSKWMYVGKQHAGQVFYDLTGNRSDTVTINSDGWGEFQVNGGSVSVWVPQKTTVS

SEQ ID NO: 18531 - protein, 486 aa, Geobacillus stearothermophilus
AAPFNGTMMQYFEWYLPDDGTLWTKVANEANNLSSLGITALWLPPAYKGTSRSDVGYGAYDLYDLGEFNQKGTVRTKYGTKAQYLQAIQAAHAAGMQVYADVVFDHKGGADGTEDVQAVEVNPSDRNQVISGPYQIQAWTKFDFPGRGNTYSSFKWRWYHFDGVDWDESRKLSRIYLFEGKAWDWEVDTEFGNYDYLMYADLDMDHPEVTTELKNWGKWYVNTTNIDGFRLDAVKHIKFSFFPDWLSYVRSSTGKPLFTVGEYWSGDINKLHNYITKTDGTVSLFDAPLHYKFYNASKSGGAFDMRTLMTNTLMKDQPTLAVTFVDNHDTEPGQALQSWVDPWFKPLAYAFILTRQEGYPCVFYGDYYGIPQYNIPSLKSKIDPLLIARRDYAYGTQHDYLDHSDIIGWTREGGTEKPGSGLAALITDGPGGSKWMYVGKQHAGKVFYDLTGNRSDTVTINSDGWGEFKVNGGSVSVWVPRKTTVS

SEQ ID NO: 18532 - protein, 484 aa, Aspergillus niger
AATALAATPADWKSQSIYFLLTDRFARTDGSTTATCNTADQKYCGGTWKGIIDKLDYIQGMGFTAIWITPVTKQLPQTTAYGDAYHGYWQQDIYSLNENYGTADDLKALSSALHERGMYLMVDVVANHMGYDGAGSSVDYSVFKPFSSQDYFHPFCFIQNYEDQTQVEDCWLGDNTVSLPDLDTTKDVVKNEWYDWVKSLVSNYSIDGLRIDTVKHVQKDFWPGYNKAAGVYCIGEVLDGDPAYTCPYQNVMDGVLNYPIYYPLLNAFKSTSGSMDDLYNMINTVKSDCKDSTLLGTFVENHDNPRFASYTNDIALAKNVAAFIILNDGIPIIYAGQEQHYAGGNDPANREATWLSGYPTDSELYKLIAKANKIRKYAISKDTGFVTYKNWPIYKDDTTIAMKKGTDGSQIVTILSNKGASGDSYTLSLSGAGYTAGQKLTEVIGCTTVTVGSDGKVPVPMAGGLPKVLYPTEKLAGSKICSSS

SEQ ID NO: 18533 - protein, 482 aa, Unidentified
HNGTNGAMMQYFEWHLPNDGNHWNRLRDDASNLRNRGITAIWIPPAWKGTSQNDVGYGAYDLYDLGEFNQKGTVRTKYGTRSQLESAIHALKNNGVQVYGDVVMNHKGAADATENVLAVEVNPNNRNQEISGDYTIEAYTKFDFPGRGNTYSDFKWRWYHFDGVDWDQSRQFQNRIYKFRGKAWDWEVDSEFGNYDYLMYADYDMDHPEVVNELRRWGEWYTNTLNLDGFRIDAVKHIKFSFTRDWLTHVRNATGKGMFAVAEFWKNDLGALENYLNKTSWNHSVFDVPLHYNLYNASNSRGNYDMAKLLNGTVVQKHPAHASTFVDNHDSQPGESLESFVQEWFKPLAYALILTREQGYPSVFYGDYYGIPTHSVPAMKAKIDPILEARANFAYGTQHDYFDHHNIIGWTREGNTTHPNSGLATIMSDGPGGEKWMYVGQNKAGQVWHDITGNKPGTVTINADGWANFSVNKGSVSIWVKR

SEQ ID NO: 18534 - protein, 482 aa, Unidentified
HNGTNATMMQYFEWHLPNDGNHWNRLRDDASNLRNRGITAIWIPPAWKGTSQNDVGYGAYDLYDLGEFNQKGTVRTKYGTRSQLESAIHALKNNGVQVYGDVVMNHKAGADATENVLAVEVNPNNRNQEISGDYTIEAYTKFDFPGRGNTYSDFKWRWYHFDGVDWDQSRQFQNRIYKFRGKAWDWPVDSENGNYDYLMYADYDMDHPEVVNELRRWGEWYTNTLNLDGFRIDAVKHIKFWFTRDWLTHVRNATGKGMFAVAEYWKNDLGALENYLSKTNWNHSVFDVPLHYNLYNASNSRGNYDMAKLLNGTVVQKHPMHAVTFVDNHDSQPGESLESFVQEWFKPLAYALILTREQGYPSVFYGDYYGIPTHSVPAMKAKIDPILAARQNFAYGTQHDYFDHHNIIGWTREGNTTHPNSGLATIMSDGPGGEKWMYVGQNKAGQVWHDITGNKPGTVTINADGWANFSVNKGSVSIWVKR

SEQ ID NO: 18535 - protein, 482 aa, Unidentified
HNGTNATMMQYFEWHLPNDGNHWNRLRDDASNLRNRGITAIWIPPAWKGTSQNDVGYGAYDLYDLGEFNQKGTVRTKYGTRSQLESAIHALKNNGVQVYGDVVMNHKAGADATENVLAVEVNPNNRNQEISGDYTIEAYTKFDFPGRGNTYSDFKWRWYHFDGVDWDQSRQFQNRIYKFRGKAWDWPVDSENGNYDYLMYADYDMDHPEVVNELRRWGEWYTNTLNLDGFRIDAVKHIKFQFTRDWLTHVRNATGKGMFAVAEYWKNDLGALENYLSKTNWNHSVFDVPLHYNLYNASNSRGNYDMAKLLNGTVVQKHPMHAVTFVDNHDSQPGESLESFVQEWFKPLAYALILTREQGYPSVFYGDYYGIPTHSVPAMKAKIDPILAARQNFAYGTQHDYFDHHNIIGWTREGNTTHPNSGLATIMSDGPGGEKWMYVGQNKAGQVWHDITGNKPGTVTINADGWANFSVNKGSVSIWVKR

SEQ ID NO: 18536 - protein, 482 aa, Unidentified
HNGTNATMMQYFEWHLPNDGNHWNRLRDDASNLRNRGITAIWIPPAWKGTSQNDVGYGAYDLYDLGEFNQKGTVRTKYGTRSQLESAIHALKNNGVQVYGDVVMNHKAGADATENVLAVEVNPNNRNQEISGDYTIEAYTKFDFPGRGNTYSDFKWRWYHFDGVDWDQSRQFQNRIYKFRGKAWDWPVDSENGNYDYLMYADYDMDHPEVVNELRRWGEWYTNTLNLDGFRIDAVKHIKFSFTRDWLTHVRNATGKGMFAVAEYWKNDLGALENYLSITNWNHSVFDVPLHYNLYNASNSRGNYDMAKLLNGTVVQKHPMHAVTFVDNHDSQPGESLESFVQEWFKPLAYALILTREQGYPSVFYGDYYGIPTHSVPAMKAKIDPILAARQNFAYGTQHDYFDHHNIIGWTREGNTTHPNSGLATIMSDGPGGEKWMYVGQNKAGQVWHDITGNKPGTVTINADGWANFSVNKGSVSIWVKR

SEQ ID NO: 18537 - protein, 482 aa, Unidentified
HNGTNATMMQYFEWHLPNDGNHWNRLRDDASNLRNRGITAIWIPPAWKGTSQNDVGYGAYDLYDLGEFNQKGTVRTKYGTRSQLESAIHALKNNGVQVYGDVVMNHKAGADATENVLAVEVNPNNRNQEISGDYTIEAYTKFDFPGRGNTYSDFKWRWYHFDGVDWDQSRQFQNRIYKFRGKAWDWPVDSENGNYDYLMYADYDMDHPEVVNELRRWGEWYTNTLNLDGFRIDAVKHIKFFFTRDWLTHVRNATGKGMFAVAEYWKNDLGALENYLSKTNWNHSVFDVPLHYNLYNASNSRGNYDMAKLLNGTVVQKHPMHAVTFVDNHDSQPGESLESFVQEWFKPLAYALILTREQGYPSVFYGDYYGIPTHSVPAMKAKIDPILAARQNFAYGTQHDYFDHHNIIGWTREGNTTHPNSGLATIMSDGPGGEKWMYVGQNKAGQVWHDITGNKPGTVTINADGWANFSVNKGSVSIWVKR

SEQ ID NO: 18538 - protein, 482 aa, Unidentified
HNGTNATMMQYFEWHLPNDGNHWNRLRDDASNLRNRGITAIWIPPAWKGTSQNDVGYGAYDLYDLGEFNQKGTVRTKYGTRSQLESAIHALKNNGVQVYGDVVMNHKAGADATENVLAVEVNPNNRNQEISGDYTIEAYTKFDFPGRGNTYSDFKWRWYHFDGVDWDQSRQFQNRIYKFRGKAWDWPVDSENGNYDYLMYADYDMDHPEVVNELRRWGEWYTNTLNLDGFRIDAVKHIKFSFTRDWLTHVRNATGKGMFAVAEYWKNDLGALENYLSFTNWNHSVFDVPLHYNLYNASNSRGNYDMAKLLNGTVVQKHPMHAVTFVDNHDSQPGESLESFVQEWFKPLAYALILTREQGYPSVFYGDYYGIPTHSVPAMKAKIDPILAARQNFAYGTQHDYFDHHNIIGWTREGNTTHPNSGLATIMSDGPGGEKWMYVGQNKAGQVWHDITGNKPGTVTINADGWANFSVNKGSVSIWVKR

SEQ ID NO: 18539 - protein, 482 aa, Unidentified
HNGTNGAMMQYFEWHLPNDGNHWNRLRDDASNLRNRGITAIWIPPAWKGTSQNDVGYGAYDLYDLGEFNQKGTVRTKYGTRSQLESAIHALKNNGVQVYGDVVMNHKGAADATENVLAVEVNPNNRNQEISGDYTIEAYTKFDFPGRGNTYSDFKWRWYHFDGVDWDQSRQFQNRIYKFRGKAWDWEVDSEFGNYDYLMYADYDMDHPEVVNELRRWGEWYTNTLNLDGFRIDAVKHIKFSFTRDWLTHVRNATGKGMFAVAEFWKNDLGALENYLNKTSWNHSVFDVPLHYNLYNASNSRGNYDMAKLLNGTVVQKHPAHANTFVDNHDSQPGESLESFVQEWFKPLAYALILTREQGYPSVFYGDYYGIPTHSVPAMKAKIDPILEARANFAYGTQHDYFDHHNIIGWTREGNTTHPNSGLATIMSDGPGGEKWMYVGQNKAGQVWHDITGNKPGTVTINADGWANFSVNKGSVSIWVKR

SEQ ID NO: 18540 - protein, 482 aa, Unidentified
HNGTNATMMQYFEWHLPNDGNHWNRLRDDASNLRNRGITAIWIPPAWKGTSQNDVGYGAYDLYDLGEFNQKGTVRTKYGTRSQLESAIHALKNNGVQVYGDVVMNHKAGADATENVLAVEVNPNNRNQEISGDYTIEAYTKFDFPGRGNTYSDFKWRWYHFDGVDWDQSRQFQNRIYKFRGKAWDWPVDSENGNYDYLMYADYDMDHPEVVNELRRWGEWYTNTLNLDGFRIDAVKHIKFHFTRDWLTHVRNATGKGMFAVAEYWKNDLGALENYLSKTNWNHSVFDVPLHYNLYNASNSRGNYDMAKLLNGTVVQKHPMHAVTFVDNHDSQPGESLESFVQEWFKPLAYALILTREQGYPSVFYGDYYGIPTHSVPAMKAKIDPILAARQNFAYGTQHDYFDHHNIIGWTREGNTTHPNSGLATIMSDGPGGEKWMYVGQNKAGQVWHDITGNKPGTVTINADGWANFSVNKGSVSIWVKR

SEQ ID NO: 18541 - protein, 478 aa, Aspergillus oryzae
ATPADWRSQSIYFLLTDRFARTDGSTTATCNTADQKYCGGTWQGIIDKLDYIQGMGFTAIWITPVTAQLPQTTAYGDAYHGYWQQDIYSLNENYGTADDLKALSSALHERGMYLMVDVVANHMGYDGPGSSVDYSVFVPFNSASYFHPFCFIQNWDNQTQVEDCWLGDNTVSLPDLDTTKDVVKNEWYDWVGSLVSNYSIDGLRIDTVKHVQKDFWPGYNKAAGVYCIGEVLDGDPAYTCPYQEVLDGVLNYPIYYPLLNAFKSTSGSMDDLYNMINTVKSDCPDSTLLGTFVENHDNPRFASYTNDIALAKNVAAFIILNDGIPIIYAGQEQHYAGGNDPANREATWLSGYPTDSELYKLIASANAIRNYAISKDTGFVTYKNWPIYKDDTTIAMRKGTDGSQIVTILSNKGASGDSYTLSLSGAGYTAGQQLTEVIGCTTVTVDSSGDVPVPMAGGLPRVLYPTEKLAGSKICSSS

SEQ ID NO: 18542 - protein, 515 aa, Geobacillus stearothermophilus
AAPFNGTMMQYFEWYLPDNGTLWTKVARQANNLSSLGITALWLPPAYKGTSRSDVGYGVYDLYDLGEFNQKGTVRTKYGTKAQYLRAIRAAHAAGMQVYADVVFDHKGGADGTEWVDAVEVNPSDRNQEISGTYQIQAWTKFDFPGRGNTYSSFKWRWYHFDGVDWDESRKLSRIYKFRGIGKAWDWEVDTENGNYDYLMYADLDMDHPEVVTELKNWGKWYVRTTNIDGFRLDAVKHIKFSFFPDWLSYVRSQTGKPLFTVGEYWSYDIRKLHNYITKTRGTMSLFDAPLHNKFYTASKSGGAFNMRTLMTNTLMKNQPTLAVTFVDNHDTEPGQALQSWVDPWFKPLAYAFILTRQEGYPCVFYGDYYGIPQYNIPSLKSKIDPLLIARRNYAYGTQHDYLDHSDIIGWTREGVTEKPGSGLAALITDGPGGSKWMYVGKQHAGKVFYDLTGNRSNTVTINSDGWGEFKVNGGSVSVWVPRKTTVSTIARPITTRPWTGEFVRWTEPRLVAWP

SEQ ID NO: 18543 - protein, 515 aa, Geobacillus stearothermophilus
AAPFNGTMMQYFEWYLPDNGTLWTKVAKEANNLSSLGITALWLPPAYKGTSRSDVGYGVYDLYDLGEFNQKGTVRTKYGTKAQYLQAIQAAHAAGMRVYADVVFDHKGGADGTEWVDAVEVNPSDRNQEISGTYQIQAWTKFDFPGRGNTYSSFKWRWYHFDGVDWDESRKLSRIYKFRGIGKAWDWEVDTENGNYDYLMYADLDMDHPEVVTELKNWGKWYVKTTNIDGFRLDAVKHIKFSFFPDWLSYVRSQTGKPLFTVGEYWSYDIKKLHNYITKTKGTMSLFDAPLHNKFYTASKSGGAFNMRTLMTNTLMKNRPTLAVTFVDNHDTEPGQALQSWVDPWFKPLAYAFILTREEGYPCVFYGDYYGIPQYNIPSLKSKIDPLLIARRNYAYGTQHDYLDHSDIIGWTREGVTEKPGSGLAALITDGPGGSKWMYVGKEHAGKVFYDLTGNRSDTVTINSDGWGEFKVNGGSVSVWVPRKTTVSTIARPITTRPWTGEFVRWTEPRLVAWP

SEQ ID NO: 18544 - protein, 535 aa, unidentified
LLAFLLTASLFCPTGQHAKAAAPFNGTMMQYFEWYLPDDGTLWTKVANEANNLSSLGITALWLPPAYKGTSRSDVGYGVYDLYDLGEFNQKGTVRTKYGTKAQYLQAIQAAHAAGMQVYADVVFDHKGGADGTEWVDAVEVNPSDRNQEISGTYQIQAWTKFDFPGRGNTYSSFKWRWYHFDGVDWDESRKLSRIYKFRGIGKAWDWEVDTENGNYDYLMYADLDMDHPEVVTELKNWGKWYVNTTNIDGFRLDAVKHIKFSFFPDWLSYVRSQTGKPLFTVGEYWSYDINKLHNYITKTNGTMSLFDAPLHNKFYTASKSGGAFDMRTLMTNTLMKDQPTLAVTFVDNHDTEPGQALQSWCDPWFKPLAYAFILTRQEGYPCVFYGDYYGIPQYNIPSLKSKIDPLLIARRDYAYGTQHDYLDHSDIIGWTREGVTEKPGSGLAALITDGPGGSKWMYVGKQHAGKVFYDLTGNRSDTVTINSDGWGEFKVNGGSVSVWVPRKTTVSTIARPITTRPWTGEFVRWTEPRLVAWP

SEQ ID NO: 18545 - protein, 535 aa, Bacillus sp.
LLAFLLTVSLFCPTGQPAKAAAPFNGTMMQYFEWYLPDDGTLWTKVANEANNLSSLGITALWLPPAYKGTSRSDVGYGVYDLYDLGEFNQKGTVRTKYGTKAQYLQAIQAAHAAGMQVYADVVFDHKGGADGTEWVDAVEVNPSDRNQEISGTYQIQAWTKFDFPGRGNTYSSFKWRWYHFDGVDWDESRKLSRIYKFRGIGKAWDWEVDTENGNYDYLMYADLDMDHPEVVTELKNWGKWYVNTTNIDGFRLDAVKHIKFSFFPDWLSYVRSQTGKPLFTVGEYWSYDINKLHNYITKTDGTMSLFDAPLHNKFYTASKSGGAFDMRTLMTNTLMKDQPTLAVTFVDNHDTEPGQALQSWVDPWFKPLAYAFILTRQEGYPCVFYGDYYGIPQYNIPSLKSKIDPLLIARRDYAYGTQHDYLDHSDIIGWTREGVTEKPGSGLAALITDGPGGSKWMYVGKQHAGKVFYDLTGNRSDTVTINSDGWGEFKVNGGSVSVWVPRKTTVSTITRPITTRPWTGEFVRWTEPRLVAWP

SEQ ID NO: 18546 - protein, 491 aa, Geobacillus stearothermophilus
AAPFNGTMMQYFEWYLPDDGTLWTKVANEANNLSSLGITALWLPPAYKGTSRSDVGYGAYDLYDLGEFNQKGTVRTKYGTKAQYLQAIQAAHAAGMQVYADVVFDHKGGADGTEWVDAVEVNPSDRNQVISGTYQIQAWTKFDFPGRGNTYSSFKWRWYHFDGVDWDESRKLSRIYLFEGKSWDWEVDTEFGNYDYLMYADLDMDYPEVVTELKNWGPWYVLTTNIDGFRLDAVKHIKFQFFPDWLSYVRSSTGKPLFTVGEYWSYDINKLHNYITKTDGTMSLFDAPLHNKFYTASKSGGAFDMRTLMTNTLMKDQPTLAVTFVDNHDTEPGQALQSWVDPWFKPLAYAFILTRQEGYPCVFYGDYYGIPQYNIPSLKSKIDPLLIARRDYAYGTQHDYLDHSDIIGWTREGGTEKPGSGLAALITDGPGGSKWMYVGKQHAGKVFYDLTGNRSDTVTINSDGWGEFKVNGGSVSVWVPRKTTVSTIARP

SEQ ID NO: 18547 - protein, 491 aa, Geobacillus stearothermophilus
AAPFNGTMMQYFEWYLPDDGTLWTKVANEANNLSSLGITALWLPPAYKGTSRSDVGYGVYDLYDLGEFNQKGTVRTKYGTKAQYLQAIQAAHAAGMQVYADVVFDHKGGADGTEWVDAVEVNPSDRNQVISGTYQIQAWTKFDFPGRGNTYSSFKWRWYHFDGVDWDESRKLSRIYLFEGKAWDWEVDTEFGNYDYLMYADLDMDHPEVVTELKNWGPWYVLTTNIDGFRLDAVKHIKFSFFPDWLSYVRSSTGKPLFTVGEYWSYDINKLHNYITKTDGTTSLFDAPLHNKFYTASKSGGAFDMRTLMTNTLMKDQPTLAVTFVDNHDTEPGQALQSWVDPWFKPLAYAFILTRQEGYPCVFYGDYYGIPQYNIPSLKSKIDPLLIARRDYAYGTQHDYLDHSDIIGWTREGGTEKPGSGLAALITDGPGGSKWMYVGKQHAGKVFYDLTGNRSDTVTINSDGWGEFKVNGGSVSVWVPRKTTVSTIARP

SEQ ID NO: 18548 - protein, 491 aa, Geobacillus stearothermophilus
AAPFNGTMMQYFEWYLPDDGTLWTKVANEANNLSSLGITALWLPPAYKGTSRSDVGYGAYDLYDLGEFNQKGTVRTKYGTKAQYLQAIQAAHAAGMQVYADVVFDHKGGADGTEWVDAVEVNPSDRNQVISGTYQIQAWTKFDFPGRGNTYSSFKWRWYHFDGVDWDESRKLSRIYLFEGKAWDWEVDTEFGNYDYLMYADLDMDHPEVVTELKNWGPWYVLTTNIDGFRLDAVKHIKFQFFPDWLSYVRSSTGKPLFTVGEYWSYDINKLHNYITKTDGTMSLFDAPLHNKFYTASKSGGAFDMRTLMTNTLMKDQPTLAVTFVDNHDTEPGQALQSWVDPWFKPLAYAFILTRQEGYPCVFYGDYYGIPQYNIPSLKSKIDPLLIARRDYAYGTQHDYLDHSDIIGWTREGVTEKPGSGLAALITDGPGGSKWMYVGKQHAGKVFYDLTGNRSDTVTINSDGWGEFKVNGGSVSVWVPRKTTVSTIARP

SEQ ID NO: 18549 - protein, 491 aa, Geobacillus stearothermophilus
AAPFNGTMMQYFEWYLPDDGTLWTKVANEANNLSSLGITALWLPPAYKGTSRSDVGYGVYDLYDLGEFNQKGTVRTKYGTKAQYLQAIQAAHAAGMQVYADVVFDHKGGADGTEWVDAVEVNPSDRNQEISGTYQIQAWTKFDFPGRGNTYSSFKWRWYHFDGVDWDESRKLSRIYKFRGKAWDWEVDTEFGNYDYLMYADLDMDHPEVVTELKNWGKWYVNTTNIDGFRLDAVKHIKFSFFPDWLSYVRSQTGKPLFTVGEYWSYDINKLHNYITKTDGTVSLFDAPLHNKFYTASKSGGAFDMRTLMTNTLMKDQPTLAVTFVDNHDTEPGQALQSWVDPWFKPLAYAFILTRQEGYPCVFYGDYYGIPQYNIPSLKSKIDPLLIARRDYAYGTQHDYLDHSDIIGWTREGGTEKPGSGLAALITDGPGGSKWMYVGKQHAGKVFYDLTGNRSDTVTINSDGWGEFKVNGGSVSVWVPRKTTVSTIARP

SEQ ID NO: 18550 - protein, 491 aa, Geobacillus stearothermophilus
AAPFNGTMMQYFEWYLPDDGTLWTKVANEANNLSSLGITALWLPPAYKGTSRSDVGYGVYDLYDLGEFNQKGTVRTKYGTKAQYLQAIQAAHAAGMQVYADVVFDHKGGADGTEWVDAVEVNPSDRNQVISGTYQIQAWTKFDFPGRGNTYSSFKWRWYHFDGVDWDESRKLSRIYLFEGKAWDWEVDTEFGNYDYLMYADLDMDHPEVVTELKNWGPWYVLTTNIDGFRLDAVKHIKFSFFPDWLSYVRSSTGKPLFTVGEYWSYDINKLHNYITKTDGTMSLFDAPLHNKFYTASKSGGAFDMRTLMTNTLMKDQPTLAVTFVDNHDTEPGQALQSWVDPWFKPLAYAFILTRQEGYPCVFYGDYYGIPQYNIPSLKSKIDPLLIARRDYAYGTQHDYLDHSDIIGWTREGGTEKPGSGLAALITDGPGGSKWMYVGKQHAGKVFYDLTGNRSDTVTINSDGWGEFKVNGGSVSVWVPRKTTVSTIARP

SEQ ID NO: 18551 - protein, 491 aa, Geobacillus stearothermophilus
AAPFNGTMMQYFEWYLPDDGTLWKRVQNDANHLSSLGITALWLPPAYKGTSRSDVGYGAYDLYDLGEFNQKGTVRTKYGTKAQYLSAIQSAHSAGMQVYADVVFDHKGGADGTEWVDAVEVNPSDRNQVISGTYQIQAWTKFDFPGRGNTYSSFKWRWYHFDGVDWDESRKLSRIYLFEGKAWDWEVDTEFGNYDYLMYADLDMDHPEVTTELKNWGKWYVNTTNIDGFRLDAVKHIKFSFFPDWLSYVRSSTGKPLFTVGEYWSGDINKLHNYITKTDGTVSLFDAPLHYKFYNASKSGGAFDMRTLMTNTLMKDQPTLAVTFVDNHDTEPGQALQSWVDPWFKPLAYAFILTRQEGYPCVFYGDYYGIPQYNIPSLKSKIDPLLIARRDYAYGTQHDYLDHSDIIGWTREGGTEKPGSGLAALITDGPGGSKWMYVGKQHAGKVFYDLTGNRSDTVTINSDGWGEFKVNGGSVSVWVPRKTTVSTIARP

SEQ ID NO: 18552 - protein, 491 aa, Geobacillus stearothermophilus
AAPFNGTMMQYFEWYLPDDGTLWTKVANEANNLSSLGITALWLPPAYKGTSRSDVGYGAYDLYDLGEFNQKGTVRTKYGTKAQYLQAIQAAHAAGMQVYADVVFDHKGGADGTEWVDAVEVNPSDRNQVISGTYQIQAWTKFDFPGRGNTYSSFKWRWYHFDGVDWDESRKLSRIYLFEGKAWDWEVDTEFGNYDYLMYADLDMDYPEVVTELKNWGPWYVLTTNIDGFRLDAVKHIKFQFFPDWLSYVRSSTGKPLFTVGEYWSYDINKLHNYITKTDGTMSLFDAPLHNKFYTASKSGGAFDMRTLMTNTLMKDQPTLAVTFVDNHDTEPGQALQSWVDPWFKPLAYAFILTRQEGYPCVFYGDYYGIPQYNIPSLKSKIDPLLIARRDYAYGTQHDYLDHSDIIGWTREGGTEKPGSGLAALITDGPGGSKWMYVGKQHAGKVFYDLTGNRSDTVTINSDGWGEFKVNGGSVSVWVPRKTTVSTIARP

SEQ ID NO: 18553 - protein, 491 aa, Geobacillus stearothermophilus
AAPFNGTMMQYFEWYLPDDGTLWTKVANEANNLSSLGITALWLPPAYKGTSRSDVGYGAYDLYDLGEFNQKGTVRTKYGTKAQYLQAIQAAHAAGMQVYADVVFDHKGGADGTEWVDAVEVNPSDRNQEISGTYQIQAWTKFDFPGRGNTYSSFKWRWYHFDGVDWDESRKLSRIYKFRGKAWDWEVDTEFGNYDYLMYADLDMDHPEVVTELKNWGKWYVNTTNIDGFRLDAVKHIKFSFFPDWLSYVRSQTGKPLFTVGEYWSYDINKLHNYITKTDGTMSLFDAPLHNKFYTASKSGGAFDMRTLMTNTLMKDQPTLAVTFVDNHDTEPGQALQSWVDPWFKPLAYAFILTRQEGYPCVFYGDYYGIPQYNIPSLKSKIDPLLIARRDYAYGTQHDYLDHSDIIGWTREGGTEKPGSGLAALITDGPGGSKWMYVGKQHAGKVFYDLTGNRSDTVTINSDGWGEFKVNGGSVSVWVPRKTTVSTIARP

SEQ ID NO: 18554 - protein, 491 aa, Geobacillus stearothermophilus
AAPFNGTMMQYFEWYLPDDGTLWTKVANEANNLSSLGITALWLPPAYKGTSRSDVGYGAYDLYDLGEFNQKGTVRTKYGTKAQYLQAIQAAHAAGMQVYADVVFDHKGGADGTEWVDAVEVNPSDRNQVISGTYQIQAWTKFDFPGRGNTYSSFKWRWYHFDGVDWDESRKLSRIYLFEGKAWDWEVDTEFGNYDYLMYADLDMDHPEVVTELKNWGPWYVLTTNIDGFRLDAVKHIKFQFFPDWLSYVRSSTGKPLFTVGEYWSYDINKLKNYITKTDGTMSLFDAPLHNKFYTASKSGGAFDMRTLMTNTLMKDQPTLAVTFVDNHDTEPGQALQSWVDPWFKPLAYAFILTRQEGYPCVFYGDYYGIPQYNIPSLKSKIDPLLIARRDYAYGTQHDYLDHSDIIGWTREGGTEKPGSGLAALITDGPGGSKWMYVGKQHAGKVFYDLTGNRSDTVTINSDGWGEFKVNGGSVSVWVPRKTTVSTIARP

SEQ ID NO: 18555 - protein, 491 aa, Geobacillus stearothermophilus
AAPFNGTMMQYFEWYLPDDGTLWTKVANEANNLSSLGITALWLPPAYKGTSRSDVGYGVYDLYDLGEFNQKGTVRTKYGTKAQYLQAIQAAHAAGMQVYADVVFDHKGGADGTEWVDAVEVNPSDRNQVISGTYQIQAWTKFDFPGRGNTYSSFKWRWYHFDGVDWDESRKLSRIYLFEGKAWDWEVDTEFGNYDYLMYADLDMDHPEVVTELKNWGPWYVLTTNIDGFRLDAVKHIKFQFFPDWLSYVRSSTGKPLFTVGEYWSYDINKLHNYITKTDGTTSLFDAPLHNKFYTASKSGGAFDMRTLMTNTLMKDQPTLAVTFVDNHDTEPGQALQSWVDPWFKPLAYAFILTRQEGYPCVFYGDYYGIPQYNIPSLKSKIDPLLIARRDYAYGTQHDYLDHSDIIGWTREGGTEKPGSGLAALITDGPGGSKWMYVGKQHAGKVFYDLTGNRSDTVTINSDGWGEFKVNGGSVSVWVPRKTTVSTIARP

SEQ ID NO: 18556 - protein, 491 aa, Geobacillus stearothermophilus
AAPFNGTMMQYFEWYLPDDGTLWTKVANEANNLSSLGITALWLPPAYKGTSRSDVGYGVYDLYDLGEFNQKGTVRTKYGTKAQYLQAIQAAHAAGMQVYADVVFDHKGGADGTEWVDAVEVNPSDRNQVISGTYQIQAWTKFDFPGRGNTYSSFKWRWYHFDGVDWDESRKLSRIYLFVGKAWDWEVDTEFGNYDYLMYADLDMDHPEVVTELKNWGPWYVLTTNIDGFRLDAVKHIKFQFFPDWLSYVRSSTGKPLFTVGEYWSYDINKLHNYITKTDGTMSLFDAPLHNKFYTASKSGGAFDMRTLMTNTLMKDQPTLAVTFVDNHDTEPGQALQSWVDPWFKPLAYAFILTRQEGYPCVFYGDYYGIPQYNIPSLKSKIDPLLIARRDYAYGTQHDYLDHSDIIGWTREGGTEKPGSGLAALITDGPGGSKWMYVGKQHAGKVFYDLTGNRSDTVTINSDGWGEFKVNGGSVSVWVPRKTTVSTIARP

SEQ ID NO: 18557 - protein, 491 aa, Geobacillus stearothermophilus
AAPFNGTMMQYFEWYLPDDGTLWTKVANEANNLSSLGITALWLPPAYKGTSRSDVGYGAYDLYDLGEFNQKGTVRTKYGTKAQYLQAIQAAHAAGMQVYADVVFDHKGGADGTEWVDAVEVNPSDRNQVISGTYQIQAWTKFDFPGRGNTYSSFKWRWYHFDGVDWDESRKLSRIYLFEGKAWDWEVDTEFGNYDYLMYADLDMDHPEVVTELKNWGPWYVLTTNIDGFRLDAVKHIKFQFFPDWLSYVRSSTGKPLFTVGEYWSYDINKLHNYITKTNGTMSLFDAPLHNKFYTASKSGGAFDMRTLMTNTLMKDQPTLAVTFVDNHDTEPGQALQSWVDPWFKPLAYAFILTRQEGYPCVFYGDYYGIPQYNIPSLKSKIDPLLIARRDYAYGTQHDYLDHSDIIGWTREGGTEKPGSGLAALITDGPGGSKWMYVGKQHAGKVFYDLTGNRSDTVTINSDGWGEFKVNGGSVSVWVPRKTTVSTIARP

SEQ ID NO: 18558 - protein, 491 aa, Geobacillus stearothermophilus
AAPFNGTMMQYFEWYLPDDGTLWTKVANEANNLSSLGITALWLPPAYKGTSRSDVGYGAYDLYDLGEFNQKGTVRTKYGTKAQYLQAIRAAHAAGMQVYADVVFDHKGGADGTEWVDAVEVNPSDRNQVISGTYQIQAWTKFDFPGRGNTYSSFKWRWYHFDGVDWDESRKLSRIYLFEGKAWDWEVDTEFGNYDYLMYADLDMDYPEVVTELKNWGPWYVLTTNIDGFRLDAVKHIKFSFFPDWLSYVRSSTGKPLFTVGEYWSYDINKLHNYITKTDGTVSLFDAPLHNKFYTASKSGGAFDMRTLMTNTLMKDQPTLAVTFVDNHDTEPGQALQSWVDPWFKPLAYAFILTRQEGYPCVFYGDYYGIPQYNIPSLKSKIDPLLIARRDYAYGTQHDYLDHSDIIGWTREGGTEKPGSGLAALITDGPGGSKWMYVGKQHAGKVFYDLTGNRSDTVTINSDGWGEFKVNGGSVSVWVPRKTTVSTIARP

SEQ ID NO: 18559 - protein, 491 aa, Geobacillus stearothermophilus
AAPFNGTMMQYFEWYLPDDGTLWTKVANEANNLSSLGITALWLPPAYKGTSRSDVGYGAYDLYDLGEFNQKGTVRTKYGTKAQYLQAIQAAHAAGMQVYADVVFDHKGGADGTEWVDAVEVNPSDRNQVISGTYQIQAWTKFDFPGRGNTYSSFKWYWYHFDGVDWDESRKLSRIYLFEGKAWDWEVDTEFGNYDYLMYADLDMDHPEVVTELKNWGPWYVLTTNIDGFRLDAVKHIKFQFFPDWLSYVRSSTGKPLFTVGEYWSYDINKLHNYITKTDGTMSLFDAPLHNKFYTASKSGGAFDMRTLMTNTLMKDQPTLAVTFVDNHDTEPGQALQSWVDPWFKPLAYAFILTRQEGYPCVFYGDYYGIPQYNIPSLKSKIDPLLIARRDYAYGTQHDYLDHSDIIGWTREGGTEKPGSGLAALITDGPGGSKWMYVGKQHAGKVFYDLTGNRSDTVTINSDGWGEFKVNGGSVSVWVPRKTTVSTIARP

SEQ ID NO: 18560 - protein, 491 aa, Geobacillus stearothermophilus
AAPFNGTMMQYFEWYLPDDGTLWTKVANEANNLSSLGITALWLPPAYKGTSRSDVGYGAYDLYDLGEFNQKGTVRTKYGTKAQYLQAIQAAHAAGMQVYADVVFDHKGGADGTEWVDAVEVNPSDRNQVISGTYQIQAWTKFDFPGRGNTYSSFKWRWYHFDGVDWDESRKLSRIYLFEGKAWDWEVDTEFGNYDYLMYADLDMDHPEVVTELKNWGPWYVLTTNIDGFRLDAVKHIKFQFFPDWLSYVRSSTGKPLFTVGEYWSYDINKLHNFITKTDGTMSLFDAPLHNKFYTASKSGGAFDMRTLMTNTLMKDQPTLAVTFVDNHDTEPGQALQSWVDPWFKPLAYAFILTRQEGYPCVFYGDYYGIPQYNIPSLKSKIDPLLIARRDYAYGTQHDYLDHSDIIGWTREGGTEKPGSGLAALITDGPGGSKWMYVGKQHAGKVFYDLTGNRSDTVTINSDGWGEFKVNGGSVSVWVPRKTTVSTIARP

SEQ ID NO: 18561 - protein, 491 aa, Geobacillus stearothermophilus
AAPFNGTMMQYFEWYLPDDGTLWTKVANEANNLSSLGITALWLPPAYKGTSRSDVGYGVYDLYDLGEFNQKGTVRTKYGTKAQYLQAIQAAHAAGMQVYADVVFDHKGGADGTEWVDAVEVNPSDRNQVISGTYQIQAWTKFDFPGRGNTYSSFKWRWYHFDGVDWDESRKLSRIYLFEGKAWDWEVDTEFGNYDYLMYADLDMDHPEVVTELKNWGPWYVLTTNIDGFRLDAVKHIKFQFFPDWLSYVRSSTGKPLFTVGEYWSYDINKLHNYITKTDGTMSLFDAPLHNKFYTASKSGGAFDMRTLMTNTLMKDQPTLAVTFVDNHDTEPGQALQSWVDPWFKPLAYAFILTRQEGYPCVFYGDYYGIPQYNIPSLKSKIDPLLIARRDYAYGTQHDYLDHSDIIGWTREGGTEKPGSGLAALITDGPGGSKWMYVGKQHAGKVFYDLTGNRSDTVTINSDGWGEFKVNGGSVSVWVPRKTTVSTIARP

SEQ ID NO: 18562 - protein, 493 aa, Geobacillus stearothermophilus
AAPFNGTMMQYFEWYLPDDGTLWTKVANEANNLSSLGITALWLPPAYKGTSRSDVGYGAYDLYDLGEFNQKGTVRTKYGTKAQYLQAIRAAHAAGMQVYADVVFDHKGGADGTEWVDAVEVNPSDRNQVISGTYQIQAWTKFDFPGRGNTYSSFKWRWYHFDGVDWDESRKLSRIYLFEGIGKAWDWEVDTENGNYDYLMYADLDMDHPEVVTELKNWGKWYVNTTNIDGFRLDAVKHIKFSFFPDWLSYVRSSTGKPLFTVGEYWSYDINKLHNYITKTNGTVSLFDAPLHNKFYTASKSGGAFDMRTLMTNTLMKDQPTLAVTFVDNHDTEPGQALQSWVDPWFKPLAYAFILTRQEGYPCVFYGDYYGIPQYNIPSLKSKIDPLLIARRDYAYGTQHDYLDHSDIIGWTREGVTEKPGSGLAALITDGPGGSKWMYVGKQHAGKVFYDLTGNRSDTVTINSDGWGEFKVNGGSVSVWVPRKTTVSTIARP

SEQ ID NO: 18563 - protein, 489 aa, Geobacillus stearothermophilus
AAPFNGTMMQYFEWYLPDDGTLWTKVANEANNLSSLGITALWLPPAYKGTSRSDVGYGVYDLYDLGEFNQKGTVRTKYGTKAQYLQAIQAAHAAGMQVYADVVFDHKGGADGTEWVDAVEVNPSDRNQVISGTYQIQAWTKFDFPGRGNTYSSFKWRWYHFDGVDWDESRKLSRIYLFEGKAWDWEVDTEFGNYDYLMYADLDMDHPEVVTELKNWGPWYVLTTNIDGFRLDAVKHIKFQFFPDWLSYVRSSTGKPLFTVGEYWSYDINKLHNYITKTDGTMSLFDAPLHNKFYTASKSGGAFDMRTLMTNTLMKDQPTLAVTFVDNHDTEPGQALQSWVDPWFKPLAYAFILTRQEGYPCVFYGDYYGIPQYPSLKSKIDPLLIARRDYAYGTQHDYLDHSDIIGWTREGGTEKPGSGLAALITDGPGGSKWMYVGKQHAGKVFYDLTGNRSDTVTINSDGWGEFKVNGGSVSVWVPRKTTVSTIARP

SEQ ID NO: 18564 - protein, 486 aa, Geobacillus stearothermophilus
AAPFNGTMMQYFEWYLPDDGQLWNRVANDANNLSSLGITALWLPPAYKGTSRSDVGYGAYDLYDLGEFNQKGTVRTKYGTKAQYLQAIQAAHAAGMQVYADVVFDHKGGADGTEWVDAVEVNPSDRNQVISGTYQIQAWTKFDFPGRGNTYSSFKWRWYHFDGVDWDESRKLSRIYLFEGKAWDWEVDTEFGNYDYLMYADLDMDHPEVTTELKNWGKWYVNTTNIDGFRLDAVKHIKFSFFPDWLSYVRSSTGKPLFTVGEYWSGDINKLHNYITKTDGTVSLFDAPLHYKFYNASKSGGAFDMRTLMTNTLMKDQPTLAVTFVDNHDTEPGQALQSWVDPWFKPLAYAFILTRQEGYPCVFYGDYYGIPQYNIPSLKSKIDPLLIARRDYAYGTQHDYLDHSDIIGWTREGGTEKPGSGLAALITDGPGGSKWMYVGKQHAGKVFYDLTGNRSDTVTINSDGWGEFKVNGGSVSVWVPRKTTVS

SEQ ID NO: 18565 - protein, 486 aa, Geobacillus stearothermophilus
AAPFNGTMMQYFEWYLPDDGTLWTKVANEANNLSSLGITALWLPPAYKGTSRSDVGYGAYDLYDLGEFNQKGTVRTKYGTKAQYLQAIQAAHAAGMQVYADVVFDHKGGADGTEWVDAVEVNPSDRNQVISGTYQIQAWTKFDFPGRGNTYSSFKWRWYHFDGVDWDESRKLSRIYLFEGKAWDWPVDTEFGNYDYLMYADLDMDHPEVTTELKNWGKWYVNTTNIDGFRLDAVKHIKFYFFPDWLSYVRSSTGKPLFTVGEYWSGDINKLHNYITWTDGTVSLFDAPLHYKFYNASKSGGAFDMRTLMTNTLMKDQPTLAVTFVDNHDTEPGQALQSWVDPWFKPLAYAFILTRQEGYPCVFYGDYYGIPQYNIPSLKSKIDPLLIARRDYAYGTQHDYLDHSDIIGWTREGGTEKPGSGLAALITDGPGGSKWMYVGKQHAGKVLYDLTGNRSDTVTINSDGWGEFKVNGGSVSVWVPRKTTVS

SEQ ID NO: 18566 - protein, 486 aa, Geobacillus stearothermophilus
AAPFNGTMMQYFEWYLPDDGTLWTKVANEANNLSSLGITALWLPPAYKGTSRSDVGYGAYDLYDLGEFNQKGTVRTKYGTKAQYLQAIQAAHAAGMQVYADVVFDHKGGADGTEWVDAVEVNPSDRNQVISGTYQIQAWTKFDFPGRGNTYSSFKWRWYHFDGVDWDESRKLSRIYLFSGKQWPWEVDNEFGNYDYLMYADLDMDHPEVTTELKNWGKWYVNTTNIDGFRLDAVKHIKFYFFPDWLSYVRSSTGKPLFTVGEYWSGDINKLHNYITKTDGTVSLFDAPLHYKFYNASKSGGAFDMRTLMTNTLMKDQPTLAVTFVDNHDTEPGQALQSWVDPWFKPLAYAFILTRQEGYPCVFYGDYYGIPQYNIPSLKSKIDPLLIARRDYAYGTQHDYLDHSDIIGWTREGGTEKPGSGLAALITDGPGGSKWMYVGKQHAGKVFYDLTGNRSDTVTINSDGWGEFKVNGGSVSVWVPRKTTVS

SEQ ID NO: 18567 - protein, 486 aa, Geobacillus stearothermophilus
AAPFNGTMMQYFEWYTPDDGKQWDKVANEANNLSSLGITALWLPPAYKGTSRSDVGYGAYDLYDLGEFNQKGTVRTKYGTKAQYLQAIQAAHAAGMQVYADVVFDHKGGADGTEWVDAVEVNPSDRNQVISGTYQIQAWTKFDFPGRGNTYSSFKWRWYHFDGVDWDESRKLSRIYLFEGKAWDWEVDTEFGNYDYLMYADLDMDHPEVTTELKNWGKWYVNTTNIDGFRLDAVKHIKFSFFPDWLSYVRSSTGKPLFTVGEYWSGDINKLHNYITKTDGTVSLFDAPLHYKFYNASKSGGAFDMRTLMTNTLMKDQPTLAVTFVDNHDTEPGQALQSWVDPWFKPLAYAFILTRQEGYPCVFYGDYYGIPQYNIPSLKSKIDPLLIARRDYAYGTQHDYLDHSDIIGWTREGGTEKPGSGLAALITDGPGGSKWMYVGKQHAGKVFYDLTGNRSDTVTINSDGWGEFKVNGGSVSVWVPRKTTVS

SEQ ID NO: 18568 - protein, 488 aa, Geobacillus stearothermophilus
AAPFNGTMMQYFEWYLPDNGTLWTKVAKEANNLSSLGITALWLPPAYKGTSRSDVGYGVYDLYDLGEFNQKGTVRTKYGTKAQYLQAIQAAHAAGMRVYADVVFDHKGGADGTEWVDAVEVNPSDRNQEISGTYQIQAWTKFDFPGRGNTYSSFKWRWYHFDGVDWDESRKLSRIYKFRGIGKAWDWEVDTENGNYDYLMYADLDMDHPEVVTELKNWGKWYVKTTNIDGFRLDAVKHIKFSFFPDWLSYVRSQTGKPLFTVGEYWSYDIKKLHNYITKTKGTMSLFDAPLHNKFYTASKSGGAFNMRTLMTNTLMKNRPTLAVTFVDNHDTEPGQALQSWVDPWFKPLAYAFILTREEGYPCVFYGDYYGIPQYNIPSLKSKIDPLLIARRNYAYGTQHDYLDHSDIIGWTREGVTEKPGSGLAALITDGPGGSKWMYVGKEHAGKVFYDLTGNRSDTVTINSDGWGEFKVNGGSVSVWVPRKTTVS

SEQ ID NO: 18569 - protein, 486 aa, Geobacillus stearothermophilus
AAPFNGTMMQYFEWYLPDDGTLWTKVANEANNLSSLGITALWLPPAYKGTSRSDVGYGAYDLYDLGEFNQKGTVRTKYGTKAQYLQAIQAAHAAGMQVYADVVFDHKGGADGTEWVDAVEVNPSDRNQVISGTYQIQAWTKFDFPGRGNTYSSFKWRWYHFDGVDWDESRKLSRIYLFEGKAWDWEVDTEFGNYDYLMYADLDMDHPEVTTELKNWGKWYVNTTNIDGFRLDAVKHIKFSFFPDWLSYVRSSTGKPLFTVGEYWSGDINKLHNYITKTDGTVSLFDAPLHYKFYNASKSGGAFDMRTLMTNTLMKDQPTLAVTFVDNHDTEPGQALQSWVDPWFKPLAYAFILTRQEGYPCVFYGDYYGIPQYNIPSLKSKIDPLLIARRDYAYGTQHDYLDHSDIIGWTREGSSSVPGSGLAALITDGPGGSKWMYVGKQHAGKVFYDLTGNRSDTVTINSDGWGEFKVNGGSVSVWVPRKTTVS

SEQ ID NO: 18570 - protein, 486 aa, Geobacillus stearothermophilus
AAPFNGTMMQYFEWYLPDDGTLWTKVANEANNLSSLGITALWLPPAYKGTSRSDVGYGAYDLYDLGEFNQKGTVRTKYGTKAQYLQAIQAAHAAGMQVYADVVFDHKGGADGTEWVDAVEVNPSDRNQVISGTYQIQAWTKFDFPGRGNTYSSFKWRWYHFDGVDWDESRKLSRIYLFEGKAWDWEVDTEFGNYDYLMYADLDMDHPEVTTELKNWGKWYVNTTNIDGFRLDAVKHIKFSFFPDWLSYVRSSTGKPLFTVGEYWSGDINKLHNYITKTDGTVSLFDAPLHYKFYNASKSGGAFDMRTLMTNTLMKDQPTLAVTFVDNHDTEPGQALQSWVDPWFKPLAYAFILTRQEGYPCVFYGDYYGIPQYNIPSLKSKIEPLLKARKNYAYGTQHDYLDHSDIIGWTREGGTEKPGSGLAALITDGPGGSKWMYVGKQHAGKVFYDLTGNRSDTVTINSDGWGEFKVNGGSVSVWVPRKTTVS

SEQ ID NO: 18571 - protein, 488 aa, Geobacillus stearothermophilus
AAPFNGTMMQYFEWYLPDNGTLWTKVARQANNLSSLGITALWLPPAYKGTSRSDVGYGVYDLYDLGEFNQKGTVRTKYGTKAQYLRAIRAAHAAGMQVYADVVFDHKGGADGTEWVDAVEVNPSDRNQEISGTYQIQAWTKFDFPGRGNTYSSFKWRWYHFDGVDWDESRKLSRIYKFRGIGKAWDWEVDTENGNYDYLMYADLDMDHPEVVTELKNWGKWYVRTTNIDGFRLDAVKHIKFSFFPDWLSYVRSQTGKPLFTVGEYWSYDIRKLHNYITKTRGTMSLFDAPLHNKFYTASKSGGAFNMRTLMTNTLMKNQPTLAVTFVDNHDTEPGQALQSWVDPWFKPLAYAFILTRQEGYPCVFYGDYYGIPQYNIPSLKSKIDPLLIARRNYAYGTQHDYLDHSDIIGWTREGVTEKPGSGLAALITDGPGGSKWMYVGKQHAGKVFYDLTGNRSNTVTINSDGWGEFKVNGGSVSVWVPRKTTVS

SEQ ID NO: 18572 - protein, 484 aa, Aspergillus niger
AATALAATPADWRSQSIYFLLTDRFARTDGSTTATCNTADQKYCGGTWQGIIDHLDYIQGMGFTAIWITPVTAQLPQTTAYGDAYHGYWQQDIYSLNENYGTADDLRALSSALHERGMYLMVDVVANHMGYDGAGSSVDYSVFNPFSSQDYFHPFCFIQNYEDQTQVEDCWLGDNTVSLPDLDTTKDVVRNEWYDWVGSLVSNYSIDGLRIDTVKHVQKDFWPGYNSAAGVYCIGEVLDGDPAYTCPYQNVMDGVLNYPIYYPLLNAFQSTSGSMDDLYNMINTVASDCPDSTLLGTFVENHDNPRFASYTNDIALAKNVAAFIILNDGIPIIYAGQEQHYAGGNDPANREATWLSGYPTDSELYQLIASANAIRNYAISQDTGFVTYQNWPIYQDDTTIAMRKGTDGSQIVTILSNLGASGDSYTLSLSGAGYTAGQQLTEVIGCTTVTVGSDGNVPVPMAGGLPRVLYPTEKLAGSGICSSS

SEQ ID NO: 18573 - protein, 518 aa, unidentified
MKQQKRLYARLLTLLFALIFLLPHSAAAAPFNGTMMQYFEWYLPDDGTLWTKVANEANNLSSLGITALWLPPAYKGTSRSDVGYGVYDLYDLGEFNQKGTVRTKYGTKAQYLQAIQAAHAAGMQVYADVVFDHKGGADGTEWVDAVEVNPSDRNQEISGTYQIQAWTKFDFPGRGNTYSSFKWRWYHFDGVDWDESRKLSRIYKFRGKAWDWEVDTEFGNYDYLMYADLDMDHPEVVTELKNWGKWYVNTTNIDGFRLDAVKHIKFSFFPDWLSYVRSQTGKPLFTVGEYWSYDINKLHNYITKTDGTMSLFDAPLHNKFYTASKSGGAFDMRTLMTNTLMKDQPTLAVTFVDNHDTEPGQALQSWVDPWFKPLAYAFILTRQEGYPCVFYGDYYGIPQYNIPSLKSKIDPLLIARRDYAYGTQHDYLDHSDIIGWTREGGTEKPGSGLAALITDGPGGSKWMYVGKQHAGKVFYDLTGNRSDTVTINSDGWGEFKVNGGSVSVWVPRKTTVSTIARP

SEQ ID NO: 18574 - protein, 483 aa, Bacillus licheniformis
LNGTLMQYFEWYMPNDGQHWKRLQNDAEHLSDIGITAVWIPPAYKGLSQSDNGYGPYDLYDLGEFQQKGTVRTKYGTKSELQDAIGSLHSRNVQVYGDVVLNHKAGADATEDVTAVEVNPANRNQETSEEYQIKAWTDFRFPGRGNTYSDFKWHWYHFDGADWDESRKISRIFKFRGEGKAWDWEVSSENGNYDYLMYADVDYDHPDVVAETKKWGIWYANELSLDGFRIDAAKHIKFSFLRDWVQAVRQATGKEMFTVAEYWQNNAGKLENYLNKTSFNQSVFDVPLHFNLQAASSQGGGYDMRRLLDGTVVSRHPEKAVTFVENHDTQPGQSLESTVQTWFKPLAYAFILTRESGYPQVFYGDMYGTKGTSPKEIPSLKDNIEPILKARKEYAYGPQHDYIDHPDVIGWTREGDSSAAKSGLAALITDGPGGAKRMYVGRQNAGETWHDITGNRSEPVVINSEGWGEFHVNGGSVSIYVQR

SEQ ID NO: 18575 - protein, 483 aa, Anoxybacillus flavithermus
FNGTMMQYFEWYLPDDGTLWTKVANEANNLSSLGITALWLPPAYKGTSRSDVGYGVYDLYDLGEFNQKGTVRTKYGTKAQYLQAIQAAHAAGMQVYADVVFDHKGGADGTEWVDAVEVNPSDRNQEISGTYQIQAWTKFDFPGRGNTYSSFKWRWYHFDGVDWDESRKLSRIYKFRGKAWDWEVDTEFGNYDYLMYADLDMDHPEVVTELKNWGKWYVNTTNIDGFRLDAVKHIKFSFFPDWLSYVRSQTGKPLFTVGEYWSYDINKLHNYITKTDGTMSLFDAPLHNKFYTASKSGGAFDMRTLMTNTLMKDQPTLAVTFVDNHDTEPGQALQSWVDPWFKPLAYAFILTRQEGYPCVFYGDYYGIPQYNIPSLKSKIDPLLIARRDYAYGTQHDYIDSADIIGWTREGVAEKANSGLAALITDGPGGSKWMYVGKQHAGKTFYDLTGNRSDTVTINADGWGEFKVNGGSVSIWVPKISTTS

SEQ ID NO: 18576 - protein, 482 aa, Unidentified
HNGTNGAMMQYFEWHLPNDGNHWNRLRDDASNLRNRGITAIWIPPAWKGTSQNDVGYGAYDLYDLGEFNQKGTVRTKYGTRSQLESAIHALKNNGVQVYGDVVMNHKGAADATENVLAVEVNPNNRNQEISGDYTIEAYTKFDFPGRGNTYSDFKWRWYHFDGVDWDQSRQFQNRIYKFRGKAWDWEVDSEFGNYDYLMYADYDMDHPEVVNELRRWGEWYTNTLNLDGFRIDAVKHIKFSFTRDWLTHVRNATGKGMFAVAEFWKNDLGALENYLNKTSWNHHVFDVPLHYNLYNASNSRGNYDMAKLLNGTVVQKHPAHANTFVDNHDSQPGESLESFVQEWFKPLAYALILTREQGYPSVFYGDYYGIPTHSVPAMKAKIDPILEARANFAYGTQHDYFDHHNIIGWTREGNTTHPNSGLATIMSDGPGGEKWMYVGQNKAGQVWHDITGNKPGTVTINADGWANFSVNKGSVSIWVKR

SEQ ID NO: 18577 - protein, 482 aa, Unidentified
HNGTNATMMQYFEWHLPNDGNHWNRLRDDASNLRNRGITAIWIPPAWKGTSQNDVGYGAYDLYDLGEFNQKGTVRTKYGTRSQLESAIHALKNNGVQVYGDVVMNHKAGADATENVLAVEVNPNNRNQEISGDYTIEAYTKFDFPGRGNTYSDFKWRWYHFDGVDWDQSRQFQNRIYKFRGKAWDWPVDSENGNYDYLMYADYDMDHPEVVNELRRWGEWYTNTLNLDGFRIDAVKHIKFWFTRDWLTHVRNATGKGMFAVAEYWKNDLGALENYLSWTNWNHSVFDVPLHYNLYNASNSRGNYDMAKLLNGTVVQKHPMHAVTFVDNHDSQPGESLESFVQEWFKPLAYALILTREQGYPSVFYGDYYGIPTHSVPAMKAKIDPILAARQNFAYGTQHDYFDHHNIIGWTREGNTTHPNSGLATIMSDGPGGEKWMYVGQNKAGQVWHDITGNKPGTVTINADGWANFSVNKGSVSIWVKR

SEQ ID NO: 18578 - protein, 482 aa, Unidentified
HNGTNATMMQYFEWHLPNDGNHWNRLRDDASNLRNRGITAIWIPPAWKGTSQNDVGYGAYDLYDLGEFNQKGTVRTKYGTRSQLESAIHALKNNGVQVYGDVVMNHKAGADATENVLAVEVNPNNRNQEISGDYTIEAYTKFDFPGRGNTYSDFKWRWYHFDGVDWDQSRQFQNRIYKFRGKAWDWPVDSENGNYDYLMYADYDMDHPEVVNELRRWGEWYTNTLNLDGFRIDAVKHIKFYFTRDWLTHVRNATGKGMFAVAEYWKNDLGALENYLSITNWNHSVFDVPLHYNLYNASNSRGNYDMAKLLNGTVVQKHPMHAVTFVDNHDSQPGESLESFVQEWFKPLAYALILTREQGYPSVFYGDYYGIPTHSVPAMKAKIDPILAARQNFAYGTQHDYFDHHNIIGWTREGNTTHPNSGLATIMSDGPGGEKWMYVGQNKAGQVWHDITGNKPGTVTINADGWANFSVNKGSVSIWVKR

SEQ ID NO: 18579 - protein, 482 aa, Unidentified
HNGTNATMMQYFEWHLPNDGNHWNRLRDDASNLRNRGITAIWIPPAWKGTSQNDVGYGAYDLYDLGEFNQKGTVRTKYGTRSQLESAIHALKNNGVQVYGDVVMNHKAGADATENVLAVEVNPNNRNQEISGDYTIEAYTKFDFPGRGNTYSDFKWRWYHFDGVDWDQSRQFQNRIYKFRGKAWDWPVDSENGNYDYLMYADYDMDHPEVVNELRRWGEWYTNTLNLDGFRIDAVKHIKFHFTRDWLTHVRNATGKGMFAVAEYWKNDLGALENYLSWTNWNHSVFDVPLHYNLYNASNSRGNYDMAKLLNGTVVQKHPMHAVTFVDNHDSQPGESLESFVQEWFKPLAYALILTREQGYPSVFYGDYYGIPTHSVPAMKAKIDPILAARQNFAYGTQHDYFDHHNIIGWTREGNTTHPNSGLATIMSDGPGGEKWMYVGQNKAGQVWHDITGNKPGTVTINADGWANFSVNKGSVSIWVKR

SEQ ID NO: 18580 - protein, 482 aa, Geobacillus stearothermophilus
AAPFNGTMMQYFEWYLPDDGTLWTKVANEANNLSSLGITALWLPPAYKGTSRSDVGYGVYDLYDLGEFNQKGTVRTKYGTKAQYLQAIQAAHAAGMQVYADVVFDHKGGADGTEWVDAVEVNPSDRNQEISGTYQIQAWTKFDFPGRGNTYSSFKWRWYHFDGVDWDESRKLSRIYKFRGKAWDWPVDTENGNYDYLMYADLDMDHPEVVTELKNWGKWYVNTTNIDGFRLDAVKHIKFYFFPDWLSYVRSQTGKPLFTVGEYWSYDINKLHNYITITDGTMSLFDAPLHNKFYTASKSGGAFDMRTLMTNTLMKDQPTLAVTFVDNHDTEPGQALQSWVDPWFKPLAYAFILTRQEGYPCVFYGDYYGIPQYNIPSLKSKIDPLLIARRDYAYGTQHDYLDHSDIIGWTREGVTEKPGSGLAALITDGPGGSKWMYVGKQHAGKVFYDLTGNRSDTVTINSDGWGEFKVNGGSVSVWVPRK

SEQ ID NO: 18581 - protein, 484 aa, Geobacillus stearothermophilus
AAPFNGTMMQYFEWYLPDDGTLWTKVANEANNLSSLGITALWLPPAYKGTSRSDVGYGVYDLYDLGEFNQKGTVRTKYGTKAQYLQAIQAAHAAGMQVYADVVFDHKGGADGTEWVDAVEVNPSDRNQEISGTYQIQAWTKFDFPGRGNTYSSFKWRWYHFDGVDWDESRKLSRIYKFRGIGKAWDWPVDTENGNYDYLMYADLDMDHPEVVTELKNWGKWYVNTTNIDGFRLDAVKHIKFYFFPDWLSYVRSQTGKPLFTVGEYWSYDINKLHNYITITDGTMSLFDAPLHNKFYTASKSGGAFDMRTLMTNTLMKDQPTLAVTFVDNHDTEPGQALQSWVDPWFKPLAYAFILTRQEGYPCVFYGDYYGIPQYNIPSLKSKIDPLLIARRDYAYGTQHDYLDHSDIIGWTREGVTEKPGSGLAALITDGPGGSKWMYVGKQHAGKVFYDLTGNRSDTVTINSDGWGEFKVNGGSVSVWVPRK

SEQ ID NO: 18582 - protein, 483 aa, Synthetic construct
AAPFNGTMMQYFEWYLPDDGTLWTKVANEANNLSSLGITALWLPPAYKGTSRSDVGYGVYDLYDLGEFNQKGAVRTKYGTKAQYLQAIQAAHAAGMQVYADVVFNHKAGADGTEFVDAVEVNPSNRNQETSGTYQIQAWTKFDFPGRGNTYSSFKWRWYHFDGTDWDESRKLNRIYKFRGTGKAWDWEVDTENGNYDYLMFADLDMDHPEVVTELKNWGKWYVNTTNIDGFRLDAVKHIKFSFFPDWLSYVRSQTGKPLFTVGEYWSYDINKLHNYIMKTNGTMSLFDAPLHNKFYTASKSGGTFDMRTLMTNTLMKDQPTLAVTFVDNHDTEPGQALQSWVDPWFKPLAYAFILTRQEGYPCVFYGDYYGIPQYNIPSLKSKIDPLLIARRDYAYGTQHDYLDHSDIIGWTREGVTEKPGSGLAALITDGPGGSKWMYVGKQHAGKVFYDLTGNRSDTVTINSDGWGEFKVNGGSVSVWVPR

SEQ ID NO: 18583 - protein, 483 aa, Synthetic construct
AAPFNGTMMQYFEWYLPDDGTLWTKVANEANNLSSLGITALWLPPAYKGTSRSDVGYGVYDLYDLGEFNQKGAVRTKYGTKAQYLQAIQAAHAAGMQVYADVVFNHKAGADSTEWVDAVEVNPSNRNQETSGTYQIQAWTKFDFPGRGNTYSSFKWRWYHFDGTDWDESRKLNRIYKFRGTGKAWDWEVDTENGNYDYLMFADLDMDHPEVVTELKNWGKWYVNTTNIDGFRLDAVKHIKFSFFPDWLSYVRSQTGKPLFTVGEYWSYDINKLHNYIMKTNGTMSLFDAPLHNKFYTASKSGGTFDMRTLMTNTLMKDQPTLAVTFVDNHDTEPGQALQSWVDPWFKPLAYAFILTRQEGYPCVFYGDYYGIPQYNIPSLKSKIDPLLIARRDYAYGTQHDYLDHSDIIGWTREGVTEKPGSGLAALITDGPGGSKWMYVGKQHAGKVFYDLTGNRSDTVTINSDGWGEFKVNGGSVSVWVPR

SEQ ID NO: 18584 - protein, 515 aa, Geobacillus stearothermophilus
AAPFNGTMMQYFEWYLPDDGTLWTKVADEANNLSSLGITALWLPPAYKGTSRSDVGYGVYDLYDLGEFNQKGTVRTKYGTKAQYLEAIQAAHAAGMRVYADVVFDHKGGADGTEWVDAVEVNPSDRNQEISGTYQIQAWTKFDFPGRGNTYSSFKWRWYHFDGVDWDESRQLSRIYKFRGIGKAWDWEVDTENGNYDYLMYADLDMDHPEVVTELKNWGKWYVDTTNIDGFRLDAVKHIKFSFFPDWLSYVRSQTGKPLFTVGEYWSYDIDKLHNYITKTDGTMSLFDAPLHNKFYTASKSGGAFDMQTLMTNTLMKDRPTLAVTFVDNHDTEPGQALQSWVDPWFKPLAYAFILTREEGYPCVFYGDYYGIPQYNIPSLKSQIDPLLIARRDYAYGTQHDYLDHSDIIGWTREGVTEKPGSGLAALITDGPGGSKWMYVGKEHAGQVFYDLTGNRSDTVTINSDGWGEFKVNGGSVSVWVPQKTTVSTIARPITTRPWTGEFVRWTEPRLVAWP

SEQ ID NO: 18585 - protein, 504 aa, Geobacillus stearothermophilus
LLAFLLTASLFCPTGQHAKAAAPFNGTMMQYFEWYLPDDGTLWTKVANEANNLSSLGITALWLPPAYKGTSRSDVGYGVYDLYDLGEFNQKGTVRTKYGTKAQYLQAIQAAHAAGMQVYADVVFDHKGGADGTEWVDAVEVNPSDRNQEISGTYQIQAWTKFDFPGRGNTYSSFKWRWYHFDGVDWDESRKLSRIYKFIGKAWDWEVDTENGNYDYLMYADLDMDHPEVVTELKNWGKWYVNTTNIDGFRLDAVKHIKFSFFPDWLSYVRSQTGKPLFTVGEYWSYDINKLHNYITKTNGTMSLFDAPLHNKFYTASKSGGAFDMRTLMTNTLMKDQPTLAVTFVDNHDTEPGQALQSWVDPWFKPLAYAFILTRQEGYPCVFYGDYYGIPQYNIPSLKSKIDPLLIARRDYAYGTQHDYLDHSDIIGWTREGVTEKPGSGLAALITDGPGGSKWMYVGKQHAGKVFYDLTGNRSDTVTINSDGWGEFKVNGGSVSVWVPRKTT

SEQ ID NO: 18586 - protein, 535 aa, Geobacillus sp
LLAFLLTVSLFCPTGQPAKAAAPFNGTMMQYFEWYLPDDGTLWTKVANEANNLSSLGITALWLPPAYKGTSRSDVGYGVYDLYDLGEFNQKGTVRTKYGTKAQYLQAIQAAHAAGMQVYADVVFDHKGGADGTEWVDAVEVNPSDRNQEISGTYQIQAWTKFDFPGRGNTYSSFKWRWYHFDGVDWDESRKLSRIYKFRGIGKAWDWEVDTENGNYDYLMYADLDMDHPEVVTELKNWGKWYVNTTNIDGFRLDAVKHIKFSFFPDWLSYVRSQTGKPLFTVGEYWSYDINKLHNYITKTDGTMSLFDAPLHNKFYTASKSGGAFDMRTLMTNTLMKDQPTLAVTFVDNHDTEPGQALQSWVDPWFKPLAYAFILTRQQGYPCVFYGDYYGIPQYNIPSLKSKIDPLLIARRDYAYGTQHDYLDHSDIIGWTREGVTEKPGSGLAALITDGPGGSKWMYVGKQHAGKVFYDLTGNRSDTVTINSDGWGEFKVNGGSVSVWVPRKTTVSTITRPITTRPWTGEFVRWTEPRLVAWP

SEQ ID NO: 18587 - protein, 532 aa, Geobacillus stearothermophilus
LALGLSLTFGLFSPAQAAAPFNGTMMQYFEWYLPDDGTLWTKVANEANNLSSLGITALWLPPAYKGTSRSDVGYGVYDLYDLGEFNQKGTVRTKYGTKAQYLQAIQAAHAAGMQVYADVVFDHKGGADGTEWVDAVEVNPSDRNQEISGTYQIQAWTKFDFPGRGNTYSSFKWRWYHFDGVDWDESRKLSRIYKFRGIGKAWDWEVDTENGNYDYLMYADLDMDHPEVVTELKNWGKWYVNTTNIDGFRLDAVKHIKFSFFPDWLSYVRSQTGKPLFTVGEYWSYDINKLHNYITKTNGTMSLFDAPLHNKFYTASKSGGAFDMRTLMTNTLMKDQPTLAVTFVDNHDTEPGQALQSWVDPWFKPLAYAFILTRQEGYPGVFYGDYYGIPQYNIPSLKSKIDPLLIARRDYAYGTQHDYLDHSDIIGWTREGVTEKPGSGLAALITDGPGGSKWMYVGKQHAGKVFYDLTGNRSDTVTITSDGWGEFKVNGGSVSVWVPRKTTVSTITRPITTRPWTGEFVRWTEPRLVAWP

SEQ ID NO: 18588 - protein, 491 aa, Geobacillus stearothermophilus
AAPFNGTMMQYFEWYLPDDGTLWTKVANEANNLSSLGITALWLPPAYKGTSRSDVGYGAYDLYDLGEFNQKGTVRTKYGTKAQYLQAIQAAHAAGMQVYADVVFDHKGGADGTEWVDAVEVNPSDRNQVISGTYQIQAWTKFDFPGRGNTYSSFKWRWYHFDGVDWDASRKLSRIYLFEGKAWDWEVDTEFGNYDYLMYADLDMDYPEVVTELKNWGPWYVLTTNIDGFRLDAVKHIKFQFFPDWLSYVRSSTGKPLFTVGEYWSYDINKLHNYITKTDGTMSLFDAPLHNKFYTASKSGGAFDMRTLMTNTLMKDQPTLAVTFVDNHDTEPGQALQSWVDPWFKPLAYAFILTRQEGYPCVFYGDYYGIPQYNIPSLKSKIDPLLIARRDYAYGTQHDYLDHSDIIGWTREGGTEKPGSGLAALITDGPGGSKWMYVGKQHAGKVFYDLTGNRSDTVTINSDGWGEFKVNGGSVSVWVPRKTTVSTIARP

SEQ ID NO: 18589 - protein, 491 aa, Geobacillus stearothermophilus
AAPFNGTMMQYFEWYLPDDGTLWTKVANEANNLSSLGITALWLPPAYKGTSRSDVGYGAYDLYDLGEFNQKGTVRTKYGTKAQYLQAIQAAHAAGMQVYADVVFDHKGGADGTEWVDAVEVNPSDRNQVISGTYQIQAWTKFDFPGRGNTYSSFKWRWYHFDGVDWDASRKLSRIYLFEGKAWDWEVDTEFGNYDYLMYADLDMDYPEVVTELKNWGPWYVLTTNIDGFRLDAVKHIKFSFFPDWLSYVRSSTGKPLFTVGEYWSYDINKLHNYITKTDGTMSLFDAPLHNKFYTASKSGGAFDMRTLMTNTLMKDQPTLAVTFVDNHDTEPGQALQSWVDPWFKPLAYAFILTRQEGYPCVFYGDYYGIPQYNIPSLKSKIDPLLIARRDYAYGTQHDYLDHSDIIGWTREGGTEKPGSGLAALITDGPGGSKWMYVGKQHAGKVFYDLTGNRSDTVTINSDGWGEFKVNGGSVSVWVPRKTTVSTIARP

SEQ ID NO: 18590 - protein, 491 aa, Geobacillus stearothermophilus
AAPFNGTMMQYFEWYLPDDGTLWTKVANEANNLSSLGITALWLPPAYKGTSRSDVGYGEYDLYDLGEFNQKGTVRTKYGTKAQYLQAIQAAHAAGMQVYADVVFDHKGGADGTEWVDAVEVNPSDRNQEISGTYQIQAWTKFDFPGRGNTYSSFKWRWYHFDGVDWDESRKLSRIYKFRGKAWDWEVDTEFGNYDYLMYADLDMDHPEVVTELKNWGKWYVNTTNIDGFRLDAVKHIKFSFFPDWLSYVRSQTGKPLFTVGEYWSYDINKLHNYITKTDGTMSLFDAPLHNKFYTASKSGGAFDMRTLMTNTLMKDQPTLAVTFVDNHDTEPGQALQSWVDPWFKPLAYAFILTRQEGYPCVFYGDYYGIPQYNIPSLKSKIDPLLIARRDYAYGTQHDYLDHSDIIGWTREGGTEKPGSGLAALITDGPGGSKWMYVGKQHAGKVFYDLTGNRSDTVTINSDGWGEFKVNGGSVSVWVPRKTTVSTIARP

SEQ ID NO: 18591 - protein, 491 aa, Geobacillus stearothermophilus
AAPFNGTMMQYFEWYLPDDGTLWTKVANEANNLSSLGITALWLPPAYKGTSRSDVGYGIYDLYDLGEFNQKGTVRTKYGTKAQYLQAIQAAHAAGMQVYADVVFDHKGGADGTEWVDAVEVNPSDRNQEISGTYQIQAWTKFDFPGRGNTYSSFKWRWYHFDGVDWDESRKLSRIYKFRGKAWDWEVDTEFGNYDYLMYADLDMDHPEVVTELKNWGKWYVNTTNIDGFRLDAVKHIKFSFFPDWLSYVRSQTGKPLFTVGEYWSYDINKLHNYITKTDGTMSLFDAPLHNKFYTASKSGGAFDMRTLMTNTLMKDQPTLAVTFVDNHDTEPGQALQSWVDPWFKPLAYAFILTRQEGYPCVFYGDYYGIPQYNIPSLKSKIDPLLIARRDYAYGTQHDYLDHSDIIGWTREGGTEKPGSGLAALITDGPGGSKWMYVGKQHAGKVFYDLTGNRSDTVTINSDGWGEFKVNGGSVSVWVPRKTTVSTIARP

SEQ ID NO: 18592 - protein, 491 aa, Geobacillus stearothermophilus
AAPFNGTMMQYFEWYLPDDGTLWTKVANEANNLSSLGITALWLPPAYKGTSRSDVGYGAYDLYDLGEFNQKGTVRTKYGTKAQYLQAIRAAHAAGMQVYADVVFDHKGGADGTEWVDAVEVNPSDRNQVISGTYQIQAWTKFDFPGRGNTYSSFKWRWYHFDGVDWDESRKLSRIYLFEGKAWDWEVDTEFGNYDYLMYADLDMDHPEVVTELKNWGPWYVLTTNIDGFRLDAVKHIKFSFFPDWLSYVRSSTGKPLFTVGEYWSYDLNKLHNYITKTDGTMSLFDAPLHNKFYTASKSGGAFDMRTLMTNTLMKDQPTLAVTFVDNHDTEPGQALQSWVDPWFKPLAYAFILTRQEGYPCVFYGDYYGIPQYNIPSLKSKIDPLLIARRDYAYGTQHDYLDHSDIIGWTREGGTEKPGSGLAALITDGPGGSKWMYVGKQHAGKVFYDLTGNRSDTVTINSDGWGEFKVNGGSVSVWVPRKTTVSTIARP

SEQ ID NO: 18593 - protein, 491 aa, Geobacillus stearothermophilus
AAPFNGTMMQYFEWYLPDDGTLWTKVANEANNLSSLGITALWLPPAYKGTSRSDVGYGQYDLYDLGEFNQKGTVRTKYGTKAQYLQAIQAAHAAGMQVYADVVFDHKGGADGTEWVDAVEVNPSDRNQEISGTYQIQAWTKFDFPGRGNTYSSFKWRWYHFDGVDWDESRKLSRIYKFRGKAWDWEVDTEFGNYDYLMYADLDMDHPEVVTELKNWGKWYVNTTNIDGFRLDAVKHIKFSFFPDWLSYVRSQTGKPLFTVGEYWSYDINKLHNYITKTDGTMSLFDAPLHNKFYTASKSGGAFDMRTLMTNTLMKDQPTLAVTFVDNHDTEPGQALQSWVDPWFKPLAYAFILTRQEGYPCVFYGDYYGIPQYNIPSLKSKIDPLLIARRDYAYGTQHDYLDHSDIIGWTREGGTEKPGSGLAALITDGPGGSKWMYVGKQHAGKVFYDLTGNRSDTVTINSDGWGEFKVNGGSVSVWVPRKTTVSTIARP

SEQ ID NO: 18594 - protein, 491 aa, Geobacillus stearothermophilus
AAPFNGTMMQYFEWYLPDDGTLWTKVANEANNLSSLGITALWLPPAYKGTSRSDVGYGAYDLYDLGEFNQKGTVRTKYGTKAQYLQAIRAAHAAGMQVYADVVFDHKGGADGTEWVDAVEVNPSDRNQVISGTYQIQAWTKFDFPGRGNTYSSFKWRWYHFDGVDWDESRKLSRIYLFEGKAWDWEVDTEFGNYDYLMYADLDMDYPEVVTELKNWGPWYVLTTNIDGFRLDAVKHIKFSFFPDWLSYVRSSTGKPLFTVGEYWSYDINKLHNYITKTDGTMSLFDAPLHNKFYTASKSGGAFDMRTLMTNTLMKDQPTLAVTFVDNHDTEPGQALQSWVDPWFKPLAYAFILTRQEGYPCVFYGDYYGIPQYNIPSLKSKIDPLLIARRDYAYGTQHDYLDHSDIIGWTREGGTEKPGSGLAALITDGPGGSKWMYVGKQHAGKVFYDLTGNRSDTVTINSDGWGEFKVNGGSVSVWVPRKTTVSTIARP

SEQ ID NO: 18595 - protein, 491 aa, Geobacillus stearothermophilus
AAPFNGTMMQYFEWYLPDDGTLWTKVANEANNLSSLGITALWLPPAYKGTSRSDVGYGAYDLYDLGEFNQKGTVRTKYGTKAQYLQAIQAAHAAGMQVYADVVFDHKGGADGTEWVDAVEVNPSDRNQVISGTYQIQAWTKFDFPGRGNTYSSFKWRWYHFDGVNWDESRKLSRIYLFEGKAWDWEVDTEFGNYDYLMYADLDMDYPEVVTELKNWGPWYVLTTNIDGFRLDAVKHIKFQFFPDWLSYVRSSTGKPLFTVGEYWSYDINKLHNYITKTDGTMSLFDAPLHNKFYTASKSGGAFDMRTLMTNTLMKDQPTLAVTFVDNHDTEPGQALQSWVDPWFKPLAYAFILTRQEGYPCVFYGDYYGIPQYNIPSLKSKIDPLLIARRDYAYGTQHDYLDHSDIIGWTREGGTEKPGSGLAALITDGPGGSKWMYVGKQHAGKVFYDLTGNRSDTVTINSDGWGEFKVNGGSVSVWVPRKTTVSTIARP

SEQ ID NO: 18596 - protein, 491 aa, Geobacillus stearothermophilus
AAPFNGTMMQYFEWYLPDDGTLWTKVANEANNLSSLGITALWLPPAYKGTSRSDVGYGAYDLYDLGEFNQKGTVRTKYGTKAQYLQAIRAAHAAGMQVYADVVFDHKGGADGTEWVDAVEVNPSDRNQVISGTYQIQAWTKFDFPGRGNTYSSFKWRWYHFDGVDWDESRKLSRIYLFEGKAWDWEVDTEFGNYDYLMYADLDMDHPEVVTELKNWGPWYVLTTNIDGFRLDAVKHIKFSFFPDWLSYVRSSTGKPLFTVGEYWSYDINKLHNFITKTDGTMSLFDAPLHNKFYTASKSGGAFDMRTLMTNTLMKDQPTLAVTFVDNHDTEPGQALQSWVDPWFKPLAYAFILTRQEGYPCVFYGDYYGIPQYNIPSLKSKIDPLLIARRDYAYGTQHDYLDHSDIIGWTREGGTEKPGSGLAALITDGPGGSKWMYVGKQHAGKVFYDLTGNRSDTVTINSDGWGEFKVNGGSVSVWVPRKTTVSTIARP

SEQ ID NO: 18597 - protein, 491 aa, Geobacillus stearothermophilus
AAPFNGTMMQYFEWYLPDDGTLWTKVANEANNLSSLGITALWLPPAYKGTSRSDVGYGAYDLYDLGEFNQKGTVRTKYGTKAQYLQAIQAAHAAGMQVYADVVFDHKGGADGTEWVDAVEVNPSDRNQVISGTYQIQAWTKFDFPGRGNTYSSFKWRWYHFDGVDWDESRELSRIYLFEGKAWDWEVDTEFGNYDYLMYADLDMDYPEVVTELKNWGPWYVLTTNIDGFRLDAVKHIKFQFFPDWLSYVRSSTGKPLFTVGEYWSYDINKLHNYITKTDGTMSLFDAPLHNKFYTASKSGGAFDMRTLMTNTLMKDQPTLAVTFVDNHDTEPGQALQSWVDPWFKPLAYAFILTRQEGYPCVFYGDYYGIPQYNIPSLKSKIDPLLIARRDYAYGTQHDYLDHSDIIGWTREGGTEKPGSGLAALITDGPGGSKWMYVGKQHAGKVFYDLTGNRSDTVTINSDGWGEFKVNGGSVSVWVPRKTTVSTIARP

SEQ ID NO: 18598 - protein, 491 aa, Geobacillus stearothermophilus
AAPFNGTMMQYFEWYLPDDGTLWTKVANEANNLSSLGITALWLPPAYKGTSRSDVGYGAYDLYDLGEFNQKGTVRTKYGTKAQYLQAIRAAHAAGMQVYADVVFDHKGGADGTEWVDAVEVNPSDRNQVISGTYQIQAWTKFDFPGRGNTYSSFKWRWYHFDGVDWDESRKLSRIYLFEGKAWDWEVDTEFGNYDYLMYADLDMDHPEVVTELKNWGPWYVLTTNIDGFRLDAVKHIKFSFFPDWLSYVRSSTGKPLFTVGEYWSYDINKLKNYITKTDGTMSLFDAPLHNKFYTASKSGGAFDMRTLMTNTLMKDQPTLAVTFVDNHDTEPGQALQSWVDPWFKPLAYAFILTRQEGYPCVFYGDYYGIPQYNIPSLKSKIDPLLIARRDYAYGTQHDYLDHSDIIGWTREGGTEKPGSGLAALITDGPGGSKWMYVGKQHAGKVFYDLTGNRSDTVTINSDGWGEFKVNGGSVSVWVPRKTTVSTIARP

SEQ ID NO: 18599 - protein, 491 aa, Geobacillus stearothermophilus
AAPFNGTMMQYFEWYLPDDGTLWTKVANEANNLSSLGITALWLPPAYKGTSRSDVGYGAYDLYDLGEFNQKGTVRTKYGTKAQYLQAIRAAHAAGMQVYADVVFDHKGGADDTEWVDAVEVNPSDRNQVISGTYQIQAWTKFDFPGRGNTYSSFKWRWYHFDGVDWDESRKLSRIYLFEGKAWDWEVDTEFGNYDYLMYADLDMDHPEVVTELKNWGPWYVLTTNIDGFRLDAVKHIKFSFFPDWLSYVRSSTGKPLFTVGEYWSYDINKLHNYITKTDGTMSLFDAPLHNKFYTASKSGGAFDMRTLMTNTLMKDQPTLAVTFVDNHDTEPGQALQSWVDPWFKPLAYAFILTRQEGYPCVFYGDYYGIPQYNIPSLKSKIDPLLIARRDYAYGTQHDYLDHSDIIGWTREGGTEKPGSGLAALITDGPGGSKWMYVGKQHAGKVFYDLTGNRSDTVTINSDGWGEFKVNGGSVSVWVPRKTTVSTIARP

SEQ ID NO: 18600 - protein, 491 aa, Geobacillus stearothermophilus
AAPFNGTMMQYFEWYLPDDGTLWTKVANEANNLSSLGITALWLPPAYKGTSRSDVGYGVYDLYDLGEFNQKGTVRTKYGTKAQYLQAIQAAHAAGMQVYADVVFDHKGGADGTEWVDAVEVNPSDRNQEISGTYQIQAWTKFDFPGRGNTYSSFKWRWYHFDGVDWDESRKLSRIYKFRGKAWDWEVDTEFGNYDYLMYADLDMDHPEVVTELKNWGKWYVNTTNIDGFRLDAVKHIKFSFFPDWLSYVRSQTGKPLFTVGEYWSYDINKLHNYITKTDGTTSLFDAPLHNKFYTASKSGGAFDMRTLMTNTLMKDQPTLAVTFVDNHDTEPGQALQSWVDPWFKPLAYAFILTRQEGYPCVFYGDYYGIPQYNIPSLKSKIDPLLIARRDYAYGTQHDYLDHSDIIGWTREGGTEKPGSGLAALITDGPGGSKWMYVGKQHAGKVFYDLTGNRSDTVTINSDGWGEFKVNGGSVSVWVPRKTTVSTIARP

SEQ ID NO: 18601 - protein, 491 aa, Geobacillus stearothermophilus
AAPFNGTMMQYFEWYLPDDGTLWTKVANEANNLSSLGITALWLPPAYKGTSRSDVGYGAYDLYDLGEFNQKGTVRTKYGTKAQYLQAIQAAHAAGMQVYADVVFDHKGGADGTEWVDAVEVNPSDRNQVISGTYQIQAWTKFDFPGRGNTYSSFKWRWYHFDGVDWDESRKLSRIYLFEGKAWDWEVDTEFGNYDYLMYADLDMDHPEVVTELKNWGPWYVLTTNIDGFRLDAVKHIKFQFFPDWLSYVRSSTGKPLFTVGEYWSYDINKLHNYITKTNGTTSLFDAPLHNKFYTASKSGGAFDMRTLMTNTLMKDQPTLAVTFVDNHDTEPGQALQSWVDPWFKPLAYAFILTRQEGYPCVFYGDYYGIPQYNIPSLKSKIDPLLIARRDYAYGTQHDYLDHSDIIGWTREGVTEKPGSGLAALITDGPGGSKWMYVGKQHAGKVFYDLTGNRSDTVTINSDGWGEFKVNGGSVSVWVPRKTTVSTIARP

SEQ ID NO: 18602 - protein, 491 aa, Geobacillus stearothermophilus
AAPFNGTMMQYFEWYLPDDGTLWTKVANEANNLSSLGITALWLPPAYKGTSRSDVGYGVYDLYDLGEFNQKGTVRTKYGTKAQYLQAIQAAHAAGMQVYADVVFDHKGGADGTEWVDAVEVNPSDRNQEISGTYQIQAWTKFDFPGRGNTYSSFKWRWYHFDGVDWDESRKLSRIYKFRGKAWDWEVDTEFGNYDYLMYADLDMDHPEVVTELKNWGKWYVNTTNIDGFRLDAVKHIKFSFFPDWLSYVRSQTGKPLFTVGEYWSYDINKLHNYITKTDGTMSLFDAPLHNKFYTASKSGGAFDMRTLMTNTLMKDQPTLAVTFVDNHDTEPGQALQSWVDPWFKPLAYAFILTRQEGYPCVFYGDYYGIPQYNIPSLKSKIDPLLIARRDYAYGTQHDYLDHSDIIGWTREGGTEKPGSGLAALITDGPGGSKWMYVGKQHAGKVFYDLTGNRSDTVTINSDGWGEFKVNGGSVSVWVPRKTTVSTIARP

SEQ ID NO: 18603 - protein, 491 aa, Geobacillus stearothermophilus
AAPFNGTMMQYFEWYLPDDGTLWTKVANEANNLSSLGITALWLPPAYKGTSRSDVGYGVYDLYDLGEFNQKGTVRTKYGTKAQYLQAIQAAHAAGMQVYADVVFDHKGGADGTEWVDAVEVNPSDRNQVISGTYQIQAWTKFDFPGRGNTYSSFKWRWYHFDGVDWDESRKLSRIYLFEGKAWDWEVDTEFGNYDYLMYADLDMDHPEVVTELKNWGKWYVNTTNIDGFRLDAVKHIKFQFFPDWLSYVRSQTGKPLFTVGEYWSYDINKLHNYITKTNGTMSLFDAPLHNKFYTASKSGGAFDMRTLMTNTLMKDQPTLAVTFVDNHDTEPGQALQSWVDPWFKPLAYAFILTRQEGYPCVFYGDYYGIPQYNIPSLKSKIDPLLIARRDYAYGTQHDYLDHSDIIGWTREGVTEKPGSGLAALITDGPGGSKWMYVGKQHAGKVFYDLTGNRSDTVTINSDGWGEFKVNGGSVSVWVPRKTTVSTIARP

SEQ ID NO: 18604 - protein, 491 aa, Geobacillus stearothermophilus
AAPFNGTMMQYFEWYLPDDGTLWTKVANEANNLSSLGITALWLPPAYKGTSRSDVGYGAYDLYDLGEFNQKGTVRTKYGTKAQYLQAIQAAHAAGMQVYADVVFDHKGGADGTEWVDAVEVNPSDRNQVISGTYQIQAWTKFDFPGRGNTYSSFKWRWYHFDGVDWDESRKLSRIYLFEGKAWDWEVDTEFGNYDYLMYADLDMDHPEVVTELKNWGPWYVLTTNIDGFRLDAVKHIKFSFFPDWLSYVRSSTGKPLFTVGEYWSYDINKLHNYITKTNGTMSLFDAPLHNKFYTASKSGGAFDMRTLMTNTLMKDQPTLAVTFVDNHDTEPGQALQSWVDPWFKPLAYAFILTRQEGYPCVFYGDYYGIPQYNIPSLKSKIDPLLIARRDYAYGTQHDYLDHSDIIGWTREGVTEKPGSGLAALITDGPGGSKWMYVGKQHAGKVFYDLTGNRSDTVTINSDGWGEFKVNGGSVSVWVPRKTTVSTIARP

SEQ ID NO: 18605 - protein, 491 aa, Geobacillus stearothermophilus
AAPFNGTMMQYFEWYLPDDGTLWTKVANEANNLSSLGITALWLPPAYKGTSRSDVGYGAYDLYDLGEFNQKGTVRTKYGTKAQYLQAIQAAHAAGMQVYADVVFDHKGGADGTEWVDAVEVNPSDRNQVISGTYQIQAWTKFDFPGRGNTYSSFKWRWYHFDGVDWDESRKLSRIYLFEGKAWDWEVDTEFGNYDYLMYADLDMDHPEVVTELKNWGPWYVLTTNIDGFRLDAVKHIKFQFFPDWLSYVRSSTGKPLFTVGEYWSYDINKLHNYITKTNGTMSLFDAPLHNKFYTASKSGGAFDMRTLMTNTLMKDQPTLAVTFVDNHDTEPGQALQSWVDPWFKPLAYAFILTRQEGYPCVFYGDYYGIPQYNIPSLKSKIDPLLIARRDYAYGTQHDYLDHSDIIGWTREGVTEKPGSGLAALITDGPGGSKWMYVGKQHAGKVFYDLTGNRSDTVTINSDGWGEFKVNGGSVSVWVPRKTTVSTIARP

SEQ ID NO: 18606 - protein, 491 aa, Geobacillus stearothermophilus
AAPFNGTMMQYFEWYLPDDGTLWTKVANEANNLSSLGITALWLPPAYKGTSRSDVGYGVYDLYDLGEFNQKGTVRTKYGTKAQYLQAIQAAHAAGMQVYADVVFDHKGGADGTEWVDAVEVNPSDRNQVISGTYQIQAWTKFDFPGRGNTYSSFKWRWYHFDGVDWDESRKLSRIYLFEGKAWDWEVDTEFGNYDYLMYADLDMDHPEVVTELKNWGKWYVNTTNIDGFRLDAVKHIKFSFFPDWLSYVRSQTGKPLFTVGEYWSYDINKLHNYITKTNGTMSLFDAPLHNKFYTASKSGGAFDMRTLMTNTLMKDQPTLAVTFVDNHDTEPGQALQSWVDPWFKPLAYAFILTRQEGYPCVFYGDYYGIPQYNIPSLKSKIDPLLIARRDYAYGTQHDYLDHSDIIGWTREGVTEKPGSGLAALITDGPGGSKWMYVGKQHAGKVFYDLTGNRSDTVTINSDGWGEFKVNGGSVSVWVPRKTTVSTIARP

SEQ ID NO: 18607 - protein, 491 aa, Geobacillus stearothermophilus
AAPFNGTMMQYFEWYLPDDGTLWTKVANEANNLSSLGITALWLPPAYKGTSRSDVGYGVYDLYDLGEFNQKGTVRTKYGTKAQYLQAIQAAHAAGMQVYADVVFDHKGGADGTEWVDAVEVNPSDRNQVISGTYQIQAWTKFDFPGRGNTYSSFKWRWYHFDGVDWDESRKLSRIYLFVGKAWDWEVDTEFGNYDYLMYADLDMDHPEVVTELKNWGKWYVNTTNIDGFRLDAVKHIKFSFFPDWLSYVRSQTGKPLFTVGEYWSYDINKLHNYITKTNGTMSLFDAPLHNKFYTASKSGGAFDMRTLMTNTLMKDQPTLAVTFVDNHDTEPGQALQSWVDPWFKPLAYAFILTRQEGYPCVFYGDYYGIPQYNIPSLKSKIDPLLIARRDYAYGTQHDYLDHSDIIGWTREGVTEKPGSGLAALITDGPGGSKWMYVGKQHAGKVFYDLTGNRSDTVTINSDGWGEFKVNGGSVSVWVPRKTTVSTIARP

SEQ ID NO: 18608 - protein, 491 aa, Geobacillus stearothermophilus
AAPFNGTMMQYFEWYLPDDGTLWTKVANEANNLSSLGITALWLPPAYKGTSRSDVGYGAYDLYDLGEFNQKGTVRTKYGTKAQYLQAIQAAHAAGMQVYADVVFDHKGGADGTEWVDAVEVNPSDRNQVISGTYQIQAWTKFDFPGRGNTYSSFKWRWYHFDGVDWDESRKLSRIYLFEGKAWDWEVDTEFGNYDYLMYADLDMDHPEVVTELKNWGPWYVLTTNIDGFRLDAVKHIKFSFFPDWLSYVRSSTGKPLFTVGEYWSYDINKLHNYITKTNGTTSLFDAPLHNKFYTASKSGGAFDMRTLMTNTLMKDQPTLAVTFVDNHDTEPGQALQSWVDPWFKPLAYAFILTRQEGYPCVFYGDYYGIPQYNIPSLKSKIDPLLIARRDYAYGTQHDYLDHSDIIGWTREGVTEKPGSGLAALITDGPGGSKWMYVGKQHAGKVFYDLTGNRSDTVTINSDGWGEFKVNGGSVSVWVPRKTTVSTIARP

SEQ ID NO: 18609 - protein, 490 aa, Geobacillus stearothermophilus
APFNGTMMQYFEWYLPDDGTLWTKVANEANNLSSLGITALWLPPAYKGTSRSDVGYGVYDLYDLGEFNQKGTVRTKYGTKAQYLQAIQAAHAAGMQVYADVVFDHKGGADGTEWVDAVEVNPSDRNQEISGTYQIQAWTKFDFPGRGNTYSSFKWRWYHFDGVDWDESRKLSRIYKFRGKAWDWEVDTEFGNYDYLMYADLDMDHPEVVTELKNWGKWYVNTTNIDGFRLDAVKHIKFSFFPDWLSYVRSQTGKPLFTVGEYWSYDINKLHNYITKTDGTMSLFDAPLHNKFYTASKSGGAFDMRTLMTNTLMKDQPTLAVTFVDNHDTEPGQALQSWVDPWFKPLAYAFILTRQEGYPCVFYGDYYGIPQYNIPSLKSKIDPLLIARRDYAYGTQHDYLDHSDIIGWTREGGTEKPGSGLAALITDGPGGSKWMYVGKQHAGKVFYDLTGNRSDTVTINSDGWGEFKVNGGSVSVWVPRKTTVSTIARP

SEQ ID NO: 18610 - protein, 489 aa, Geobacillus stearothermophilus
AAPFNGTMMQYFEWYLPDDGTLWTKVANEANNLSSLGITALWLPPAYKGTSRSDVGYGVYDLYDLGEFNQKGTVRTKYGTKAQYLQAIQAAHAAGMQVYADVVFDHKGGADGTEWVDAVEVNPSDRNQVISGTYQIQAWTKFDFPGRGNTYSSFKWRWYHFDGVDWDESRKLSRIYLFVGKAWDWEVDTEFGNYDYLMYADLDMDHPEVVTELKNWGKWYVNTTNIDGFRLDAVKHIKFSFFPDWLSYVRSQTGKPLFTVGEYWSYDINKLHNYITKTNGTMSLFDAPLHNKFYTASKSGGAFDMRTLMTNTLMKDQPTLAVTFVDNHDTEPGQALQSWVDPWFKPLAYAFILTRQEGYPCVFYGDYYGIPQYNIPSLKSKIDPLLIARRDYAYGTQHDYLDHSDIIGWTREGVTEKPGSGLAALITDGPGGSKWMYVGKQHAGKVFYDLTGNRSDTVTINSDGWGEFKVNGGSVSVWVPRKTTVSTIA

SEQ ID NO: 18611 - protein, 489 aa, Geobacillus stearothermophilus
AAPFNGTMMQYFEWYLPDDGTLWTKVANEANNLSSLGITALWLPPAYKGTSRSDVGYGAYDLYDLGEFNQKGTVRTKYGTKAQYLQAIQAAHAAGMQVYADVVFDHKGGADGTEWVDAVEVNPSDRNQVISGTYQIQAWTKFDFPGRGNTYSSFKWRWYHFDGVDWDESRKLSRIYLFEGKAWDWEVDTEFGNYDYLMYADLDMDHPEVVTELKNWGPWYVLTTNIDGFRLDAVKHIKFQFFPDWLSYVRSSTGKPLFTVGEYWSYDINKLHNYITKTNGTMSLFDAPLHNKFYTASKSGGAFDMRTLMTNTLMKDQPTLAVTFVDNHDTEPGQALQSWVDPWFKPLAYAFILTRQEGYPCVFYGDYYGIPQYNIPSLKSKIDPLLIARRDYAYGTQHDYLDHSDIIGWTREGVTEKPGSGLAALITDGPGGSKWMYVGKQHAGKVFYDLTGNRSDTVTINSDGWGEFKVNGGSVSVWVPRKTTVSTIA

SEQ ID NO: 18612 - protein, 489 aa, Geobacillus stearothermophilus
AAPFNGTMMQYFEWYLPDDGTLWTKVANEANNLSSLGITALWLPPAYKGTSRSDVGYGAYDLYDLGEFNQKGTVRTKYGTKAQYLQAIQAAHAAGMQVYADVVFDHKGGADGTEWVDAVEVNPSDRNQVISGTYQIQAWTKFDFPGRGNTYSSFKWRWYHFDGVDWDESRKLSRIYLFEGKAWDWEVDTEFGNYDYLMYADLDMDHPEVVTELKNWGPWYVLTTNIDGFRLDAVKHIKFSFFPDWLSYVRSSTGKPLFTVGEYWSYDINKLHNYITKTNGTMSLFDAPLHNKFYTASKSGGAFDMRTLMTNTLMKDQPTLAVTFVDNHDTEPGQALQSWVDPWFKPLAYAFILTRQEGYPCVFYGDYYGIPQYNIPSLKSKIDPLLIARRDYAYGTQHDYLDHSDIIGWTREGVTEKPGSGLAALITDGPGGSKWMYVGKQHAGKVFYDLTGNRSDTVTINSDGWGEFKVNGGSVSVWVPRKTTVSTIA

SEQ ID NO: 18613 - protein, 489 aa, Geobacillus stearothermophilus
AAPFNGTMMQYFEWYLPDDGTLWTKVANEANNLSSLGITALWLPPAYKGTSRSDVGYGVYDLYDLGEFNQKGTVRTKYGTKAQYLQAIQAAHAAGMQVYADVVFDHKGGADGTEWVDAVEVNPSDRNQVISGTYQIQAWTKFDFPGRGNTYSSFKWRWYHFDGVDWDESRKLSRIYLFEGKAWDWEVDTEFGNYDYLMYADLDMDHPEVVTELKNWGKWYVNTTNIDGFRLDAVKHIKFQFFPDWLSYVRSQTGKPLFTVGEYWSYDINKLHNYITKTNGTMSLFDAPLHNKFYTASKSGGAFDMRTLMTNTLMKDQPTLAVTFVDNHDTEPGQALQSWVDPWFKPLAYAFILTRQEGYPCVFYGDYYGIPQYNIPSLKSKIDPLLIARRDYAYGTQHDYLDHSDIIGWTREGVTEKPGSGLAALITDGPGGSKWMYVGKQHAGKVFYDLTGNRSDTVTINSDGWGEFKVNGGSVSVWVPRKTTVSTIA

SEQ ID NO: 18614 - protein, 489 aa, Geobacillus stearothermophilus
AAPFNGTMMQYFEWYLPDDGTLWTKVANEANNLSSLGITALWLPPAYKGTSRSDVGYGAYDLYDLGEFNQKGTVRTKYGTKAQYLQAIQAAHAAGMQVYADVVFDHKGGADGTEWVDAVEVNPSDRNQVISGTYQIQAWTKFDFPGRGNTYSSFKWRWYHFDGVDWDESRKLSRIYLFEGKAWDWEVDTEFGNYDYLMYADLDMDHPEVVTELKNWGPWYVLTTNIDGFRLDAVKHIKFQFFPDWLSYVRSSTGKPLFTVGEYWSYDINKLHNYITKTNGTTSLFDAPLHNKFYTASKSGGAFDMRTLMTNTLMKDQPTLAVTFVDNHDTEPGQALQSWVDPWFKPLAYAFILTRQEGYPCVFYGDYYGIPQYNIPSLKSKIDPLLIARRDYAYGTQHDYLDHSDIIGWTREGVTEKPGSGLAALITDGPGGSKWMYVGKQHAGKVFYDLTGNRSDTVTINSDGWGEFKVNGGSVSVWVPRKTTVSTIA

SEQ ID NO: 18615 - protein, 489 aa, Geobacillus stearothermophilus
AAPFNGTMMQYFEWYLPDDGTLWTKVANEANNLSSLGITALWLPPAYKGTSRSDVGYGAYDLYDLGEFNQKGTVRTKYGTKAQYLQAIQAAHAAGMQVYADVVFDHKGGADGTEWVDAVEVNPSDRNQVISGTYQIQAWTKFDFPGRGNTYSSFKWRWYHFDGVDWDESRKLSRIYLFEGKAWDWEVDTEFGNYDYLMYADLDMDHPEVVTELKNWGPWYVLTTNIDGFRLDAVKHIKFSFFPDWLSYVRSSTGKPLFTVGEYWSYDINKLHNYITKTNGTTSLFDAPLHNKFYTASKSGGAFDMRTLMTNTLMKDQPTLAVTFVDNHDTEPGQALQSWVDPWFKPLAYAFILTRQEGYPCVFYGDYYGIPQYNIPSLKSKIDPLLIARRDYAYGTQHDYLDHSDIIGWTREGVTEKPGSGLAALITDGPGGSKWMYVGKQHAGKVFYDLTGNRSDTVTINSDGWGEFKVNGGSVSVWVPRKTTVSTIA

SEQ ID NO: 18616 - protein, 489 aa, Geobacillus stearothermophilus
AAPFNGTMMQYFEWYLPDDGTLWTKVANEANNLSSLGITALWLPPAYKGTSRSDVGYGVYDLYDLGEFNQKGTVRTKYGTKAQYLQAIQAAHAAGMQVYADVVFDHKGGADGTEWVDAVEVNPSDRNQVISGTYQIQAWTKFDFPGRGNTYSSFKWRWYHFDGVDWDESRKLSRIYLFEGKAWDWEVDTEFGNYDYLMYADLDMDHPEVVTELKNWGKWYVNTTNIDGFRLDAVKHIKFSFFPDWLSYVRSQTGKPLFTVGEYWSYDINKLHNYITKTNGTMSLFDAPLHNKFYTASKSGGAFDMRTLMTNTLMKDQPTLAVTFVDNHDTEPGQALQSWVDPWFKPLAYAFILTRQEGYPCVFYGDYYGIPQYNIPSLKSKIDPLLIARRDYAYGTQHDYLDHSDIIGWTREGVTEKPGSGLAALITDGPGGSKWMYVGKQHAGKVFYDLTGNRSDTVTINSDGWGEFKVNGGSVSVWVPRKTTVSTIA

SEQ ID NO: 18617 - protein, 491 aa, Geobacillus stearothermophilus
AAPFNGTMMQYFEWYLPDDGTLWTKVANEANNLSSLGITALWLPPAYKGTSRSDVGYGVYDLYDLGEFNQKGTVRTKYGTKAQYLQAIQAAHAAGMQVYADVVFDHKGGADGTEWVDAVEVNPSDRNQVISGTYQIQAWTKFDFPGRGNTYSSFKWRWYHFDGVDWDESRKLSRIYLFVGXXKAWDWEVDTEFGNYDYLMYADLDMDHPEVVTELKNWGKWYVNTTNIDGFRLDAVKHIKFSFFPDWLSYVRSQTGKPLFTVGEYWSYDINKLHNYITKTNGTMSLFDAPLHNKFYTASKSGGAFDMRTLMTNTLMKDQPTLAVTFVDNHDTEPGQALQSWVDPWFKPLAYAFILTRQEGYPCVFYGDYYGIPQYNIPSLKSKIDPLLIARRDYAYGTQHDYLDHSDIIGWTREGVTEKPGSGLAALITDGPGGSKWMYVGKQHAGKVFYDLTGNRSDTVTINSDGWGEFKVNGGSVSVWVPRKTTVSTIA

SEQ ID NO: 18618 - protein, 491 aa, Geobacillus stearothermophilus
AAPFNGTMMQYFEWYLPDDGTLWTKVANEANNLSSLGITALWLPPAYKGTSRSDVGYGVYDLYDLGEFNQKGTVRTKYGTKAQYLQAIQAAHAAGMQVYADVVFDHKGGADGTEWVDAVEVNPSDRNQVISGTYQIQAWTKFDFPGRGNTYSSFKWRWYHFDGVDWDESRKLSRIYLFEGXXKAWDWEVDTEFGNYDYLMYADLDMDHPEVVTELKNWGKWYVNTTNIDGFRLDAVKHIKFSFFPDWLSYVRSQTGKPLFTVGEYWSYDINKLHNYITKTNGTMSLFDAPLHNKFYTASKSGGAFDMRTLMTNTLMKDQPTLAVTFVDNHDTEPGQALQSWVDPWFKPLAYAFILTRQEGYPCVFYGDYYGIPQYNIPSLKSKIDPLLIARRDYAYGTQHDYLDHSDIIGWTREGVTEKPGSGLAALITDGPGGSKWMYVGKQHAGKVFYDLTGNRSDTVTINSDGWGEFKVNGGSVSVWVPRKTTVSTIA

SEQ ID NO: 18619 - protein, 491 aa, Geobacillus stearothermophilus
AAPFNGTMMQYFEWYLPDDGTLWTKVANEANNLSSLGITALWLPPAYKGTSRSDVGYGVYDLYDLGEFNQKGTVRTKYGTKAQYLQAIQAAHAAGMQVYADVVFDHKGGADGTEWVDAVEVNPSDRNQVISGTYQIQAWTKFDFPGRGNTYSSFKWRWYHFDGVDWDESRKLSRIYLFEGXXKAWDWEVDTEFGNYDYLMYADLDMDHPEVVTELKNWGKWYVNTTNIDGFRLDAVKHIKFQFFPDWLSYVRSQTGKPLFTVGEYWSYDINKLHNYITKTNGTMSLFDAPLHNKFYTASKSGGAFDMRTLMTNTLMKDQPTLAVTFVDNHDTEPGQALQSWVDPWFKPLAYAFILTRQEGYPCVFYGDYYGIPQYNIPSLKSKIDPLLIARRDYAYGTQHDYLDHSDIIGWTREGVTEKPGSGLAALITDGPGGSKWMYVGKQHAGKVFYDLTGNRSDTVTINSDGWGEFKVNGGSVSVWVPRKTTVSTIA

SEQ ID NO: 18620 - protein, 491 aa, Geobacillus stearothermophilus
AAPFNGTMMQYFEWYLPDDGTLWTKVANEANNLSSLGITALWLPPAYKGTSRSDVGYGAYDLYDLGEFNQKGTVRTKYGTKAQYLQAIQAAHAAGMQVYADVVFDHKGGADGTEWVDAVEVNPSDRNQVISGTYQIQAWTKFDFPGRGNTYSSFKWRWYHFDGVDWDESRKLSRIYLFEGXXKAWDWEVDTEFGNYDYLMYADLDMDHPEVVTELKNWGPWYVLTTNIDGFRLDAVKHIKFQFFPDWLSYVRSSTGKPLFTVGEYWSYDINKLHNYITKTNGTTSLFDAPLHNKFYTASKSGGAFDMRTLMTNTLMKDQPTLAVTFVDNHDTEPGQALQSWVDPWFKPLAYAFILTRQEGYPCVFYGDYYGIPQYNIPSLKSKIDPLLIARRDYAYGTQHDYLDHSDIIGWTREGVTEKPGSGLAALITDGPGGSKWMYVGKQHAGKVFYDLTGNRSDTVTINSDGWGEFKVNGGSVSVWVPRKTTVSTIA

SEQ ID NO: 18621 - protein, 491 aa, Geobacillus stearothermophilus
AAPFNGTMMQYFEWYLPDDGTLWTKVANEANNLSSLGITALWLPPAYKGTSRSDVGYGAYDLYDLGEFNQKGTVRTKYGTKAQYLQAIQAAHAAGMQVYADVVFDHKGGADGTEWVDAVEVNPSDRNQVISGTYQIQAWTKFDFPGRGNTYSSFKWRWYHFDGVDWDESRKLSRIYLFEGXXKAWDWEVDTEFGNYDYLMYADLDMDHPEVVTELKNWGPWYVLTTNIDGFRLDAVKHIKFQFFPDWLSYVRSSTGKPLFTVGEYWSYDINKLHNYITKTNGTMSLFDAPLHNKFYTASKSGGAFDMRTLMTNTLMKDQPTLAVTFVDNHDTEPGQALQSWVDPWFKPLAYAFILTRQEGYPCVFYGDYYGIPQYNIPSLKSKIDPLLIARRDYAYGTQHDYLDHSDIIGWTREGVTEKPGSGLAALITDGPGGSKWMYVGKQHAGKVFYDLTGNRSDTVTINSDGWGEFKVNGGSVSVWVPRKTTVSTIA

SEQ ID NO: 18622 - protein, 491 aa, Geobacillus stearothermophilus
AAPFNGTMMQYFEWYLPDDGTLWTKVANEANNLSSLGITALWLPPAYKGTSRSDVGYGAYDLYDLGEFNQKGTVRTKYGTKAQYLQAIQAAHAAGMQVYADVVFDHKGGADGTEWVDAVEVNPSDRNQVISGTYQIQAWTKFDFPGRGNTYSSFKWRWYHFDGVDWDESRKLSRIYLFEGXXKAWDWEVDTEFGNYDYLMYADLDMDHPEVVTELKNWGPWYVLTTNIDGFRLDAVKHIKFSFFPDWLSYVRSSTGKPLFTVGEYWSYDINKLHNYITKTNGTMSLFDAPLHNKFYTASKSGGAFDMRTLMTNTLMKDQPTLAVTFVDNHDTEPGQALQSWVDPWFKPLAYAFILTRQEGYPCVFYGDYYGIPQYNIPSLKSKIDPLLIARRDYAYGTQHDYLDHSDIIGWTREGVTEKPGSGLAALITDGPGGSKWMYVGKQHAGKVFYDLTGNRSDTVTINSDGWGEFKVNGGSVSVWVPRKTTVSTIA

SEQ ID NO: 18623 - protein, 491 aa, Geobacillus stearothermophilus
AAPFNGTMMQYFEWYLPDDGTLWTKVANEANNLSSLGITALWLPPAYKGTSRSDVGYGAYDLYDLGEFNQKGTVRTKYGTKAQYLQAIQAAHAAGMQVYADVVFDHKGGADGTEWVDAVEVNPSDRNQVISGTYQIQAWTKFDFPGRGNTYSSFKWRWYHFDGVDWDESRKLSRIYLFEGXXKAWDWEVDTEFGNYDYLMYADLDMDHPEVVTELKNWGPWYVLTTNIDGFRLDAVKHIKFSFFPDWLSYVRSSTGKPLFTVGEYWSYDINKLHNYITKTNGTTSLFDAPLHNKFYTASKSGGAFDMRTLMTNTLMKDQPTLAVTFVDNHDTEPGQALQSWVDPWFKPLAYAFILTRQEGYPCVFYGDYYGIPQYNIPSLKSKIDPLLIARRDYAYGTQHDYLDHSDIIGWTREGVTEKPGSGLAALITDGPGGSKWMYVGKQHAGKVFYDLTGNRSDTVTINSDGWGEFKVNGGSVSVWVPRKTTVSTIA

SEQ ID NO: 18624 - protein, 486 aa, Geobacillus stearothermophilus
AAPFNGTMMQYFEWYLPDDGTLWTKVANEANNLSSLGITALWLPPAYKGTSRSDVGYGAYDLYDLGEFNQKGTVRTKYGTKAQYLQAIQAAHAAGMQVYADVVFDHKGGADGTEWVDAVEVNPSDRNQVISGTYQIQAWTKFDFPGRGNTYSSFKWRWYHFDGVDWDESRKLSRIYLFSGKQWDWPVDNEFGNYDYLMYADLDMDHPEVTTELKNWGKWYVNTTNIDGFRLDAVKHIKFYFFPDWLSYVRSSTGKPLFTVGEYWSGDINKLHNYITWTDGTVSLFDAPLHYKFYNASKSGGAFDMRTLMTNTLMKDQPTLAVTFVDNHDTEPGQALQSWVDPWFKPLAYAFILTRQEGYPCVFYGDYYGIPQYNIPSLKSKIDPLLIARRDYAYGTQHDYLDHSDIIGWTREGGTEKPGSGLAALITDGPGGSKWMYVGKQHAGKVFYDLTGNRSDTVTINSDGWGEFKVNGGSVSVWVPRKTTVS

SEQ ID NO: 18625 - protein, 488 aa, Geobacillus stearothermophilus
AAPFNGTMMQYFEWYLPDDGTLWTKVADEANNLSSLGITALWLPPAYKGTSRSDVGYGVYDLYDLGEFNQKGTVRTKYGTKAQYLEAIQAAHAAGMRVYADVVFDHKGGADGTEWVDAVEVNPSDRNQEISGTYQIQAWTKFDFPGRGNTYSSFKWRWYHFDGVDWDESRQLSRIYKFRGIGKAWDWEVDTENGNYDYLMYADLDMDHPEVVTELKNWGKWYVDTTNIDGFRLDAVKHIKFSFFPDWLSYVRSQTGKPLFTVGEYWSYDIDKLHNYITKTDGTMSLFDAPLHNKFYTASKSGGAFDMQTLMTNTLMKDRPTLAVTFVDNHDTEPGQALQSWVDPWFKPLAYAFILTREEGYPCVFYGDYYGIPQYNIPSLKSQIDPLLIARRDYAYGTQHDYLDHSDIIGWTREGVTEKPGSGLAALITDGPGGSKWMYVGKEHAGQVFYDLTGNRSDTVTINSDGWGEFKVNGGSVSVWVPQKTTVS

SEQ ID NO: 18626 - protein, 486 aa, Geobacillus stearothermophilus
AAPFNGTMMQYFEWYLPDDGTLWTKVANEANNLSSLGITALWLPPAYKGTSRSDVGYGAYDLYDLGEFNQKGTVRTKYGTKAQYLQAIQAAHAAGMQVYADVVFDHKGGADGTEWVDAVEVNPSDRNQVISGTYQIQAWTKFDFPGRGNTYSSFKWRWYHFDGVDWDESRKLSRIYLFSGKQWDWPVDNEFGNYDYLMYADLDMDHPEVTTELKNWGKWYVNTTNIDGFRLDAVKHIKFYFFPDWLSYVRSSTGKPLFTVGEYWSGDINKLHNYITITDGTVSLFDAPLHYKFYNASKSGGAFDMRTLMTNTLMKDQPTLAVTFVDNHDTEPGQALQSWVDPWFKPLAYAFILTRQEGYPCVFYGDYYGIPQYNIPSLKSKIDPLLIARRDYAYGTQHDYLDHSDIIGWTREGGTEKPGSGLAALITDGPGGSKWMYVGKQHAGKVFYDLTGNRSDTVTINSDGWGEFKVNGGSVSVWVPRKTTVS

SEQ ID NO: 18627 - protein, 486 aa, Geobacillus stearothermophilus
AAPFNGTMMQYFEWYLPDDGTLWTKVANEANNLSSLGITALWLPPAYKGTSRSDVGYGVYDLYDLGEFNQKGTVRTKYGTKAQYLQAIQAAHAAGMQVYADVVFDHKGGADGTEWVDAVEVNPSDRNQEISGTYQIQAWTKFDFPGRGNTYSSFKWRWYHFDGVDWDESRKLSRIYKFRGKAWDWEVDTEFGNYDYLMYADLDMDHPEVVTELKNWGKWYVNTTNIDGFRLDAVKHIKFSFFPDWLSYVRSQTGKPLFTVGEYWSYDINKLHNYITKTDGTMSLFDAPLHNKFYTASKSGGAFDMRTLMTNTLMKDQPTLAVTFVDNHDTEPGQALQSWVDPWFKPLAYAFILTRQEGYPCVFYGDYYGIPQYNIPSLKSKIDPLLIARRDYAYGTQHDYLDHSDIIGWTREGGTEKPGSGLAALITDGPGGSKWMYVGKQHAGKVFYDLTGNRSDTVTINSDGWGEFKVNGGSVSVWVPRKTTVS

SEQ ID NO: 18628 - protein, 482 aa, Geobacillus stearothermophilus
AAPFNGTMMQYFEWYLPDDGTLWTKVANEANNLSSLGITALWLPPAYKGTSRSDVGYGVYDLYDLGEFNQKGTVRTKYGTKAQYLQAIQAAHAAGMQVYADVVFDHKGGADGTEWVDAVEVNPSDRNQEISGTYQIQAWTKFDFPGRGNTYSSFKWRWYHFDGVDWDESRKLSRIYKFRGKAWDWPVDTENGNYDYLMYADLDMDHPEVVTELKNWGKWYVNTTNIDGFRLDAVKHIKFYFFPDWLSYVRSQTGKPLFTVGEYWSYDINKLHNYITHTDGTMSLFDAPLHNKFYTASKSGGAFDMRTLMTNTLMKDQPTLAVTFVDNHDTEPGQALQSWVDPWFKPLAYAFILTRQEGYPCVFYGDYYGIPQYNIPSLKSKIDPLLIARRDYAYGTQHDYLDHSDIIGWTREGVTEKPGSGLAALITDGPGGSKWMYVGKQHAGKVFYDLTGNRSDTVTINSDGWGEFKVNGGSVSVWVPRK

SEQ ID NO: 18629 - protein, 482 aa, Geobacillus stearothermophilus
AAPFNGTMMQYFEWYLPDDGTLWTKVANEANNLSSLGITALWLPPAYKGTSRSDVGYGVYDLYDLGEFNQKGTVRTKYGTKAQYLQAIQAAHAAGMQVYADVVFDHKGGADGTEWVDAVEVNPSDRNQEISGTYQIQAWTKFDFPGRGNTYSSFKWRWYHFDGVDWDESRKLSRIYKFRGKAWDWPVDTENGNYDYLMYADLDMDHPEVVTELKNWGKWYVNTTNIDGFRLDAVKHIKFYFFPDWLSYVRSQTGKPLFTVGEYWSYDINKLHNYITITNGTMSLFDAPLHNKFYTASKSGGAFDMRTLMTNTLMKDQPTLAVTFVDNHDTEPGQALQSWVDPWFKPLAYAFILTRQEGYPCVFYGDYYGIPQYNIPSLKSKIDPLLIARRDYAYGTQHDYLDHSDIIGWTREGVTEKPGSGLAALITDGPGGSKWMYVGKQHAGKVFYDLTGNRSDTVTINSDGWGEFKVNGGSVSVWVPRK

SEQ ID NO: 18630 - protein, 482 aa, Geobacillus stearothermophilus
AAPFNGTMMQYFEWYLPDDGTLWTKVANEANNLSSLGITALWLPPAYKGTSRSDVGYGVYDLYDLGEFNQKGTVRTKYGTKAQYLQAIQAAHAAGMQVYADVVFDHKGGADGTEWVDAVEVNPSDRNQEISGTYQIQAWTKFDFPGRGNTYSSFKWRWYHFDGVDWDESRKLSRIYKFRGKAWDWPVDTENGNYDYLMYADLDMDHPEVVTELKNWGKWYVNTTNIDGFRLDAVKHIKFYFFPDWLSYVRSQTGKPLFTVGEYWSYDINKLHNYITFTDGTMSLFDAPLHNKFYTASKSGGAFDMRTLMTNTLMKDQPTLAVTFVDNHDTEPGQALQSWVDPWFKPLAYAFILTRQEGYPCVFYGDYYGIPQYNIPSLKSKIDPLLIARRDYAYGTQHDYLDHSDIIGWTREGVTEKPGSGLAALITDGPGGSKWMYVGKQHAGKVFYDLTGNRSDTVTINSDGWGEFKVNGGSVSVWVPRK

SEQ ID NO: 18631 - protein, 484 aa, Geobacillus stearothermophilus
AAPFNGTMMQYFEWYLPDDGTLWTKVANEANNLSSLGITALWLPPAYKGTSRSDVGYGVYDLYDLGEFNQKGTVRTKYGTKAQYLQAIQAAHAAGMQVYADVVFDHKGGADGTEWVDAVEVNPSDRNQEISGTYQIQAWTKFDFPGRGNTYSSFKWRWYHFDGVDWDESRKLSRIYKFRGIGKAWDWPVDTENGNYDYLMYADLDMDHPEVVTELKNWGKWYVNTTNIDGFRLDAVKHIKFYFFPDWLSYVRSQTGKPLFTVGEYWSYDINKLHNYITITNGTMSLFDAPLHNKFYTASKSGGAFDMRTLMTNTLMKDQPTLAVTFVDNHDTEPGQALQSWVDPWFKPLAYAFILTRQEGYPCVFYGDYYGIPQYNIPSLKSKIDPLLIARRDYAYGTQHDYLDHSDIIGWTREGVTEKPGSGLAALITDGPGGSKWMYVGKQHAGKVFYDLTGNRSDTVTINSDGWGEFKVNGGSVSVWVPRK

SEQ ID NO: 18632 - protein, 484 aa, Geobacillus stearothermophilus
AAPFNGTMMQYFEWYLPDDGTLWTKVANEANNLSSLGITALWLPPAYKGTSRSDVGYGVYDLYDLGEFNQKGTVRTKYGTKAQYLQAIQAAHAAGMQVYADVVFDHKGGADGTEWVDAVEVNPSDRNQEISGTYQIQAWTKFDFPGRGNTYSSFKWRWYHFDGVDWDESRKLSRIYKFRGIGKAWDWPVDTENGNYDYLMYADLDMDHPEVVTELKNWGKWYVNTTNIDGFRLDAVKHIKFYFFPDWLSYVRSQTGKPLFTVGEYWSYDINKLHNYITKTDGTMSLFDAPLHNKFYTASKSGGAFDMRTLMTNTLMKDQPTLAVTFVDNHDTEPGQALQSWVDPWFKPLAYAFILTRQEGYPCVFYGDYYGIPQYNIPSLKSKIDPLLIARRDYAYGTQHDYLDHSDIIGWTREGVTEKPGSGLAALITDGPGGSKWMYVGKQHAGKVFYDLTGNRSDTVTINSDGWGEFKVNGGSVSVWVPRK

SEQ ID NO: 18633 - protein, 481 aa, Geobacillus stearothermophilus
AAPFNGTMMQYFEWYLPDDGTLWTKVANEANNLSSLGITALWLPPAYKGTSRSDVGYGVYDLYDLGEFNQKGTVRTKYGTKAQYLQAIQAAHAAGMQVYADVVFDHKGGADGTEWVDAVEVNPSDRNQEISGTYQIQAWTKFDFPGRGNTYSSFKWRWYHFDGVDWDESRKLSRIYKFRGKAWDWEVDTEFGNYDYLMYADLDMDHPEVVTELKNWGKWYVNTTNIDGFRLDAVKHIKFSFFPDWLSYVRSQTGKPLFTVGEYWSYDINKLHNYITKTDGTMSLFDAPLHNKFYTASKSGGAFDMRTLMTNTLMKDQPTLAVTFVDNHDTEPGQALQSWVDPWFKPLAYAFILTRQEGYPCVFYGDYYGIPQYNIPSLKSKIDPLLIARRDYAYGTQHDYLDHSDIIGWTREGGTEKPGSGLAALITDGPGGSKWMYVGKQHAGKVFYDLTGNRSDTVTINSDGWGEFKVNGGSVSVWVPR

SEQ ID NO: 18634 - protein, 483 aa, Synthetic construct
AAPFNGTMMQYFEWYLPDDGTLWTKVANEANNLSSLGITALWLPPAYKGTSRSDVGYGVYDLYDLGEFNQKGAVRTKYGTKAQYLQAIQAAHAAGMQVYADVVFNHKAGADGTEFVDAVEVNPSNRNQETSGTYQIQAWTKFDFPGRGNTYSSFKWRWYHFDGTDWDESRKLNRVYKFRGTGKAWDWEVDTENGNYDYLMFADLDMDHPEVVTELKNWGKWYVNTTNIDGFRLDAVKHIKFSFFPDWLSYVRSQTGKPLFTVGEYWSYDINKLHNYIMKTNGTMSLFDAPLHNKFYTASKSGGTFDMRTLMTNTLMKDQPTLAVTFVDNHDTEPGQALQSWVDPWFKPLAYAFILTRQEGYPCVFYGDYYGIPQYNIPSLKSKIDPLLIARRDYAYGTQHDYLDHSDIIGWTREGVTEKPGSGLAALITDGPGGSKWMYVGKQHAGKVFYDLTGNRSDTVTINSDGWGEFKVNGGSVSVWVPR

SEQ ID NO: 18635 - protein, 515 aa, Geobacillus stearothermophilus
AAPFNGTMMQYFEWYLPDNGTLWTKVAKEANNLSSLGITALWLPPAYKGTSRSDVGYGVYDLYDLGEFNQKGTVRTKYGTKAQYLRAIQAAHAAGMRVYADVVFDHKGGADGTEWVDAVEVNPSDRNQEISGTYQIQAWTKFDFPGRGNTYSSFKWRWYHFDGVDWDESRKLSRIYKFRGIGKAWDWEVDTENGNYDYLMYADLDMDHPEVVTELKNWGKWYVKTTNIDGFRLDAVKHIKFSFFPDWLSYVRSQTGKPLFTVGEYWSYDIKKLHNYITKTKGTMSLFDAPLHNKFYTASKSGGAFNMRTLMTNTLMKNRPTLAVTFVDNHDTEPGQALQSWVDPWFKPLAYAFILTREEGYPCVFYGDYYGIPQYNIPSLKSKIDPLLIARRNYAYGTQHDYLDHSDIIGWTREGVTEKPGSGLAALITDGPGGSKWMYVGKEHAGKVFYDLTGNRSNTVTINSDGWGEFKVNGGSVSVWVPRKTTVSTIARPITTRPWTGEFVRWTEPRLVAWP

SEQ ID NO: 18636 - protein, 504 aa, Geobacillus stearothermophilus
LLAFLLTASLFCPTGQEAKAAAPFNGTMMQYFEWYLPDDGTLWTKVANEANNLSSLGITALWLPPAYKGTSRSDVGYGVYDLYDLGEFNQKGTVRTKYGTKAQYLQAIQAAHAAGMQVYADVVFDHKGGADGTEWVDAVEVNPSDRNQEISGTYQIQAWTKFDFPGRGNTYSSFKWRWYHFDGVDWDESRKLSRIYKFIGKAWDWEVDTENGNYDYLMYADLDMDHPEVVTELKNWGKWYVNTTNIDGFRLDAVKHIKFSFFPDWLSYVRSQTGKPLFTVGEYWSYDINKLHNYITKTNGTMSLFDAPLHNKFYTASKSGGAFDMRTLMTNTLMKDQPTLAVTFVDNHDTEPGQALQSWVDPWFKPLAYAFILTRQEGYPCVFYGDYYGIPQYNIPSLKSKIDPLLIARRDYAYGTQHDYLDHSDIIGWTREGVTEKPGSGLAALITDGPGGSKWMYVGKQHAGKVFYDLTGNRSDTVTINSDGWGEFKVNGGSVSVWVPRKTT

SEQ ID NO: 18637 - protein, 491 aa, Geobacillus stearothermophilus
AAPFNGTMMQYFEWYLPDDGTLWTKVANEANNLSSLGITALWLPPAYKGTSRSDVGYGAYDLYDLGEFNQKGTVRTKYGTKAQYLQAIQAAHAAGMQVYADVVFDHKGGADGTEWVDAVEVNPSDRNQVISGTYQIQAWTKFDFPGRGNTYSSFKWRWYHFDGVDWDESRKLSRIYLFEGKAWDWEVDTEFGNYDYLMYADLDMDYPEVVTELKNWGPWYVLTTNIDGFRLDAVKHIKFQFFPDWLSYVRSSTGKPLFTVGEYWSYDINKLHNYITKTNGTMSLFDAPLHNKFYTASKSGGAFDMRTLMTNTLMKDQPTLAVTFVDNHDTEPGQALQSWVDPWFKPLAYAFILTRQEGYPCVFYGDYYGIPQYNIPSLKSKIDPLLIARRDYAYGTQHDYLDHSDIIGWTREGVTEKPGSGLAALITDGPGGSKWMYVGKQHAGKVFYDLTGNRSDTVTINSDGWGEFKVNGGSVSVWVPRKTTVSTIARP

SEQ ID NO: 18638 - protein, 491 aa, Geobacillus stearothermophilus
AAPFNGTMMQYFEWYLPDDGTLWTKVANEANNLSSLGITALWLPPAYKGTSRSDVGYGVYDLYDLGEFNQKGTVRTKYGTKAQYLQAIQAAHAAGMQVYADVVFDHKGGADGTEWVDAVEVNPSDRNQEISGTYQIQAWTKFDFPGRGNTYSSFKWRWYHFDGVDWDESRKLSRIYKFRGKAWDWEVDTEFGNYDYLMYADLDMDHPEVVTELKNWGPWYVLTTNIDGFRLDAVKHIKFQFFPDWLSYVRSSTGKPLFTVGEYWSYDINKLHNYITKTDGTMSLFDAPLHNKFYTASKSGGAFDMRTLMTNTLMKDQPTLAVTFVDNHDTEPGQALQSWVDPWFKPLAYAFILTRQEGYPCVFYGDYYGIPQYNIPSLKSKIDPLLIARRDYAYGTQHDYLDHSDIIGWTREGGTEKPGSGLAALITDGPGGSKWMYVGKQHAGKVFYDLTGNRSDTVTINSDGWGEFKVNGGSVSVWVPRKTTVSTIARP

SEQ ID NO: 18639 - protein, 491 aa, Geobacillus stearothermophilus
AAPFNGTMMQYFEWYLPDDGTLWTKVANEANNLSSLGITALWLPPAYKGTSRSDVGYGAYDLYDLGEFNQKGTVRTKYGTKAQYLQAIRAAHAAGMQVYADVVFDHKGGADGTEWVDAVEVNPSDRNQVISGTYQIQAWTKFDFPGRGNTYSSFKWRWYHFDGVNWDESRKLSRIYLFEGKAWDWEVDTEFGNYDYLMYADLDMDYPEVVTELKNWGPWYVLTTNIDGFRLDAVKHIKFSFFPDWLSYVRSSTGKPLFTVGEYWSYDINKLHNYITKTDGTMSLFDAPLHNKFYTASKSGGAFDMRTLMTNTLMKDQPTLAVTFVDNHDTEPGQALQSWVDPWFKPLAYAFILTRQEGYPCVFYGDYYGIPQYNIPSLKSKIDPLLIARRDYAYGTQHDYLDHSDIIGWTREGGTEKPGSGLAALITDGPGGSKWMYVGKQHAGKVFYDLTGNRSDTVTINSDGWGEFKVNGGSVSVWVPRKTTVSTIARP

SEQ ID NO: 18640 - protein, 491 aa, Geobacillus stearothermophilus
AAPFNGTMMQYFEWYLPDDGTLWTKVANEANNLSSLGITALWLPPAYKGTSRSDVGYGVYDLYDLGEFNQKGTVRTKYGTKAQYLQAIQAAHAAGMQVYADVVFDHKGGADGTEWVDAVEVNPSDRNQVISGTYQIQAWTKFDFPGRGNTYSSFKWRWYHFDGVDWDESRKLSRIYLFEGKAWDWEVDTEFGNYDYLMYADLDMDHPEVVTELKNWGPWYVLTTNIDGFRLDAVKHIKFQFFPDWLSYVRSSTGKPLFTVGEYWSYDINKLHNFITKTDGTMSLFDAPLHNKFYTASKSGGAFDMRTLMTNTLMKDQPTLAVTFVDNHDTEPGQALQSWVDPWFKPLAYAFILTRQEGYPCVFYGDYYGIPQYNIPSLKSKIDPLLIARRDYAYGTQHDYLDHSDIIGWTREGGTEKPGSGLAAMITDGPGGSKWMYVGKQHAGKVFYDLTGNRSDTVTINSDGWGEFKVNGGSVSVWVPRKTTVSTIARP

SEQ ID NO: 18641 - protein, 491 aa, Geobacillus stearothermophilus
AAPFNGTMMQYFEWYLPDDGTLWTKVANEANNLSSLGITALWLPPAYKGTSRSDVGYGAYDLYDLGEFNQKGTVRTKYGTKAQYLQAIQAAHAAGMQVYADVVFDHKGGADGTEWVDAVEVNPSDRNQVISGTYQIQAWTKFDFPGRGNTYSSFKWRWYHFDGVDWDESRKLSRIYLFEGKAWDWEVDTEFGNYDYLMYADLDMDHPEVVTELKNWGPWYVLTTNIDGFRLDAVKHIKFQFFPDWLSYVRSSTGKPLFTVGEYWSYDINKLKNYITKTNGTMSLFDAPLHNKFYTASKSGGAFDMRTLMTNTLMKDQPTLAVTFVDNHDTEPGQALQSWVDPWFKPLAYAFILTRQEGYPCVFYGDYYGIPQYNIPSLKSKIDPLLIARRDYAYGTQHDYLDHSDIIGWTREGVTEKPGSGLAALITDGPGGSKWMYVGKQHAGKVFYDLTGNRSDTVTINSDGWGEFKVNGGSVSVWVPRKTTVSTIARP

SEQ ID NO: 18642 - protein, 491 aa, Geobacillus stearothermophilus
AAPFNGTMMQYFEWYLPDDGTLWTKVANEANNLSSLGITALWLPPAYKGTSRSDVGYGVYDLYDLGEFNQKGTVRTKYGTKAQYLQAIQAAHAAGMQVYADVVFDHKGGADGTEWVDAVEVNPSDRNQEISGTYQIQAWTKFDFPGRGNTYSSFKWRWYHFDGVDWDESRKLSRIYKFRGKAWDWEVDTEFGNYDYLMYADLDMDHPEVVTELKNWGPWYVLTTNIDGFRLDAVKHIKFSFFPDWLSYVRSSTGKPLFTVGEYWSYDINKLHNYITKTDGTMSLFDAPLHNKFYTASKSGGAFDMRTLMTNTLMKDQPTLAVTFVDNHDTEPGQALQSWVDPWFKPLAYAFILTRQEGYPCVFYGDYYGIPQYNIPSLKSKIDPLLIARRDYAYGTQHDYLDHSDIIGWTREGGTEKPGSGLAALITDGPGGSKWMYVGKQHAGKVFYDLTGNRSDTVTINSDGWGEFKVNGGSVSVWVPRKTTVSTIARP

SEQ ID NO: 18643 - protein, 491 aa, Geobacillus stearothermophilus
AAPFNGTMMQYFEWYLPDDGTLWTKVANEANNLSSLGITALWLPPAYKGTSRSDVGYGAYDLYDLGEFNQKGTVRTKYGTKAQYLQAIRAAHAAGMQVYADVVFDHKGGADGTEWVDAVEVNPSDRNQVISGTYQIQAWTKFDFPGRGNTYSSFKWRWYHFDGVDWDESRKLSRIYLFEGKAWDWEVDTEFGNYDYLMYADLDMDHPEVVTELKNWGPWYVLTTNIDGFRLDAVKHIKFSFFPDWLSYVRSSTGKPLFTVGEYWSYEINKLHNYITKTNGTMSLFDAPLHNKFYTASKSGGAFDMRTLMTNTLMKDQPTLAVTFVDNHDTEPGQALQSWVDPWFKPLAYAFILTRQEGYPCVFYGDYYGIPQYNIPSLKSKIDPLLIARRDYAYGTQHDYLDHSDIIGWTREGGTEKPGSGLAALITDGPGGSKWMYVGKQHAGKVFYDLTGNRSDTVTINSDGWGEFKVNGGSVSVWVPRKTTVSTIARP

SEQ ID NO: 18644 - protein, 491 aa, Geobacillus stearothermophilus
AAPFNGTMMQYFEWYLPDDGTLWTKVANEANNLSSLGITALWLPPAYKGTSRSDVGYGVYDLYDLGEFNQKGTVRTKYGTKAQYLQAIQALHAAGIQVYADVVFDHKGGADGTEWVDAVEVNPSDRNQVISGTYQIQAWTKFDFPGRGNTYSSFKWRWYHFDGVDWDESRKLSRIYLFEGKAWDWEVDTEFGNYDYLMYADLDMDHPEVVTELKNWGPWYVLTTNIDGFRLDAVKHIKFQFFPDWLSYVRSSTGKPLFTVGEYWSYDINKLHNYITKTDGTMSLFDAPLHNKFYTASKSGGAFDMRTLMTNTLMKDQPTLAVTFVDNHDTEPGQALQSWVDPWFKPLAYAFILTRQEGYPCVFYGDYYGIPQYNIPSLKSKIDPLLIARRDYAYGTQHDYLDHSDIIGWTREGGTEKPGSGLAALITDGPGGSKWMYVGKQHAGKVFYDLTGNRSDTVTINSDGWGEFKVNGGSVSVWVPRKTTVSTIARP

SEQ ID NO: 18645 - protein, 491 aa, Geobacillus stearothermophilus
AAPFNGTMMQYFEWYLPDDGTLWTKVANEANNLSSLGITALWLPPAYKGTSRSDVGYGAYDLYDLGEFNQKGTVRTKYGTKAQYLQAIQAAHAAGMQVYADVVFDHKGGADGTEWVDAVEVNPSDRNQEISGTYQIQAWTKFDFPGRGNTYSSFKWRWYHFDGVDWDESRKLSRIYKFRGKAWDWEVDTEFGNYDYLMYADLDMDHPEVVTELKNWGKWYVNTTNIDGFRLDAVKHIKFSFFPDWLSYVRSQTGKPLFTVGEYWSYDINKLHNYITKTNGTMSLFDAPLHNKFYTASKSGGAFDMRTLMTNTLMKDQPTLAVTFVDNHDTEPGQALQSWVDPWFKPLAYAFILTRQEGYPCVFYGDYYGIPQYNIPSLKSKIDPLLIARRDYAYGTQHDYLDHSDIIGWTREGVTEKPGSGLAALITDGPGGSKWMYVGKQHAGKVFYDLTGNRSDTVTINSDGWGEFKVNGGSVSVWVPRKTTVSTIARP

SEQ ID NO: 18646 - protein, 491 aa, Geobacillus stearothermophilus
AAPFNGTMMQYFEWYLPDDGTLWTKVANEANNLSSLGITALWLPPAYKGTSRSDVGYGVYDLYDLGEFNQKGTVRTKYGTKAQYLQAIQAAHAAGMQVYADVVFDHKAGADGTEWVDAVEVNPSDRNQEISGTYQIQAWTKFDFPGRGNTYSSFKWRWYHFDGVDWDESRKLSRIYKFRGKAWDWEVDTEFGNYDYLMYADLDMDHPEVVTELKNWGKWYVNTTNIDGFRLDAVKHIKFSFFPDWLSYVRSQTGKPLFTVGEYWSYDINKLHNYITKTDGTMSLFDAPLHNKFYTASKSGGAFDMRTLMTNTLMKDQPTLAVTFVDNHDTEPGQALQSWVDPWFKPLAYAFILTRQEGYPCVFYGDYYGIPQYNIPSLKSKIDPLLIARRDYAYGTQHDYLDHSDIIGWTREGGTEKPGSGLAALITDGPGGSKWMYVGKQHAGKVFYDLTGNRSDTVTINSDGWGEFKVNGGSVSVWVPRKTTVSTIARP

SEQ ID NO: 18647 - protein, 491 aa, Geobacillus stearothermophilus
AAPFNGTMMQYFEWYLPDDGTLWTKVANEANNLSSLGITALWLPPAYKGTSRSDVGYGVYDLYDLGEFNQKGTVRTKYGTKAQYLQAIQAAHAAGMQVYADVVFDHKGGADGTEWVDAVEVNPSDRNQVISGTYQIQAWTKFDFPGRGNTYSSFKWRWYHFDGVDWDESRKLSRIYLFVGKAWDWEVDTEFGNYDYLMYADLDMDHPEVVTELKNWGPWYVLTTNIDGFRLDAVKHIKFQFFPDWLSYVRSSTGKPLFTVGEYWSYDINKLHNYITKTNGTMSLFDAPLHNKFYTASKSGGAFDMRTLMTNTLMKDQPTLAVTFVDNHDTEPGQALQSWVDPWFKPLAYAFILTRQEGYPCVFYGDYYGIPQYNIPSLKSKIDPLLIARRDYAYGTQHDYLDHSDIIGWTREGVTEKPGSGLAALITDGPGGSKWMYVGKQHAGKVFYDLTGNRSDTVTINSDGWGEFKVNGGSVSVWVPRKTTVSTIARP

SEQ ID NO: 18648 - protein, 491 aa, Geobacillus stearothermophilus
AAPFNGTMMQYFEWYLPDDGTLWTKVANEANNLSSLGITALWLPPAYKGTSRSDVGYGAYDLYDLGEFNQKGTVRTKYGTKAQYLQAIQAAHAAGMQVYADVVFDHKGGADGTEWVDAVEVNPSDRNQVISGTYQIQAWTKFDFPGRGNTYSSFKWYWYHFDGVDWDESRKLSRIYLFEGKAWDWEVDTEFGNYDYLMYADLDMDHPEVVTELKNWGPWYVLTTNIDGFRLDAVKHIKFQFFPDWLSYVRSSTGKPLFTVGEYWSYDINKLHNYITKTNGTMSLFDAPLHNKFYTASKSGGAFDMRTLMTNTLMKDQPTLAVTFVDNHDTEPGQALQSWVDPWFKPLAYAFILTRQEGYPCVFYGDYYGIPQYNIPSLKSKIDPLLIARRDYAYGTQHDYLDHSDIIGWTREGVTEKPGSGLAALITDGPGGSKWMYVGKQHAGKVFYDLTGNRSDTVTINSDGWGEFKVNGGSVSVWVPRKTTVSTIARP

SEQ ID NO: 18649 - protein, 491 aa, unidentified
AAPFNGTMMQYFEWYLPDDGTLWTKVANEANNLSSLGITALWLPPAYKGTSRSDVGYGVYDLYDLGEFNQKGTVRTKYGTKAQYLQAIQAAHAAGMQVYADVVFDHKGGADGTEWVDAVEVNPSDRNQEISGTYQIQAWTKFDFPGRGNTYSSFKWRWYHFDGVDWDESRKLSRIYKFRGKAWDWEVDTEFGNYDYLMYADLDMDHPEVVTELKNWGKWYVNTTNIDGFRLDAVKHIKFQFFPDWLSYVRSQTGKPLFTVGEYWSYDINKLHNYITKTDGTMSLFDAPLHNKFYTASKSGGAFDMRTLMTNTLMKDQPTLAVTFVDNHDTEPVQALQSWVDPWFKPLAYAFILTRQEGYPCVFYGDYYGIPQYNIPSLKSKIDPLLIARRDYAYGTQHDYLDHSDIIGWTREGGTEKPGSGLAALITDGPGGSKWMYVGKQHAGKVFYDLTGNRSDTVTINSDGWGEFKVNGGSVSVWVPRKTTVSTIARP

SEQ ID NO: 18650 - protein, 491 aa, Geobacillus stearothermophilus
AAPFNGTMMQYFEWYLPDDGTLWTKVANEANNLSSLGITALWLPPAYKGTSRSDVGYGVYDLYDLGEFNQKGTVRTKYGTKAQYLQAIQAAHAAGMQVYADVVFDHKGGADGTEWVDAVEVNPSDRNQVISGTYQIQAWTKFDFPGRGNTYSSFKWRWYHFDGVDWDESRKLSRIYLFEGKAWDWEVDTEFGNYDYLMYADLDMDHPEVVTELKNWGPWYVLTTNIDGFRLDAVKHIKFQFFPDWLSYVRSSTGKPLFTVGEYWSYDINKLHNYITKTNGTMSLFDAPLHNKFYTASKSGGAFDMRTLMTNTLMKDQPTLAVTFVDNHDTEPGQALQSWVDPWFKPLAYAFILTRQEGYPCVFYGDYYGIPQYNIPSLKSKIDPLLIARRDYAYGTQHDYLDHSDIIGWTREGVTEKPGSGLAALITDGPGGSKWMYVGKQHAGKVFYDLTGNRSDTVTINSDGWGEFKVNGGSVSVWVPRKTTVSTIARP

SEQ ID NO: 18651 - protein, 491 aa, Geobacillus stearothermophilus
AAPFNGTMMQYFEWYLPDDGTLWTKVANEANNLSSLGITALWLPPAYKGTSRSDVGYGVYDLYDLGEFNQKGTVRTKYGTKAQYLQAIQAAHAAGMQVYADVVFDHKGGADGTEWVDAVEVNPSDRNQVISGTYQIQAWTKFDFPGRGNTYSSFKWRWYHFDGVDWDESRKLSRIYLFEGKAWDWEVDTEFGNYDYLMYADLDMDHPEVVTELKNWGPWYVLTTNIDGFRLDAVKHIKFSFFPDWLSYVRSSTGKPLFTVGEYWSYDINKLHNYITKTNGTTSLFDAPLHNKFYTASKSGGAFDMRTLMTNTLMKDQPTLAVTFVDNHDTEPGQALQSWVDPWFKPLAYAFILTRQEGYPCVFYGDYYGIPQYNIPSLKSKIDPLLIARRDYAYGTQHDYLDHSDIIGWTREGVTEKPGSGLAALITDGPGGSKWMYVGKQHAGKVFYDLTGNRSDTVTINSDGWGEFKVNGGSVSVWVPRKTTVSTIARP

SEQ ID NO: 18652 - protein, 491 aa, Geobacillus stearothermophilus
AAPFNGTMMQYFEWYLPDDGTLWTKVANEANNLSSLGITALWLPPAYKGTSRSDVGYGVYDLYDLGEFNQKGTVRTKYGTKAQYLQAIQAAHAAGMQVYADVVFDHKGGADGTEWVDAVEVNPSDRNQVISGTYQIQAWTKFDFPGRGNTYSSFKWRWYHFDGVDWDESRKLSRIYLFEGKAWDWEVDTEFGNYDYLMYADLDMDHPEVVTELKNWGPWYVLTTNIDGFRLDAVKHIKFSFFPDWLSYVRSSTGKPLFTVGEYWSYDINKLHNYITKTNGTMSLFDAPLHNKFYTASKSGGAFDMRTLMTNTLMKDQPTLAVTFVDNHDTEPGQALQSWVDPWFKPLAYAFILTRQEGYPCVFYGDYYGIPQYNIPSLKSKIDPLLIARRDYAYGTQHDYLDHSDIIGWTREGVTEKPGSGLAALITDGPGGSKWMYVGKQHAGKVFYDLTGNRSDTVTINSDGWGEFKVNGGSVSVWVPRKTTVSTIARP

SEQ ID NO: 18653 - protein, 491 aa, Geobacillus stearothermophilus
AAPFNGTMMQYFEWYLPDDGTLWTKVANEANNLSSLGITALWLPPAYKGTSRSDVGYGVYDLYDLGEFNQKGTVRTKYGTKAQYLQAIQAAHAAGMQVYADVVFDHKGGADGTEWVDAVEVNPSDRNQVISGTYQIQAWTKFDFPGRGNTYSSFKWRWYHFDGVDWDESRKLSRIYLFEGKAWDWEVDTEFGNYDYLMYADLDMDHPEVVTELKNWGPWYVLTTNIDGFRLDAVKHIKFQFFPDWLSYVRSSTGKPLFTVGEYWSYDINKLHNYITKTNGTTSLFDAPLHNKFYTASKSGGAFDMRTLMTNTLMKDQPTLAVTFVDNHDTEPGQALQSWVDPWFKPLAYAFILTRQEGYPCVFYGDYYGIPQYNIPSLKSKIDPLLIARRDYAYGTQHDYLDHSDIIGWTREGVTEKPGSGLAALITDGPGGSKWMYVGKQHAGKVFYDLTGNRSDTVTINSDGWGEFKVNGGSVSVWVPRKTTVSTIARP

SEQ ID NO: 18654 - protein, 491 aa, Geobacillus stearothermophilus
AAPFNGTMMQYFEWYLPDDGTLWTKVANEANNLSSLGITALWLPPAYKGTSRSDVGYGAYDLYDLGEFNQKGTVRTKYGTKAQYLQAIQAAHAAGMQVYADVVFDHKGGADGTEWVDAVEVNPSDRNQVISGTYQIQAWTKFDFPGRGNTYSSFKWRWYHFDGVDWDESRKLSRIYLFEGKAWDWEVDTEFGNYDYLMYADLDMDHPEVVTELKNWGPWYVLTTNIDGFRLDAVKHIKFQFFPDWLSYVRSSTGKPLFTVGEYWSYDINKLHNFITKTNGTMSLFDAPLHNKFYTASKSGGAFDMRTLMTNTLMKDQPTLAVTFVDNHDTEPGQALQSWVDPWFKPLAYAFILTRQEGYPCVFYGDYYGIPQYNIPSLKSKIDPLLIARRDYAYGTQHDYLDHSDIIGWTREGVTEKPGSGLAALITDGPGGSKWMYVGKQHAGKVFYDLTGNRSDTVTINSDGWGEFKVNGGSVSVWVPRKTTVSTIARP

SEQ ID NO: 18655 - protein, 491 aa, Geobacillus stearothermophilus
AAPFNGTMMQYFEWYLPDDGTLWTKVANEANNLSSLGITALWLPPAYKGTSRSDVGYGVYDLYDLGEFNQKGTVRTKYGTKAQYLQAIQAAHAAGMQVYADVVFDHKGGADGTEWVDAVEVNPSDRNQEISGTYQIQAWTKFDFPGRGNTYSSFKWRWYHFDGVDWDESRKLSRIYKFRGKAWDWEVDTEFGNYDYLMYADLDMDHPEVVTELKNWGKWYVNTTNIDGFRLDAVKHIKFSFFPDWLSYVRSQTGKPLFTVGEYWSYDINKLHNYITKTNGTVSLFDAPLHNKFYTASKSGGAFDMRTLMTNTLMKDQPTLAVTFVDNHDTEPGQALQSWVDPWFKPLAYAFILTRQEGYPCVFYGDYYGIPQYNIPSLKSKIDPLLIARRDYAYGTQHDYLDHSDIIGWTREGVTEKPGSGLAALITDGPGGSKWMYVGKQHAGKVFYDLTGNRSDTVTINSDGWGEFKVNGGSVSVWVPRKTTVSTIARP

SEQ ID NO: 18656 - protein, 491 aa, Geobacillus stearothermophilus
AAPFNGTMMQYFEWYLPDDGTLWTKVANEANNLSSLGITALWLPPAYKGTSRSDVGYGVYDLYDLGEFNQKGTVRTKYGTKAQYLQAIQAAHAAGMQVYADVVFDHKGGADGTEWVDAVEVNPSDRNQEISGTYQIQAWTKFDFPGRGNTYSSFKWRWYHFDGVDWDESRKLSRIYKFRGKAWDWEVDTEFGNYDYLMYADLDMDHPEVVTELKNWGKWYVNTTNIDGFRLDAVKHIKFSFFPDWLSYVRSQTGKPLFTVGEYWSYDINKLHNYITKTNGTMSLFDAPLHNKFYTASKSGGAFDMRTLMTNTLMKDQPTLAVTFVDNHDTEPGQALQSWVDPWFKPLAYAFILTRQEGYPCVFYGDYYGIPQYNIPSLKSKIDPLLIARRDYAYGTQHDYLDHSDIIGWTREGGTEKPGSGLAALITDGPGGSKWMYVGKQHAGKVFYDLTGNRSDTVTINSDGWGEFKVNGGSVSVWVPRKTTVSTIARP

SEQ ID NO: 18657 - protein, 493 aa, Geobacillus stearothermophilus
AAPFNGTMMQYFEWYLPDDGTLWTKVANEANNLSSLGITALWLPPAYKGTSRSDVGYGVYDLYDLGEFNQKGTVRTKYGTKAQYLQAIQAAHAAGMQVYADVVFDHKGGADGTEWVDAVEVNPSDRNQVISGTYQIQAWTKFDFPGRGNTYSSFKWRWYHFDGVDWDESRKLSRIYLFEGIGKAWDWEVDTENGNYDYLMYADLDMDHPEVVTELKNWGKWYVNTTNIDGFRLDAVKHIKFSFFPDWLSYVRSQTGKPLFTVGEYWSYDINKLHNYITKTNGTMSLFDAPLHNKFYTASKSGGAFDMRTLMTNTLMKDQPTLAVTFVDNHDTEPGQALQSWVDPWFKPLAYAFILTRQEGYPCVFYGDYYGIPQYNIPSLKSKIDPLLIARRDYAYGTQHDYLDHSDIIGWTREGVTEKPGSGLAALITDGPGGSKWMYVGKQHAGKVFYDLTGNRSDTVTINSDGWGEFKVNGGSVSVWVPRKTTVSTIARP

SEQ ID NO: 18658 - protein, 493 aa, Geobacillus stearothermophilus
AAPFNGTMMQYFEWYLPDDGTLWTKVANEANNLSSLGITALWLPPAYKGTSRSDVGYGVYDLYDLGEFNQKGTVRTKYGTKAQYLQAIQAAHAAGMQVYADVVFDHKGGADGTEWVDAVEVNPSDRNQVISGTYQIQAWTKFDFPGRGNTYSSFKWRWYHFDGVDWDESRKLSRIYLFVGIGKAWDWEVDTENGNYDYLMYADLDMDHPEVVTELKNWGKWYVNTTNIDGFRLDAVKHIKFSFFPDWLSYVRSQTGKPLFTVGEYWSYDINKLHNYITKTNGTMSLFDAPLHNKFYTASKSGGAFDMRTLMTNTLMKDQPTLAVTFVDNHDTEPGQALQSWVDPWFKPLAYAFILTRQEGYPCVFYGDYYGIPQYNIPSLKSKIDPLLIARRDYAYGTQHDYLDHSDIIGWTREGVTEKPGSGLAALITDGPGGSKWMYVGKQHAGKVFYDLTGNRSDTVTINSDGWGEFKVNGGSVSVWVPRKTTVSTIARP

SEQ ID NO: 18659 - protein, 493 aa, Geobacillus stearothermophilus
AAPFNGTMMQYFEWYLPDDGTLWTKVANEANNLSSLGITALWLPPAYKGTSRSDVGYGAYDLYDLGEFNQKGTVRTKYGTKAQYLQAIQAAHAAGMQVYADVVFDHKGGADGTEWVDAVEVNPSDRNQVISGTYQIQAWTKFDFPGRGNTYSSFKWRWYHFDGVDWDESRKLSRIYLFEGIGKAWDWEVDTENGNYDYLMYADLDMDHPEVVTELKNWGPWYVLTTNIDGFRLDAVKHIKFSFFPDWLSYVRSSTGKPLFTVGEYWSYDINKLHNYITKTNGTMSLFDAPLHNKFYTASKSGGAFDMRTLMTNTLMKDQPTLAVTFVDNHDTEPGQALQSWVDPWFKPLAYAFILTRQEGYPCVFYGDYYGIPQYNIPSLKSKIDPLLIARRDYAYGTQHDYLDHSDIIGWTREGVTEKPGSGLAALITDGPGGSKWMYVGKQHAGKVFYDLTGNRSDTVTINSDGWGEFKVNGGSVSVWVPRKTTVSTIARP

SEQ ID NO: 18660 - protein, 493 aa, Geobacillus stearothermophilus
AAPFNGTMMQYFEWYLPDDGTLWTKVANEANNLSSLGITALWLPPAYKGTSRSDVGYGAYDLYDLGEFNQKGTVRTKYGTKAQYLQAIQAAHAAGMQVYADVVFDHKGGADGTEWVDAVEVNPSDRNQVISGTYQIQAWTKFDFPGRGNTYSSFKWRWYHFDGVDWDESRKLSRIYLFEGIGKAWDWEVDTENGNYDYLMYADLDMDHPEVVTELKNWGPWYVLTTNIDGFRLDAVKHIKFSFFPDWLSYVRSSTGKPLFTVGEYWSYDINKLHNYITKTNGTTSLFDAPLHNKFYTASKSGGAFDMRTLMTNTLMKDQPTLAVTFVDNHDTEPGQALQSWVDPWFKPLAYAFILTRQEGYPCVFYGDYYGIPQYNIPSLKSKIDPLLIARRDYAYGTQHDYLDHSDIIGWTREGVTEKPGSGLAALITDGPGGSKWMYVGKQHAGKVFYDLTGNRSDTVTINSDGWGEFKVNGGSVSVWVPRKTTVSTIARP

SEQ ID NO: 18661 - protein, 493 aa, Geobacillus stearothermophilus
AAPFNGTMMQYFEWYLPDDGTLWTKVANEANNLSSLGITALWLPPAYKGTSRSDVGYGVYDLYDLGEFNQKGTVRTKYGTKAQYLQAIQAAHAAGMQVYADVVFDHKGGADGTEWVDAVEVNPSDRNQEISGTYQIQAWTKFDFPGRGNTYSSFKWRWYHFDGVDWDESRKLSRIYKFRGIGKAWDWEVDTENGNYDYLMYADLDMDHPEVVTELKNWGKWYVNTTNIDGFRLDAVKHIKFSFFPDWLSYVRSQTGKPLFTVGEYWSYDINKLHNYITKTDGTMSLFDAPLHNKFYTASKSGGAFDMRTLMTNTLMKDQPTLAVTFVDNHDTEPGQALQSWVDPWFKPLAYAFILTRQEGYPCVFYGDYYGIPQYNIPSLKSKIDPLLIARRDYAYGTQHDYLDHSDIIGWTREGGTEKPGSGLAALITDGPGGSKWMYVGKQHAGKVFYDLTGNRSDTVTINSDGWGEFKVNGGSVSVWVPRKTTVSTIARP

SEQ ID NO: 18662 - protein, 493 aa, Geobacillus stearothermophilus
AAPFNGTMMQYFEWYLPDDGTLWTKVANEANNLSSLGITALWLPPAYKGTSRSDVGYGAYDLYDLGEFNQKGTVRTKYGTKAQYLQAIQAAHAAGMQVYADVVFDHKGGADGTEWVDAVEVNPSDRNQVISGTYQIQAWTKFDFPGRGNTYSSFKWRWYHFDGVDWDESRKLSRIYLFEGIGKAWDWEVDTENGNYDYLMYADLDMDHPEVVTELKNWGPWYVLTTNIDGFRLDAVKHIKFQFFPDWLSYVRSSTGKPLFTVGEYWSYDINKLHNYITKTNGTMSLFDAPLHNKFYTASKSGGAFDMRTLMTNTLMKDQPTLAVTFVDNHDTEPGQALQSWVDPWFKPLAYAFILTRQEGYPCVFYGDYYGIPQYNIPSLKSKIDPLLIARRDYAYGTQHDYLDHSDIIGWTREGVTEKPGSGLAALITDGPGGSKWMYVGKQHAGKVFYDLTGNRSDTVTINSDGWGEFKVNGGSVSVWVPRKTTVSTIARP

SEQ ID NO: 18663 - protein, 493 aa, Geobacillus stearothermophilus
AAPFNGTMMQYFEWYLPDDGTLWTKVANEANNLSSLGITALWLPPAYKGTSRSDVGYGAYDLYDLGEFNQKGTVRTKYGTKAQYLQAIQAAHAAGMQVYADVVFDHKGGADGTEWVDAVEVNPSDRNQVISGTYQIQAWTKFDFPGRGNTYSSFKWRWYHFDGVDWDESRKLSRIYLFEGIGKAWDWEVDTENGNYDYLMYADLDMDHPEVVTELKNWGPWYVLTTNIDGFRLDAVKHIKFQFFPDWLSYVRSSTGKPLFTVGEYWSYDINKLHNYITKTNGTTSLFDAPLHNKFYTASKSGGAFDMRTLMTNTLMKDQPTLAVTFVDNHDTEPGQALQSWVDPWFKPLAYAFILTRQEGYPCVFYGDYYGIPQYNIPSLKSKIDPLLIARRDYAYGTQHDYLDHSDIIGWTREGVTEKPGSGLAALITDGPGGSKWMYVGKQHAGKVFYDLTGNRSDTVTINSDGWGEFKVNGGSVSVWVPRKTTVSTIARP

SEQ ID NO: 18664 - protein, 493 aa, Geobacillus stearothermophilus
AAPFNGTMMQYFEWYLPDDGTLWTKVANEANNLSSLGITALWLPPAYKGTSRSDVGYGVYDLYDLGEFNQKGTVRTKYGTKAQYLQAIQAAHAAGMQVYADVVFDHKGGADGTEWVDAVEVNPSDRNQVISGTYQIQAWTKFDFPGRGNTYSSFKWRWYHFDGVDWDESRKLSRIYLFEGIGKAWDWEVDTENGNYDYLMYADLDMDHPEVVTELKNWGKWYVNTTNIDGFRLDAVKHIKFQFFPDWLSYVRSQTGKPLFTVGEYWSYDINKLHNYITKTNGTMSLFDAPLHNKFYTASKSGGAFDMRTLMTNTLMKDQPTLAVTFVDNHDTEPGQALQSWVDPWFKPLAYAFILTRQEGYPCVFYGDYYGIPQYNIPSLKSKIDPLLIARRDYAYGTQHDYLDHSDIIGWTREGVTEKPGSGLAALITDGPGGSKWMYVGKQHAGKVFYDLTGNRSDTVTINSDGWGEFKVNGGSVSVWVPRKTTVSTIARP

SEQ ID NO: 18665 - protein, 489 aa, Geobacillus stearothermophilus
AAPFNGTMMQYFEWYLPDDGTLWTKVANEANNLSSLGITALWLPPAYKGTSRSDVGYGVYDLYDLGEFNQKGTVRTKYGTKAQYLQAIQAAHAAGMQVYADVVFDHKGGADGTEWVDAVEVNPSDRNQVISGTYQIQAWTKFDFPGRGNTYSSFKWRWYHFDGVDWDESRKLSRIYLFEGKAWDWEVDTEFGNYDYLMYADLDMDHPEVVTELKNWGPWYVNTTNIDGFRLDAVKHIKFSFFPDWLSYVRSQTGKPLFTVGEYWSYDINKLHNYITKTNGTMSLFDAPLHNKFYTASKSGGAFDMRTLMTNTLMKDQPTLAVTFVDNHDTEPGQALQSWVDPWFKPLAYAFILTRQEGYPCVFYGDYYGIPQYNIPSLKSKIDPLLIARRDYAYGTQHDYLDHSDIIGWTREGVTEKPGSGLAALITDGPGGSKWMYVGKQHAGKVFYDLTGNRSDTVTINSDGWGEFKVNGGSVSVWVPRKTTVSTIA

SEQ ID NO: 18666 - protein, 489 aa, Geobacillus stearothermophilus
AAPFNGTMMQYFEWYLPDDGTLWTKVANEANNLSSLGITALWLPPAYKGTSRSDVGYGAYDLYDLGEFNQKGTVRTKYGTKAQYLQAIQAAHAAGMQVYADVVFDHKGGADGTEWVDAVEVNPSDRNQVISGTYQIQAWTKFDFPGRGNTYSSFKWRWYHFDGVDWDESRKLSRIYLFEGKAWDWEVDTEFGNYDYLMYADLDMDHPEVVTELKNWGPWYVLTTNIDGFRLDAVKHIKFQFFPDWLSYVRSSTGKPLFTVGEYWSYDINKLHNFITKTNGTMSLFDAPLHNKFYTASKSGGAFDMRTLMTNTLMKDQPTLAVTFVDNHDTEPGQALQSWVDPWFKPLAYAFILTRQEGYPCVFYGDYYGIPQYNIPSLKSKIDPLLIARRDYAYGTQHDYLDHSDIIGWTREGVTEKPGSGLAALITDGPGGSKWMYVGKQHAGKVFYDLTGNRSDTVTINSDGWGEFKVNGGSVSVWVPRKTTVSTIA

SEQ ID NO: 18667 - protein, 489 aa, Geobacillus stearothermophilus
AAPFNGTMMQYFEWYLPDDGTLWTKVANEANNLSSLGITALWLPPAYKGTSRSDVGYGVYDLYDLGEFNQKGTVRTKYGTKAQYLQAIQAAHAAGMQVYADVVFDHKGGADGTEWVDAVEVNPSDRNQVISGTYQIQAWTKFDFPGRGNTYSSFKWRWYHFDGVDWDESRKLSRIYLFEGKAWDWEVDTEFGNYDYLMYADLDMDHPEVVTELKNWGPWYVLTTNIDGFRLDAVKHIKFQFFPDWLSYVRSSTGKPLFTVGEYWSYDINKLHNYITKTNGTMSLFDAPLHNKFYTASKSGGAFDMRTLMTNTLMKDQPTLAVTFVDNHDTEPGQALQSWVDPWFKPLAYAFILTRQEGYPCVFYGDYYGIPQYPSLKSKIDPLLIARRDYAYGTQHDYLDHSDIIGWTREGVTEKPGSGLAALITDGPGGSKWMYVGKQHAGKVFYDLTGNRSDTVTINSDGWGEFKVNGGSVSVWVPRKTTVSTIARP

SEQ ID NO: 18668 - protein, 489 aa, Geobacillus stearothermophilus
AAPFNGTMMQYFEWYLPDDGTLWTKVANEANNLSSLGITALWLPPAYKGTSRSDVGYGAYDLYDLGEFNQKGTVRTKYGTKAQYLQAIQAAHAAGMQVYADVVFDHKGGADGTEWVDAVEVNPSDRNQEISGTYQIQAWTKFDFPGRGNTYSSFKWRWYHFDGVDWDESRKLSRIYKFRGKAWDWEVDTEFGNYDYLMYADLDMDHPEVVTELKNWGKWYVNTTNIDGFRLDAVKHIKFSFFPDWLSYVRSQTGKPLFTVGEYWSYDINKLHNYITKTNGTMSLFDAPLHNKFYTASKSGGAFDMRTLMTNTLMKDQPTLAVTFVDNHDTEPGQALQSWVDPWFKPLAYAFILTRQEGYPCVFYGDYYGIPQYNIPSLKSKIDPLLIARRDYAYGTQHDYLDHSDIIGWTREGVTEKPGSGLAALITDGPGGSKWMYVGKQHAGKVFYDLTGNRSDTVTINSDGWGEFKVNGGSVSVWVPRKTTVSTIA

SEQ ID NO: 18669 - protein, 489 aa, Geobacillus stearothermophilus
AAPFNGTMMQYFEWYLPDDGTLWTKVANEANNLSSLGITALWLPPAYKGTSRSDVGYGVYDLYDLGEFNQKGTVRTKYGTKAQYLQAIQAAHAAGMQVYADVVFDHKGGADGTEWVDAVEVNPSDRNQVISGTYQIQAWTKFDFPGRGNTYSSFKWRWYHFDGVDWDESRKLSRIYLFVGKAWDWEVDTEFGNYDYLMYADLDMDHPEVVTELKNWGPWYVLTTNIDGFRLDAVKHIKFQFFPDWLSYVRSSTGKPLFTVGEYWSYDINKLHNYITKTNGTMSLFDAPLHNKFYTASKSGGAFDMRTLMTNTLMKDQPTLAVTFVDNHDTEPGQALQSWVDPWFKPLAYAFILTRQEGYPCVFYGDYYGIPQYNIPSLKSKIDPLLIARRDYAYGTQHDYLDHSDIIGWTREGVTEKPGSGLAALITDGPGGSKWMYVGKQHAGKVFYDLTGNRSDTVTINSDGWGEFKVNGGSVSVWVPRKTTVSTIA

SEQ ID NO: 18670 - protein, 489 aa, Geobacillus stearothermophilus
AAPFNGTMMQYFEWYLPDDGTLWTKVANEANNLSSLGITALWLPPAYKGTSRSDVGYGAYDLYDLGEFNQKGTVRTKYGTKAQYLQAIQAAHAAGMQVYADVVFDHKGGADGTEWVDAVEVNPSDRNQVISGTYQIQAWTKFDFPGRGNTYSSFKWRWYHFDGVDWDESRKLSRIYLFEGKAWDWEVDTEFGNYDYLMYADLDMDHPEVVTELKNWGPWYVLTTNIDGFRLDAVKHIKFQFFPDWLSYVRSSTGKPLFTVGEYWSYDINKLKNYITKTNGTMSLFDAPLHNKFYTASKSGGAFDMRTLMTNTLMKDQPTLAVTFVDNHDTEPGQALQSWVDPWFKPLAYAFILTRQEGYPCVFYGDYYGIPQYNIPSLKSKIDPLLIARRDYAYGTQHDYLDHSDIIGWTREGVTEKPGSGLAALITDGPGGSKWMYVGKQHAGKVFYDLTGNRSDTVTINSDGWGEFKVNGGSVSVWVPRKTTVSTIA

SEQ ID NO: 18671 - protein, 489 aa, Geobacillus stearothermophilus
AAPFNGTMMQYFEWYLPDDGTLWTKVANEANNLSSLGITALWLPPAYKGTSRSDVGYGVYDLYDLGEFNQKGTVRTKYGTKAQYLQAIQAAHAAGMQVYADVVFDHKGGADGTEWVDAVEVNPSDRNQVISGTYQIQAWTKFDFPGRGNTYSSFKWRWYHFDGVDWDESRKLSRIYLFEGKAWDWEVDTEFGNYDYLMYADLDMDHPEVVTELKNWGPWYVLTTNIDGFRLDAVKHIKFQFFPDWLSYVRSSTGKPLFTVGEYWSYDINKLHNYITKTNGTMSLFDAPLHNKFYTASKSGGAFDMRTLMTNTLMKDQPTLAVTFVDNHDTEPGQALQSWVDPWFKPLAYAFILTRQEGYPCVFYGDYYGIPQYNIPSLKSKIDPLLIARRDYAYGTQHDYLDHSDIIGWTREGVTEKPGSGLAALITDGPGGSKWMYVGKQHAGKVFYDLTGNRSDTVTINSDGWGEFKVNGGSVSVWVPRKTTVSTIA

SEQ ID NO: 18672 - protein, 489 aa, Geobacillus stearothermophilus
AAPFNGTMMQYFEWYLPDDGTLWTKVANEANNLSSLGITALWLPPAYKGTSRSDVGYGVYDLYDLGEFNQKGTVRTKYGTKAQYLQAIQAAHAAGMQVYADVVFDHKGGADGTEWVDAVEVNPSDRNQEISGTYQIQAWTKFDFPGRGNTYSSFKWRWYHFDGVDWDESRKLSRIYKFRGKAWDWEVDTEFGNYDYLMYADLDMDHPEVVTELKNWGKWYVNTTNIDGFRLDAVKHIKFSFFPDWLSYVRSQTGKPLFTVGEYWSYDINKLHNYITKTNGTVSLFDAPLHNKFYTASKSGGAFDMRTLMTNTLMKDQPTLAVTFVDNHDTEPGQALQSWVDPWFKPLAYAFILTRQEGYPCVFYGDYYGIPQYNIPSLKSKIDPLLIARRDYAYGTQHDYLDHSDIIGWTREGVTEKPGSGLAALITDGPGGSKWMYVGKQHAGKVFYDLTGNRSDTVTINSDGWGEFKVNGGSVSVWVPRKTTVSTIA

SEQ ID NO: 18673 - protein, 489 aa, Geobacillus stearothermophilus
AAPFNGTMMQYFEWYLPDDGTLWTKVANEANNLSSLGITALWLPPAYKGTSRSDVGYGAYDLYDLGEFNQKGTVRTKYGTKAQYLQAIQAAHAAGMQVYADVVFDHKGGADGTEWVDAVEVNPSDRNQVISGTYQIQAWTKFDFPGRGNTYSSFKWYWYHFDGVDWDESRKLSRIYLFEGKAWDWEVDTEFGNYDYLMYADLDMDHPEVVTELKNWGPWYVLTTNIDGFRLDAVKHIKFQFFPDWLSYVRSSTGKPLFTVGEYWSYDINKLHNYITKTNGTMSLFDAPLHNKFYTASKSGGAFDMRTLMTNTLMKDQPTLAVTFVDNHDTEPGQALQSWVDPWFKPLAYAFILTRQEGYPCVFYGDYYGIPQYNIPSLKSKIDPLLIARRDYAYGTQHDYLDHSDIIGWTREGVTEKPGSGLAALITDGPGGSKWMYVGKQHAGKVFYDLTGNRSDTVTINSDGWGEFKVNGGSVSVWVPRKTTVSTIA

SEQ ID NO: 18674 - protein, 489 aa, Geobacillus stearothermophilus
AAPFNGTMMQYFEWYLPDDGTLWTKVANEANNLSSLGITALWLPPAYKGTSRSDVGYGVYDLYDLGEFNQKGTVRTKYGTKAQYLQAIQAAHAAGMQVYADVVFDHKGGADGTEWVDAVEVNPSDRNQVISGTYQIQAWTKFDFPGRGNTYSSFKWRWYHFDGVDWDESRKLSRIYLFEGKAWDWEVDTEFGNYDYLMYADLDMDHPEVVTELKNWGPWYVLTTNIDGFRLDAVKHIKFQFFPDWLSYVRSSTGKPLFTVGEYWSYDINKLHNYITKTNGTTSLFDAPLHNKFYTASKSGGAFDMRTLMTNTLMKDQPTLAVTFVDNHDTEPGQALQSWVDPWFKPLAYAFILTRQEGYPCVFYGDYYGIPQYNIPSLKSKIDPLLIARRDYAYGTQHDYLDHSDIIGWTREGVTEKPGSGLAALITDGPGGSKWMYVGKQHAGKVFYDLTGNRSDTVTINSDGWGEFKVNGGSVSVWVPRKTTVSTIA

SEQ ID NO: 18675 - protein, 489 aa, Geobacillus stearothermophilus
AAPFNGTMMQYFEWYLPDDGTLWTKVANEANNLSSLGITALWLPPAYKGTSRSDVGYGAYDLYDLGEFNQKGTVRTKYGTKAQYLQAIQAAHAAGMQVYADVVFDHKGGADGTEWVDAVEVNPSDRNQVISGTYQIQAWTKFDFPGRGNTYSSFKWRWYHFDGVDWDESRKLSRIYLFEGKAWDWEVDTEFGNYDYLMYADLDMDYPEVVTELKNWGPWYVLTTNIDGFRLDAVKHIKFQFFPDWLSYVRSSTGKPLFTVGEYWSYDINKLHNYITKTNGTMSLFDAPLHNKFYTASKSGGAFDMRTLMTNTLMKDQPTLAVTFVDNHDTEPGQALQSWVDPWFKPLAYAFILTRQEGYPCVFYGDYYGIPQYNIPSLKSKIDPLLIARRDYAYGTQHDYLDHSDIIGWTREGVTEKPGSGLAALITDGPGGSKWMYVGKQHAGKVFYDLTGNRSDTVTINSDGWGEFKVNGGSVSVWVPRKTTVSTIA

SEQ ID NO: 18676 - protein, 489 aa, Geobacillus stearothermophilus
AAPFNGTMMQYFEWYLPDDGTLWTKVANEANNLSSLGITALWLPPAYKGTSRSDVGYGVYDLYDLGEFNQKGTVRTKYGTKAQYLQAIQAAHAAGMQVYADVVFDHKGGADGTEWVDAVEVNPSDRNQVISGTYQIQAWTKFDFPGRGNTYSSFKWRWYHFDGVDWDESRKLSRIYLFEGKAWDWEVDTEFGNYDYLMYADLDMDHPEVVTELKNWGPWYVLTTNIDGFRLDAVKHIKFSFFPDWLSYVRSSTGKPLFTVGEYWSYDINKLHNYITKTNGTMSLFDAPLHNKFYTASKSGGAFDMRTLMTNTLMKDQPTLAVTFVDNHDTEPGQALQSWVDPWFKPLAYAFILTRQEGYPCVFYGDYYGIPQYNIPSLKSKIDPLLIARRDYAYGTQHDYLDHSDIIGWTREGVTEKPGSGLAALITDGPGGSKWMYVGKQHAGKVFYDLTGNRSDTVTINSDGWGEFKVNGGSVSVWVPRKTTVSTIA

SEQ ID NO: 18677 - protein, 489 aa, Geobacillus stearothermophilus
AAPFNGTMMQYFEWYLPDDGTLWTKVANEANNLSSLGITALWLPPAYKGTSRSDVGYGVYDLYDLGEFNQKGTVRTKYGTKAQYLQAIQAAHAAGMQVYADVVFDHKGGADGTEWVDAVEVNPSDRNQVISGTYQIQAWTKFDFPGRGNTYSSFKWRWYHFDGVDWDESRKLSRIYLFEGKAWDWEVDTEFGNYDYLMYADLDMDHPEVVTELKNWGPWYVLTTNIDGFRLDAVKHIKFSFFPDWLSYVRSSTGKPLFTVGEYWSYDINKLHNYITKTNGTTSLFDAPLHNKFYTASKSGGAFDMRTLMTNTLMKDQPTLAVTFVDNHDTEPGQALQSWVDPWFKPLAYAFILTRQEGYPCVFYGDYYGIPQYNIPSLKSKIDPLLIARRDYAYGTQHDYLDHSDIIGWTREGVTEKPGSGLAALITDGPGGSKWMYVGKQHAGKVFYDLTGNRSDTVTINSDGWGEFKVNGGSVSVWVPRKTTVSTIA

SEQ ID NO: 18678 - protein, 491 aa, Geobacillus stearothermophilus
AAPFNGTMMQYFEWYLPDDGTLWTKVANEANNLSSLGITALWLPPAYKGTSRSDVGYGVYDLYDLGEFNQKGTVRTKYGTKAQYLQAIQAAHAAGMQVYADVVFDHKGGADGTEWVDAVEVNPSDRNQVISGTYQIQAWTKFDFPGRGNTYSSFKWRWYHFDGVDWDESRKLSRIYLFVGIGKAWDWEVDTENGNYDYLMYADLDMDHPEVVTELKNWGKWYVNTTNIDGFRLDAVKHIKFSFFPDWLSYVRSQTGKPLFTVGEYWSYDINKLHNYITKTNGTMSLFDAPLHNKFYTASKSGGAFDMRTLMTNTLMKDQPTLAVTFVDNHDTEPGQALQSWVDPWFKPLAYAFILTRQEGYPCVFYGDYYGIPQYNIPSLKSKIDPLLIARRDYAYGTQHDYLDHSDIIGWTREGVTEKPGSGLAALITDGPGGSKWMYVGKQHAGKVFYDLTGNRSDTVTINSDGWGEFKVNGGSVSVWVPRKTTVSTIA

SEQ ID NO: 18679 - protein, 491 aa, Geobacillus stearothermophilus
AAPFNGTMMQYFEWYLPDDGTLWTKVANEANNLSSLGITALWLPPAYKGTSRSDVGYGVYDLYDLGEFNQKGTVRTKYGTKAQYLQAIQAAHAAGMQVYADVVFDHKGGADGTEWVDAVEVNPSDRNQVISGTYQIQAWTKFDFPGRGNTYSSFKWRWYHFDGVDWDESRKLSRIYLFEGIGKAWDWEVDTENGNYDYLMYADLDMDHPEVVTELKNWGKWYVNTTNIDGFRLDAVKHIKFSFFPDWLSYVRSQTGKPLFTVGEYWSYDINKLHNYITKTNGTMSLFDAPLHNKFYTASKSGGAFDMRTLMTNTLMKDQPTLAVTFVDNHDTEPGQALQSWVDPWFKPLAYAFILTRQEGYPCVFYGDYYGIPQYNIPSLKSKIDPLLIARRDYAYGTQHDYLDHSDIIGWTREGVTEKPGSGLAALITDGPGGSKWMYVGKQHAGKVFYDLTGNRSDTVTINSDGWGEFKVNGGSVSVWVPRKTTVSTIA

SEQ ID NO: 18680 - protein, 491 aa, Geobacillus stearothermophilus
AAPFNGTMMQYFEWYLPDDGTLWTKVANEANNLSSLGITALWLPPAYKGTSRSDVGYGAYDLYDLGEFNQKGTVRTKYGTKAQYLQAIQAAHAAGMQVYADVVFDHKGGADGTEWVDAVEVNPSDRNQVISGTYQIQAWTKFDFPGRGNTYSSFKWRWYHFDGVDWDESRKLSRIYLFEGIGKAWDWEVDTENGNYDYLMYADLDMDHPEVVTELKNWGPWYVLTTNIDGFRLDAVKHIKFSFFPDWLSYVRSSTGKPLFTVGEYWSYDINKLHNYITKTNGTTSLFDAPLHNKFYTASKSGGAFDMRTLMTNTLMKDQPTLAVTFVDNHDTEPGQALQSWVDPWFKPLAYAFILTRQEGYPCVFYGDYYGIPQYNIPSLKSKIDPLLIARRDYAYGTQHDYLDHSDIIGWTREGVTEKPGSGLAALITDGPGGSKWMYVGKQHAGKVFYDLTGNRSDTVTINSDGWGEFKVNGGSVSVWVPRKTTVSTIA

SEQ ID NO: 18681 - protein, 491 aa, Geobacillus stearothermophilus
AAPFNGTMMQYFEWYLPDDGTLWTKVANEANNLSSLGITALWLPPAYKGTSRSDVGYGVYDLYDLGEFNQKGTVRTKYGTKAQYLQAIQAAHAAGMQVYADVVFDHKGGADGTEWVDAVEVNPSDRNQVISGTYQIQAWTKFDFPGRGNTYSSFKWRWYHFDGVDWDESRKLSRIYLFEGXXKAWDWEVDTEFGNYDYLMYADLDMDHPEVVTELKNWGPWYVLTTNIDGFRLDAVKHIKFSFFPDWLSYVRSSTGKPLFTVGEYWSYDINKLHNYITKTNGTMSLFDAPLHNKFYTASKSGGAFDMRTLMTNTLMKDQPTLAVTFVDNHDTEPGQALQSWVDPWFKPLAYAFILTRQEGYPCVFYGDYYGIPQYNIPSLKSKIDPLLIARRDYAYGTQHDYLDHSDIIGWTREGVTEKPGSGLAALITDGPGGSKWMYVGKQHAGKVFYDLTGNRSDTVTINSDGWGEFKVNGGSVSVWVPRKTTVSTIA

SEQ ID NO: 18682 - protein, 491 aa, Geobacillus stearothermophilus
AAPFNGTMMQYFEWYLPDDGTLWTKVANEANNLSSLGITALWLPPAYKGTSRSDVGYGAYDLYDLGEFNQKGTVRTKYGTKAQYLQAIQAAHAAGMQVYADVVFDHKGGADGTEWVDAVEVNPSDRNQVISGTYQIQAWTKFDFPGRGNTYSSFKWRWYHFDGVDWDESRKLSRIYLFEGXXKAWDWEVDTEFGNYDYLMYADLDMDHPEVVTELKNWGPWYVLTTNIDGFRLDAVKHIKFQFFPDWLSYVRSSTGKPLFTVGEYWSYDINKLHNFITKTNGTMSLFDAPLHNKFYTASKSGGAFDMRTLMTNTLMKDQPTLAVTFVDNHDTEPGQALQSWVDPWFKPLAYAFILTRQEGYPCVFYGDYYGIPQYNIPSLKSKIDPLLIARRDYAYGTQHDYLDHSDIIGWTREGVTEKPGSGLAALITDGPGGSKWMYVGKQHAGKVFYDLTGNRSDTVTINSDGWGEFKVNGGSVSVWVPRKTTVSTIA

SEQ ID NO: 18683 - protein, 491 aa, Geobacillus stearothermophilus
AAPFNGTMMQYFEWYLPDDGTLWTKVANEANNLSSLGITALWLPPAYKGTSRSDVGYGVYDLYDLGEFNQKGTVRTKYGTKAQYLQAIQAAHAAGMQVYADVVFDHKGGADGTEWVDAVEVNPSDRNQEISGTYQIQAWTKFDFPGRGNTYSSFKWRWYHFDGVDWDESRKLSRIYKFRGXXKAWDWEVDTEFGNYDYLMYADLDMDHPEVVTELKNWGKWYVNTTNIDGFRLDAVKHIKFSFFPDWLSYVRSQTGKPLFTVGEYWSYDINKLHNYITKTNGTVSLFDAPLHNKFYTASKSGGAFDMRTLMTNTLMKDQPTLAVTFVDNHDTEPGQALQSWVDPWFKPLAYAFILTRQEGYPCVFYGDYYGIPQYNIPSLKSKIDPLLIARRDYAYGTQHDYLDHSDIIGWTREGVTEKPGSGLAALITDGPGGSKWMYVGKQHAGKVFYDLTGNRSDTVTINSDGWGEFKVNGGSVSVWVPRKTTVSTIA

SEQ ID NO: 18684 - protein, 491 aa, Geobacillus stearothermophilus
AAPFNGTMMQYFEWYLPDDGTLWTKVANEANNLSSLGITALWLPPAYKGTSRSDVGYGVYDLYDLGEFNQKGTVRTKYGTKAQYLQAIQAAHAAGMQVYADVVFDHKGGADGTEWVDAVEVNPSDRNQVISGTYQIQAWTKFDFPGRGNTYSSFKWRWYHFDGVDWDESRKLSRIYLFEGXXKAWDWEVDTEFGNYDYLMYADLDMDHPEVVTELKNWGPWYVLTTNIDGFRLDAVKHIKFQFFPDWLSYVRSSTGKPLFTVGEYWSYDINKLHNYITKTNGTTSLFDAPLHNKFYTASKSGGAFDMRTLMTNTLMKDQPTLAVTFVDNHDTEPGQALQSWVDPWFKPLAYAFILTRQEGYPCVFYGDYYGIPQYNIPSLKSKIDPLLIARRDYAYGTQHDYLDHSDIIGWTREGVTEKPGSGLAALITDGPGGSKWMYVGKQHAGKVFYDLTGNRSDTVTINSDGWGEFKVNGGSVSVWVPRKTTVSTIA

SEQ ID NO: 18685 - protein, 491 aa, Geobacillus stearothermophilus
AAPFNGTMMQYFEWYLPDDGTLWTKVANEANNLSSLGITALWLPPAYKGTSRSDVGYGAYDLYDLGEFNQKGTVRTKYGTKAQYLQAIQAAHAAGMQVYADVVFDHKGGADGTEWVDAVEVNPSDRNQEISGTYQIQAWTKFDFPGRGNTYSSFKWRWYHFDGVDWDESRKLSRIYKFRGXXKAWDWEVDTEFGNYDYLMYADLDMDHPEVVTELKNWGKWYVNTTNIDGFRLDAVKHIKFSFFPDWLSYVRSQTGKPLFTVGEYWSYDINKLHNYITKTNGTMSLFDAPLHNKFYTASKSGGAFDMRTLMTNTLMKDQPTLAVTFVDNHDTEPGQALQSWVDPWFKPLAYAFILTRQEGYPCVFYGDYYGIPQYNIPSLKSKIDPLLIARRDYAYGTQHDYLDHSDIIGWTREGVTEKPGSGLAALITDGPGGSKWMYVGKQHAGKVFYDLTGNRSDTVTINSDGWGEFKVNGGSVSVWVPRKTTVSTIA

SEQ ID NO: 18686 - protein, 491 aa, Geobacillus stearothermophilus
AAPFNGTMMQYFEWYLPDDGTLWTKVANEANNLSSLGITALWLPPAYKGTSRSDVGYGAYDLYDLGEFNQKGTVRTKYGTKAQYLQAIQAAHAAGMQVYADVVFDHKGGADGTEWVDAVEVNPSDRNQVISGTYQIQAWTKFDFPGRGNTYSSFKWRWYHFDGVDWDESRKLSRIYLFEGIGKAWDWEVDTENGNYDYLMYADLDMDHPEVVTELKNWGPWYVLTTNIDGFRLDAVKHIKFSFFPDWLSYVRSSTGKPLFTVGEYWSYDINKLHNYITKTNGTMSLFDAPLHNKFYTASKSGGAFDMRTLMTNTLMKDQPTLAVTFVDNHDTEPGQALQSWVDPWFKPLAYAFILTRQEGYPCVFYGDYYGIPQYNIPSLKSKIDPLLIARRDYAYGTQHDYLDHSDIIGWTREGVTEKPGSGLAALITDGPGGSKWMYVGKQHAGKVFYDLTGNRSDTVTINSDGWGEFKVNGGSVSVWVPRKTTVSTIA

SEQ ID NO: 18687 - protein, 491 aa, Geobacillus stearothermophilus
AAPFNGTMMQYFEWYLPDDGTLWTKVANEANNLSSLGITALWLPPAYKGTSRSDVGYGVYDLYDLGEFNQKGTVRTKYGTKAQYLQAIQAAHAAGMQVYADVVFDHKGGADGTEWVDAVEVNPSDRNQVISGTYQIQAWTKFDFPGRGNTYSSFKWRWYHFDGVDWDESRKLSRIYLFVGXXKAWDWEVDTEFGNYDYLMYADLDMDHPEVVTELKNWGPWYVLTTNIDGFRLDAVKHIKFQFFPDWLSYVRSSTGKPLFTVGEYWSYDINKLHNYITKTNGTMSLFDAPLHNKFYTASKSGGAFDMRTLMTNTLMKDQPTLAVTFVDNHDTEPGQALQSWVDPWFKPLAYAFILTRQEGYPCVFYGDYYGIPQYNIPSLKSKIDPLLIARRDYAYGTQHDYLDHSDIIGWTREGVTEKPGSGLAALITDGPGGSKWMYVGKQHAGKVFYDLTGNRSDTVTINSDGWGEFKVNGGSVSVWVPRKTTVSTIA

SEQ ID NO: 18688 - protein, 491 aa, Geobacillus stearothermophilus
AAPFNGTMMQYFEWYLPDDGTLWTKVANEANNLSSLGITALWLPPAYKGTSRSDVGYGAYDLYDLGEFNQKGTVRTKYGTKAQYLQAIQAAHAAGMQVYADVVFDHKGGADGTEWVDAVEVNPSDRNQVISGTYQIQAWTKFDFPGRGNTYSSFKWRWYHFDGVDWDESRKLSRIYLFEGXXKAWDWEVDTEFGNYDYLMYADLDMDYPEVVTELKNWGPWYVLTTNIDGFRLDAVKHIKFQFFPDWLSYVRSSTGKPLFTVGEYWSYDINKLHNYITKTNGTMSLFDAPLHNKFYTASKSGGAFDMRTLMTNTLMKDQPTLAVTFVDNHDTEPGQALQSWVDPWFKPLAYAFILTRQEGYPCVFYGDYYGIPQYNIPSLKSKIDPLLIARRDYAYGTQHDYLDHSDIIGWTREGVTEKPGSGLAALITDGPGGSKWMYVGKQHAGKVFYDLTGNRSDTVTINSDGWGEFKVNGGSVSVWVPRKTTVSTIA

SEQ ID NO: 18689 - protein, 491 aa, Geobacillus stearothermophilus
AAPFNGTMMQYFEWYLPDDGTLWTKVANEANNLSSLGITALWLPPAYKGTSRSDVGYGAYDLYDLGEFNQKGTVRTKYGTKAQYLQAIQAAHAAGMQVYADVVFDHKGGADGTEWVDAVEVNPSDRNQVISGTYQIQAWTKFDFPGRGNTYSSFKWRWYHFDGVDWDESRKLSRIYLFEGIGKAWDWEVDTENGNYDYLMYADLDMDHPEVVTELKNWGPWYVLTTNIDGFRLDAVKHIKFQFFPDWLSYVRSSTGKPLFTVGEYWSYDINKLHNYITKTNGTTSLFDAPLHNKFYTASKSGGAFDMRTLMTNTLMKDQPTLAVTFVDNHDTEPGQALQSWVDPWFKPLAYAFILTRQEGYPCVFYGDYYGIPQYNIPSLKSKIDPLLIARRDYAYGTQHDYLDHSDIIGWTREGVTEKPGSGLAALITDGPGGSKWMYVGKQHAGKVFYDLTGNRSDTVTINSDGWGEFKVNGGSVSVWVPRKTTVSTIA

SEQ ID NO: 18690 - protein, 491 aa, Geobacillus stearothermophilus
AAPFNGTMMQYFEWYLPDDGTLWTKVANEANNLSSLGITALWLPPAYKGTSRSDVGYGVYDLYDLGEFNQKGTVRTKYGTKAQYLQAIQAAHAAGMQVYADVVFDHKGGADGTEWVDAVEVNPSDRNQVISGTYQIQAWTKFDFPGRGNTYSSFKWRWYHFDGVDWDESRKLSRIYLFEGXXKAWDWEVDTEFGNYDYLMYADLDMDHPEVVTELKNWGPWYVLTTNIDGFRLDAVKHIKFSFFPDWLSYVRSSTGKPLFTVGEYWSYDINKLHNYITKTNGTTSLFDAPLHNKFYTASKSGGAFDMRTLMTNTLMKDQPTLAVTFVDNHDTEPGQALQSWVDPWFKPLAYAFILTRQEGYPCVFYGDYYGIPQYNIPSLKSKIDPLLIARRDYAYGTQHDYLDHSDIIGWTREGVTEKPGSGLAALITDGPGGSKWMYVGKQHAGKVFYDLTGNRSDTVTINSDGWGEFKVNGGSVSVWVPRKTTVSTIA

SEQ ID NO: 18691 - protein, 491 aa, Geobacillus stearothermophilus
AAPFNGTMMQYFEWYLPDDGTLWTKVANEANNLSSLGITALWLPPAYKGTSRSDVGYGAYDLYDLGEFNQKGTVRTKYGTKAQYLQAIQAAHAAGMQVYADVVFDHKGGADGTEWVDAVEVNPSDRNQVISGTYQIQAWTKFDFPGRGNTYSSFKWYWYHFDGVDWDESRKLSRIYLFEGXXKAWDWEVDTEFGNYDYLMYADLDMDHPEVVTELKNWGPWYVLTTNIDGFRLDAVKHIKFQFFPDWLSYVRSSTGKPLFTVGEYWSYDINKLHNYITKTNGTMSLFDAPLHNKFYTASKSGGAFDMRTLMTNTLMKDQPTLAVTFVDNHDTEPGQALQSWVDPWFKPLAYAFILTRQEGYPCVFYGDYYGIPQYNIPSLKSKIDPLLIARRDYAYGTQHDYLDHSDIIGWTREGVTEKPGSGLAALITDGPGGSKWMYVGKQHAGKVFYDLTGNRSDTVTINSDGWGEFKVNGGSVSVWVPRKTTVSTIA

SEQ ID NO: 18692 - protein, 491 aa, Geobacillus stearothermophilus
AAPFNGTMMQYFEWYLPDDGTLWTKVANEANNLSSLGITALWLPPAYKGTSRSDVGYGAYDLYDLGEFNQKGTVRTKYGTKAQYLQAIQAAHAAGMQVYADVVFDHKGGADGTEWVDAVEVNPSDRNQVISGTYQIQAWTKFDFPGRGNTYSSFKWRWYHFDGVDWDESRKLSRIYLFEGXXKAWDWEVDTEFGNYDYLMYADLDMDHPEVVTELKNWGPWYVLTTNIDGFRLDAVKHIKFQFFPDWLSYVRSSTGKPLFTVGEYWSYDINKLKNYITKTNGTMSLFDAPLHNKFYTASKSGGAFDMRTLMTNTLMKDQPTLAVTFVDNHDTEPGQALQSWVDPWFKPLAYAFILTRQEGYPCVFYGDYYGIPQYNIPSLKSKIDPLLIARRDYAYGTQHDYLDHSDIIGWTREGVTEKPGSGLAALITDGPGGSKWMYVGKQHAGKVFYDLTGNRSDTVTINSDGWGEFKVNGGSVSVWVPRKTTVSTIA

SEQ ID NO: 18693 - protein, 491 aa, Geobacillus stearothermophilus
AAPFNGTMMQYFEWYLPDDGTLWTKVANEANNLSSLGITALWLPPAYKGTSRSDVGYGAYDLYDLGEFNQKGTVRTKYGTKAQYLQAIQAAHAAGMQVYADVVFDHKGGADGTEWVDAVEVNPSDRNQVISGTYQIQAWTKFDFPGRGNTYSSFKWRWYHFDGVDWDESRKLSRIYLFEGIGKAWDWEVDTENGNYDYLMYADLDMDHPEVVTELKNWGPWYVLTTNIDGFRLDAVKHIKFQFFPDWLSYVRSSTGKPLFTVGEYWSYDINKLHNYITKTNGTMSLFDAPLHNKFYTASKSGGAFDMRTLMTNTLMKDQPTLAVTFVDNHDTEPGQALQSWVDPWFKPLAYAFILTRQEGYPCVFYGDYYGIPQYNIPSLKSKIDPLLIARRDYAYGTQHDYLDHSDIIGWTREGVTEKPGSGLAALITDGPGGSKWMYVGKQHAGKVFYDLTGNRSDTVTINSDGWGEFKVNGGSVSVWVPRKTTVSTIA

SEQ ID NO: 18694 - protein, 491 aa, Geobacillus stearothermophilus
AAPFNGTMMQYFEWYLPDDGTLWTKVANEANNLSSLGITALWLPPAYKGTSRSDVGYGVYDLYDLGEFNQKGTVRTKYGTKAQYLQAIQAAHAAGMQVYADVVFDHKGGADGTEWVDAVEVNPSDRNQVISGTYQIQAWTKFDFPGRGNTYSSFKWRWYHFDGVDWDESRKLSRIYLFEGIGKAWDWEVDTENGNYDYLMYADLDMDHPEVVTELKNWGKWYVNTTNIDGFRLDAVKHIKFQFFPDWLSYVRSQTGKPLFTVGEYWSYDINKLHNYITKTNGTMSLFDAPLHNKFYTASKSGGAFDMRTLMTNTLMKDQPTLAVTFVDNHDTEPGQALQSWVDPWFKPLAYAFILTRQEGYPCVFYGDYYGIPQYNIPSLKSKIDPLLIARRDYAYGTQHDYLDHSDIIGWTREGVTEKPGSGLAALITDGPGGSKWMYVGKQHAGKVFYDLTGNRSDTVTINSDGWGEFKVNGGSVSVWVPRKTTVSTIA

SEQ ID NO: 18695 - protein, 491 aa, Geobacillus stearothermophilus
AAPFNGTMMQYFEWYLPDDGTLWTKVANEANNLSSLGITALWLPPAYKGTSRSDVGYGVYDLYDLGEFNQKGTVRTKYGTKAQYLQAIQAAHAAGMQVYADVVFDHKGGADGTEWVDAVEVNPSDRNQVISGTYQIQAWTKFDFPGRGNTYSSFKWRWYHFDGVDWDESRKLSRIYLFEGXXKAWDWEVDTEFGNYDYLMYADLDMDHPEVVTELKNWGPWYVLTTNIDGFRLDAVKHIKFQFFPDWLSYVRSSTGKPLFTVGEYWSYDINKLHNYITKTNGTMSLFDAPLHNKFYTASKSGGAFDMRTLMTNTLMKDQPTLAVTFVDNHDTEPGQALQSWVDPWFKPLAYAFILTRQEGYPCVFYGDYYGIPQYNIPSLKSKIDPLLIARRDYAYGTQHDYLDHSDIIGWTREGVTEKPGSGLAALITDGPGGSKWMYVGKQHAGKVFYDLTGNRSDTVTINSDGWGEFKVNGGSVSVWVPRKTTVSTIA

SEQ ID NO: 18696 - protein, 487 aa, Geobacillus stearothermophilus
AAPFNGTMMQYFEWYLPDDGTLWTKVANEANNLSSLGITALWLPPAYKGTSRSDVGYGVYDLYDLGEFNQKGTVRTKYGTKAQYLQAIQAAHAAGMQVYADVVFDHKGGADGTEWVDAVEVNPSDRNQVISGTYQIQAWTKFDFPGRGNTYSSFKWRWYHFDGVDWDESRKLSRIYLFEGKAWDWEVDTEFGNYDYLMYADLDMDHPEVVTELKNWGPWYVLTTNIDGFRLDAVKHIKFQFFPDWLSYVRSSTGKPLFTVGEYWSYDINKLHNYITKTNGTMSLFDAPLHNKFYTASKSGGAFDMRTLMTNTLMKDQPTLAVTFVDNHDTEPGQALQSWVDPWFKPLAYAFILTRQEGYPCVFYGDYYGIPQYPSLKSKIDPLLIARRDYAYGTQHDYLDHSDIIGWTREGVTEKPGSGLAALITDGPGGSKWMYVGKQHAGKVFYDLTGNRSDTVTINSDGWGEFKVNGGSVSVWVPRKTTVSTIA

SEQ ID NO: 18697 - protein, 486 aa, Geobacillus stearothermophilus
AAPFNGTMMQYFEWYLPDDGQLWTKVANEANNLSSLGITALWLPPAYKGTSRSDVGYGAYDLYDLGEFNQKGTVRTKYGTKAQYLKAIQAAHAAGMQVYADVVFDHKGGADGTEWVQAVEVNPSDRNQVISGTYQIQAWTKFDFPGRGNTYSSFKWRWYHFDGVDWDESRKLNRIYLFEGKAWDWEVDTEFGNYDYLMYADLDMDYPEVTTELKNWGKWYVNTTNIDGFRLDAVKHIKFSFFPDWLSYVRSSTGKPLFTVGEYWSGDINKLHNYITKTDGTVSLFDAPLHYKFYNASKSGGAFDMRTLMTNTLMKDQPTLAVTFVDNHDTEPGQALQSWVDPWFKPLAYAFILTRQEGYPCVFYGDYYGIPQYNIPSLKHKIDPLLIARRDYAYGTQHDYLDHSDIIGWTREGGTEKPGSGLAALITDGPGGSKWMYVGKQHAGKVFYDLTGNRSDTVTINSDGWGEFKVNGGSVSVWVPRKTTVS

SEQ ID NO: 18698 - protein, 488 aa, Geobacillus stearothermophilus
AAPFNGTMMQYFEWYLPDNGTLWTKVAKEANNLSSLGITALWLPPAYKGTSRSDVGYGVYDLYDLGEFNQKGTVRTKYGTKAQYLRAIQAAHAAGMRVYADVVFDHKGGADGTEWVDAVEVNPSDRNQEISGTYQIQAWTKFDFPGRGNTYSSFKWRWYHFDGVDWDESRKLSRIYKFRGIGKAWDWEVDTENGNYDYLMYADLDMDHPEVVTELKNWGKWYVKTTNIDGFRLDAVKHIKFSFFPDWLSYVRSQTGKPLFTVGEYWSYDIKKLHNYITKTKGTMSLFDAPLHNKFYTASKSGGAFNMRTLMTNTLMKNRPTLAVTFVDNHDTEPGQALQSWVDPWFKPLAYAFILTREEGYPCVFYGDYYGIPQYNIPSLKSKIDPLLIARRNYAYGTQHDYLDHSDIIGWTREGVTEKPGSGLAALITDGPGGSKWMYVGKEHAGKVFYDLTGNRSNTVTINSDGWGEFKVNGGSVSVWVPRKTTVS

SEQ ID NO: 18699 - protein, 486 aa, Geobacillus stearothermophilus
AAPFNGTMMQYFEWYLPDDGQLWNRVANDANNLSSLGITALWLPPAYKGTSRSDVGYGAYDLYDLGEFNQKGTVRTKYGTKAQYLQAIQAAHAAGMQVYADVVFDHKGGADGTEWVDAVEVNPSDRNQVISGTYQIQAWTKFDFPGRGNTYSSFKWRWYHFDGVDWDESRKLSRIYLFEGKAWDWPVDTEFGNYDYLMYADLDMDHPEVTTELKNWGKWYVNTTNIDGFRLDAVKHIKFYFFPDWLSYVRSSTGKPLFTVGEYWSGDINKLHNYITKTDGTVSLFDAPLHYKFYNASKSGGAFDMRTLMTNTLMKDQPTLAVTFVDNHDTEPGQALQSWVDPWFKPLAYAFILTRQEGYPCVFYGDYYGIPQYNIPSLKSKIDPLLIARRDYAYGTQHDYLDHSDIIGWTREGGTEKPGSGLAALITDGPGGSKWMYVGKQHAGKVFYDLTGNRSDTVTINSDGWGEFKVNGGSVSVWVPRKTTVS

SEQ ID NO: 18700 - protein, 486 aa, Geobacillus stearothermophilus
AAPFNGTMMQYFEWYLPDDGTLWTKVANEANNLSSLGITALWLPPAYKGTSRSDVGYGVYDLYDLGEFNQKGTVRTKYGTKAQYLQAIQAAHAAGMQVYADVVFDHKGGADGTEWVDAVEVNPSDRNQEISGTYQIQAWTKFDFPGRGNTYSSFKWRWYHFDGVDWDESRKLSRIYKFRGKAWDWEVDTEFGNYDYLMYADLDMDHPEVVTELKNWGKWYVNTTNIDGFRLDAVKHIKFSFFPDWLSYVRSQTGKPLFTVGEYWSYDINKLHNYITKTNGTMSLFDAPLHNKFYTASKSGGAFDMRTLMTNTLMKDQPTLAVTFVDNHDTEPGQALQSWVDPWFKPLAYAFILTRQEGYPCVFYGDYYGIPQYNIPSLKSKIDPLLIARRDYAYGTQHDYLDHSDIIGWTREGGTEKPGSGLAALITDGPGGSKWMYVGKQHAGKVFYDLTGNRSDTVTINSDGWGEFKVNGGSVSVWVPRKTTVS

SEQ ID NO: 18701 - protein, 487 aa, Bacillus licheniformis
AAPFNGTMMQYFEWYLPDDGTLWTKVANEANNLSSLGITALSLPPAYKGTSRSDVGYGVYDLYDLGEFNQKGTVRTKYGTKAQYLQAIQAAHAAGMQVYADVVFDHKGGADGTEWVDAVEVNPSDRNQEISGTYQIQAWTKFDFPGRGNTYSSFKWRWYHFDGVDWDESRKLSRIYKFRGIGKAWDWEVDTENGNYDYLMYADLDMDHPEVVTELKNWGKWYVNTTNIDGFRLDGLKHIKFSFFPDWLSYVRSQTGKPLFTVGEYWSYDINKLHNYITKTNGTMSLFDAPLHNKFYTASKSGGAFDMRTLMTNTLMKDQPTLAVTFVDNHDTNPAKRCSHGRPWFKPLAYAFILTRQEGYPCVFYGDYYGIPQYNIPSLKSKIDPLLIARRDYAYGTQHDYLDHSDIIGWTREGVTEKPGSGLAALITDGAGRSKWMYVGKQHAGKVFYDLTGNRSDTVTINSDGWGEFKVNGGSVSVWVPRKTTVS

SEQ ID NO: 18702 - protein, 484 aa, Synthetic construct
AAPFNGTMMQYFEWYLPDDGTLWTKVANEANNLSSLGITALWLPPAYKGTSRSDVGYGVYDLYDLGEFNQKGTVRTKYGTKAQYLQAIQAAHAAGMQVYADVVFDHKGGADGTEWVDAVEVNPSDRNQEISGTYQIQAWTKFDFPGRGNTYSSFKWRWYHFDGVDWDESRKLSRIYKFRGKAWDWEVDTEGNYDYLMYADLDMDHPEVVTELKNWGKWYVNTTNIDGFRLDAVKHIKFSFFPDWLSYVRSQTGKPLFTVGEYWSYDINKLHNYITKTNGTMSLFDAPLHNKFYTASKSGGAFDMRTLMTNTLMKDQPTLAVTFVDNHDTEPGQALQSWVDPWFKPLAYAFILTRQEGYPCVFYGDYYGIPQYNIPSLKSKIDPLLIARRDYAYGTQHDYLDHSDIIGWTREGTEKPGSGLAALITDGPGGSKWMYVGKQHAGKVFYDLTGNRSDTVTINSDGWGEFKVNGGSVSVWVPRKTTVS

SEQ ID NO: 18703 - protein, 486 aa, Geobacillus stearothermophilus
AAPFNGTMMQYFEWYLPDDGTLWTKVANEANNLSSLGITALWLPPAYKGTSRSDVGYGVYDLYDLGEFNQKGTVRTKYGTKAQYLQAIQAAHAAGMQVYADVVFDHKGGADGTEWVDAVEVNPSDRNQEISGTYQIQAWTKFDFPGRGNTYSSFKWRWYHFDGVDWDESRKLSRIYKFRGIGKAWDWEVDTEFGNYDYLMYADLDMDHPEVVTELKNWGKWYVNTTNIDGFRLDAVKHIKFSFFPDWLSYVRSQTGKPLFTVGEYWSYDINKLHNYITKTNGTMSLFDAPLHNKFYTASKSGGAFDMRTLMTNTLMKDQPTLAVTFVDNHDTEPGQALQSWVDPWFKPLAYAFILTRQEGYPCVFYGDYYGIPQYNIPSLKSKIDPLLIARRDYAYGTQHDYLDHSDIIGWTREGGTEKPGSGLAALITDGPGGSKWMYVGKQHAGKVFYDLTGNRSDTVTINSDGWGEFKVNGGSVSVWVPRKTT

SEQ ID NO: 18704 - protein, 484 aa, Aspergillus niger
AATALAATPADWRSQSIYFLLTDRFARTDGSTTATCNTADQKYCGGTWQGIIDHLDYIQGMGFTAIWITPVTAQLPQTTAYGDAYHGYWQQDIYSLNENYGTADDLRALSSALHERGMYLMVDVVANHMGYDGAGSSVDYSVFNPFSSQDYFHPFCFIQNYEDQTQVEDCWLGDNTVSLPDLDTTKDVVRNEWYDWVGSLVSNYSIDGLRIDTVKHVQPDFWPGYNSAAGVYCIGEVLDGDPAYTCPYQNVMDGVLNYPIYYPLLNAFQSTSGSMDDLYNMINTVASDCPDSTLLGTFVENHDNPRFASYTNDIALAKNVAAFIILNDGIPIIYAGQEQHYAGGNDPANREATWLSGYPTDSELYQLIASANAIRNYAISQDTGFVTYQNWPIYQDDTTIAMRKGTDGSQIVTILSNLGASGDSYTLSLSGAGYTAGQQLTEVIGCTTVTVGSDGNVPVPMAGGLPRVLYPTERLAGSGICSSS

SEQ ID NO: 18705 - protein, 515 aa, Geobacillus stearothermophilus
AAPFNGTMMQYFEWYLPDDGTLWTKVADEANNLSSLGITALWLPPAYKGTSRSDVGYGVYDLYDLGEFNQKGTVRTKYGTKAQYLEAIEAAHAAGMRVYADVVFDHKGGADGTEWVDAVEVNPSDRNQEISGTYQIQAWTKFDFPGRGNTYSSFKWRWYHFDGVDWDESRQLSRIYKFRGIGKAWDWEVDTENGNYDYLMYADLDMDHPEVVTELKNWGKWYVDTTNIDGFRLDAVKHIKFSFFPDWLSYVRSQTGKPLFTVGEYWSYDIDKLHNYITKTDGTMSLFDAPLHNKFYTASKSGGAFDMQTLMTNTLMKDRPTLAVTFVDNHDTEPGQALQSWVDPWFKPLAYAFILTREEGYPCVFYGDYYGIPQYNIPSLKSQIDPLLIARRDYAYGTQHDYLDHSDIIGWTREGVTEKPGSGLAALITDGPGGSKWMYVGKEHAGQVFYDLTGNRSDTVTINSDGWGEFQVNGGSVSVWVPQKTTVSTIARPITTRPWTGEFVRWTEPRLVAWP

SEQ ID NO: 18706 - protein, 482 aa, Geobacillus stearothermophilus
AAPFNGTMMQYFEWYLPDDGTLWTKVANEANNLSSLGITALWLPPAYKGTSRSDVGYGVYDLYDLGEFNQKGTVRTKYGTKAQYLQAIQAAHAAGMQVYADVVFDHKGGADGTEWVDAVEVNPSDRNQEISGTYQIQAWTKFDFPGRGNTYSSFKWRWYHFDGVDWDESRKLSRIYKFRGKAWDWPVDTENGNYDYLMYADLDMDHPEVVTELKNWGKWYVNTTNIDGFRLDAVKHIKFWFFPDWLSYVRSQTGKPLFTVGEYWSYDINKLHNYITWTDGTMSLFDAPLHNKFYTASKSGGAFDMRTLMTNTLMKDQPTLAVTFVDNHDTEPGQALQSWVDPWFKPLAYAFILTRQEGYPCVFYGDYYGIPQYNIPSLKSKIDPLLIARRDYAYGTQHDYLDHSDIIGWTREGVTEKPGSGLAALITDGPGGSKWMYVGKQHAGKVFYDLTGNRSDTVTINSDGWGEFKVNGGSVSVWVPRK

SEQ ID NO: 18707 - protein, 482 aa, Geobacillus stearothermophilus
AAPFNGTMMQYFEWYLPDDGTLWTKVANEANNLSSLGITALWLPPAYKGTSRSDVGYGVYDLYDLGEFNQKGTVRTKYGTKAQYLQAIQAAHAAGMQVYADVVFDHKGGADGTEWVDAVEVNPSDRNQEISGTYQIQAWTKFDFPGRGNTYSSFKWRWYHFDGVDWDESRKLSRIYKFRGKAWDWPVDTENGNYDYLMYADLDMDHPEVVTELKNWGKWYVNTTNIDGFRLDAVKHIKFFFFPDWLSYVRSQTGKPLFTVGEYWSYDINKLHNYITKTDGTMSLFDAPLHNKFYTASKSGGAFDMRTLMTNTLMKDQPTLAVTFVDNHDTEPGQALQSWVDPWFKPLAYAFILTRQEGYPCVFYGDYYGIPQYNIPSLKSKIDPLLIARRDYAYGTQHDYLDHSDIIGWTREGVTEKPGSGLAALITDGPGGSKWMYVGKQHAGKVFYDLTGNRSDTVTINSDGWGEFKVNGGSVSVWVPRK

SEQ ID NO: 18708 - protein, 482 aa, Geobacillus stearothermophilus
AAPFNGTMMQYFEWYLPDDGTLWTKVANEANNLSSLGITALWLPPAYKGTSRSDVGYGVYDLYDLGEFNQKGTVRTKYGTKAQYLQAIQAAHAAGMQVYADVVFDHKGGADGTEWVDAVEVNPSDRNQEISGTYQIQAWTKFDFPGRGNTYSSFKWRWYHFDGVDWDESRKLSRIYKFRGKAWDWPVDTENGNYDYLMYADLDMDHPEVVTELKNWGKWYVNTTNIDGFRLDAVKHIKFFFFPDWLSYVRSQTGKPLFTVGEYWSYDINKLHNYITWTDGTMSLFDAPLHNKFYTASKSGGAFDMRTLMTNTLMKDQPTLAVTFVDNHDTEPGQALQSWVDPWFKPLAYAFILTRQEGYPCVFYGDYYGIPQYNIPSLKSKIDPLLIARRDYAYGTQHDYLDHSDIIGWTREGVTEKPGSGLAALITDGPGGSKWMYVGKQHAGKVFYDLTGNRSDTVTINSDGWGEFKVNGGSVSVWVPRK

SEQ ID NO: 18709 - protein, 482 aa, Geobacillus stearothermophilus
AAPFNGTMMQYFEWYLPDDGTLWTKVANEANNLSSLGITALWLPPAYKGTSRSDVGYGVYDLYDLGEFNQKGTVRTKYGTKAQYLQAIQAAHAAGMQVYADVVFDHKGGADGTEWVDAVEVNPSDRNQEISGTYQIQAWTKFDFPGRGNTYSSFKWRWYHFDGVDWDESRKLSRIYKFRGKAWDWPVDTENGNYDYLMYADLDMDHPEVVTELKNWGKWYVNTTNIDGFRLDAVKHIKFSFFPDWLSYVRSQTGKPLFTVGEYWSYDINKLHNYITFTDGTMSLFDAPLHNKFYTASKSGGAFDMRTLMTNTLMKDQPTLAVTFVDNHDTEPGQALQSWVDPWFKPLAYAFILTRQEGYPCVFYGDYYGIPQYNIPSLKSKIDPLLIARRDYAYGTQHDYLDHSDIIGWTREGVTEKPGSGLAALITDGPGGSKWMYVGKQHAGKVFYDLTGNRSDTVTINSDGWGEFKVNGGSVSVWVPRK

SEQ ID NO: 18710 - protein, 482 aa, Geobacillus stearothermophilus
AAPFNGTMMQYFEWYLPDDGTLWTKVANEANNLSSLGITALWLPPAYKGTSRSDVGYGVYDLYDLGEFNQKGTVRTKYGTKAQYLQAIQAAHAAGMQVYADVVFDHKGGADGTEWVDAVEVNPSDRNQEISGTYQIQAWTKFDFPGRGNTYSSFKWRWYHFDGVDWDESRKLSRIYKFRGKAWDWPVDTENGNYDYLMYADLDMDHPEVVTELKNWGKWYVNTTNIDGFRLDAVKHIKFSFFPDWLSYVRSQTGKPLFTVGEYWSYDINKLHNYITYTDGTMSLFDAPLHNKFYTASKSGGAFDMRTLMTNTLMKDQPTLAVTFVDNHDTEPGQALQSWVDPWFKPLAYAFILTRQEGYPCVFYGDYYGIPQYNIPSLKSKIDPLLIARRDYAYGTQHDYLDHSDIIGWTREGVTEKPGSGLAALITDGPGGSKWMYVGKQHAGKVFYDLTGNRSDTVTINSDGWGEFKVNGGSVSVWVPRK

SEQ ID NO: 18711 - protein, 482 aa, Geobacillus stearothermophilus
AAPFNGTMMQYFEWYLPDDGTLWTKVANEANNLSSLGITALWLPPAYKGTSRSDVGYGVYDLYDLGEFNQKGTVRTKYGTKAQYLQAIQAAHAAGMQVYADVVFDHKGGADGTEWVDAVEVNPSDRNQEISGTYQIQAWTKFDFPGRGNTYSSFKWRWYHFDGVDWDESRKLSRIYKFRGKAWDWPVDTENGNYDYLMYADLDMDHPEVVTELKNWGKWYVNTTNIDGFRLDAVKHIKFYFFPDWLSYVRSQTGKPLFTVGEYWSYDINKLHNYITHTNGTMSLFDAPLHNKFYTASKSGGAFDMRTLMTNTLMKDQPTLAVTFVDNHDTEPGQALQSWVDPWFKPLAYAFILTRQEGYPCVFYGDYYGIPQYNIPSLKSKIDPLLIARRDYAYGTQHDYLDHSDIIGWTREGVTEKPGSGLAALITDGPGGSKWMYVGKQHAGKVFYDLTGNRSDTVTINSDGWGEFKVNGGSVSVWVPRK

SEQ ID NO: 18712 - protein, 482 aa, Geobacillus stearothermophilus
AAPFNGTMMQYFEWYLPDDGTLWTKVANEANNLSSLGITALWLPPAYKGTSRSDVGYGVYDLYDLGEFNQKGTVRTKYGTKAQYLQAIQAAHAAGMQVYADVVFDHKGGADGTEWVDAVEVNPSDRNQEISGTYQIQAWTKFDFPGRGNTYSSFKWRWYHFDGVDWDESRKLSRIYKFRGKAWDWPVDTENGNYDYLMYADLDMDHPEVVTELKNWGKWYVNTTNIDGFRLDAVKHIKFHFFPDWLSYVRSQTGKPLFTVGEYWSYDINKLHNYITWTDGTMSLFDAPLHNKFYTASKSGGAFDMRTLMTNTLMKDQPTLAVTFVDNHDTEPGQALQSWVDPWFKPLAYAFILTRQEGYPCVFYGDYYGIPQYNIPSLKSKIDPLLIARRDYAYGTQHDYLDHSDIIGWTREGVTEKPGSGLAALITDGPGGSKWMYVGKQHAGKVFYDLTGNRSDTVTINSDGWGEFKVNGGSVSVWVPRK

SEQ ID NO: 18713 - protein, 482 aa, Geobacillus stearothermophilus
AAPFNGTMMQYFEWYLPDDGTLWTKVANEANNLSSLGITALWLPPAYKGTSRSDVGYGVYDLYDLGEFNQKGTVRTKYGTKAQYLQAIQAAHAAGMQVYADVVFDHKGGADGTEWVDAVEVNPSDRNQEISGTYQIQAWTKFDFPGRGNTYSSFKWRWYHFDGVDWDESRKLSRIYKFRGKAWDWPVDTENGNYDYLMYADLDMDHPEVVTELKNWGKWYVNTTNIDGFRLDAVKHIKFSFFPDWLSYVRSQTGKPLFTVGEYWSYDINKLHNYITKTDGTMSLFDAPLHNKFYTASKSGGAFDMRTLMTNTLMKDQPTLAVTFVDNHDTEPGQALQSWVDPWFKPLAYAFILTRQEGYPCVFYGDYYGIPQYNIPSLKSKIDPLLIARRDYAYGTQHDYLDHSDIIGWTREGVTEKPGSGLAALITDGPGGSKWMYVGKQHAGKVFYDLTGNRSDTVTINSDGWGEFKVNGGSVSVWVPRK

SEQ ID NO: 18714 - protein, 482 aa, Geobacillus stearothermophilus
AAPFNGTMMQYFEWYLPDDGTLWTKVANEANNLSSLGITALWLPPAYKGTSRSDVGYGVYDLYDLGEFNQKGTVRTKYGTKAQYLQAIQAAHAAGMQVYADVVFDHKGGADGTEWVDAVEVNPSDRNQEISGTYQIQAWTKFDFPGRGNTYSSFKWRWYHFDGVDWDESRKLSRIYKFRGKAWDWPVDTENGNYDYLMYADLDMDHPEVVTELKNWGKWYVNTTNIDGFRLDAVKHIKFQFFPDWLSYVRSQTGKPLFTVGEYWSYDINKLHNYITKTDGTMSLFDAPLHNKFYTASKSGGAFDMRTLMTNTLMKDQPTLAVTFVDNHDTEPGQALQSWVDPWFKPLAYAFILTRQEGYPCVFYGDYYGIPQYNIPSLKSKIDPLLIARRDYAYGTQHDYLDHSDIIGWTREGVTEKPGSGLAALITDGPGGSKWMYVGKQHAGKVFYDLTGNRSDTVTINSDGWGEFKVNGGSVSVWVPRK

SEQ ID NO: 18715 - protein, 482 aa, Geobacillus stearothermophilus
AAPFNGTMMQYFEWYLPDDGTLWTKVANEANNLSSLGITALWLPPAYKGTSRSDVGYGVYDLYDLGEFNQKGTVRTKYGTKAQYLQAIQAAHAAGMQVYADVVFDHKGGADGTEWVDAVEVNPSDRNQEISGTYQIQAWTKFDFPGRGNTYSSFKWRWYHFDGVDWDESRKLSRIYKFRGKAWDWPVDTENGNYDYLMYADLDMDHPEVVTELKNWGKWYVNTTNIDGFRLDAVKHIKFYFFPDWLSYVRSQTGKPLFTVGEYWSYDINKLHNYITFTNGTMSLFDAPLHNKFYTASKSGGAFDMRTLMTNTLMKDQPTLAVTFVDNHDTEPGQALQSWVDPWFKPLAYAFILTRQEGYPCVFYGDYYGIPQYNIPSLKSKIDPLLIARRDYAYGTQHDYLDHSDIIGWTREGVTEKPGSGLAALITDGPGGSKWMYVGKQHAGKVFYDLTGNRSDTVTINSDGWGEFKVNGGSVSVWVPRK

SEQ ID NO: 18716 - protein, 482 aa, Geobacillus stearothermophilus
AAPFNGTMMQYFEWYLPDDGTLWTKVANEANNLSSLGITALWLPPAYKGTSRSDVGYGVYDLYDLGEFNQKGTVRTKYGTKAQYLQAIQAAHAAGMQVYADVVFDHKGGADGTEWVDAVEVNPSDRNQEISGTYQIQAWTKFDFPGRGNTYSSFKWRWYHFDGVDWDESRKLSRIYKFRGKAWDWPVDTENGNYDYLMYADLDMDHPEVVTELKNWGKWYVNTTNIDGFRLDAVKHIKFSFFPDWLSYVRSQTGKPLFTVGEYWSYDINKLHNYITWTDGTMSLFDAPLHNKFYTASKSGGAFDMRTLMTNTLMKDQPTLAVTFVDNHDTEPGQALQSWVDPWFKPLAYAFILTRQEGYPCVFYGDYYGIPQYNIPSLKSKIDPLLIARRDYAYGTQHDYLDHSDIIGWTREGVTEKPGSGLAALITDGPGGSKWMYVGKQHAGKVFYDLTGNRSDTVTINSDGWGEFKVNGGSVSVWVPRK

SEQ ID NO: 18717 - protein, 482 aa, Geobacillus stearothermophilus
NGTMMQYFEWYLPDDGTLWTKVANEANNLSSLGITALWLPPAYKGTSRSDVGYGVYDLYDLGEFNQKGTVRTKYGTKAQYLQAIQAAHAAGMQVYADVVFDHKGGADGTEWVDAVEVNPSDRNQEISGTYQIQAWTKFDFPGRGNTYSSFKWRWYHFDGVDWDESRKLSRIYKFRGKAWDWEVDTEFGNYDYLMYADLDMDHPEVVTELKNWGKWYVNTTNIDGFRLDAVKHIKFSFFPDWLSYVRSQTGKPLFTVGEYWSYDINKLHNYITKTNGTMSLFDAPLHNKFYTASKSGGAFDMRTLMTNTLMKDQPTLAVTFVDNHDTEPGQALQSWVDPWFKPLAYAFILTRQEGYPCVFYGDYYGIPQYNIPSLKSKIDPLLIARRDYAYGTQHDYLDHSDIIGWTREGGTEKPGSGLAALITDGPGGSKWMYVGKQHAGKVFYDLTGNRSDTVTINSDGWGEFKVNGGSVSVWVPRKTTVS

SEQ ID NO: 18718 - protein, 484 aa, Geobacillus stearothermophilus
AAPFNGTMMQYFEWYLPDDGTLWTKVANEANNLSSLGITALWLPPAYKGTSRSDVGYGVYDLYDLGEFNQKGTVRTKYGTKAQYLQAIQAAHAAGMQVYADVVFDHKGGADGTEWVDAVEVNPSDRNQEISGTYQIQAWTKFDFPGRGNTYSSFKWRWYHFDGVDWDESRKLSRIYKFRGIGKAWDWPVDTENGNYDYLMYADLDMDHPEVVTELKNWGKWYVNTTNIDGFRLDAVKHIKFQFFPDWLSYVRSQTGKPLFTVGEYWSYDINKLHNYITKTDGTMSLFDAPLHNKFYTASKSGGAFDMRTLMTNTLMKDQPTLAVTFVDNHDTEPGQALQSWVDPWFKPLAYAFILTRQEGYPCVFYGDYYGIPQYNIPSLKSKIDPLLIARRDYAYGTQHDYLDHSDIIGWTREGVTEKPGSGLAALITDGPGGSKWMYVGKQHAGKVFYDLTGNRSDTVTINSDGWGEFKVNGGSVSVWVPRK

SEQ ID NO: 18719 - protein, 484 aa, Geobacillus stearothermophilus
AAPFNGTMMQYFEWYLPDDGTLWTKVANEANNLSSLGITALWLPPAYKGTSRSDVGYGVYDLYDLGEFNQKGTVRTKYGTKAQYLQAIQAAHAAGMQVYADVVFDHKGGADGTEWVDAVEVNPSDRNQEISGTYQIQAWTKFDFPGRGNTYSSFKWRWYHFDGVDWDESRKLSRIYKFRGIGKAWDWPVDTENGNYDYLMYADLDMDHPEVVTELKNWGKWYVNTTNIDGFRLDAVKHIKFFFFPDWLSYVRSQTGKPLFTVGEYWSYDINKLHNYITKTDGTMSLFDAPLHNKFYTASKSGGAFDMRTLMTNTLMKDQPTLAVTFVDNHDTEPGQALQSWVDPWFKPLAYAFILTRQEGYPCVFYGDYYGIPQYNIPSLKSKIDPLLIARRDYAYGTQHDYLDHSDIIGWTREGVTEKPGSGLAALITDGPGGSKWMYVGKQHAGKVFYDLTGNRSDTVTINSDGWGEFKVNGGSVSVWVPRK

SEQ ID NO: 18720 - protein, 484 aa, Geobacillus stearothermophilus
AAPFNGTMMQYFEWYLPDDGTLWTKVANEANNLSSLGITALWLPPAYKGTSRSDVGYGVYDLYDLGEFNQKGTVRTKYGTKAQYLQAIQAAHAAGMQVYADVVFDHKGGADGTEWVDAVEVNPSDRNQEISGTYQIQAWTKFDFPGRGNTYSSFKWRWYHFDGVDWDESRKLSRIYKFRGIGKAWDWPVDTENGNYDYLMYADLDMDHPEVVTELKNWGKWYVNTTNIDGFRLDAVKHIKFSFFPDWLSYVRSQTGKPLFTVGEYWSYDINKLHNYITYTDGTMSLFDAPLHNKFYTASKSGGAFDMRTLMTNTLMKDQPTLAVTFVDNHDTEPGQALQSWVDPWFKPLAYAFILTRQEGYPCVFYGDYYGIPQYNIPSLKSKIDPLLIARRDYAYGTQHDYLDHSDIIGWTREGVTEKPGSGLAALITDGPGGSKWMYVGKQHAGKVFYDLTGNRSDTVTINSDGWGEFKVNGGSVSVWVPRK

SEQ ID NO: 18721 - protein, 484 aa, Geobacillus stearothermophilus
AAPFNGTMMQYFEWYLPDDGTLWTKVANEANNLSSLGITALWLPPAYKGTSRSDVGYGVYDLYDLGEFNQKGTVRTKYGTKAQYLQAIQAAHAAGMQVYADVVFDHKGGADGTEWVDAVEVNPSDRNQEISGTYQIQAWTKFDFPGRGNTYSSFKWRWYHFDGVDWDESRKLSRIYKFRGIGKAWDWEVDTENGNYDYLMYADLDMDHPEVVTELKNWGKWYVNTTNIDGFRLDAVKHIKFSFFPDWLSYVRSQTGKPLFTVGEYWSGDINKLHNYITKTNGTMSLFDAPLHYKFYTASKSGGAFDMRTLMTNTLMKDQPTLAVTFVDNHDTEPGQALQSWVDPWFKPLAYAFILTRQEGYPCVFYGDYYGIPQYNIPSLKSKIDPLLIARRDYAYGTQHDYLDHSDIIGWTREGVTEKPGSGLAALITDGPGGSKWMYVGKQHAGKVFYDLTGNRSDTVTINSDGWGEFKVNGGSVSVWVPRK

SEQ ID NO: 18722 - protein, 484 aa, Geobacillus stearothermophilus
AAPFNGTMMQYFEWYLPDDGTLWTKVANEANNLSSLGITALWLPPAYKGTSRSDVGYGVYDLYDLGEFNQKGTVRTKYGTKAQYLQAIQAAHAAGMQVYADVVFDHKGGADGTEWVDAVEVNPSDRNQEISGTYQIQAWTKFDFPGRGNTYSSFKWRWYHFDGVDWDESRKLSRIYKFRGIGKAWDWPVDTENGNYDYLMYADLDMDHPEVVTELKNWGKWYVNTTNIDGFRLDAVKHIKFYFFPDWLSYVRSQTGKPLFTVGEYWSYDINKLHNYITKTNGTMSLFDAPLHNKFYTASKSGGAFDMRTLMTNTLMKDQPTLAVTFVDNHDTEPGQALQSWVDPWFKPLAYAFILTRQEGYPCVFYGDYYGIPQYNIPSLKSKIDPLLIARRDYAYGTQHDYLDHSDIIGWTREGVTEKPGSGLAALITDGPGGSKWMYVGKQHAGKVFYDLTGNRSDTVTINSDGWGEFKVNGGSVSVWVPRK

SEQ ID NO: 18723 - protein, 484 aa, Geobacillus stearothermophilus
AAPFNGTMMQYFEWYLPDDGTLWTKVANEANNLSSLGITALWLPPAYKGTSRSDVGYGVYDLYDLGEFNQKGTVRTKYGTKAQYLQAIQAAHAAGMQVYADVVFDHKGGADGTEWVDAVEVNPSDRNQEISGTYQIQAWTKFDFPGRGNTYSSFKWRWYHFDGVDWDESRKLSRIYKFRGIGKAWDWPVDTENGNYDYLMYADLDMDHPEVVTELKNWGKWYVNTTNIDGFRLDAVKHIKFSFFPDWLSYVRSQTGKPLFTVGEYWSYDINKLHNYITWTDGTMSLFDAPLHNKFYTASKSGGAFDMRTLMTNTLMKDQPTLAVTFVDNHDTEPGQALQSWVDPWFKPLAYAFILTRQEGYPCVFYGDYYGIPQYNIPSLKSKIDPLLIARRDYAYGTQHDYLDHSDIIGWTREGVTEKPGSGLAALITDGPGGSKWMYVGKQHAGKVFYDLTGNRSDTVTINSDGWGEFKVNGGSVSVWVPRK

SEQ ID NO: 18724 - protein, 481 aa, Geobacillus stearothermophilus
AAPFNGTMMQYFEWYLPDDGTLWTKVANEANNLSSLGITALWLPPAYKGTSRSDVGYGVYDLYDLGEFNQKGTVRTKYGTKAQYLQAIQAAHAAGMQVYADVVFDHKGGADGTEWVDAVEVNPSDRNQEISGTYQIQAWTKFDFPGRGNTYSSFKWRWYHFDGVDWDESRKLSRIYKFRGKAWDWEVDTEFGNYDYLMYADLDMDHPEVVTELKNWGKWYVNTTNIDGFRLDAVKHIKFSFFPDWLSYVRSQTGKPLFTVGEYWSYDINKLHNYITKTDGTMSLFDAPLHNKFYTASKSGGAFDMRTLMTNTLMKDQPTLAVTFVDNHDTEPVQALQSWVDPWFKPLAYAFILTRQEGYPCVFYGDYYGIPQYNIPSLKSKIDPLLIARRDYAYGTQHDYLDHSDIIGWTREGGTEKPGSGLAALITDGPGGSKWMYVGKQHAGKVFYDLTGNRSDTVTINSDGWGEFKVNGGSVSVWVPR

SEQ ID NO: 18725 - protein, 482 aa, Synthetic construct
AAPFNGTMMQYFEWYLPDDGTLWTKVANEANNLSSLGITALWLPPAYKGTSRSDVGYGVYDLYDLGEFNQKGAVRTKYGTKAQYLQAIQAAHAAGMQVYADVVFNHKAGADGTEFVDAVEVDPSNRNQETSGTYQIQAWTKFDFPGRGNTYSSFKWRWYHFDGTDWDESRKLNRIYKFSTGKAWDWEVDTENGNYDYLMFADLDMDHPEVVTELKNWGKWYVNTTNIDGFRLDAVKHIKFSFFPDWLSYVRSQTGKPLFTVGEYWSYDINKLHNYIMKTNGTMSLFDAPLHNKFYTASKSGGTFDMRTLMTNTLMKDQPTLAVTFVDNHDTEPGQALQSWVDPWFKPLAYAFILTRQEGYPCVFYGDYYGIPQYNIPSLKSKIDPLLIARRDYAYGTQHDYLDHSDIIGWTREGVTEKPGSGLAALITDGPGGSKWMYVGKQHAGKVFYDLTGNRSDTVTINSDGWGEFKVNGGSVSVWVPR

SEQ ID NO: 18726 - protein, 483 aa, Geobacillus stearothermophilus
AAPFNGTMMQYFEWYLPDDGTLWTKVANEANNLSSLGITALWLPPAYKGTSRSDVGYGVYDLYDLGEFNQKGTVRTKYGTKAQYLQAIQAAHAAGMQVYADVVFDHKGGADGTEWVDAVEVNPSDRNQEISGTYQIQAWTKFDFPGRGNTYSSFKWRWYHFDGVDWDESRKLSRIYKFRGIGKAWDWEVDTENGNYDYLMYADLDMDHPEVVTELKNWGKWYVNTTNIDGFRLDAVKHIKFSFFPDWLSYVRSQTGKPLFTVGEYWSYDINKLHNYITKTDGTMSLFDAPLHNKFYTASKSGGAFDMRTLMTNTLMKDQPTLAVTFVDNHDTEPGQALQSWVDPWFKPLAYAFILTRQEGYPCVFYGDYYGIPQYNIPSLKSKIDPLLIARRDYAYGTQHDYLDHSDIIGWTREGGTEKPGSGLAALITDGPGGSKWMYVGKQHAGKVFYDLTGNRSDTVTINSDGWGEFKVNGGSVSVWVPR

SEQ ID NO: 18727 - protein, 491 aa, Geobacillus stearothermophilus
AAPFNGTMMQYFEWYLPDDGTLWTKVANEANNLSSLGITALWLPPAYKGTSRSDVGYGAYDLYDLGEFNQKGTVRTKYGTKAQYLQAIRAAHAAGMQVYADVVFDHKGGADGTEWVDAVEVNPSDRNQVISGTYQIQAWTKFDFPGRGNTYSSFKWRWYHFDGVDWDESRKLSRIYLFEGKAWDWEVDTEFGNYDYLMYADLDMDHPEVVTELKNWGPWYVLTTNIDGFRLDAVKHIKFSFFPDWLSYVRSSTGKPLFTVGEYWSYDLNKLHNYITKTNGTMSLFDAPLHNKFYTASKSGGAFDMRTLMTNTLMKDQPTLAVTFVDNHDTEPGQALQSWVDPWFKPLAYAFILTRQEGYPCVFYGDYYGIPQYNIPSLKSKIDPLLIARRDYAYGTQHDYLDHSDIIGWTREGVTEKPGSGLAALITDGPGGSKWMYVGKQHAGKVFYDLTGNRSDTVTINSDGWGEFKVNGGSVSVWVPRKTTVSTIARP

SEQ ID NO: 18728 - protein, 491 aa, Geobacillus stearothermophilus
AAPFNGTMMQYFEWYLPDDGTLWTKVANEANNLSSLGITALWLPPAYKGTSRSDVGYGAYDLYDLGEFNQKGTVRTKYGTKAQYLQAIRAAHAAGMQVYADVVFDHKGGADGTEWVDAVEVNPSDRNQVISGTYQIQAWTKFDFPGRGNTYSSFKFRWYHFDGVDFDESRKLSRIYLFEGKAWDWEVDTEFGNYDYLMYADLDMDYPEVVTELKNWGPWYVLTTNIDGFRLDAVKHIKFSFFPDWLSYVRSSTGKPLFTVGEYWSYDINKLHNYITKTDGTMSLFDAPLHNKFYTASKSGGAFDMRTLMTNTLMKDQPTLAVTFVDNHDTEPGQALQSWVDPWFKPLAYAFILTRQEGYPCVFYGDYYGIPQYNIPSLKSKIDPLLIARRDYAYGTQHDYLDHSDIIGWTREGGTEKPGSGLAALITDGPGGSKWMYVGKQHAGKVFYDLTGNRSDTVTINSDGWGEFKVNGGSVSVWVPRKTTVSTIARP

SEQ ID NO: 18729 - protein, 491 aa, Geobacillus stearothermophilus
AAPFNGTMMQYFEWYLPDDGTLWTKVANEANNLSSLGITALWLPPAYKGTSRSDVGYGVYDLYDLGEFNQKGTVRTKYGTKAQYLQAIQAAHAAGMQVYADVVFDHKGGADGTEWVDAVEVNPSDRNQEISGTYQIQAWTKFDFPGRGNTYSSFKWRWYHFDGVDWDESRKLSRIYKFRGKAWDWEVDTEFGNYDYLMYADLDMDHPEVVTELKNWGKWYVNTTNIDGFRLDAVKHIKFSFFPDWLSYVRSQTGKPLFTVGEYWSYDINKLHNYITKTNGTTSLFDAPLHNKFYTASKSGGAFDMRTLMTNTLMKDQPTLAVTFVDNHDTEPGQALQSWVDPWFKPLAYAFILTRQEGYPCVFYGDYYGIPQYNIPSLKSKIDPLLIARRDYAYGTQHDYLDHSDIIGWTREGVTEKPGSGLAALITDGPGGSKWMYVGKQHAGKVFYDLTGNRSDTVTINSDGWGEFKVNGGSVSVWVPRKTTVSTIARP

SEQ ID NO: 18730 - protein, 491 aa, Geobacillus stearothermophilus
AAPFNGTMMQYFEWYLPDDGTLWTKVANEANNLSSLGITALWLPPAYKGTSRSDVGYGIYDLYDLGEFNQKGTVRTKYGTKAQYLQAIQAAHAAGMQVYADVVFDHKGGADGTEWVDAVEVNPSDRNQEISGTYQIQAWTKFDFPGRGNTYSSFKWRWYHFDGVDWDESRKLSRIYKFRGKAWDWEVDTEFGNYDYLMYADLDMDHPEVVTELKNWGKWYVNTTNIDGFRLDAVKHIKFSFFPDWLSYVRSQTGKPLFTVGEYWSYDINKLHNYITKTNGTMSLFDAPLHNKFYTASKSGGAFDMRTLMTNTLMKDQPTLAVTFVDNHDTEPGQALQSWVDPWFKPLAYAFILTRQEGYPCVFYGDYYGIPQYNIPSLKSKIDPLLIARRDYAYGTQHDYLDHSDIIGWTREGVTEKPGSGLAALITDGPGGSKWMYVGKQHAGKVFYDLTGNRSDTVTINSDGWGEFKVNGGSVSVWVPRKTTVSTIARP

SEQ ID NO: 18731 - protein, 491 aa, Geobacillus stearothermophilus
AAPFNGTMMQYFEWYLPDDGTLWTKVANEANNLSSLGITALWLPPAYKGTSRSDVGYGQYDLYDLGEFNQKGTVRTKYGTKAQYLQAIQAAHAAGMQVYADVVFDHKGGADGTEWVDAVEVNPSDRNQEISGTYQIQAWTKFDFPGRGNTYSSFKWRWYHFDGVDWDESRKLSRIYKFRGKAWDWEVDTEFGNYDYLMYADLDMDHPEVVTELKNWGKWYVNTTNIDGFRLDAVKHIKFSFFPDWLSYVRSQTGKPLFTVGEYWSYDINKLHNYITKTNGTMSLFDAPLHNKFYTASKSGGAFDMRTLMTNTLMKDQPTLAVTFVDNHDTEPGQALQSWVDPWFKPLAYAFILTRQEGYPCVFYGDYYGIPQYNIPSLKSKIDPLLIARRDYAYGTQHDYLDHSDIIGWTREGVTEKPGSGLAALITDGPGGSKWMYVGKQHAGKVFYDLTGNRSDTVTINSDGWGEFKVNGGSVSVWVPRKTTVSTIARP

SEQ ID NO: 18732 - protein, 491 aa, Geobacillus stearothermophilus
AAPFNGTMMQYFEWYLPDDGTLWTKVANEANNLSSLGITALWLPPAYKGTSRSDVGYGEYDLYDLGEFNQKGTVRTKYGTKAQYLQAIQAAHAAGMQVYADVVFDHKGGADGTEWVDAVEVNPSDRNQEISGTYQIQAWTKFDFPGRGNTYSSFKWRWYHFDGVDWDESRKLSRIYKFRGKAWDWEVDTEFGNYDYLMYADLDMDHPEVVTELKNWGKWYVNTTNIDGFRLDAVKHIKFSFFPDWLSYVRSQTGKPLFTVGEYWSYDINKLHNYITKTNGTMSLFDAPLHNKFYTASKSGGAFDMRTLMTNTLMKDQPTLAVTFVDNHDTEPGQALQSWVDPWFKPLAYAFILTRQEGYPCVFYGDYYGIPQYNIPSLKSKIDPLLIARRDYAYGTQHDYLDHSDIIGWTREGVTEKPGSGLAALITDGPGGSKWMYVGKQHAGKVFYDLTGNRSDTVTINSDGWGEFKVNGGSVSVWVPRKTTVSTIARP

SEQ ID NO: 18733 - protein, 491 aa, Homo sapiens
AAPFNGTMMQYFEWYLPDDGTLWTKVANEANNLSSLGITALWLPPAYKGTSRSDVGYGAYDLYDLGEFNQKGTVRTKYGTKAQYLQAIRAAHAAGMQVYADVVFDHKGGADDTEWVDAVEVNPSDRNQVISGTYQIQAWTKFDFPGRGNTYSSFKWRWYHFDGVDWDESRKLSRIYLFEGKAWDWEVDTEFGNYDYLMYADLDMDHPEVVTELKNWGPWYVLTTNIDGFRLDAVKHIKFSFFPDWLSYVRSSTGKPLFTVGEYWSYDINKLHNYITKTNGTMSLFDAPLHNKFYTASKSGGAFDMRTLMTNTLMKDQPTLAVTFVDNHDTEPGQALQSWVDPWFKPLAYAFILTRQEGYPCVFYGDYYGIPQYNIPSLKSKIDPLLIARRDYAYGTQHDYLDHSDIIGWTREGVTEKPGSGLAALITDGPGGSKWMYVGKQHAGKVFYDLTGNRSDTVTINSDGWGEFKVNGGSVSVWVPRKTTVSTIARP

SEQ ID NO: 18734 - protein, 491 aa, Geobacillus stearothermophilus
AAPFNGTMMQYFEWYLPDDGTLWTKVANEANNLSSLGITALWLPPAYKGTSRSDVGYGAYDLYDLGEFNQKGTVRTKYGTKAQYLQAIRAAHAAGMQVYADVVFDHKGGADGTEWVDAVEVNPSDRNQVISGTYQIQAWTKFDFPGRGNTYSSFKWRWYHFDGVDWDESRKLSRIYLFEGKAWDWEVDTEFGNYDYLMYADLDMDYPEVVTELKNWGPWYVLTTNIDGFRLDAVKHIKFSFFPDWLSYVRSSTGKPLFTVGEYWSYDINKLHNYITKTNGTMSLFDAPLHNKFYTASKSGGAFDMRTLMTNTLMKDQPTLAVTFVDNHDTEPGQALQSWVDPWFKPLAYAFILTRQEGYPCVFYGDYYGIPQYNIPSLKSKIDPLLIARRDYAYGTQHDYLDHSDIIGWTREGVTEKPGSGLAALITDGPGGSKWMYVGKQHAGKVFYDLTGNRSDTVTINSDGWGEFKVNGGSVSVWVPRKTTVSTIARP

SEQ ID NO: 18735 - protein, 491 aa, Geobacillus stearothermophilus
AAPFNGTMMQYFEWYLPDDGTLWTKVANEANNLSSLGITALWLPPAYKGTSRSDVGYGAYDLYDLGEFNQKGTVRTKYGTKAQYLQAIRAAHAAGMQVYADVVFDHKGGADGTEWVDAVEVNPSDRNQVISGTYQIQAWTKFDFPGRGNTYSSFKWRWYHFDGVDWDESRKLSRIYLFEGKAWDWEVDTEFGNYDYLMYADLDMDHPEVVTELKNWGPWYVLTTNIDGFRLDAVKHIKFSFFPDWLSYVRSSTGKPLFTVGEYWSYDINKLHNFITKTNGTMSLFDAPLHNKFYTASKSGGAFDMRTLMTNTLMKDQPTLAVTFVDNHDTEPGQALQSWVDPWFKPLAYAFILTRQEGYPCVFYGDYYGIPQYNIPSLKSKIDPLLIARRDYAYGTQHDYLDHSDIIGWTREGVTEKPGSGLAALITDGPGGSKWMYVGKQHAGKVFYDLTGNRSDTVTINSDGWGEFKVNGGSVSVWVPRKTTVSTIARP

SEQ ID NO: 18736 - protein, 491 aa, Geobacillus stearothermophilus
AAPFNGTMMQYFEWYLPDDGTLWTKVANEANNLSSLGITALWLPPAYKGTSRSDVGYGAYDLYDLGEFNQKGTVRTKYGTKAQYLQAIRAAHAAGMQVYADVVFDHKGGADGTEWVDAVEVNPSDRNQVISGTYQIQAWTKFDFPGRGNTYSSFKWRWYHFDGVDWDESRKLSRIYLFEGKAWDWEVDTEFGNYDYLMYADLDMDHPEVVTELKNWGPWYVLTTNIDGFRLDAVKHIKFSFFPDWLSYVRSSTGKPLFTVGEYWSYEINKLHNYITKTNGTMSLFDAPLHNKFYTASKSGGAFDMRTLMTNTLMKDQPTLAVTFVDNHDTEPGQALQSWVDPWFKPLAYAFILTRQEGYPCVFYGDYYGIPQYNIPSLKSKIDPLLIARRDYAYGTQHDYLDHSDIIGWTREGVTEKPGSGLAALITDGPGGSKWMYVGKQHAGKVFYDLTGNRSDTVTINSDGWGEFKVNGGSVSVWVPRKTTVSTIARP

SEQ ID NO: 18737 - protein, 491 aa, Geobacillus stearothermophilus
AAPFNGTMMQYFEWYLPDDGTLWTKVANEANNLSSLGITALWLPPAYKGTSRSDVGYGVYDLYDLGEFNQKGTVRTKYGTKAQYLQAIQAAHAAGMQVYADVVFDHKGGADGTEWVDAVEVNPSDRNQEISGTYQIQAWTKFDFPGRGNTYSSFKWRWYHFDGVDWDESRKLSRIYKFRGKAWDWEVDTEFGNYDYLMYADLDMDHPEVVTELKNWGKWYVNTTNIDGFRLDAVKHIKFSFFPDWLSYVRSQTGKPLFTVGEYWSYDINKLHNYITKTNGTMSLFDAPLHNKFYTASKSGGAFDMRTLMTNTLMKDQPTLAVTFVDNHDTEPGQALQSWVDPWFKPLAYAFILTRQEGYPCVFYGDYYGIPQYNIPSLKSKIDPLLIARRDYAYGTQHDYLDHSDIIGWTREGVTEKPGSGLAALITDGPGGSKWMYVGKQHAGKVFYDLTGNRSDTVTINSDGWGEFKVNGGSVSVWVPRKTTVSTIARP

SEQ ID NO: 18738 - protein, 491 aa, Geobacillus stearothermophilus
AAPFNGTMMQYFEWYLPDDGTLWTKVANEANNLSSLGITALWLPPAYKGTSRSDVGYGAYDLYDLGEFNQKGTVRTKYGTKAQYLQAIRAAHAAGMQVYADVVFDHKGGADGTEWVDAVEVNPSDRNQVISGTYQIQAWTKFDFPGRGNTYSSFKWRWYHFDGVDWDESRKLSRIYLFEGKAWDWEVDTEFGNYDYLMYADLDMDHPEVVTELKNWGPWYVLTTNIDGFRLDAVKHIKFSFFPDWLSYVRSSTGKPLFTVGEYWSYDINKLKNYITKTNGTMSLFDAPLHNKFYTASKSGGAFDMRTLMTNTLMKDQPTLAVTFVDNHDTEPGQALQSWVDPWFKPLAYAFILTRQEGYPCVFYGDYYGIPQYNIPSLKSKIDPLLIARRDYAYGTQHDYLDHSDIIGWTREGVTEKPGSGLAALITDGPGGSKWMYVGKQHAGKVFYDLTGNRSDTVTINSDGWGEFKVNGGSVSVWVPRKTTVSTIARP

SEQ ID NO: 18739 - protein, 493 aa, Geobacillus stearothermophilus
AAPFNGTMMQYFEWYLPDDGTLWTKVANEANNLSSLGITALWLPPAYKGTSRSDVGYGAYDLYDLGEFNQKGTVRTKYGTKAQYLQAIQAAHAAGMQVYADVVFDHKGGADGTEWVDAVEVNPSDRNQVISGTYQIQAWTKFDFPGRGNTYSSFKWRWYHFDGVDWDESRKLSRIYLFEGIGKAWDWEVDTENGNYDYLMYADLDMDHPEVVTELKNWGPWYVLTTNIDGFRLDAVKHIKFSFFPDWTSYVRSSTGKPLFTVGEYWSYDINKLHNYITKTNGTMSLFDAPLHNKFYTASKSGGAFDMRTLMTNTLMKDQPTLAVTFVDNHDTEPGQALQSWVDPWFKPLAYAFILTRQEGYPCVFYGDYYGIPQYNIPSLKSKIDPLLIARRDYAYGTQHDYLDHSDIIGWTREGVTEKPGSGLAALITDGPGGSKWMYVGKQHAGKVFYDLTGNRSDTVTINSDGWGEFKVNGGSVSVWVPRKTTVSTIARP

SEQ ID NO: 18740 - protein, 493 aa, Geobacillus stearothermophilus
AAPFNGTMMQYFEWYLPDDGTLWTKVANEANNLSSLGITALWLPPAYKGTSRSDVGYGVYDLYDLGEFNQKGTVRTKYGTKAQYLQAIQAAHAAGMQVYADVVFDHKGGADGTEWVDAVEVNPSDRNQVISGTYQIQAWTKFDFPGRGNTYSSFKWRWYHFDGVDWDESRKLSRIYLFVGIGKAWDWEVDTENGNYDYLMYADLDMDHPEVVTELKNWGPWYVLTTNIDGFRLDAVKHIKFQFFPDWLSYVRSSTGKPLFTVGEYWSYDINKLHNYITKTNGTMSLFDAPLHNKFYTASKSGGAFDMRTLMTNTLMKDQPTLAVTFVDNHDTEPGQALQSWVDPWFKPLAYAFILTRQEGYPCVFYGDYYGIPQYNIPSLKSKIDPLLIARRDYAYGTQHDYLDHSDIIGWTREGVTEKPGSGLAALITDGPGGSKWMYVGKQHAGKVFYDLTGNRSDTVTINSDGWGEFKVNGGSVSVWVPRKTTVSTIARP

SEQ ID NO: 18741 - protein, 493 aa, Geobacillus stearothermophilus
AAPFNGTMMQYFEWYLPDDGTLWTKVANEANNLSSLGITALWLPPAYKGTSRSDVGYGVYDLYDLGEFNQKGTVRTKYGTKAQYLQAIQAAHAAGMQVYADVVFDHKGGADGTEWVDAVEVNPSDRNQEISGTYQIQAWTKFDFPGRGNTYSSFKWRWYHFDGVDWDESRKLSRIYKFRGIGKAWDWEVDTEFGNYDYLMYADLDMDHPEVVTELKNWGKWYVNTTNIDGFRLDAVKHIKFSFFPDWLSYVRSQTGKPLFTVGEYWSYDINKLHNYITKTNGTMSLFDAPLHNKFYTASKSGGAFDMRTLMTNTLMKDQPTLAVTFVDNHDTEPGQALQSWVDPWFKPLAYAFILTRQEGYPCVFYGDYYGIPQYNIPSLKSKIDPLLIARRDYAYGTQHDYLDHSDIIGWTREGVTEKPGSGLAALITDGPGGSKWMYVGKQHAGKVFYDLTGNRSDTVTINSDGWGEFKVNGGSVSVWVPRKTTVSTIARP

SEQ ID NO: 18742 - protein, 493 aa, Geobacillus stearothermophilus
AAPFNGTMMQYFEWYLPDDGTLWTKVANEANNLSSLGITALWLPPAYKGTSRSDVGYGAYDLYDLGEFNQKGTVRTKYGTKAQYLQAIQAAHAAGMQVYADVVFDHKGGADGTEWVDAVEVNPSDRNQVISGTYQIQAWTKFDFPGRGNTYSSFKWRWYHFDGVDWDESRKLSRIYLFEGIGKAWDWEVDTENGNYDYLMYADLDMDHPEVVTELKNWGPWYVLTTNIDGFRLDAVKHIKFQFFPDWLSYVRSSTGKPLFTVGEYWSYDINKLKNYITKTNGTMSLFDAPLHNKFYTASKSGGAFDMRTLMTNTLMKDQPTLAVTFVDNHDTEPGQALQSWVDPWFKPLAYAFILTRQEGYPCVFYGDYYGIPQYNIPSLKSKIDPLLIARRDYAYGTQHDYLDHSDIIGWTREGVTEKPGSGLAALITDGPGGSKWMYVGKQHAGKVFYDLTGNRSDTVTINSDGWGEFKVNGGSVSVWVPRKTTVSTIARP

SEQ ID NO: 18743 - protein, 493 aa, Geobacillus stearothermophilus
AAPFNGTMMQYFEWYLPDDGTLWTKVANEANNLSSLGITALWLPPAYKGTSRSDVGYGAYDLYDLGEFNQKGTVRTKYGTKAQYLQAIRAAHAAGMQVYADVVFDHKGGADGTEWVDAVEVNPSDRNQVISGTYQIQAWTKFDFPGRGNTYSSFKWRWYHFDGVDWDESRKLSRIYLFEGIGKAWDWEVDTENGNYDYLMYADLDMDHPEVVTELKNWGPWYVLTTNIDGFRLDAVKHIKFSFFPDWLSYVRSSTGKPLFTVGEYWSYDINKLHNYITKTNGTMSLFDAPLHNKFYTASKSGGAFDMRTLMTNTLMKDQPTLAVTFVDNHDTEPGQALQSWVDPWFKPLAYAFILTRQEGYPCVFYGDYYGIPQYNIPSLKSKIDPLLIARRDYAYGTQHDYLDHSDIIGWTREGVTEKPGSGLAALITDGPGGSKWMYVGKQHAGKVFYDLTGNRSDTVTINSDGWGEFKVNGGSVSVWVPRKTTVSTIARP

SEQ ID NO: 18744 - protein, 493 aa, Geobacillus stearothermophilus
AAPFNGTMMQYFEWYLPDDGTLWTKVANEANNLSSLGITALWLPPAYKGTSRSDVGYGAYDLYDLGEFNQKGTVRTKYGTKAQYLQAIQAAHAAGMQVYADVVFDHKGGADGTEWVDAVEVNPSDRNQVISGTYQIQAWTKFDFPGRGNTYSSFKWRWYHFDGVDWDESRKLSRIYLFEGIGKAWDWEVDTENGNYDYLMYADLDMDHPEVVTELKNWGPWYVLTTNIDGFRLDAVKHIKFQFFPDWLSYVRSSTGKPLFTVGEYWSYDINKLHNFITKTNGTMSLFDAPLHNKFYTASKSGGAFDMRTLMTNTLMKDQPTLAVTFVDNHDTEPGQALQSWVDPWFKPLAYAFILTRQEGYPCVFYGDYYGIPQYNIPSLKSKIDPLLIARRDYAYGTQHDYLDHSDIIGWTREGVTEKPGSGLAALITDGPGGSKWMYVGKQHAGKVFYDLTGNRSDTVTINSDGWGEFKVNGGSVSVWVPRKTTVSTIARP

SEQ ID NO: 18745 - protein, 493 aa, Geobacillus stearothermophilus
AAPFNGTMMQYFEWYLPDDGTLWTKVANEANNLSSLGITALWLPPAYKGTSRSDVGYGVYDLYDLGEFNQKGTVRTKYGTKAQYLQAIQAAHAAGMQVYADVVFDHKGGADGTEWVDAVEVNPSDRNQEISGTYQIQAWTKFDFPGRGNTYSSFKWRWYHFDGVDWDESRKLSRIYKFRGIGKAWDWEVDTENGNYDYLMYADLDMDHPEVVTELKNWGKWYVNTTNIDGFRLDAVKHIKFSFFPDWLSYVRSQTGKPLFTVGEYWSYDINKLHNYITKTNGTVSLFDAPLHNKFYTASKSGGAFDMRTLMTNTLMKDQPTLAVTFVDNHDTEPGQALQSWVDPWFKPLAYAFILTRQEGYPCVFYGDYYGIPQYNIPSLKSKIDPLLIARRDYAYGTQHDYLDHSDIIGWTREGVTEKPGSGLAALITDGPGGSKWMYVGKQHAGKVFYDLTGNRSDTVTINSDGWGEFKVNGGSVSVWVPRKTTVSTIARP

SEQ ID NO: 18746 - protein, 493 aa, Geobacillus stearothermophilus
AAPFNGTMMQYFEWYLPDDGTLWTKVANEANNLSSLGITALWLPPAYKGTSRSDVGYGAYDLYDLGEFNQKGTVRTKYGTKAQYLQAIQAAHAAGMQVYADVVFDHKGGADGTEWVDAVEVNPSDRNQVISGTYQIQAWTKFDFPGRGNTYSSFKWRWYHFDGVDWDESRKLSRIYLFEGIGKAWDWEVDTENGNYDYLMYADLDMDHPEVVTELKNWGPWYVLTTNIDGFRLDAVKHIKFQFFPDWTSYVRSSTGKPLFTVGEYWSYDINKLHNYITKTNGTMSLFDAPLHNKFYTASKSGGAFDMRTLMTNTLMKDQPTLAVTFVDNHDTEPGQALQSWVDPWFKPLAYAFILTRQEGYPCVFYGDYYGIPQYNIPSLKSKIDPLLIARRDYAYGTQHDYLDHSDIIGWTREGVTEKPGSGLAALITDGPGGSKWMYVGKQHAGKVFYDLTGNRSDTVTINSDGWGEFKVNGGSVSVWVPRKTTVSTIARP

SEQ ID NO: 18747 - protein, 493 aa, Geobacillus stearothermophilus
AAPFNGTMMQYFEWYLPDDGTLWTKVANEANNLSSLGITALWLPPAYKGTSRSDVGYGAYDLYDLGEFNQKGTVRTKYGTKAQYLQAIQAAHAAGMQVYADVVFDHKGGADGTEWVDAVEVNPSDRNQVISGTYQIQAWTKFDFPGRGNTYSSFKWRWYHFDGVDWDESRKLSRIYLFEGIGKAWDWEVDTENGNYDYLMYADLDMDYPEVVTELKNWGPWYVLTTNIDGFRLDAVKHIKFQFFPDWLSYVRSSTGKPLFTVGEYWSYDINKLHNYITKTNGTTSLFDAPLHNKFYTASKSGGAFDMRTLMTNTLMKDQPTLAVTFVDNHDTEPGQALQSWVDPWFKPLAYAFILTRQEGYPCVFYGDYYGIPQYNIPSLKSKIDPLLIARRDYAYGTQHDYLDHSDIIGWTREGVTEKPGSGLAALITDGPGGSKWMYVGKQHAGKVFYDLTGNRSDTVTINSDGWGEFKVNGGSVSVWVPRKTTVSTIARP

SEQ ID NO: 18748 - protein, 493 aa, Geobacillus stearothermophilus
AAPFNGTMMQYFEWYLPDDGTLWTKVANEANNLSSLGITALWLPPAYKGTSRSDVGYGVYDLYDLGEFNQKGTVRTKYGTKAQYLQAIQAAHAAGMQVYADVVFDHKGGADGTEWVDAVEVNPSDRNQEISGTYQIQAWTKFDFPGRGNTYSSFKWRWYHFDGVDWDESRKLSRIYKFRGSGKAWDWEVDTENGNYDYLMYADLDMDHPEVVTELKNWGKWYVNTTNIDGFRLDAVKHIKFSFFPDWLSYVRSQTGKPLFTVGEYWSYDINKLHNYITKTNGTMSLFDAPLHNKFYTASKSGGAFDMRTLMTNTLMKDQPTLAVTFVDNHDTEPGQALQSWVDPWFKPLAYAFILTRQEGYPCVFYGDYYGIPQYNIPSLKSKIDPLLIARRDYAYGTQHDYLDHSDIIGWTREGVTEKPGSGLAALITDGPGGSKWMYVGKQHAGKVFYDLTGNRSDTVTINSDGWGEFKVNGGSVSVWVPRKTTVSTIARP

SEQ ID NO: 18749 - protein, 493 aa, Geobacillus stearothermophilus
AAPFNGTMMQYFEWYLPDDGTLWTKVANEANNLSSLGITALWLPPAYKGTSRSDVGYGAYDLYDLGEFNQKGTVRTKYGTKAQYLQAIQAAHAAGMQVYADVVFDHKGGADDTEWVDAVEVNPSDRNQVISGTYQIQAWTKFDFPGRGNTYSSFKWRWYHFDGVDWDESRKLSRIYLFEGIGKAWDWEVDTENGNYDYLMYADLDMDHPEVVTELKNWGPWYVLTTNIDGFRLDAVKHIKFSFFPDWLSYVRSSTGKPLFTVGEYWSYDINKLHNYITKTNGTMSLFDAPLHNKFYTASKSGGAFDMRTLMTNTLMKDQPTLAVTFVDNHDTEPGQALQSWVDPWFKPLAYAFILTRQEGYPCVFYGDYYGIPQYNIPSLKSKIDPLLIARRDYAYGTQHDYLDHSDIIGWTREGVTEKPGSGLAALITDGPGGSKWMYVGKQHAGKVFYDLTGNRSDTVTINSDGWGEFKVNGGSVSVWVPRKTTVSTIARP

SEQ ID NO: 18750 - protein, 493 aa, Geobacillus stearothermophilus
AAPFNGTMMQYFEWYLPDDGTLWTKVANEANNLSSLGITALWLPPAYKGTSRSDVGYGVYDLYDLGEFNQKGTVRTKYGTKAQYLQAIQAAHAAGMQVYADVVFDHKGGADGTEWVDAVEVNPSDRNQVISGTYQIQAWTKFDFPGRGNTYSSFKWRWYHFDGVDWDESRKLSRIYLFEGIGKAWDWEVDTENGNYDYLMYADLDMDHPEVVTELKNWGPWYVLTTNIDGFRLDAVKHIKFQFFPDWLSYVRSSTGKPLFTVGEYWSYDINKLHNYITKTNGTMSLFDAPLHNKFYTASKSGGAFDMRTLMTNTLMKDQPTLAVTFVDNHDTEPGQALQSWVDPWFKPLAYAFILTRQEGYPCVFYGDYYGIPQYNIPSLKSKIDPLLIARRDYAYGTQHDYLDHSDIIGWTREGVTEKPGSGLAALITDGPGGSKWMYVGKQHAGKVFYDLTGNRSDTVTINSDGWGEFKVNGGSVSVWVPRKTTVSTIARP

SEQ ID NO: 18751 - protein, 493 aa, Geobacillus stearothermophilus
AAPFNGTMMQYFEWYLPDDGTLWTKVANEANNLSSLGITALWLPPAYKGTSRSDVGYGVYDLYDLGEFNQKGTVRTKYGTKAQYLQAIQAAHAAGMQVYADVVFDHKGGADGTEWVDAVEVNPSDRNQVISGTYQIQAWTKFDFPGRGNTYSSFKWRWYHFDGVDWDESRKLSRIYLFEGIGKAWDWEVDTENGNYDYLMYADLDMDHPEVVTELKNWGPWYVLTTNIDGFRLDAVKHIKFQFFPDWLSYVRSSTGKPLFTVGEYWSYDINKLHNYITKTNGTTSLFDAPLHNKFYTASKSGGAFDMRTLMTNTLMKDQPTLAVTFVDNHDTEPGQALQSWVDPWFKPLAYAFILTRQEGYPCVFYGDYYGIPQYNIPSLKSKIDPLLIARRDYAYGTQHDYLDHSDIIGWTREGVTEKPGSGLAALITDGPGGSKWMYVGKQHAGKVFYDLTGNRSDTVTINSDGWGEFKVNGGSVSVWVPRKTTVSTIARP

SEQ ID NO: 18752 - protein, 493 aa, Geobacillus stearothermophilus
AAPFNGTMMQYFEWYLPDDGTLWTKVANEANNLSSLGITALWLPPAYKGTSRSDVGYGAYDLYDLGEFNQKGTVRTKYGTKAQYLQAIQAAHAAGMQVYADVVFDHKGGADGTEWVDAVEVNPSDRNQVISGTYQIQAWTKFDFPGRGNTYSSFKWRWYHFDGVDWDESRKLSRIYDFEGIGKAWDWEVDTENGNYDYLMYADLDMDHPEVVTELKNWGPWYVLTTNIDGFRLDAVKHIKFQFFPDWLSYVRSSTGKPLFTVGEYWSYDINKLHNYITKTNGTMSLFDAPLHNKFYTASKSGGAFDMRTLMTNTLMKDQPTLAVTFVDNHDTEPGQALQSWVDPWFKPLAYAFILTRQEGYPCVFYGDYYGIPQYNIPSLKSKIDPLLIARRDYAYGTQHDYLDHSDIIGWTREGVTEKPGSGLAALITDGPGGSKWMYVGKQHAGKVFYDLTGNRSDTVTINSDGWGEFKVNGGSVSVWVPRKTTVSTIARP

SEQ ID NO: 18753 - protein, 493 aa, Geobacillus stearothermophilus
AAPFNGTMMQYFEWYLPDDGTLWTKVANEANNLSSLGITALWLPPAYKGTSRSDVGYGAYDLYDLGEFNQKGTVRTKYGTKAQYLQAIQAAHAAGMQVYADVVFDHKGGADGTEWVDAVEVNPSDRNQVISGTYQIQAWTKFDFPGRGNTYSSFKWRWYHFDGVDWDESRKLSRIYLFEGIGKAWDWEVDTENGNYDYLMYADLDMDYPEVVTELKNWGPWYVLTTNIDGFRLDAVKHIKFQFFPDWLSYVRSSTGKPLFTVGEYWSYDINKLHNYITKTNGTMSLFDAPLHNKFYTASKSGGAFDMRTLMTNTLMKDQPTLAVTFVDNHDTEPGQALQSWVDPWFKPLAYAFILTRQEGYPCVFYGDYYGIPQYNIPSLKSKIDPLLIARRDYAYGTQHDYLDHSDIIGWTREGVTEKPGSGLAALITDGPGGSKWMYVGKQHAGKVFYDLTGNRSDTVTINSDGWGEFKVNGGSVSVWVPRKTTVSTIARP

SEQ ID NO: 18754 - protein, 493 aa, Geobacillus stearothermophilus
AAPFNGTMMQYFEWYLPDDGTLWTKVANEANNLSSLGITALWLPPAYKGTSRSDVGYGVYDLYDLGEFNQKGTVRTKYGTKAQYLQAIQAAHAAGMQVYADVVFDHKGGADGTEWVDAVEVNPSDRNQVISGTYQIQAWTKFDFPGRGNTYSSFKWRWYHFDGVDWDESRKLSRIYLFEGIGKAWDWEVDTENGNYDYLMYADLDMDHPEVVTELKNWGPWYVLTTNIDGFRLDAVKHIKFSFFPDWLSYVRSSTGKPLFTVGEYWSYDINKLHNYITKTNGTTSLFDAPLHNKFYTASKSGGAFDMRTLMTNTLMKDQPTLAVTFVDNHDTEPGQALQSWVDPWFKPLAYAFILTRQEGYPCVFYGDYYGIPQYNIPSLKSKIDPLLIARRDYAYGTQHDYLDHSDIIGWTREGVTEKPGSGLAALITDGPGGSKWMYVGKQHAGKVFYDLTGNRSDTVTINSDGWGEFKVNGGSVSVWVPRKTTVSTIARP

SEQ ID NO: 18755 - protein, 493 aa, Geobacillus stearothermophilus
AAPFNGTMMQYFEWYLPDDGTLWTKVANEANNLSSLGITALWLPPAYKGTSRSDVGYGVYDLYDLGEFNQKGTVRTKYGTKAQYLQAIQAAHAAGMQVYADVVFDHKGGADGTEWVDAVEVNPSDRNQVISGTYQIQAWTKFDFPGRGNTYSSFKWRWYHFDGVDWDESRKLSRIYLFEGIGKAWDWEVDTENGNYDYLMYADLDMDHPEVVTELKNWGPWYVLTTNIDGFRLDAVKHIKFSFFPDWLSYVRSSTGKPLFTVGEYWSYDINKLHNYITKTNGTMSLFDAPLHNKFYTASKSGGAFDMRTLMTNTLMKDQPTLAVTFVDNHDTEPGQALQSWVDPWFKPLAYAFILTRQEGYPCVFYGDYYGIPQYNIPSLKSKIDPLLIARRDYAYGTQHDYLDHSDIIGWTREGVTEKPGSGLAALITDGPGGSKWMYVGKQHAGKVFYDLTGNRSDTVTINSDGWGEFKVNGGSVSVWVPRKTTVSTIARP

SEQ ID NO: 18756 - protein, 493 aa, Geobacillus stearothermophilus
AAPFNGTMMQYFEWYLPDDGTLWTKVANEANNLSSLGITALWLPPAYKGTSRSDVGYGAYDLYDLGEFNQKGTVRTKYGTKAQYLQAIQAAHAAGMQVYADVVFDHKGGADGTEWVDAVEVNPSDRNQVISGTYQIQAWTKFDFPGRGNTYSSFKWYWYHFDGVDWDESRKLSRIYLFEGIGKAWDWEVDTENGNYDYLMYADLDMDHPEVVTELKNWGPWYVLTTNIDGFRLDAVKHIKFQFFPDWLSYVRSSTGKPLFTVGEYWSYDINKLHNYITKTNGTMSLFDAPLHNKFYTASKSGGAFDMRTLMTNTLMKDQPTLAVTFVDNHDTEPGQALQSWVDPWFKPLAYAFILTRQEGYPCVFYGDYYGIPQYNIPSLKSKIDPLLIARRDYAYGTQHDYLDHSDIIGWTREGVTEKPGSGLAALITDGPGGSKWMYVGKQHAGKVFYDLTGNRSDTVTINSDGWGEFKVNGGSVSVWVPRKTTVSTIARP

SEQ ID NO: 18757 - protein, 493 aa, Geobacillus stearothermophilus
AAPFNGTMMQYFEWYLPDDGTLWTKVANEANNLSSLGITALWLPPAYKGTSRSDVGYGAYDLYDLGEFNQKGTVRTKYGTKAQYLQAIQAAHAAGMQVYADVVFDHKGGADGTEWVDAVEVNPSDRNQEISGTYQIQAWTKFDFPGRGNTYSSFKWRWYHFDGVDWDESRKLSRIYKFRGIGKAWDWEVDTENGNYDYLMYADLDMDHPEVVTELKNWGKWYVNTTNIDGFRLDAVKHIKFSFFPDWLSYVRSQTGKPLFTVGEYWSYDINKLHNYITKTNGTMSLFDAPLHNKFYTASKSGGAFDMRTLMTNTLMKDQPTLAVTFVDNHDTEPGQALQSWVDPWFKPLAYAFILTRQEGYPCVFYGDYYGIPQYNIPSLKSKIDPLLIARRDYAYGTQHDYLDHSDIIGWTREGVTEKPGSGLAALITDGPGGSKWMYVGKQHAGKVFYDLTGNRSDTVTINSDGWGEFKVNGGSVSVWVPRKTTVSTIARP

SEQ ID NO: 18758 - protein, 520 aa, Geobacillus stearothermophilus
MKQQKRLYARLLTLLFALIFLLPHSAASAAAPFNGTMMQYFEWYLPDDGTLWTKVANEANNLSSLGITALWLPPAYKGTSRSDVGYGVYDLYDLGEFNQKGTVRTKYGTKAQYLQAIQAAHAAGMQVYADVVFDHKGGADGTEWVDAVEVNPSDRNQEISGTYQIQAWTKFDFPGRGNTYSSFKWRWYHFDGVDWDESRKLSRIYKFIGKAWDWEVDTENGNYDYLMYADLDMDHPEVVTELKNWGKWYVNTTNIDGFRLDAVKHIKFSFFPDWLSYVRSQTGKPLFTVGEYWSYDINKLHNYITKTNGTMSLFDAPLHNKFYTASKSGGAFDMRTLMTNTLMKDQPTLAVTFVDNHDTEPGQALQSWVDPWFKPLAYAFILTRQEGYPCVFYGDYYGIPQYNIPSLKSKIDPLLIARRDYAYGTQHDYLDHSDIIGWTREGVTEKPGSGLAALITDGPGGSKWMYVGKQHAGKVFYDLTGNRSDTVTINSDGWGEFKVNGGSVSVWVPRKTTVSTIARP

SEQ ID NO: 18759 - protein, 492 aa, Geobacillus stearothermophilus
AAPFNGTMMQYFEWYLPDDGTLWTKVANEANNLSSLITALWLPPAYKGTSRSDVGYGVYDLYDLGEFNQKGTVRTKYGTKAQYLQAIQAAHAAGMQVYADVVFDHKGGADGTEWVDAVEVNPSDRNQVISGTYQIQAWTKFDFPGRGNTYSSFKWRWYHFDGVDWDESRKLSRIYLFEGIGKAWDWEVDTENGNYDYLMYADLDMDHPEVVTELKNWGPWYVLTTNIDGFRLDAVKHIKFQFFPDWLSYVRSSTGKPLFTVGEYWSYDINKLHNYITKTNGTMSLFDAPLHNKFYTASKSGGAFDMRTLMTNTLMKDQPTLAVTFVDNHDTEPGQALQSWVDPWFKPLAYAFILTRQEGYPCVFYGDYYGIPQYNIPSLKSKIDPLLIARRDYAYGTQHDYLDHSDIIGWTREGVTEKPGSGLAALITDGPGGSKWMYVGKQHAGKVFYDLTGNRSDTVTINSDGWGEFKVNGGSVSVWVPRKTTVSTIARP

SEQ ID NO: 18760 - protein, 489 aa, Geobacillus stearothermophilus
AAPFNGTMMQYFEWYLPDDGTLWTKVANEANNLSSLGITALWLPPAYKGTSRSDVGYGAYDLYDLGEFNQKGTVRTKYGTKAQYLQAIRAAHAAGMQVYADVVFDHKGGADGTEWVDAVEVNPSDRNQVISGTYQIQAWTKFDFPGRGNTYSSFKWRWYHFDGVDWDESRKLSRIYLFEGKAWDWEVDTEFGNYDYLMYADLDMDHPEVVTELKNWGPWYVLTTNIDGFRLDAVKHIKFSFFPDWLSYVRSSTGKPLFTVGEYWSYDINKLKNYITKTNGTMSLFDAPLHNKFYTASKSGGAFDMRTLMTNTLMKDQPTLAVTFVDNHDTEPGQALQSWVDPWFKPLAYAFILTRQEGYPCVFYGDYYGIPQYNIPSLKSKIDPLLIARRDYAYGTQHDYLDHSDIIGWTREGVTEKPGSGLAALITDGPGGSKWMYVGKQHAGKVFYDLTGNRSDTVTINSDGWGEFKVNGGSVSVWVPRKTTVSTIA

SEQ ID NO: 18761 - protein, 489 aa, Geobacillus stearothermophilus
AAPFNGTMMQYFEWYLPDDGTLWTKVANEANNLSSLGITALWLPPAYKGTSRSDVGYGVYDLYDLGEFNQKGTVRTKYGTKAQYLQAIQAAHAAGMQVYADVVFDHKGGADGTEWVDAVEVNPSDRNQEISGTYQIQAWTKFDFPGRGNTYSSFKWRWYHFDGVDWDESRKLSRIYKFRGKAWDWEVDTEFGNYDYLMYADLDMDHPEVVTELKNWGKWYVNTTNIDGFRLDAVKHIKFSFFPDWLSYVRSQTGKPLFTVGEYWSYDINKLHNYITKTNGTMSLFDAPLHNKFYTASKSGGAFDMRTLMTNTLMKDQPTLAVTFVDNHDTEPGQALQSWVDPWFKPLAYAFILTRQEGYPCVFYGDYYGIPQYNIPSLKSKIDPLLIARRDYAYGTQHDYLDHSDIIGWTREGVTEKPGSGLAALITDGPGGSKWMYVGKQHAGKVFYDLTGNRSDTVTINSDGWGEFKVNGGSVSVWVPRKTTVSTIA

SEQ ID NO: 18762 - protein, 489 aa, Geobacillus stearothermophilus
AAPFNGTMMQYFEWYLPDDGTLWTKVANEANNLSSLGITALWLPPAYKGTSRSDVGYGAYDLYDLGEFNQKGTVRTKYGTKAQYLQAIRAAHAAGMQVYADVVFDHKGGADGTEWVDAVEVNPSDRNQVISGTYQIQAWTKFDFPGRGNTYSSFKWRWYHFDGVDWDESRKLSRIYLFEGKAWDWEVDTEFGNYDYLMYADLDMDHPEVVTELKNWGPWYVLTTNIDGFRLDAVKHIKFSFFPDWLSYVRSSTGKPLFTVGEYWSYDLNKLHNYITKTNGTMSLFDAPLHNKFYTASKSGGAFDMRTLMTNTLMKDQPTLAVTFVDNHDTEPGQALQSWVDPWFKPLAYAFILTRQEGYPCVFYGDYYGIPQYNIPSLKSKIDPLLIARRDYAYGTQHDYLDHSDIIGWTREGVTEKPGSGLAALITDGPGGSKWMYVGKQHAGKVFYDLTGNRSDTVTINSDGWGEFKVNGGSVSVWVPRKTTVSTIA

SEQ ID NO: 18763 - protein, 489 aa, Geobacillus stearothermophilus
AAPFNGTMMQYFEWYLPDDGTLWTKVANEANNLSSLGITALWLPPAYKGTSRSDVGYGAYDLYDLGEFNQKGTVRTKYGTKAQYLQAIRAAHAAGMQVYADVVFDHKGGADGTEWVDAVEVNPSDRNQVISGTYQIQAWTKFDFPGRGNTYSSFKWRWYHFDGVDWDESRKLSRIYLFEGKAWDWEVDTEFGNYDYLMYADLDMDYPEVVTELKNWGPWYVLTTNIDGFRLDAVKHIKFSFFPDWLSYVRSSTGKPLFTVGEYWSYDINKLHNYITKTNGTMSLFDAPLHNKFYTASKSGGAFDMRTLMTNTLMKDQPTLAVTFVDNHDTEPGQALQSWVDPWFKPLAYAFILTRQEGYPCVFYGDYYGIPQYNIPSLKSKIDPLLIARRDYAYGTQHDYLDHSDIIGWTREGVTEKPGSGLAALITDGPGGSKWMYVGKQHAGKVFYDLTGNRSDTVTINSDGWGEFKVNGGSVSVWVPRKTTVSTIA

SEQ ID NO: 18764 - protein, 489 aa, Geobacillus stearothermophilus
AAPFNGTMMQYFEWYLPDDGTLWTKVANEANNLSSLGITALWLPPAYKGTSRSDVGYGIYDLYDLGEFNQKGTVRTKYGTKAQYLQAIQAAHAAGMQVYADVVFDHKGGADGTEWVDAVEVNPSDRNQEISGTYQIQAWTKFDFPGRGNTYSSFKWRWYHFDGVDWDESRKLSRIYKFRGKAWDWEVDTEFGNYDYLMYADLDMDHPEVVTELKNWGKWYVNTTNIDGFRLDAVKHIKFSFFPDWLSYVRSQTGKPLFTVGEYWSYDINKLHNYITKTNGTMSLFDAPLHNKFYTASKSGGAFDMRTLMTNTLMKDQPTLAVTFVDNHDTEPGQALQSWVDPWFKPLAYAFILTRQEGYPCVFYGDYYGIPQYNIPSLKSKIDPLLIARRDYAYGTQHDYLDHSDIIGWTREGVTEKPGSGLAALITDGPGGSKWMYVGKQHAGKVFYDLTGNRSDTVTINSDGWGEFKVNGGSVSVWVPRKTTVSTIA

SEQ ID NO: 18765 - protein, 489 aa, Geobacillus stearothermophilus
AAPFNGTMMQYFEWYLPDDGTLWTKVANEANNLSSLGITALWLPPAYKGTSRSDVGYGVYDLYDLGEFNQKGTVRTKYGTKAQYLQAIQAAHAAGMQVYADVVFDHKGGADGTEWVDAVEVNPSDRNQEISGTYQIQAWTKFDFPGRGNTYSSFKWRWYHFDGVDWDESRKLSRIYKFRGKAWDWEVDTEFGNYDYLMYADLDMDHPEVVTELKNWGKWYVNTTNIDGFRLDAVKHIKFSFFPDWLSYVRSQTGKPLFTVGEYWSYDINKLHNYITKTNGTTSLFDAPLHNKFYTASKSGGAFDMRTLMTNTLMKDQPTLAVTFVDNHDTEPGQALQSWVDPWFKPLAYAFILTRQEGYPCVFYGDYYGIPQYNIPSLKSKIDPLLIARRDYAYGTQHDYLDHSDIIGWTREGVTEKPGSGLAALITDGPGGSKWMYVGKQHAGKVFYDLTGNRSDTVTINSDGWGEFKVNGGSVSVWVPRKTTVSTIA

SEQ ID NO: 18766 - protein, 489 aa, Geobacillus stearothermophilus
AAPFNGTMMQYFEWYLPDDGTLWTKVANEANNLSSLGITALWLPPAYKGTSRSDVGYGEYDLYDLGEFNQKGTVRTKYGTKAQYLQAIQAAHAAGMQVYADVVFDHKGGADGTEWVDAVEVNPSDRNQEISGTYQIQAWTKFDFPGRGNTYSSFKWRWYHFDGVDWDESRKLSRIYKFRGKAWDWEVDTEFGNYDYLMYADLDMDHPEVVTELKNWGKWYVNTTNIDGFRLDAVKHIKFSFFPDWLSYVRSQTGKPLFTVGEYWSYDINKLHNYITKTNGTMSLFDAPLHNKFYTASKSGGAFDMRTLMTNTLMKDQPTLAVTFVDNHDTEPGQALQSWVDPWFKPLAYAFILTRQEGYPCVFYGDYYGIPQYNIPSLKSKIDPLLIARRDYAYGTQHDYLDHSDIIGWTREGVTEKPGSGLAALITDGPGGSKWMYVGKQHAGKVFYDLTGNRSDTVTINSDGWGEFKVNGGSVSVWVPRKTTVSTIA

SEQ ID NO: 18767 - protein, 489 aa, Geobacillus stearothermophilus
AAPFNGTMMQYFEWYLPDDGTLWTKVANEANNLSSLGITALWLPPAYKGTSRSDVGYGAYDLYDLGEFNQKGTVRTKYGTKAQYLQAIRAAHAAGMQVYADVVFDHKGGADGTEWVDAVEVNPSDRNQVISGTYQIQAWTKFDFPGRGNTYSSFKWRWYHFDGVDWDESRKLSRIYLFEGKAWDWEVDTEFGNYDYLMYADLDMDHPEVVTELKNWGPWYVLTTNIDGFRLDAVKHIKFSFFPDWLSYVRSSTGKPLFTVGEYWSYDINKLHNFITKTNGTMSLFDAPLHNKFYTASKSGGAFDMRTLMTNTLMKDQPTLAVTFVDNHDTEPGQALQSWVDPWFKPLAYAFILTRQEGYPCVFYGDYYGIPQYNIPSLKSKIDPLLIARRDYAYGTQHDYLDHSDIIGWTREGVTEKPGSGLAALITDGPGGSKWMYVGKQHAGKVFYDLTGNRSDTVTINSDGWGEFKVNGGSVSVWVPRKTTVSTIA

SEQ ID NO: 18768 - protein, 489 aa, Geobacillus stearothermophilus
AAPFNGTMMQYFEWYLPDDGTLWTKVANEANNLSSLGITALWLPPAYKGTSRSDVGYGAYDLYDLGEFNQKGTVRTKYGTKAQYLQAIRAAHAAGMQVYADVVFDHKGGADDTEWVDAVEVNPSDRNQVISGTYQIQAWTKFDFPGRGNTYSSFKWRWYHFDGVDWDESRKLSRIYLFEGKAWDWEVDTEFGNYDYLMYADLDMDHPEVVTELKNWGPWYVLTTNIDGFRLDAVKHIKFSFFPDWLSYVRSSTGKPLFTVGEYWSYDINKLHNYITKTNGTMSLFDAPLHNKFYTASKSGGAFDMRTLMTNTLMKDQPTLAVTFVDNHDTEPGQALQSWVDPWFKPLAYAFILTRQEGYPCVFYGDYYGIPQYNIPSLKSKIDPLLIARRDYAYGTQHDYLDHSDIIGWTREGVTEKPGSGLAALITDGPGGSKWMYVGKQHAGKVFYDLTGNRSDTVTINSDGWGEFKVNGGSVSVWVPRKTTVSTIA

SEQ ID NO: 18769 - protein, 489 aa, Geobacillus stearothermophilus
AAPFNGTMMQYFEWYLPDDGTLWTKVANEANNLSSLGITALWLPPAYKGTSRSDVGYGVYDLYDLGEFNQKGTVRTKYGTKAQYLQAIQALHAAGIQVYADVVFDHKGGADGTEWVDAVEVNPSDRNQVISGTYQIQAWTKFDFPGRGNTYSSFKWRWYHFDGVDWDESRKLSRIYLFEGKAWDWEVDTEFGNYDYLMYADLDMDHPEVVTELKNWGKWYVLTTNIDGFRLDAVKHIKFQFFPDWLSYVRSSTGKPLFTVGEYWSYDINKLHNYITKTNGTMSLFDAPLHNKFYTASKSGGAFDMRTLMTNTLMKDQPTLAVTFVDNHDTEPGQALQSWVDPWFKPLAYAFILTRQEGYPCVFYGDYYGIPQYNIPSLKSKIDPLLIARRDYAYGTQHDYLDHSDIIGWTREGVTEKPGSGLAALITDGPGGSKWMYVGKQHAGKVFYDLTGNRSDTVTINSDGWGEFKVNGGSVSVWVPRKTTVSTIA

SEQ ID NO: 18770 - protein, 489 aa, Geobacillus stearothermophilus
AAPFNGTMMQYFEWYLPDDGTLWTKVANEANNLSSLGITALWLPPAYKGTSRSDVGYGAYDLYDLGEFNQKGTVRTKYGTKAQYLQAIRAAHAAGMQVYADVVFDHKGGADGTEWVDAVEVNPSDRNQVISGTYQIQAWTKFDFPGRGNTYSSFKWRWYHFDGVDWDESRKLSRIYLFEGKAWDWEVDTEFGNYDYLMYADLDMDHPEVVTELKNWGPWYVLTTNIDGFRLDAVKHIKFSFFPDWLSYVRSSTGKPLFTVGEYWSYEINKLHNYITKTNGTMSLFDAPLHNKFYTASKSGGAFDMRTLMTNTLMKDQPTLAVTFVDNHDTEPGQALQSWVDPWFKPLAYAFILTRQEGYPCVFYGDYYGIPQYNIPSLKSKIDPLLIARRDYAYGTQHDYLDHSDIIGWTREGVTEKPGSGLAALITDGPGGSKWMYVGKQHAGKVFYDLTGNRSDTVTINSDGWGEFKVNGGSVSVWVPRKTTVSTIA

SEQ ID NO: 18771 - protein, 489 aa, Geobacillus stearothermophilus
AAPFNGTMMQYFEWYLPDDGTLWTKVANEANNLSSLGITALWLPPAYKGTSRSDVGYGQYDLYDLGEFNQKGTVRTKYGTKAQYLQAIQAAHAAGMQVYADVVFDHKGGADGTEWVDAVEVNPSDRNQEISGTYQIQAWTKFDFPGRGNTYSSFKWRWYHFDGVDWDESRKLSRIYKFRGKAWDWEVDTEFGNYDYLMYADLDMDHPEVVTELKNWGKWYVNTTNIDGFRLDAVKHIKFSFFPDWLSYVRSQTGKPLFTVGEYWSYDINKLHNYITKTNGTMSLFDAPLHNKFYTASKSGGAFDMRTLMTNTLMKDQPTLAVTFVDNHDTEPGQALQSWVDPWFKPLAYAFILTRQEGYPCVFYGDYYGIPQYNIPSLKSKIDPLLIARRDYAYGTQHDYLDHSDIIGWTREGVTEKPGSGLAALITDGPGGSKWMYVGKQHAGKVFYDLTGNRSDTVTINSDGWGEFKVNGGSVSVWVPRKTTVSTIA

SEQ ID NO: 18772 - protein, 491 aa, Geobacillus stearothermophilus
AAPFNGTMMQYFEWYLPDDGTLWTKVANEANNLSSLGITALWLPPAYKGTSRSDVGYGAYDLYDLGEFNQKGTVRTKYGTKAQYLQAIQAAHAAGMQVYADVVFDHKGGADGTEWVDAVEVNPSDRNQEISGTYQIQAWTKFDFPGRGNTYSSFKWRWYHFDGVDWDESRKLSRIYKFRGIGKAWDWEVDTENGNYDYLMYADLDMDHPEVVTELKNWGKWYVNTTNIDGFRLDAVKHIKFSFFPDWLSYVRSQTGKPLFTVGEYWSYDINKLHNYITKTNGTMSLFDAPLHNKFYTASKSGGAFDMRTLMTNTLMKDQPTLAVTFVDNHDTEPGQALQSWVDPWFKPLAYAFILTRQEGYPCVFYGDYYGIPQYNIPSLKSKIDPLLIARRDYAYGTQHDYLDHSDIIGWTREGVTEKPGSGLAALITDGPGGSKWMYVGKQHAGKVFYDLTGNRSDTVTINSDGWGEFKVNGGSVSVWVPRKTTVSTIA

SEQ ID NO: 18773 - protein, 491 aa, Geobacillus stearothermophilus
AAPFNGTMMQYFEWYLPDDGTLWTKVANEANNLSSLGITALWLPPAYKGTSRSDVGYGAYDLYDLGEFNQKGTVRTKYGTKAQYLQAIRAAHAAGMQVYADVVFDHKGGADGTEWVDAVEVNPSDRNQVISGTYQIQAWTKFDFPGRGNTYSSFKWRWYHFDGVDWDESRKLSRIYLFEGXXKAWDWEVDTEFGNYDYLMYADLDMDYPEVVTELKNWGPWYVLTTNIDGFRLDAVKHIKFSFFPDWLSYVRSSTGKPLFTVGEYWSYDINKLHNYITKTNGTMSLFDAPLHNKFYTASKSGGAFDMRTLMTNTLMKDQPTLAVTFVDNHDTEPGQALQSWVDPWFKPLAYAFILTRQEGYPCVFYGDYYGIPQYNIPSLKSKIDPLLIARRDYAYGTQHDYLDHSDIIGWTREGVTEKPGSGLAALITDGPGGSKWMYVGKQHAGKVFYDLTGNRSDTVTINSDGWGEFKVNGGSVSVWVPRKTTVSTIA

SEQ ID NO: 18774 - protein, 491 aa, Geobacillus stearothermophilus
AAPFNGTMMQYFEWYLPDDGTLWTKVANEANNLSSLGITALWLPPAYKGTSRSDVGYGAYDLYDLGEFNQKGTVRTKYGTKAQYLQAIQAAHAAGMQVYADVVFDHKGGADGTEWVDAVEVNPSDRNQVISGTYQIQAWTKFDFPGRGNTYSSFKWRWYHFDGVDWDESRKLSRIYLFEGIGKAWDWEVDTENGNYDYLMYADLDMDYPEVVTELKNWGPWYVLTTNIDGFRLDAVKHIKFQFFPDWLSYVRSSTGKPLFTVGEYWSYDINKLHNYITKTNGTMSLFDAPLHNKFYTASKSGGAFDMRTLMTNTLMKDQPTLAVTFVDNHDTEPGQALQSWVDPWFKPLAYAFILTRQEGYPCVFYGDYYGIPQYNIPSLKSKIDPLLIARRDYAYGTQHDYLDHSDIIGWTREGVTEKPGSGLAALITDGPGGSKWMYVGKQHAGKVFYDLTGNRSDTVTINSDGWGEFKVNGGSVSVWVPRKTTVSTIA

SEQ ID NO: 18775 - protein, 491 aa, Geobacillus stearothermophilus
AAPFNGTMMQYFEWYLPDDGTLWTKVANEANNLSSLGITALWLPPAYKGTSRSDVGYGAYDLYDLGEFNQKGTVRTKYGTKAQYLQAIQAAHAAGMQVYADVVFDHKGGADGTEWVDAVEVNPSDRNQVISGTYQIQAWTKFDFPGRGNTYSSFKWYWYHFDGVDWDESRKLSRIYLFEGIGKAWDWEVDTENGNYDYLMYADLDMDHPEVVTELKNWGPWYVLTTNIDGFRLDAVKHIKFQFFPDWLSYVRSSTGKPLFTVGEYWSYDINKLHNYITKTNGTMSLFDAPLHNKFYTASKSGGAFDMRTLMTNTLMKDQPTLAVTFVDNHDTEPGQALQSWVDPWFKPLAYAFILTRQEGYPCVFYGDYYGIPQYNIPSLKSKIDPLLIARRDYAYGTQHDYLDHSDIIGWTREGVTEKPGSGLAALITDGPGGSKWMYVGKQHAGKVFYDLTGNRSDTVTINSDGWGEFKVNGGSVSVWVPRKTTVSTIA

SEQ ID NO: 18776 - protein, 491 aa, Geobacillus stearothermophilus
AAPFNGTMMQYFEWYLPDDGTLWTKVANEANNLSSLGITALWLPPAYKGTSRSDVGYGQYDLYDLGEFNQKGTVRTKYGTKAQYLQAIQAAHAAGMQVYADVVFDHKGGADGTEWVDAVEVNPSDRNQEISGTYQIQAWTKFDFPGRGNTYSSFKWRWYHFDGVDWDESRKLSRIYKFRGXXKAWDWEVDTEFGNYDYLMYADLDMDHPEVVTELKNWGKWYVNTTNIDGFRLDAVKHIKFSFFPDWLSYVRSQTGKPLFTVGEYWSYDINKLHNYITKTNGTMSLFDAPLHNKFYTASKSGGAFDMRTLMTNTLMKDQPTLAVTFVDNHDTEPGQALQSWVDPWFKPLAYAFILTRQEGYPCVFYGDYYGIPQYNIPSLKSKIDPLLIARRDYAYGTQHDYLDHSDIIGWTREGVTEKPGSGLAALITDGPGGSKWMYVGKQHAGKVFYDLTGNRSDTVTINSDGWGEFKVNGGSVSVWVPRKTTVSTIA

SEQ ID NO: 18777 - protein, 491 aa, Geobacillus stearothermophilus
AAPFNGTMMQYFEWYLPDDGTLWTKVANEANNLSSLGITALWLPPAYKGTSRSDVGYGVYDLYDLGEFNQKGTVRTKYGTKAQYLQAIQAAHAAGMQVYADVVFDHKGGADGTEWVDAVEVNPSDRNQEISGTYQIQAWTKFDFPGRGNTYSSFKWRWYHFDGVDWDESRKLSRIYKFRGXXKAWDWEVDTEFGNYDYLMYADLDMDHPEVVTELKNWGKWYVNTTNIDGFRLDAVKHIKFSFFPDWLSYVRSQTGKPLFTVGEYWSYDINKLHNYITKTNGTTSLFDAPLHNKFYTASKSGGAFDMRTLMTNTLMKDQPTLAVTFVDNHDTEPGQALQSWVDPWFKPLAYAFILTRQEGYPCVFYGDYYGIPQYNIPSLKSKIDPLLIARRDYAYGTQHDYLDHSDIIGWTREGVTEKPGSGLAALITDGPGGSKWMYVGKQHAGKVFYDLTGNRSDTVTINSDGWGEFKVNGGSVSVWVPRKTTVSTIA

SEQ ID NO: 18778 - protein, 491 aa, Geobacillus stearothermophilus
AAPFNGTMMQYFEWYLPDDGTLWTKVANEANNLSSLGITALWLPPAYKGTSRSDVGYGAYDLYDLGEFNQKGTVRTKYGTKAQYLQAIRAAHAAGMQVYADVVFDHKGGADGTEWVDAVEVNPSDRNQVISGTYQIQAWTKFDFPGRGNTYSSFKWRWYHFDGVDWDESRKLSRIYLFEGXXKAWDWEVDTEFGNYDYLMYADLDMDHPEVVTELKNWGPWYVLTTNIDGFRLDAVKHIKFSFFPDWLSYVRSSTGKPLFTVGEYWSYEINKLHNYITKTNGTMSLFDAPLHNKFYTASKSGGAFDMRTLMTNTLMKDQPTLAVTFVDNHDTEPGQALQSWVDPWFKPLAYAFILTRQEGYPCVFYGDYYGIPQYNIPSLKSKIDPLLIARRDYAYGTQHDYLDHSDIIGWTREGVTEKPGSGLAALITDGPGGSKWMYVGKQHAGKVFYDLTGNRSDTVTINSDGWGEFKVNGGSVSVWVPRKTTVSTIA

SEQ ID NO: 18779 - protein, 491 aa, Geobacillus stearothermophilus
AAPFNGTMMQYFEWYLPDDGTLWTKVANEANNLSSLGITALWLPPAYKGTSRSDVGYGAYDLYDLGEFNQKGTVRTKYGTKAQYLQAIRAAHAAGMQVYADVVFDHKGGADGTEWVDAVEVNPSDRNQVISGTYQIQAWTKFDFPGRGNTYSSFKWRWYHFDGVDWDESRKLSRIYLFEGXXKAWDWEVDTEFGNYDYLMYADLDMDHPEVVTELKNWGPWYVLTTNIDGFRLDAVKHIKFSFFPDWLSYVRSSTGKPLFTVGEYWSYDLNKLHNYITKTNGTMSLFDAPLHNKFYTASKSGGAFDMRTLMTNTLMKDQPTLAVTFVDNHDTEPGQALQSWVDPWFKPLAYAFILTRQEGYPCVFYGDYYGIPQYNIPSLKSKIDPLLIARRDYAYGTQHDYLDHSDIIGWTREGVTEKPGSGLAALITDGPGGSKWMYVGKQHAGKVFYDLTGNRSDTVTINSDGWGEFKVNGGSVSVWVPRKTTVSTIA

SEQ ID NO: 18780 - protein, 491 aa, Geobacillus stearothermophilus
AAPFNGTMMQYFEWYLPDDGTLWTKVANEANNLSSLGITALWLPPAYKGTSRSDVGYGEYDLYDLGEFNQKGTVRTKYGTKAQYLQAIQAAHAAGMQVYADVVFDHKGGADGTEWVDAVEVNPSDRNQEISGTYQIQAWTKFDFPGRGNTYSSFKWRWYHFDGVDWDESRKLSRIYKFRGXXKAWDWEVDTEFGNYDYLMYADLDMDHPEVVTELKNWGKWYVNTTNIDGFRLDAVKHIKFSFFPDWLSYVRSQTGKPLFTVGEYWSYDINKLHNYITKTNGTMSLFDAPLHNKFYTASKSGGAFDMRTLMTNTLMKDQPTLAVTFVDNHDTEPGQALQSWVDPWFKPLAYAFILTRQEGYPCVFYGDYYGIPQYNIPSLKSKIDPLLIARRDYAYGTQHDYLDHSDIIGWTREGVTEKPGSGLAALITDGPGGSKWMYVGKQHAGKVFYDLTGNRSDTVTINSDGWGEFKVNGGSVSVWVPRKTTVSTIA

SEQ ID NO: 18781 - protein, 491 aa, Geobacillus stearothermophilus
AAPFNGTMMQYFEWYLPDDGTLWTKVANEANNLSSLGITALWLPPAYKGTSRSDVGYGAYDLYDLGEFNQKGTVRTKYGTKAQYLQAIQAAHAAGMQVYADVVFDHKGGADGTEWVDAVEVNPSDRNQVISGTYQIQAWTKFDFPGRGNTYSSFKWRWYHFDGVDWDESRKLSRIYLFEGIGKAWDWEVDTENGNYDYLMYADLDMDHPEVVTELKNWGPWYVLTTNIDGFRLDAVKHIKFQFFPDWLSYVRSSTGKPLFTVGEYWSYDINKLHNFITKTNGTMSLFDAPLHNKFYTASKSGGAFDMRTLMTNTLMKDQPTLAVTFVDNHDTEPGQALQSWVDPWFKPLAYAFILTRQEGYPCVFYGDYYGIPQYNIPSLKSKIDPLLIARRDYAYGTQHDYLDHSDIIGWTREGVTEKPGSGLAALITDGPGGSKWMYVGKQHAGKVFYDLTGNRSDTVTINSDGWGEFKVNGGSVSVWVPRKTTVSTIA

SEQ ID NO: 18782 - protein, 491 aa, Geobacillus stearothermophilus
AAPFNGTMMQYFEWYLPDDGTLWTKVANEANNLSSLGITALWLPPAYKGTSRSDVGYGAYDLYDLGEFNQKGTVRTKYGTKAQYLQAIRAAHAAGMQVYADVVFDHKGGADGTEWVDAVEVNPSDRNQVISGTYQIQAWTKFDFPGRGNTYSSFKWRWYHFDGVDWDESRKLSRIYLFEGXXKAWDWEVDTEFGNYDYLMYADLDMDHPEVVTELKNWGPWYVLTTNIDGFRLDAVKHIKFSFFPDWLSYVRSSTGKPLFTVGEYWSYDINKLHNFITKTNGTMSLFDAPLHNKFYTASKSGGAFDMRTLMTNTLMKDQPTLAVTFVDNHDTEPGQALQSWVDPWFKPLAYAFILTRQEGYPCVFYGDYYGIPQYNIPSLKSKIDPLLIARRDYAYGTQHDYLDHSDIIGWTREGVTEKPGSGLAALITDGPGGSKWMYVGKQHAGKVFYDLTGNRSDTVTINSDGWGEFKVNGGSVSVWVPRKTTVSTIA

SEQ ID NO: 18783 - protein, 491 aa, Geobacillus stearothermophilus
AAPFNGTMMQYFEWYLPDDGTLWTKVANEANNLSSLGITALWLPPAYKGTSRSDVGYGVYDLYDLGEFNQKGTVRTKYGTKAQYLQAIQAAHAAGMQVYADVVFDHKGGADGTEWVDAVEVNPSDRNQVISGTYQIQAWTKFDFPGRGNTYSSFKWRWYHFDGVDWDESRKLSRIYLFEGIGKAWDWEVDTENGNYDYLMYADLDMDHPEVVTELKNWGPWYVLTTNIDGFRLDAVKHIKFSFFPDWLSYVRSSTGKPLFTVGEYWSYDINKLHNYITKTNGTTSLFDAPLHNKFYTASKSGGAFDMRTLMTNTLMKDQPTLAVTFVDNHDTEPGQALQSWVDPWFKPLAYAFILTRQEGYPCVFYGDYYGIPQYNIPSLKSKIDPLLIARRDYAYGTQHDYLDHSDIIGWTREGVTEKPGSGLAALITDGPGGSKWMYVGKQHAGKVFYDLTGNRSDTVTINSDGWGEFKVNGGSVSVWVPRKTTVSTIA

SEQ ID NO: 18784 - protein, 491 aa, Geobacillus stearothermophilus
AAPFNGTMMQYFEWYLPDDGTLWTKVANEANNLSSLGITALWLPPAYKGTSRSDVGYGAYDLYDLGEFNQKGTVRTKYGTKAQYLQAIRAAHAAGMQVYADVVFDHKGGADDTEWVDAVEVNPSDRNQVISGTYQIQAWTKFDFPGRGNTYSSFKWRWYHFDGVDWDESRKLSRIYLFEGXXKAWDWEVDTEFGNYDYLMYADLDMDHPEVVTELKNWGPWYVLTTNIDGFRLDAVKHIKFSFFPDWLSYVRSSTGKPLFTVGEYWSYDINKLHNYITKTNGTMSLFDAPLHNKFYTASKSGGAFDMRTLMTNTLMKDQPTLAVTFVDNHDTEPGQALQSWVDPWFKPLAYAFILTRQEGYPCVFYGDYYGIPQYNIPSLKSKIDPLLIARRDYAYGTQHDYLDHSDIIGWTREGVTEKPGSGLAALITDGPGGSKWMYVGKQHAGKVFYDLTGNRSDTVTINSDGWGEFKVNGGSVSVWVPRKTTVSTIA

SEQ ID NO: 18785 - protein, 491 aa, Geobacillus stearothermophilus
AAPFNGTMMQYFEWYLPDDGTLWTKVANEANNLSSLGITALWLPPAYKGTSRSDVGYGVYDLYDLGEFNQKGTVRTKYGTKAQYLQAIQAAHAAGMQVYADVVFDHKGGADGTEWVDAVEVNPSDRNQEISGTYQIQAWTKFDFPGRGNTYSSFKWRWYHFDGVDWDESRKLSRIYKFRGIGKAWDWEVDTENGNYDYLMYADLDMDHPEVVTELKNWGKWYVNTTNIDGFRLDAVKHIKFSFFPDWLSYVRSQTGKPLFTVGEYWSYDINKLHNYITKTNGTVSLFDAPLHNKFYTASKSGGAFDMRTLMTNTLMKDQPTLAVTFVDNHDTEPGQALQSWVDPWFKPLAYAFILTRQEGYPCVFYGDYYGIPQYNIPSLKSKIDPLLIARRDYAYGTQHDYLDHSDIIGWTREGVTEKPGSGLAALITDGPGGSKWMYVGKQHAGKVFYDLTGNRSDTVTINSDGWGEFKVNGGSVSVWVPRKTTVSTIA

SEQ ID NO: 18786 - protein, 491 aa, Geobacillus stearothermophilus
AAPFNGTMMQYFEWYLPDDGTLWTKVANEANNLSSLGITALWLPPAYKGTSRSDVGYGVYDLYDLGEFNQKGTVRTKYGTKAQYLQAIQAAHAAGMQVYADVVFDHKGGADGTEWVDAVEVNPSDRNQVISGTYQIQAWTKFDFPGRGNTYSSFKWRWYHFDGVDWDESRKLSRIYLFVGIGKAWDWEVDTENGNYDYLMYADLDMDHPEVVTELKNWGPWYVLTTNIDGFRLDAVKHIKFQFFPDWLSYVRSSTGKPLFTVGEYWSYDINKLHNYITKTNGTMSLFDAPLHNKFYTASKSGGAFDMRTLMTNTLMKDQPTLAVTFVDNHDTEPGQALQSWVDPWFKPLAYAFILTRQEGYPCVFYGDYYGIPQYNIPSLKSKIDPLLIARRDYAYGTQHDYLDHSDIIGWTREGVTEKPGSGLAALITDGPGGSKWMYVGKQHAGKVFYDLTGNRSDTVTINSDGWGEFKVNGGSVSVWVPRKTTVSTIA

SEQ ID NO: 18787 - protein, 491 aa, Geobacillus stearothermophilus
AAPFNGTMMQYFEWYLPDDGTLWTKVANEANNLSSLGITALWLPPAYKGTSRSDVGYGAYDLYDLGEFNQKGTVRTKYGTKAQYLQAIQAAHAAGMQVYADVVFDHKGGADGTEWVDAVEVNPSDRNQVISGTYQIQAWTKFDFPGRGNTYSSFKWRWYHFDGVDWDESRKLSRIYLFEGIGKAWDWEVDTENGNYDYLMYADLDMDHPEVVTELKNWGPWYVLTTNIDGFRLDAVKHIKFQFFPDWLSYVRSSTGKPLFTVGEYWSYDINKLKNYITKTNGTMSLFDAPLHNKFYTASKSGGAFDMRTLMTNTLMKDQPTLAVTFVDNHDTEPGQALQSWVDPWFKPLAYAFILTRQEGYPCVFYGDYYGIPQYNIPSLKSKIDPLLIARRDYAYGTQHDYLDHSDIIGWTREGVTEKPGSGLAALITDGPGGSKWMYVGKQHAGKVFYDLTGNRSDTVTINSDGWGEFKVNGGSVSVWVPRKTTVSTIA

SEQ ID NO: 18788 - protein, 491 aa, Geobacillus stearothermophilus
AAPFNGTMMQYFEWYLPDDGTLWTKVANEANNLSSLGITALWLPPAYKGTSRSDVGYGVYDLYDLGEFNQKGTVRTKYGTKAQYLQAIQAAHAAGMQVYADVVFDHKGGADGTEWVDAVEVNPSDRNQVISGTYQIQAWTKFDFPGRGNTYSSFKWRWYHFDGVDWDESRKLSRIYLFEGIGKAWDWEVDTENGNYDYLMYADLDMDHPEVVTELKNWGPWYVLTTNIDGFRLDAVKHIKFSFFPDWLSYVRSSTGKPLFTVGEYWSYDINKLHNYITKTNGTMSLFDAPLHNKFYTASKSGGAFDMRTLMTNTLMKDQPTLAVTFVDNHDTEPGQALQSWVDPWFKPLAYAFILTRQEGYPCVFYGDYYGIPQYNIPSLKSKIDPLLIARRDYAYGTQHDYLDHSDIIGWTREGVTEKPGSGLAALITDGPGGSKWMYVGKQHAGKVFYDLTGNRSDTVTINSDGWGEFKVNGGSVSVWVPRKTTVSTIA

SEQ ID NO: 18789 - protein, 491 aa, Geobacillus stearothermophilus
AAPFNGTMMQYFEWYLPDDGTLWTKVANEANNLSSLGITALWLPPAYKGTSRSDVGYGVYDLYDLGEFNQKGTVRTKYGTKAQYLQAIQAAHAAGMQVYADVVFDHKGGADGTEWVDAVEVNPSDRNQVISGTYQIQAWTKFDFPGRGNTYSSFKWRWYHFDGVDWDESRKLSRIYLFEGIGKAWDWEVDTENGNYDYLMYADLDMDHPEVVTELKNWGPWYVLTTNIDGFRLDAVKHIKFQFFPDWLSYVRSSTGKPLFTVGEYWSYDINKLHNYITKTNGTTSLFDAPLHNKFYTASKSGGAFDMRTLMTNTLMKDQPTLAVTFVDNHDTEPGQALQSWVDPWFKPLAYAFILTRQEGYPCVFYGDYYGIPQYNIPSLKSKIDPLLIARRDYAYGTQHDYLDHSDIIGWTREGVTEKPGSGLAALITDGPGGSKWMYVGKQHAGKVFYDLTGNRSDTVTINSDGWGEFKVNGGSVSVWVPRKTTVSTIA

SEQ ID NO: 18790 - protein, 491 aa, Geobacillus stearothermophilus
AAPFNGTMMQYFEWYLPDDGTLWTKVANEANNLSSLGITALWLPPAYKGTSRSDVGYGIYDLYDLGEFNQKGTVRTKYGTKAQYLQAIQAAHAAGMQVYADVVFDHKGGADGTEWVDAVEVNPSDRNQEISGTYQIQAWTKFDFPGRGNTYSSFKWRWYHFDGVDWDESRKLSRIYKFRGXXKAWDWEVDTEFGNYDYLMYADLDMDHPEVVTELKNWGKWYVNTTNIDGFRLDAVKHIKFSFFPDWLSYVRSQTGKPLFTVGEYWSYDINKLHNYITKTNGTMSLFDAPLHNKFYTASKSGGAFDMRTLMTNTLMKDQPTLAVTFVDNHDTEPGQALQSWVDPWFKPLAYAFILTRQEGYPCVFYGDYYGIPQYNIPSLKSKIDPLLIARRDYAYGTQHDYLDHSDIIGWTREGVTEKPGSGLAALITDGPGGSKWMYVGKQHAGKVFYDLTGNRSDTVTINSDGWGEFKVNGGSVSVWVPRKTTVSTIA

SEQ ID NO: 18791 - protein, 491 aa, Geobacillus stearothermophilus
AAPFNGTMMQYFEWYLPDDGTLWTKVANEANNLSSLGITALWLPPAYKGTSRSDVGYGVYDLYDLGEFNQKGTVRTKYGTKAQYLQAIQAAHAAGMQVYADVVFDHKGGADGTEWVDAVEVNPSDRNQVISGTYQIQAWTKFDFPGRGNTYSSFKWRWYHFDGVDWDESRKLSRIYLFEGIGKAWDWEVDTENGNYDYLMYADLDMDHPEVVTELKNWGPWYVLTTNIDGFRLDAVKHIKFQFFPDWLSYVRSSTGKPLFTVGEYWSYDINKLHNYITKTNGTMSLFDAPLHNKFYTASKSGGAFDMRTLMTNTLMKDQPTLAVTFVDNHDTEPGQALQSWVDPWFKPLAYAFILTRQEGYPCVFYGDYYGIPQYNIPSLKSKIDPLLIARRDYAYGTQHDYLDHSDIIGWTREGVTEKPGSGLAALITDGPGGSKWMYVGKQHAGKVFYDLTGNRSDTVTINSDGWGEFKVNGGSVSVWVPRKTTVSTIA

SEQ ID NO: 18792 - protein, 491 aa, Geobacillus stearothermophilus
AAPFNGTMMQYFEWYLPDDGTLWTKVANEANNLSSLGITALWLPPAYKGTSRSDVGYGVYDLYDLGEFNQKGTVRTKYGTKAQYLQAIQAAHAAGMQVYADVVFDHKGGADGTEWVDAVEVNPSDRNQEISGTYQIQAWTKFDFPGRGNTYSSFKWRWYHFDGVDWDESRKLSRIYKFRGXXKAWDWEVDTEFGNYDYLMYADLDMDHPEVVTELKNWGKWYVNTTNIDGFRLDAVKHIKFSFFPDWLSYVRSQTGKPLFTVGEYWSYDINKLHNYITKTNGTMSLFDAPLHNKFYTASKSGGAFDMRTLMTNTLMKDQPTLAVTFVDNHDTEPGQALQSWVDPWFKPLAYAFILTRQEGYPCVFYGDYYGIPQYNIPSLKSKIDPLLIARRDYAYGTQHDYLDHSDIIGWTREGVTEKPGSGLAALITDGPGGSKWMYVGKQHAGKVFYDLTGNRSDTVTINSDGWGEFKVNGGSVSVWVPRKTTVSTIA

SEQ ID NO: 18793 - protein, 491 aa, Geobacillus stearothermophilus
AAPFNGTMMQYFEWYLPDDGTLWTKVANEANNLSSLGITALWLPPAYKGTSRSDVGYGAYDLYDLGEFNQKGTVRTKYGTKAQYLQAIRAAHAAGMQVYADVVFDHKGGADGTEWVDAVEVNPSDRNQVISGTYQIQAWTKFDFPGRGNTYSSFKWRWYHFDGVDWDESRKLSRIYLFEGXXKAWDWEVDTEFGNYDYLMYADLDMDHPEVVTELKNWGPWYVLTTNIDGFRLDAVKHIKFSFFPDWLSYVRSSTGKPLFTVGEYWSYDINKLKNYITKTNGTMSLFDAPLHNKFYTASKSGGAFDMRTLMTNTLMKDQPTLAVTFVDNHDTEPGQALQSWVDPWFKPLAYAFILTRQEGYPCVFYGDYYGIPQYNIPSLKSKIDPLLIARRDYAYGTQHDYLDHSDIIGWTREGVTEKPGSGLAALITDGPGGSKWMYVGKQHAGKVFYDLTGNRSDTVTINSDGWGEFKVNGGSVSVWVPRKTTVSTIA

SEQ ID NO: 18794 - protein, 491 aa, Bacillus stearothermophilus
AAPFNGTMMQYFEWYLPDDGTLWTKVANEANNLSSLGITALWLPPAYKGTSRSDVGYGVYDLYDLGEFNQKGTVRTKYGTKAQYLQAIQAAHAAGMQVYADVVFDHKGGADGTEWVDAVEVNPSDRNQVISGTYQIQAWTKFDFPGRGNTYSSFKWRWYHFDGVDWDESRKLSRIYLFEGIGKAWDWEVDTENGNYDYLMYADLDMDHPEVVTELKNWGPWYVLTTNIDGFRLDAVKHIKFQFFPDWLSYVRSSTGKPLFTVGEYWSYDINKLHNYITKTNGTMSLFDAPLHNKFYTASKSGGAFDMRTLMTNTLMKDQPTLAVTFVDNHDTEPGQALQSWVDPWFKPLAYAFILTRQEGYPCVFYGDYYGIPQYPSLKSKIDPLLIARRDYAYGTQHDYLDHSDIIGWTREGVTEKPGSGLAALITDGPGGSKWMYVGKQHAGKVFYDLTGNRSDTVTINSDGWGEFKVNGGSVSVWVPRKTTVSTIARP

SEQ ID NO: 18795 - protein, 488 aa, Geobacillus stearothermophilus
AAPFNGTMMQYFEWYLPDDGTLWTKVANEANNLSSLGITALWLPPAYKGTSRSDVGYGVYDLYDLGEFNQKGTVRTKYGTKAQYLQAIQAAHAAGMQVYADVVFDHKGGADGTEWVDAVEVNPSDRNQEISGTYQIQAWTKFDFPGRGNTYSSFKWRWYHFDGVDWDESRKLSRIYKFRGKAWDWEVDTFGNYDYLMYADLDMDHPEVVTELKNWGKWYVNTTNIDGFRLDAVKHIKFSFFPDWLSYVRSQTGKPLFTVGEYWSYDINKLHNYITKTNGTMSLFDAPLHNKFYTASKSGGAFDMRTLMTNTLMKDQPTLAVTFVDNHDTEPGQALQSWVDPWFKPLAYAFILTRQEGYPCVFYGDYYGIPQYNIPSLKSKIDPLLIARRDYAYGTQHDYLDHSDIIGWTREGVTEKPGSGLAALITDGPGGSKWMYVGKQHAGKVFYDLTGNRSDTVTINSDGWGEFKVNGGSVSVWVPRKTTVSTIA

SEQ ID NO: 18796 - protein, 486 aa, Geobacillus stearothermophilus
AAPFNGTMMQYFEWYLPDDGTLWTKVANEANNLSSLGITALWLPPAYKGTSRSDVGYGAYDLYDLGEFNQKGTVRTKYGTKAQYLQAIQAAHAAGMQVYADVVFDHKGGADGTEWVDAVEVNPSDRNQVISGTYQIQAWTKFDFPGRGNTYSSFKWRWYHFDGVDWDESRKLSRIYLFSGKQWDWPVDNEFGNYDYLMYADLDMDHPEVTTELKNWGKWYVNTTNIDGFRLDAVKHIKFYFFPDWLSYVRSSTGKPLFTVGEYWSGDINKLHNYITITNGTVSLFDAPLHYKFYNASKSGGAFDMRTLMTNTLMKDQPTLAVTFVDNHDTEPGQALQSWVDPWFKPLAYAFILTRQEGYPCVFYGDYYGIPQYNIPSLKSKIDPLLIARRDYAYGTQHDYLDHSDIIGWTREGVTEKPGSGLAALITDGPGGSKWMYVGKQHAGKVFYDLTGNRSDTVTINSDGWGEFKVNGGSVSVWVPRKTTVS

SEQ ID NO: 18797 - protein, 488 aa, Geobacillus stearothermophilus
AAPFNGTMMQYFEWYLPDDGTLWTKVANEANNLSSLGITALWLPPAYKGTSRSDVGYGVYILYDLGEXNQKGTVRTKYGTKAQYLQAIQAAHAAGMQVYADVVFDHKGGADGTEWVDAVEVNPSDRNQEISGTYQIQAWTKFDFPGRGNTYSSFKWRWYHFDGVDWDESRKLSRIYKFRGIGKAWDWEVDTENGNYDYLMYADLDMDHPEVVTELKNWGKWYVNTTNIDGXRLDAVKHIKFSFFPDWLSYVRSQTGKPLXTVGEYWSYDXNKLHNYITKTXGTMSLFDAPLXNKFYTASKSGGAFDMRXLMTNTLMKDQPTLAVTFVDNHDTEPGQALQSWVDPWFKPLAYAFILTRQEGYPCVFYGDYYGIPQYNIPSLKSKXDPLLIARRDYAYGXQHDYLDHSDIXGXTREGGTXKPGSGLAALITDGPGGSKWXYVGKQHAGKVFXDLTGNRSDTVTINSDGWGEFKVNGGSVSVXVPRKTTVS

SEQ ID NO: 18798 - protein, 488 aa, Geobacillus stearothermophilus
AAPFNGTMMQYFEWYLPDDGTLWTKVADEANNLSSLGITALWLPPAYKGTSRSDVGYGVYDLYDLGEFNQKGTVRTKYGTKAQYLEAIEAAHAAGMRVYADVVFDHKGGADGTEWVDAVEVNPSDRNQEISGTYQIQAWTKFDFPGRGNTYSSFKWRWYHFDGVDWDESRQLSRIYKFRGIGKAWDWEVDTENGNYDYLMYADLDMDHPEVVTELKNWGKWYVDTTNIDGFRLDAVKHIKFSFFPDWLSYVRSQTGKPLFTVGEYWSYDIDKLHNYITKTDGTMSLFDAPLHNKFYTASKSGGAFDMQTLMTNTLMKDRPTLAVTFVDNHDTEPGQALQSWVDPWFKPLAYAFILTREEGYPCVFYGDYYGIPQYNIPSLKSQIDPLLIARRDYAYGTQHDYLDHSDIIGWTREGVTEKPGSGLAALITDGPGGSKWMYVGKEHAGQVFYDLTGNRSDTVTINSDGWGEFQVNGGSVSVWVPQKTTVS

SEQ ID NO: 18799 - protein, 485 aa, Geobacillus stearothermophilus
AAPFNGTMMQYFEWYLPDDGTLWTKVANEANNLSSLGITALSLPPAYKGTSRSDVGYGVYDLYDLGEFNQKGTVRTKYGTKAQYLQAIQAAHAAGMQVYADVVFDHKGGADGTEWVDAVEVNPSDRNQEISGTYQIQAWTKFDFPGRGNTYSSFKWRWYHFDGVDWDESRKLSRIYKFIGKAWDWEVDTENGNYDYLMYADLDMDHPEVVTELKNWGKWYVNTTNIDGFRLDGLKHIKFSFFPDWLSYVRSQTGKPLFTVGEYWSYDINKLHNYITKTNGTMSLFDAPLHNKFYTASKSGGAFDMRTLMTNTLMKDQPTLAVTFVDNHDTNPAKRCSHGRPWFKPLAYAFILTRQEGYPCVFYGDYYGIPQYNIPSLKSKIDPLLIARRDYAYGTQHDYLDHSDIIGWTREGVTEKPGSGLAALITDGAGRSKWMYVGKQHAGKVFYDLTGNRSDTVTINSDGWGEFKVNGGSVSVWVPRKTTVS

SEQ ID NO: 18800 - protein, 515 aa, Geobacillus stearothermophilus
AAPFNGTMMQYFEWYLPDNGTLWTKVAKQANNLSSLGITALWLPPAYKGTSRSDVGYGVYDLYDLGEFNQKGTVRTKYGTKAQYLRAIRAAHAAGMRVYADVVFDHKGGADGTEWVDAVEVNPSDRNQEISGTYQIQAWTKFDFPGRGNTYSSFKWRWYHFDGVDWDESRKLSRIYKFRGIGKAWDWEVDTENGNYDYLMYADLDMDHPEVVTELKNWGKWYVKTTNIDGFRLDAVKHIKFSFFPDWLSYVRSQTGKPLFTVGEYWSYDIKKLHNYITKTKGTMSLFDAPLHNKFYTASKSGGAFNMRTLMTNTLMKNRPTLAVTFVDNHDTEPGQALQSWVDPWFKPLAYAFILTREEGYPCVFYGDYYGIPQYNIPSLKSKIDPLLIARRNYAYGTQHDYLDHSDIIGWTREGVTEKPGSGLAALITDGPGGSKWMYVGKEHAGKVFYDLTGNRSNTVTINSDGWGEFKVNGGSVSVWVPRKTTVSTIARPITTRPWTGEFVRWTEPRLVAWP

SEQ ID NO: 18801 - protein, 486 aa, Geobacillus stearothermophilus
AAPFNGTMMQYFEWYLPDDGTLWTKVANEANNLSSLGITALWLPPAYKGTSRSDVGYGVYDLYDLGEFNQKGTVRTKYGTKAQYLQAIQAAHAAGMQVYADVVFDHKGGADGTEWVDAVEVNPSDRNQEISGTYQIQAWTKFDFPGRGNTYSSFKWRWYHFDGVDWDESRKLSRIYKFRGIGKAWDWPVDTENGNYDYLMYADLDMDHPEVVTELKNWGKWYVNTTNIDGFRLDAVKHIKFSFFPDWLSYVRSQTGKPLFTVGEYWSYDINKLHNYITKTNGTMSLFDAPLHNKFYTASKSGGAFDMRTLMTNTLMKDQPTLAVTFVDNHDTEPGQALQSWVDPWFKPLAYAFILTRQEGYPCVFYGDYYGIPQYNIPSLKSKIDPLLIARRDYAYGTQHDYLDHSDIIGWTREGVTEKPGSGLAALITDGPGGSKWMYVGKQHAGKVFYDLTGNRSDTVTINSDGWGEFKVNGGSVSVWVPRKTT

SEQ ID NO: 18802 - protein, 486 aa, Geobacillus stearothermophilus
AAPFNGTMMQYFEWYLPDDGTLWTKVANEANNLSSLGITALWLPPAYKGTSRSDVGYGVYDLYDLGEFNQKGTVRTKYGTKAQYLQAIQAAHAAGMQVYADVVFDHKGGADGTEWVDAVEVNPSDRNQEISGTYQIQAWTKFDFPGRGNTYSSFKWRWYHFDGVDWDESRKLSRIYKFRGIGKAWDWEVDTEFGNYDYLMYADLDMDHPEVVTELKNWGKWYVNTTNIDGFRLDAVKHIKFSFFPDWLSYVRSQTGKPLFTVGEYWSYDINKLHNYITKTNGTMSLFDAPLHNKFYTASKSGGAFDMRTLMTNTLMKDQPTLAVTFVDNHDTEPGQALQSWVDPWFKPLAYAFILTRQEGYPCVFYGDYYGIPQYNIPSLKSKIDPLLIARRDYAYGTQHDYLDHSDIIGWTREGVTEKPGSGLAALITDGPGGSKWMYVGKQHAGKVFYDLTGNRSDTVTINSDGWGEFKVNGGSVSVWVPRKTT

SEQ ID NO: 18803 - protein, 486 aa, Geobacillus stearothermophilus
AAPFNGTMMQYFEWYLPDDGTLWTKVANEANNLSSLGITALWLPPAYKGTSRSDVGYGVYDLYDLGEFNQKGTVRTKYGTKAQYLQAIQAAHAAGMQVYADVVFDHKGGADGTEWVDAVEVNPSDRNQEISGTYQIQAWTKFDFPGRGNTYSSFKWRWYHFDGVDWDESRKLSRIYKFRGIGKAWDWEVDTENGNYDYLMYADLDMDHPEVVTELKNWGKWYVNTTNIDGFRLDAVKHIKFSFFPDWLSYVRSQTGKPLFTVGEYWSYDINKLHNYITKTNGTMSLFDAPLHNKFYTASKSGGAFDMRTLMTNTLMKDQPTLAVTFVDNHDTEPGQALQSWVDPWFKPLAYAFILTRQEGYPCVFYGDYYGIPQYNIPSLKSKIDPLLIARRDYAYGTQHDYLDHSDIIGWTREGGTEKPGSGLAALITDGPGGSKWMYVGKQHAGKVFYDLTGNRSDTVTINSDGWGEFKVNGGSVSVWVPRKTT

SEQ ID NO: 18804 - protein, 482 aa, Geobacillus stearothermophilus
AAPFNGTMMQYFEWYLPDDGTLWTKVANEANNLSSLGITALWLPPAYKGTSRSDVGYGVYDLYDLGEFNQKGTVRTKYGTKAQYLQAIQAAHAAGMQVYADVVFDHKGGADGTEWVDAVEVNPSDRNQEISGTYQIQAWTKFDFPGRGNTYSSFKWRWYHFDGVDWDESRKLSRIYKFRGKAWDWPVDTENGNYDYLMYADLDMDHPEVVTELKNWGKWYVNTTNIDGFRLDAVKHIKFFFFPDWLSYVRSQTGKPLFTVGEYWSYDINKLHNYITKTNGTMSLFDAPLHNKFYTASKSGGAFDMRTLMTNTLMKDQPTLAVTFVDNHDTEPGQALQSWVDPWFKPLAYAFILTRQEGYPCVFYGDYYGIPQYNIPSLKSKIDPLLIARRDYAYGTQHDYLDHSDIIGWTREGVTEKPGSGLAALITDGPGGSKWMYVGKQHAGKVFYDLTGNRSDTVTINSDGWGEFKVNGGSVSVWVPRK

SEQ ID NO: 18805 - protein, 482 aa, Geobacillus stearothermophilus
AAPFNGTMMQYFEWYLPDDGTLWTKVANEANNLSSLGITALWLPPAYKGTSRSDVGYGVYDLYDLGEFNQKGTVRTKYGTKAQYLQAIQAAHAAGMQVYADVVFDHKGGADGTEWVDAVEVNPSDRNQEISGTYQIQAWTKFDFPGRGNTYSSFKWRWYHFDGVDWDESRKLSRIYKFRGKAWDWPVDTENGNYDYLMYADLDMDHPEVVTELKNWGKWYVNTTNIDGFRLDAVKHIKFHFFPDWLSYVRSQTGKPLFTVGEYWSYDINKLHNYITWTNGTMSLFDAPLHNKFYTASKSGGAFDMRTLMTNTLMKDQPTLAVTFVDNHDTEPGQALQSWVDPWFKPLAYAFILTRQEGYPCVFYGDYYGIPQYNIPSLKSKIDPLLIARRDYAYGTQHDYLDHSDIIGWTREGVTEKPGSGLAALITDGPGGSKWMYVGKQHAGKVFYDLTGNRSDTVTINSDGWGEFKVNGGSVSVWVPRK

SEQ ID NO: 18806 - protein, 482 aa, Geobacillus stearothermophilus
AAPFNGTMMQYFEWYLPDDGTLWTKVANEANNLSSLGITALWLPPAYKGTSRSDVGYGVYDLYDLGEFNQKGTVRTKYGTKAQYLQAIQAAHAAGMQVYADVVFDHKGGADGTEWVDAVEVNPSDRNQEISGTYQIQAWTKFDFPGRGNTYSSFKWRWYHFDGVDWDESRKLSRIYKFRGKAWDWPVDTENGNYDYLMYADLDMDHPEVVTELKNWGKWYVNTTNIDGFRLDAVKHIKFSFFPDWLSYVRSQTGKPLFTVGEYWSYDINKLHNYITWTNGTMSLFDAPLHNKFYTASKSGGAFDMRTLMTNTLMKDQPTLAVTFVDNHDTEPGQALQSWVDPWFKPLAYAFILTRQEGYPCVFYGDYYGIPQYNIPSLKSKIDPLLIARRDYAYGTQHDYLDHSDIIGWTREGVTEKPGSGLAALITDGPGGSKWMYVGKQHAGKVFYDLTGNRSDTVTINSDGWGEFKVNGGSVSVWVPRK

SEQ ID NO: 18807 - protein, 482 aa, Geobacillus stearothermophilus
AAPFNGTMMQYFEWYLPDDGTLWTKVANEANNLSSLGITALWLPPAYKGTSRSDVGYGVYDLYDLGEFNQKGTVRTKYGTKAQYLQAIQAAHAAGMQVYADVVFDHKGGADGTEWVDAVEVNPSDRNQEISGTYQIQAWTKFDFPGRGNTYSSFKWRWYHFDGVDWDESRKLSRIYKFRGKAWDWPVDTENGNYDYLMYADLDMDHPEVVTELKNWGKWYVNTTNIDGFRLDAVKHIKFSFFPDWLSYVRSQTGKPLFTVGEYWSYDINKLHNYITYTNGTMSLFDAPLHNKFYTASKSGGAFDMRTLMTNTLMKDQPTLAVTFVDNHDTEPGQALQSWVDPWFKPLAYAFILTRQEGYPCVFYGDYYGIPQYNIPSLKSKIDPLLIARRDYAYGTQHDYLDHSDIIGWTREGVTEKPGSGLAALITDGPGGSKWMYVGKQHAGKVFYDLTGNRSDTVTINSDGWGEFKVNGGSVSVWVPRK

SEQ ID NO: 18808 - protein, 482 aa, Geobacillus stearothermophilus
AAPFNGTMMQYFEWYLPDDGTLWTKVANEANNLSSLGITALWLPPAYKGTSRSDVGYGVYDLYDLGEFNQKGTVRTKYGTKAQYLQAIQAAHAAGMQVYADVVFDHKGGADGTEWVDAVEVNPSDRNQEISGTYQIQAWTKFDFPGRGNTYSSFKWRWYHFDGVDWDESRKLSRIYKFRGKAWDWPVDTENGNYDYLMYADLDMDHPEVVTELKNWGKWYVNTTNIDGFRLDAVKHIKFWFFPDWLSYVRSQTGKPLFTVGEYWSYDINKLHNYITWTNGTMSLFDAPLHNKFYTASKSGGAFDMRTLMTNTLMKDQPTLAVTFVDNHDTEPGQALQSWVDPWFKPLAYAFILTRQEGYPCVFYGDYYGIPQYNIPSLKSKIDPLLIARRDYAYGTQHDYLDHSDIIGWTREGVTEKPGSGLAALITDGPGGSKWMYVGKQHAGKVFYDLTGNRSDTVTINSDGWGEFKVNGGSVSVWVPRK

SEQ ID NO: 18809 - protein, 482 aa, Geobacillus stearothermophilus
AAPFNGTMMQYFEWYLPDDGTLWTKVANEANNLSSLGITALWLPPAYKGTSRSDVGYGVYDLYDLGEFNQKGTVRTKYGTKAQYLQAIQAAHAAGMQVYADVVFDHKGGADGTEWVDAVEVNPSDRNQEISGTYQIQAWTKFDFPGRGNTYSSFKWRWYHFDGVDWDESRKLSRIYKFRGKAWDWPVDTENGNYDYLMYADLDMDHPEVVTELKNWGKWYVNTTNIDGFRLDAVKHIKFFFFPDWLSYVRSQTGKPLFTVGEYWSYDINKLHNYITWTNGTMSLFDAPLHNKFYTASKSGGAFDMRTLMTNTLMKDQPTLAVTFVDNHDTEPGQALQSWVDPWFKPLAYAFILTRQEGYPCVFYGDYYGIPQYNIPSLKSKIDPLLIARRDYAYGTQHDYLDHSDIIGWTREGVTEKPGSGLAALITDGPGGSKWMYVGKQHAGKVFYDLTGNRSDTVTINSDGWGEFKVNGGSVSVWVPRK

SEQ ID NO: 18810 - protein, 482 aa, Geobacillus stearothermophilus
AAPFNGTMMQYFEWYLPDDGTLWTKVANEANNLSSLGITALWLPPAYKGTSRSDVGYGVYDLYDLGEFNQKGTVRTKYGTKAQYLQAIQAAHAAGMQVYADVVFDHKGGADGTEWVDAVEVNPSDRNQEISGTYQIQAWTKFDFPGRGNTYSSFKWRWYHFDGVDWDESRKLSRIYKFRGKAWDWPVDTENGNYDYLMYADLDMDHPEVVTELKNWGKWYVNTTNIDGFRLDAVKHIKFQFFPDWLSYVRSQTGKPLFTVGEYWSYDINKLHNYITKTNGTMSLFDAPLHNKFYTASKSGGAFDMRTLMTNTLMKDQPTLAVTFVDNHDTEPGQALQSWVDPWFKPLAYAFILTRQEGYPCVFYGDYYGIPQYNIPSLKSKIDPLLIARRDYAYGTQHDYLDHSDIIGWTREGVTEKPGSGLAALITDGPGGSKWMYVGKQHAGKVFYDLTGNRSDTVTINSDGWGEFKVNGGSVSVWVPRK

SEQ ID NO: 18811 - protein, 482 aa, Geobacillus stearothermophilus
AAPFNGTMMQYFEWYLPDDGTLWTKVANEANNLSSLGITALWLPPAYKGTSRSDVGYGVYDLYDLGEFNQKGTVRTKYGTKAQYLQAIQAAHAAGMQVYADVVFDHKGGADGTEWVDAVEVNPSDRNQEISGTYQIQAWTKFDFPGRGNTYSSFKWRWYHFDGVDWDESRKLSRIYKFRGKAWDWPVDTENGNYDYLMYADLDMDHPEVVTELKNWGKWYVNTTNIDGFRLDAVKHIKFSFFPDWLSYVRSQTGKPLFTVGEYWSYDINKLHNYITFTNGTMSLFDAPLHNKFYTASKSGGAFDMRTLMTNTLMKDQPTLAVTFVDNHDTEPGQALQSWVDPWFKPLAYAFILTRQEGYPCVFYGDYYGIPQYNIPSLKSKIDPLLIARRDYAYGTQHDYLDHSDIIGWTREGVTEKPGSGLAALITDGPGGSKWMYVGKQHAGKVFYDLTGNRSDTVTINSDGWGEFKVNGGSVSVWVPRK

SEQ ID NO: 18812 - protein, 482 aa, Geobacillus stearothermophilus
AAPFNGTMMQYFEWYLPDDGTLWTKVANEANNLSSLGITALWLPPAYKGTSRSDVGYGVYDLYDLGEFNQKGTVRTKYGTKAQYLQAIQAAHAAGMQVYADVVFDHKGGADGTEWVDAVEVNPSDRNQEISGTYQIQAWTKFDFPGRGNTYSSFKWRWYHFDGVDWDESRKLSRIYKFRGKAWDWPVDTENGNYDYLMYADLDMDHPEVVTELKNWGKWYVNTTNIDGFRLDAVKHIKFSFFPDWLSYVRSQTGKPLFTVGEYWSYDINKLHNYITKTNGTMSLFDAPLHNKFYTASKSGGAFDMRTLMTNTLMKDQPTLAVTFVDNHDTEPGQALQSWVDPWFKPLAYAFILTRQEGYPCVFYGDYYGIPQYNIPSLKSKIDPLLIARRDYAYGTQHDYLDHSDIIGWTREGVTEKPGSGLAALITDGPGGSKWMYVGKQHAGKVFYDLTGNRSDTVTINSDGWGEFKVNGGSVSVWVPRK

SEQ ID NO: 18813 - protein, 484 aa, Geobacillus stearothermophilus
AAPFNGTMMQYFEWYLPDDGTLWTKVANEANNLSSLGITALWLPPAYKGTSRSDVGYGVYDLYDLGEFNQKGTVRTKYGTKAQYLQAIQAAHAAGMQVYADVVFDHKGGADGTEWVDAVEVNPSDRNQEISGTYQIQAWTKFDFPGRGNTYSSFKWRWYHFDGVDWDESRKLSRIYKFRGIGKAWDWEVDTENGNYDYLMYADLDMDHPEVVTELKNWGKWYVNTTNIDGFRLDAVKHIKFSFFPDWLSYVRSQTGKPLFTVGEYWSGDINKLHNYITKTNGTMSLFDAPLHHKFYTASKSGGAFDMRTLMTNTLMKDQPTLAVTFVDNHDTEPGQALQSWVDPWFKPLAYAFILTRQEGYPCVFYGDYYGIPQYNIPSLKSKIDPLLIARRDYAYGTQHDYLDHSDIIGWTREGVTEKPGSGLAALITDGPGGSKWMYVGKQHAGKVFYDLTGNRSDTVTINSDGWGEFKVNGGSVSVWVPRK

SEQ ID NO: 18814 - protein, 484 aa, Geobacillus stearothermophilus
AAPFNGTMMQYFEWYLPDDGTLWTKVANEANNLSSLGITALWLPPAYKGTSRSDVGYGVYDLYDLGEFNQKGTVRTKYGTKAQYLQAIQAAHAAGMQVYADVVFDHKGGADGTEWVDAVEVNPSDRNQEISGTYQIQAWTKFDFPGRGNTYSSFKWRWYHFDGVDWDESRKLSRIYKFRGIGKAWDWEVDTENGNYDYLMYADLDMDHPEVVTELKNWGKWYVNTTNIDGFRLDAVKHIKFSFFPDWLSYVRSQTGKPLFTVGEYWSGDINKLHNYITKTNGTMSLFDAPLHFKFYTASKSGGAFDMRTLMTNTLMKDQPTLAVTFVDNHDTEPGQALQSWVDPWFKPLAYAFILTRQEGYPCVFYGDYYGIPQYNIPSLKSKIDPLLIARRDYAYGTQHDYLDHSDIIGWTREGVTEKPGSGLAALITDGPGGSKWMYVGKQHAGKVFYDLTGNRSDTVTINSDGWGEFKVNGGSVSVWVPRK

SEQ ID NO: 18815 - protein, 484 aa, Geobacillus stearothermophilus
AAPFNGTMMQYFEWYLPDDGTLWTKVANEANNLSSLGITALWLPPAYKGTSRSDVGYGVYDLYDLGEFNQKGTVRTKYGTKAQYLQAIQAAHAAGMQVYADVVFDHKGGADGTEWVDAVEVNPSDRNQEISGTYQIQAWTKFDFPGRGNTYSSFKWRWYHFDGVDWDESRKLSRIYKFRGIGKAWDWEVDTENGNYDYLMYADLDMDHPEVVTELKNWGKWYVNTTNIDGFRLDAVKHIKFSFFPDWLSYVRSQTGKPLFTVGEYWSMDINKLHNYITKTNGTMSLFDAPLHYKFYTASKSGGAFDMRTLMTNTLMKDQPTLAVTFVDNHDTEPGQALQSWVDPWFKPLAYAFILTRQEGYPCVFYGDYYGIPQYNIPSLKSKIDPLLIARRDYAYGTQHDYLDHSDIIGWTREGVTEKPGSGLAALITDGPGGSKWMYVGKQHAGKVFYDLTGNRSDTVTINSDGWGEFKVNGGSVSVWVPRK

SEQ ID NO: 18816 - protein, 484 aa, Geobacillus stearothermophilus
AAPFNGTMMQYFEWYLPDDGTLWTKVANEANNLSSLGITALWLPPAYKGTSRSDVGYGVYDLYDLGEFNQKGTVRTKYGTKAQYLQAIQAAHAAGMQVYADVVFDHKGGADGTEWVDAVEVNPSDRNQEISGTYQIQAWTKFDFPGRGNTYSSFKWRWYHFDGVDWDESRKLSRIYKFRGIGKAWDWPVDTENGNYDYLMYADLDMDHPEVVTELKNWGKWYVNTTNIDGFRLDAVKHIKFSFFPDWLSYVRSQTGKPLFTVGEYWSYDINKLHNYITWTNGTMSLFDAPLHNKFYTASKSGGAFDMRTLMTNTLMKDQPTLAVTFVDNHDTEPGQALQSWVDPWFKPLAYAFILTRQEGYPCVFYGDYYGIPQYNIPSLKSKIDPLLIARRDYAYGTQHDYLDHSDIIGWTREGVTEKPGSGLAALITDGPGGSKWMYVGKQHAGKVFYDLTGNRSDTVTINSDGWGEFKVNGGSVSVWVPRK

SEQ ID NO: 18817 - protein, 484 aa, Geobacillus stearothermophilus
AAPFNGTMMQYFEWYLPDDGTLWTKVANEANNLSSLGITALWLPPAYKGTSRSDVGYGVYDLYDLGEFNQKGTVRTKYGTKAQYLQAIQAAHAAGMQVYADVVFDHKGGADGTEWVDAVEVNPSDRNQEISGTYQIQAWTKFDFPGRGNTYSSFKWRWYHFDGVDWDESRKLSRIYKFRGIGKAWDWEVDTENGNYDYLMYADLDMDHPEVVTELKNWGKWYVNTTNIDGFRLDAVKHIKFSFFPDWLSYVRSQTGKPLFTVGEYWSLDINKLHNYITKTNGTMSLFDAPLHYKFYTASKSGGAFDMRTLMTNTLMKDQPTLAVTFVDNHDTEPGQALQSWVDPWFKPLAYAFILTRQEGYPCVFYGDYYGIPQYNIPSLKSKIDPLLIARRDYAYGTQHDYLDHSDIIGWTREGVTEKPGSGLAALITDGPGGSKWMYVGKQHAGKVFYDLTGNRSDTVTINSDGWGEFKVNGGSVSVWVPRK

SEQ ID NO: 18818 - protein, 484 aa, Geobacillus stearothermophilus
AAPFNGTMMQYFEWYLPDDGTLWTKVANEANNLSSLGITALWLPPAYKGTSRSDVGYGVYDLYDLGEFNQKGTVRTKYGTKAQYLQAIQAAHAAGMQVYADVVFDHKGGADGTEWVDAVEVNPSDRNQEISGTYQIQAWTKFDFPGRGNTYSSFKWRWYHFDGVDWDESRKLSRIYKFRGIGKAWDWEVDTENGNYDYLMYADLDMDHPEVVTELKNWGKWYVNTTNIDGFRLDAVKHIKFSFFPDWLSYVRSQTGKPLFTVGEYWSVDINKLHNYITKTNGTMSLFDAPLHYKFYTASKSGGAFDMRTLMTNTLMKDQPTLAVTFVDNHDTEPGQALQSWVDPWFKPLAYAFILTRQEGYPCVFYGDYYGIPQYNIPSLKSKIDPLLIARRDYAYGTQHDYLDHSDIIGWTREGVTEKPGSGLAALITDGPGGSKWMYVGKQHAGKVFYDLTGNRSDTVTINSDGWGEFKVNGGSVSVWVPRK

SEQ ID NO: 18819 - protein, 484 aa, Geobacillus stearothermophilus
AAPFNGTMMQYFEWYLPDDGTLWTKVANEANNLSSLGITALWLPPAYKGTSRSDVGYGVYDLYDLGEFNQKGTVRTKYGTKAQYLQAIQAAHAAGMQVYADVVFDHKGGADGTEWVDAVEVNPSDRNQEISGTYQIQAWTKFDFPGRGNTYSSFKWRWYHFDGVDWDESRKLSRIYKFRGIGKAWDWEVDTENGNYDYLMYADLDMDHPEVVTELKNWGKWYVNTTNIDGFRLDAVKHIKFSFFPDWLSYVRSQTGKPLFTVGEYWSADINKLHNYITKTNGTMSLFDAPLHYKFYTASKSGGAFDMRTLMTNTLMKDQPTLAVTFVDNHDTEPGQALQSWVDPWFKPLAYAFILTRQEGYPCVFYGDYYGIPQYNIPSLKSKIDPLLIARRDYAYGTQHDYLDHSDIIGWTREGVTEKPGSGLAALITDGPGGSKWMYVGKQHAGKVFYDLTGNRSDTVTINSDGWGEFKVNGGSVSVWVPRK

SEQ ID NO: 18820 - protein, 484 aa, Geobacillus stearothermophilus
AAPFNGTMMQYFEWYLPDDGTLWTKVANEANNLSSLGITALWLPPAYKGTSRSDVGYGVYDLYDLGEFNQKGTVRTKYGTKAQYLQAIQAAHAAGMQVYADVVFDHKGGADGTEWVDAVEVNPSDRNQEISGTYQIQAWTKFDFPGRGNTYSSFKWRWYHFDGVDWDESRKLSRIYKFRGIGKAWDWPVDTENGNYDYLMYADLDMDHPEVVTELKNWGKWYVNTTNIDGFRLDAVKHIKFQFFPDWLSYVRSQTGKPLFTVGEYWSYDINKLHNYITKTNGTMSLFDAPLHNKFYTASKSGGAFDMRTLMTNTLMKDQPTLAVTFVDNHDTEPGQALQSWVDPWFKPLAYAFILTRQEGYPCVFYGDYYGIPQYNIPSLKSKIDPLLIARRDYAYGTQHDYLDHSDIIGWTREGVTEKPGSGLAALITDGPGGSKWMYVGKQHAGKVFYDLTGNRSDTVTINSDGWGEFKVNGGSVSVWVPRK

SEQ ID NO: 18821 - protein, 484 aa, Geobacillus stearothermophilus
AAPFNGTMMQYFEWYLPDDGTLWTKVANEANNLSSLGITALWLPPAYKGTSRSDVGYGVYDLYDLGEFNQKGTVRTKYGTKAQYLQAIQAAHAAGMQVYADVVFDHKGGADGTEWVDAVEVNPSDRNQEISGTYQIQAWTKFDFPGRGNTYSSFKWRWYHFDGVDWDESRKLSRIYKFRGIGKAWDWPVDTENGNYDYLMYADLDMDHPEVVTELKNWGKWYVNTTNIDGFRLDAVKHIKFSFFPDWLSYVRSQTGKPLFTVGEYWSYDINKLHNYITKTNGTMSLFDAPLHNKFYTASKSGGAFDMRTLMTNTLMKDQPTLAVTFVDNHDTEPGQALQSWVDPWFKPLAYAFILTRQEGYPCVFYGDYYGIPQYNIPSLKSKIDPLLIARRDYAYGTQHDYLDHSDIIGWTREGVTEKPGSGLAALITDGPGGSKWMYVGKQHAGKVFYDLTGNRSDTVTINSDGWGEFKVNGGSVSVWVPRK

SEQ ID NO: 18822 - protein, 484 aa, Geobacillus stearothermophilus
AAPFNGTMMQYFEWYLPDDGTLWTKVANEANNLSSLGITALWLPPAYKGTSRSDVGYGVYDLYDLGEFNQKGTVRTKYGTKAQYLQAIQAAHAAGMQVYADVVFDHKGGADGTEWVDAVEVNPSDRNQEISGTYQIQAWTKFDFPGRGNTYSSFKWRWYHFDGVDWDESRKLSRIYKFRGIGKAWDWEVDTENGNYDYLMYADLDMDHPEVVTELKNWGKWYVNTTNIDGFRLDAVKHIKFSFFPDWLSYVRSQTGKPLFTVGEYWSSDINKLHNYITKTNGTMSLFDAPLHYKFYTASKSGGAFDMRTLMTNTLMKDQPTLAVTFVDNHDTEPGQALQSWVDPWFKPLAYAFILTRQEGYPCVFYGDYYGIPQYNIPSLKSKIDPLLIARRDYAYGTQHDYLDHSDIIGWTREGVTEKPGSGLAALITDGPGGSKWMYVGKQHAGKVFYDLTGNRSDTVTINSDGWGEFKVNGGSVSVWVPRK

SEQ ID NO: 18823 - protein, 484 aa, Geobacillus stearothermophilus
AAPFNGTMMQYFEWYLPDDGTLWTKVANEANNLSSLGITALWLPPAYKGTSRSDVGYGVYDLYDLGEFNQKGTVRTKYGTKAQYLQAIQAAHAAGMQVYADVVFDHKGGADGTEWVDAVEVNPSDRNQEISGTYQIQAWTKFDFPGRGNTYSSFKWRWYHFDGVDWDESRKLSRIYKFRGIGKAWDWEVDTENGNYDYLMYADLDMDHPEVVTELKNWGKWYVNTTNIDGFRLDAVKHIKFSFFPDWLSYVRSQTGKPLFTVGEYWSYDINKLHNYITKTDGTMSLFDAPLHNKFYTASKSGGAFDMRTLMTNTLMKDQPTLAVTFVDNHDTEPGQALQSWVDPWFKPLAYAFILTRQEGYPCVFYGDYYGIPQYNIPSLKSKIDPLLIARRDYAYGTQHDYLDHSDIIGWTREGVTEKPGSGLAALITDGPGGSKWMYVGKQHAGKVFYDLTGNRSDTVTINSDGWGEFKVNGGSVSVWVPRK

SEQ ID NO: 18824 - protein, 484 aa, Geobacillus stearothermophilus
AAPFNGTMMQYFEWYLPDDGTLWTKVANEANNLSSLGITALWLPPAYKGTSRSDVGYGVYDLYDLGEFNQKGTVRTKYGTKAQYLQAIQAAHAAGMQVYADVVFDHKGGADGTEWVDAVEVNPSDRNQEISGTYQIQAWTKFDFPGRGNTYSSFKWRWYHFDGVDWDESRKLSRIYKFRGIGKAWDWEVDTENGNYDYLMYADLDMDHPEVVTELKNWGKWYVNTTNIDGFRLDAVKHIKFSFFPDWLSYVRSQTGKPLFTVGEYWSPDINKLHNYITKTNGTMSLFDAPLHYKFYTASKSGGAFDMRTLMTNTLMKDQPTLAVTFVDNHDTEPGQALQSWVDPWFKPLAYAFILTRQEGYPCVFYGDYYGIPQYNIPSLKSKIDPLLIARRDYAYGTQHDYLDHSDIIGWTREGVTEKPGSGLAALITDGPGGSKWMYVGKQHAGKVFYDLTGNRSDTVTINSDGWGEFKVNGGSVSVWVPRK

SEQ ID NO: 18825 - protein, 484 aa, Geobacillus stearothermophilus
AAPFNGTMMQYFEWYLPDDGTLWTKVANEANNLSSLGITALWLPPAYKGTSRSDVGYGVYDLYDLGEFNQKGTVRTKYGTKAQYLQAIQAAHAAGMQVYADVVFDHKGGADGTEWVDAVEVNPSDRNQEISGTYQIQAWTKFDFPGRGNTYSSFKWRWYHFDGVDWDESRKLSRIYKFRGIGKAWDWEVDTENGNYDYLMYADLDMDHPEVVTELKNWGKWYVNTTNIDGFRLDAVKHIKFSFFPDWLSYVRSQTGKPLFTVGEYWSGDINKLHNYITKTNGTMSLFDAPLHWKFYTASKSGGAFDMRTLMTNTLMKDQPTLAVTFVDNHDTEPGQALQSWVDPWFKPLAYAFILTRQEGYPCVFYGDYYGIPQYNIPSLKSKIDPLLIARRDYAYGTQHDYLDHSDIIGWTREGVTEKPGSGLAALITDGPGGSKWMYVGKQHAGKVFYDLTGNRSDTVTINSDGWGEFKVNGGSVSVWVPRK

SEQ ID NO: 18826 - protein, 484 aa, Geobacillus stearothermophilus
AAPFNGTMMQYFEWYLPDDGTLWTKVANEANNLSSLGITALWLPPAYKGTSRSDVGYGVYDLYDLGEFNQKGTVRTKYGTKAQYLQAIQAAHAAGMQVYADVVFDHKGGADGTEWVDAVEVNPSDRNQEISGTYQIQAWTKFDFPGRGNTYSSFKWRWYHFDGVDWDESRKLSRIYKFRGIGKAWDWPVDTENGNYDYLMYADLDMDHPEVVTELKNWGKWYVNTTNIDGFRLDAVKHIKFFFFPDWLSYVRSQTGKPLFTVGEYWSYDINKLHNYITKTNGTMSLFDAPLHNKFYTASKSGGAFDMRTLMTNTLMKDQPTLAVTFVDNHDTEPGQALQSWVDPWFKPLAYAFILTRQEGYPCVFYGDYYGIPQYNIPSLKSKIDPLLIARRDYAYGTQHDYLDHSDIIGWTREGVTEKPGSGLAALITDGPGGSKWMYVGKQHAGKVFYDLTGNRSDTVTINSDGWGEFKVNGGSVSVWVPRK

SEQ ID NO: 18827 - protein, 484 aa, Geobacillus stearothermophilus
AAPFNGTMMQYFEWYLPDDGTLWTKVANEANNLSSLGITALWLPPAYKGTSRSDVGYGVYDLYDLGEFNQKGTVRTKYGTKAQYLQAIQAAHAAGMQVYADVVFDHKGGADGTEWVDAVEVNPSDRNQEISGTYQIQAWTKFDFPGRGNTYSSFKWRWYHFDGVDWDESRKLSRIYKFRGIGKAWDWEVDTENGNYDYLMYADLDMDHPEVVTELKNWGKWYVNTTNIDGFRLDAVKHIKFSFFPDWLSYVRSQTGKPLFTVGEYWSTDINKLHNYITKTNGTMSLFDAPLHYKFYTASKSGGAFDMRTLMTNTLMKDQPTLAVTFVDNHDTEPGQALQSWVDPWFKPLAYAFILTRQEGYPCVFYGDYYGIPQYNIPSLKSKIDPLLIARRDYAYGTQHDYLDHSDIIGWTREGVTEKPGSGLAALITDGPGGSKWMYVGKQHAGKVFYDLTGNRSDTVTINSDGWGEFKVNGGSVSVWVPRK

SEQ ID NO: 18828 - protein, 484 aa, Geobacillus stearothermophilus
AAPFNGTMMQYFEWYLPDDGTLWTKVANEANNLSSLGITALWLPPAYKGTSRSDVGYGVYDLYDLGEFNQKGTVRTKYGTKAQYLQAIQAAHAAGMQVYADVVFDHKGGADGTEWVDAVEVNPSDRNQEISGTYQIQAWTKFDFPGRGNTYSSFKWRWYHFDGVDWDESRKLSRIYKFRGIGKAWDWEVDTENGNYDYLMYADLDMDHPEVVTELKNWGKWYVNTTNIDGFRLDAVKHIKFSFFPDWLSYVRSQTGKPLFTVGEYWSGDINKLHNYITKTNGTMSLFDAPLHQKFYTASKSGGAFDMRTLMTNTLMKDQPTLAVTFVDNHDTEPGQALQSWVDPWFKPLAYAFILTRQEGYPCVFYGDYYGIPQYNIPSLKSKIDPLLIARRDYAYGTQHDYLDHSDIIGWTREGVTEKPGSGLAALITDGPGGSKWMYVGKQHAGKVFYDLTGNRSDTVTINSDGWGEFKVNGGSVSVWVPRK

SEQ ID NO: 18829 - protein, 484 aa, Geobacillus stearothermophilus
AAPFNGTMMQYFEWYLPDDGTLWTKVANEANNLSSLGITALWLPPAYKGTSRSDVGYGVYDLYDLGEFNQKGTVRTKYGTKAQYLQAIQAAHAAGMQVYADVVFDHKGGADGTEWVDAVEVNPSDRNQEISGTYQIQAWTKFDFPGRGNTYSSFKWRWYHFDGVDWDESRKLSRIYKFRGIGKAWDWEVDTENGNYDYLMYADLDMDHPEVVTELKNWGKWYVNTTNIDGFRLDAVKHIKFSFFPDWLSYVRSQTGKPLFTVGEYWSGDINKLHNYITKTNGTMSLFDAPLHAKFYTASKSGGAFDMRTLMTNTLMKDQPTLAVTFVDNHDTEPGQALQSWVDPWFKPLAYAFILTRQEGYPCVFYGDYYGIPQYNIPSLKSKIDPLLIARRDYAYGTQHDYLDHSDIIGWTREGVTEKPGSGLAALITDGPGGSKWMYVGKQHAGKVFYDLTGNRSDTVTINSDGWGEFKVNGGSVSVWVPRK

SEQ ID NO: 18830 - protein, 484 aa, Geobacillus stearothermophilus
AAPFNGTMMQYFEWYLPDDGTLWTKVANEANNLSSLGITALWLPPAYKGTSRSDVGYGVYDLYDLGEFNQKGTVRTKYGTKAQYLQAIQAAHAAGMQVYADVVFDHKGGADGTEWVDAVEVNPSDRNQEISGTYQIQAWTKFDFPGRGNTYSSFKWRWYHFDGVDWDESRKLSRIYKFRGIGKAWDWPVDTENGNYDYLMYADLDMDHPEVVTELKNWGKWYVNTTNIDGFRLDAVKHIKFSFFPDWLSYVRSQTGKPLFTVGEYWSYDINKLHNYITYTNGTMSLFDAPLHNKFYTASKSGGAFDMRTLMTNTLMKDQPTLAVTFVDNHDTEPGQALQSWVDPWFKPLAYAFILTRQEGYPCVFYGDYYGIPQYNIPSLKSKIDPLLIARRDYAYGTQHDYLDHSDIIGWTREGVTEKPGSGLAALITDGPGGSKWMYVGKQHAGKVFYDLTGNRSDTVTINSDGWGEFKVNGGSVSVWVPRK

SEQ ID NO: 18831 - protein, 484 aa, Geobacillus stearothermophilus
AAPFNGTMMQYFEWYLPDDGTLWTKVANEANNLSSLGITALWLPPAYKGTSRSDVGYGVYDLYDLGEFNQKGTVRTKYGTKAQYLQAIQAAHAAGMQVYADVVFDHKGGADGTEWVDAVEVNPSDRNQEISGTYQIQAWTKFDFPGRGNTYSSFKWRWYHFDGVDWDESRKLSRIYKFRGIGKAWDWEVDTENGNYDYLMYADLDMDHPEVVTELKNWGKWYVNTTNIDGFRLDAVKHIKFSFFPDWLSYVRSQTGKPLFTVGEYWSIDINKLHNYITKTNGTMSLFDAPLHYKFYTASKSGGAFDMRTLMTNTLMKDQPTLAVTFVDNHDTEPGQALQSWVDPWFKPLAYAFILTRQEGYPCVFYGDYYGIPQYNIPSLKSKIDPLLIARRDYAYGTQHDYLDHSDIIGWTREGVTEKPGSGLAALITDGPGGSKWMYVGKQHAGKVFYDLTGNRSDTVTINSDGWGEFKVNGGSVSVWVPRK

SEQ ID NO: 18832 - protein, 481 aa, Geobacillus stearothermophilus
AAPFNGTMMQYFEWYLPDDGTLWTKVANEANNLSSLGITALWLPPAYKGTSRSDVGYGVYDLYDLGEFNQKGTVRTKYGTEAQYLQAIQAAHAAGMQVYADVVFDHKGGADGTEWVDAVEVNPSDRNQEISGTYQIQAWTKFDFPGRGNTYSSFKWRWYHFDGVDWDESRKLSRIYKFRGKAWDWEVDTEFGNYDYLMYADLDMDHPEVVTELKNWGKWYVNTTNIDGFRLDAVKHIKFSFFPDWLSYVRSQTGKPLFTVGEYWSYDINKLHNYITKTDGTMSLFDAPLHNKFYTASKSGGAFDMRTLMTNTLMKDQPTLAVTFVDNHDTEPVQALQSWVDPWFKPLAYAFILTRQEGYPCVFYGDYYGIPQYNIPSLKSKIDPLLIARRDYAYGTQHDYLDHSDIIGWTREGGTEKPGSGLAALITDGPGGSKWMYVGKQHAGKVFYDLTGNRSDTVTINSDGWGEFKVNGGSVSVWVPR

SEQ ID NO: 18833 - protein, 481 aa, Geobacillus stearothermophilus
AAPFNGTMMQYFEWYLPDDGTLWTKVANEANNLSSLGITALWLPPAYKGTSRSDVGYGVYDLYDLGEFNQKGTVRTKYGTKAQYLQAIQAAHAAGMQVYADVVFDHKGGADGTEWVDAVEVNPSDRNQEISGTYQIQAWTKFDFPGRGNTYSSFKWRWYHFDGVDWDESRKLSRIYKFRGKAWDWEVDTEFGNYDYLMYADLDMDHPEVVTELKNWGKWYVNTTNIDGFRLDAVKHIKFSFFPDWLSYVRSQTGKPLFTVGEYWSYDINKLHNYITKTDGTMSLFDAPLHNKFYTASKSGGAFDMRTLMTNTLMKDQPTLAVTFVDNHDTEPVQALQSWVDPWFKPLAYAFILTRQEGYPCVFYGDYYGIPQYNIPSLKSKIDPLLIARRDYAYGTQHDYLDHRDIIGWTREGGTEKPGSGLAALITDGPGGSKWMYVGKQHAGKVFYDLTGNRSDTVTINSDGWGEFKVNGGSVSVWVPR

SEQ ID NO: 18834 - protein, 483 aa, Synthetic construct
AAPFNGTMMQYFEWYLPDDGTLWTKVANEANNLSSLGITALWLPPAYKGTSRSDVGYGVYDLYDLGEFNQKGAVRTKYGTKAQYLQAIQAAHAAGMQVYADVVFNHKAGADATEWVDAVEVNPSNRNQEVSGTYKIQAWTKFDFPGRGNTYSSFKWRWYHFDGTDWDQSRQLNRIYKFRGTGKAWDWEVDTENGNYDYLMFADLDMDHPEVVTELKNWGKWYVNTTNIDGFRLDAVKHIKFSFFPDWLSYVRSQTGKPLFTVGEYWSYDINKLHNYIMKTNGTMSLFDAPLHNKFYTASKSGGTFDMRTLMTNTLMKDQPTLAVTFVDNHDTEPGQALQSWVDPWFKPLAYAFILTRQEGYPCVFYGDYYGIPQYNIPSLKSKIDPLLIARRDYAYGTQHDYLDHSDIIGWTREGVTEKPGSGLAALITDGPGGSKWMYVGKQHAGKVFYDLTGNRSDTVTINSDGWGEFKVNGGSVSVWVPR

SEQ ID NO: 18835 - protein, 532 aa, Geobacillus stearothermophilus
RPIVFFTVCLFLLCDGSLAAAAPFNGTMMQYFEWYLPDDGTLWTKVANEANNLSSLGITALWLPPAYKGTSRSDVGYGVYDLYDLGEFNQKGTVRTKYGTKAQYLQAIQAAHAAGMQVYADVVFDHKGGADGTEWVDAVEVNPSDRNQEISGTYQIQAWTKFDFNGRGNTYSSFKWRWYHFDGVDWDESRKLSRIYKFRGIGKAWDWEVDTENGNYDYLMYADLDMDHPEVVTELKNWGKWYVNTTNIDGFRLDAVKHIKFSFFPDWLSYVRSQTGKPLFTVGEYWSYDINKLHNYITKTNGTMSLFDAPLHNKFYTASKSGGAFDMSTLMNNTLMKDQPTLAVTFVDNHDTEPGQALQSWVDPWFKPLAYAFILTRQEGYPCVFYGDYYGIPQYNIPSLKSKIDPLLIARRDYAYGTQHDYLDHSDIIGWTREGVTEKPGSGLAALITDGPGGSKWMYVGKQHAGKVFYDLTGNRSDTVTINSDGWGEFKVNGGSVSVWVPRKTTVSTIAWPITTRPWTGEFVRWTEPRLV

SEQ ID NO: 18836 - protein, 491 aa, Geobacillus stearothermophilus
AAPFNGTMMQYFEWYLPDDGTLWTKVANEANNLSSLGITALWLPPAYKGTSRSDVGYGVYDLYDLGEFNQKGTVRTKYGTKAQYLQAIQAAHAAGMQVYADVVFDHKGGADGTEWVDAVEVNPSDRNQEISGTYQIQAWTKFDFPGRGNTYSSFKWRWYHFDGVDWDESRKLSRIYKFRGKAWDWEVDTEFGNYDYLMYADLDMDHPEVVTELKNWGPWYVLTTNIDGFRLDAVKHIKFQFFPDWLSYVRSSTGKPLFTVGEYWSYDINKLHNYITKTNGTMSLFDAPLHNKFYTASKSGGAFDMRTLMTNTLMKDQPTLAVTFVDNHDTEPGQALQSWVDPWFKPLAYAFILTRQEGYPCVFYGDYYGIPQYNIPSLKSKIDPLLIARRDYAYGTQHDYLDHSDIIGWTREGVTEKPGSGLAALITDGPGGSKWMYVGKQHAGKVFYDLTGNRSDTVTINSDGWGEFKVNGGSVSVWVPRKTTVSTIARP

SEQ ID NO: 18837 - protein, 491 aa, Geobacillus stearothermophilus
AAPFNGTMMQYFEWYLPDDGTLWTKVANEANNLSSLGITALWLPPAYKGTSRSDVGYGVYDLYDLGEFNQKGTVRTKYGTKAQYLQAIQALHAAGIQVYADVVFDHKGGADGTEWVDAVEVNPSDRNQVISGTYQIQAWTKFDFPGRGNTYSSFKWRWYHFDGVDWDESRKLSRIYLFEGKAWDWEVDTEFGNYDYLMYADLDMDHPEVVTELKNWGPWYVLTTNIDGFRLDAVKHIKFQFFPDWLSYVRSSTGKPLFTVGEYWSYDINKLHNYITKTNGTMSLFDAPLHNKFYTASKSGGAFDMRTLMTNTLMKDQPTLAVTFVDNHDTEPGQALQSWVDPWFKPLAYAFILTRQEGYPCVFYGDYYGIPQYNIPSLKSKIDPLLIARRDYAYGTQHDYLDHSDIIGWTREGVTEKPGSGLAALITDGPGGSKWMYVGKQHAGKVFYDLTGNRSDTVTINSDGWGEFKVNGGSVSVWVPRKTTVSTIARP

SEQ ID NO: 18838 - protein, 491 aa, Geobacillus stearothermophilus
AAPFNGTMMQYFEWYLPDDGTLWTKVANEANNLSSLGITALWLPPAYKGTSRSDVGYGVYDLYDLGEFNQKGTVRTKYGTKAQYLQAIQAAHAAGMQVYADVVFDHKGGADGTEWVDAVEVNPSDRNQEISGTYQIQAWTKFDFPGRGNTYSSFKWRWYHFDGVDWDESRKLSRIYKFRGKAWDWEVDTEFGNYDYLMYADLDMDHPEVVTELKNWGPWYVLTTNIDGFRLDAVKHIKFSFFPDWLSYVRSSTGKPLFTVGEYWSYDINKLHNYITKTNGTMSLFDAPLHNKFYTASKSGGAFDMRTLMTNTLMKDQPTLAVTFVDNHDTEPGQALQSWVDPWFKPLAYAFILTRQEGYPCVFYGDYYGIPQYNIPSLKSKIDPLLIARRDYAYGTQHDYLDHSDIIGWTREGVTEKPGSGLAALITDGPGGSKWMYVGKQHAGKVFYDLTGNRSDTVTINSDGWGEFKVNGGSVSVWVPRKTTVSTIARP

SEQ ID NO: 18839 - protein, 491 aa, Geobacillus stearothermophilus
AAPFNGTMMQYFEWYLPDDGTLWTKVANEANNLSSLGITALWLPPAYKGTSRSDVGYGVYDLYDLGEFNQKGTVRTKYGTKAQYLQAIQAAHAAGMQVYADVVFDHKGGADGTEWVDAVEVNPSDRNQEISGTYQIQAWTKFDFPGRGNTYSSFKWRWYHFDGVDWDESRKLSRIYKFRGKAWDWEVDTENGNYDYLMYADLDMDHPEVVTELKNWGKWYVNTTNIDGFRLDAVKHIKFSFFPDWLSYVRSQTGKPLFTVGEYWSYDINKLHNYITKTNGTMSLFDAPLHNKFYTASKSGGAFDMRTLMTNTLMKDQPTLAVTFVDNHDTEPGQALQSWVDPWFKPLAYAFILTRQEGYPCVFYGDYYGIPQYNIPSLKSKIDPLLIARRDYAYGTQHDYLDHSDIIGWTREGVTEKPGSGLAALITDGPGGSKWMYVGKQHAGKVFYDLTGNRSDTVTINSDGWGEFKVNGGSVSVWVPRKTTVSTIARP

SEQ ID NO: 18840 - protein, 491 aa, Geobacillus stearothermophilus
AAPFNGTMMQYFEWYLPDDGTLWTKVANEANNLSSLGITALWLPPAYKGTSRSDVGYGVYDLYDLGEFNQKGTVRTKYGTKAQYLQAIQAAHAAGMQVYADVVFDHKGGADGTEWVDAVEVNPSDRNQVISGTYQIQAWTKFDFPGRGNTYSSFKWRWYHFDGVDWDESRKLSRIYLFEGKAWDWEVDTEFGNYDYLMYADLDMDHPEVVTELKNWGPWYVLTTNIDGFRLDAVKHIKFQFFPDWLSYVRSSTGKPLFTVGEYWSYDINKLHNFITKTNGTMSLFDAPLHNKFYTASKSGGAFDMRTLMTNTLMKDQPTLAVTFVDNHDTEPGQALQSWVDPWFKPLAYAFILTRQEGYPCVFYGDYYGIPQYNIPSLKSKIDPLLIARRDYAYGTQHDYLDHSDIIGWTREGVTEKPGSGLAAMITDGPGGSKWMYVGKQHAGKVFYDLTGNRSDTVTINSDGWGEFKVNGGSVSVWVPRKTTVSTIARP

SEQ ID NO: 18841 - protein, 491 aa, Geobacillus stearothermophilus
AAPFNGTMMQYFEWYLPDDGTLWTKVANEANNLSSLGITALWLPPAYKGTSRSDVGYGVYDLYDLGEFNQKGTVRTKYGTKAQYLQAIQAAHAAGMQVYADVVFDHKGGADGTEWVDAVEVNPSDRNQEISGTYQIQAWTKFDFPGRGNTYSSFKWRWYHFDGVDWDESRKLSRIYKFIGKAWDWEVDTENGNYDYLMYADLDMDHPEVVTELKNWGKWYVNTTNIDGFRLDAVKHIKFSFFPDWLSYVRSQTGKPLFTVGEYWSYDINKLHNYITKTNGTMSLFDAPLHNKFYTASKSGGAFDMRTLMTNTLMKDQPTLAVTFVDNHDTEPGQALQSWVDPWFKPLAYAFILTRQEGYPCVFYGDYYGIPQYNIPSLKSKIDPLLIARRDYAYGTQHDYLDHSDIIGWTREGVTEKPGSGLAALITDGPGGSKWMYVGKQHAGKVFYDLTGNRSDTVTINSDGWGEFKVNGGSVSVWVPRKTTVSTIARP

SEQ ID NO: 18842 - protein, 491 aa, Geobacillus stearothermophilus
AAPFNGTMMQYFEWYLPDDGTLWTKVANEANNLSSLGITALWLPPAYKGTSRSDVGYGVYDLYDLGEFNQKGTVRTKYGTKAQYLQAIQALHAAGLQVYADVVFDHKGGADGTEWVDAVEVNPSDRNQVISGTYQIQAWTKFDFPGRGNTYSSFKWRWYHFDGVDWDESRKLSRIYLFEGKAWDWEVDTEFGNYDYLMYADLDMDHPEVVTELKNWGPWYVLTTNIDGFRLDAVKHIKFQFFPDWLSYVRSSTGKPLFTVGEYWSYDINKLHNYITKTNGTMSLFDAPLHNKFYTASKSGGAFDMRTLMTNTLMKDQPTLAVTFVDNHDTEPGQALQSWVDPWFKPLAYAFILTRQEGYPCVFYGDYYGIPQYNIPSLKSKIDPLLIARRDYAYGTQHDYLDHSDIIGWTREGVTEKPGSGLAALITDGPGGSKWMYVGKQHAGKVFYDLTGNRSDTVTINSDGWGEFKVNGGSVSVWVPRKTTVSTIARP

SEQ ID NO: 18843 - protein, 492 aa, Geobacillus stearothermophilus
AAPFNGTMMQYFEWYLPDDGTLWTKVANEANNLSSLGITALWLPPAYKGTSRSDVGYGVYDLYDLGEFNQKGTVRTKYGTKAQYLQAIQAAHAAGMQVYADVVFDHKGGADGTEWVDAVEVNPSDRNQEISGTYQIQAWTKFDFPGRGNTYSSFKWRWYHFDGVDWDESRKLSRIYKFRIGKAWDWEVDTENGNYDYLMYADLDMDHPEVVTELKNWGKWYVNTTNIDGFRLDAVKHIKFSFFPDWLSYVRSQTGKPLFTVGEYWSYDINKLHNYITKTNGTMSLFDAPLHNKFYTASKSGGAFDMRTLMTNTLMKDQPTLAVTFVDNHDTEPGQALQSWVDPWFKPLAYAFILTRQEGYPCVFYGDYYGIPQYNIPSLKSKIDPLLIARRDYAYGTQHDYLDHSDIIGWTREGVTEKPGSGLAALITDGPGGSKWMYVGKQHAGKVFYDLTGNRSDTVTINSDGWGEFKVNGGSVSVWVPRKTTVSTIARP

SEQ ID NO: 18844 - protein, 492 aa, 180
AAPFNGTMMQYFEWYLPDDGTLWTKVANEANNLSSLGITALWLPPAYKGTSRSDVGYGVYDLYDLGEFNQKGTVRTKYGTKAQYLQAIQAAHAAGMQVYADVVFDHKGGADGTEWVDAVEVNPSDRNQEISGTYQIQAWTKFDFPGRGNTYSSFKWRWYHFDGVDWDESRKLSRIYKFRGIKAWDWEVDTENGNYDYLMYADLDMDHPEVVTELKNWGKWYVNTTNIDGFRLDAVKHIKFSFFPDWLSYVRSQTGKPLFTVGEYWSYDINKLHNYITKTNGTMSLFDAPLHNKFYTASKSGGAFDMRTLMTNTLMKDQPTLAVTFVDNHDTEPGQALQSWVDPWFKPLAYAFILTRQEGYPCVFYGDYYGIPQYNIPSLKSKIDPLLIARRDYAYGTQHDYLDHSDIIGWTREGVTEKPGSGLAALITDGPGGSKWMYVGKQHAGKVFYDLTGNRSDTVTINSDGWGEFKVNGGSVSVWVPRKTTVSTIARP

SEQ ID NO: 18845 - protein, 492 aa, Geobacillus stearothermophilus
AAPFNGTMMQYFEWYLPDDGTLWTKVANEANNLSSLGITALWLPPAYKGTSRSDVGYGVYDLYDLGEFNQKGTVRTKYGTKAQYLQAIQAAHAAGMQVYADVVFDHKGGADGTEWVDAVEVNPSDRNQEISGTYQIQAWTKFDFPGRGNTYSSFKWRWYHFDGVDWDESRKLSRIYKFGIGKAWDWEVDTENGNYDYLMYADLDMDHPEVVTELKNWGKWYVNTTNIDGFRLDAVKHIKFSFFPDWLSYVRSQTGKPLFTVGEYWSYDINKLHNYITKTNGTMSLFDAPLHNKFYTASKSGGAFDMRTLMTNTLMKDQPTLAVTFVDNHDTEPGQALQSWVDPWFKPLAYAFILTRQEGYPCVFYGDYYGIPQYNIPSLKSKIDPLLIARRDYAYGTQHDYLDHSDIIGWTREGVTEKPGSGLAALITDGPGGSKWMYVGKQHAGKVFYDLTGNRSDTVTINSDGWGEFKVNGGSVSVWVPRKTTVSTIARP

SEQ ID NO: 18846 - protein, 492 aa, Geobacillus stearothermophilus
AAPFNGTMMQYFEWYLPDDGTLWTKVANEANNLSSLGITALWLPPAYKGTSRSDVGYGVYDLYDLGEFNQKGTVRTKYGTKAQYLQAIQAAHAAGMQVYADVVFDHKGGRADGTEWVDAVEVNPSDRNQEISGTYQIQAWTKFDFPGRGNTYSSFKWRWYHFDGVDWDESRKLSRIYKFIGKAWDWEVDTENGNYDYLMYADLDMDHPEVVTELKNWGKWYVNTTNIDGFRLDAVKHIKFSFFPDWLSYVRSQTGKPLFTVGEYWSYDINKLHNYITKTNGTMSLFDAPLHNKFYTASKSGGAFDMRTLMTNTLMKDQPTLAVTFVDNHDTEPGQALQSWVDPWFKPLAYAFILTRQEGYPCVFYGDYYGIPQYNIPSLKSKIDPLLIARRDYAYGTQHDYLDHSDIIGWTREGVTEKPGSGLAALITDGPGGSKWMYVGKQHAGKVFYDLTGNRSDTVTINSDGWGEFKVNGGSVSVWVPRKTTVSTIARP

SEQ ID NO: 18847 - protein, 492 aa, Geobacillus stearothermophilus
AAPFNGTMMQYFEWYLPDDGTLWTKVANEANNLSSLGITALWLPPAYKGTSRSDVGYGVYDLYDLGEFNQKGTVRTKYGTKAQYLQAIQAAHAAGMQVYADVVFDHKGGADGTEWVDAVEVNPSDRNQEISGTYQIQAWTKFDFPGRGNTYSSFKWRWYHFDGVDWDESRKLSRIYKFRGGKAWDWEVDTENGNYDYLMYADLDMDHPEVVTELKNWGKWYVNTTNIDGFRLDAVKHIKFSFFPDWLSYVRSQTGKPLFTVGEYWSYDINKLHNYITKTNGTMSLFDAPLHNKFYTASKSGGAFDMRTLMTNTLMKDQPTLAVTFVDNHDTEPGQALQSWVDPWFKPLAYAFILTRQEGYPCVFYGDYYGIPQYNIPSLKSKIDPLLIARRDYAYGTQHDYLDHSDIIGWTREGVTEKPGSGLAALITDGPGGSKWMYVGKQHAGKVFYDLTGNRSDTVTINSDGWGEFKVNGGSVSVWVPRKTTVSTIARP

SEQ ID NO: 18848 - protein, 493 aa, Geobacillus stearothermophilus
AAPFNGTMMQYFEWYLPDDGTLWTKVANEANNLSSLGITALWLPPAYKGTSRSDVGYGVYDLYDLGEFNQKGTVRTKYGTKAQYLQAIQAAHAAGMQVYADVVFDHKGGADGTEWVDAVEVNPSDRNQEISGTYQIQAWTKFDFPGRGNTYSSFKWRWYHFDGVDWDESRKLSRIYKFRGIGKAWDWEVDTENGNYDYLMYADLDMDHPEVVTELKNWGKWYVNTTNIDGFRLDAVKHIKFNFFPDWLSYVRSQTGKPLFTVGEYWSYDINKLHNYITKTNGTMSLFDAPLHNKFYTASKSGGAFDMRTLMTNTLMKDQPTLAVTFVDNHDTEPGQALQSWVDPWFKPLAYAFILTRQEGYPCVFYGDYYGIPQYNIPSLKSKIDPLLIARRDYAYGTQHDYLDHSDIIGWTREGVTEKPGSGLAALITDGPGGSKWMYVGKQHAGKVFYDLTGNRSDTVTINSDGWGEFKVNGGSVSVWVPRKTTVSTIARP

SEQ ID NO: 18849 - protein, 493 aa, Geobacillus stearothermophilus
AAPFNGTMMQYFEWYLPDDGTLWTKVANEANNLSSLGITALWLPPAYKGTSRSDVGYGVYDLYDLGEFNQKGTVRTKYGTKAQYLQAIQAAHAAGMQVYADVVFDHKGGADGTEWVDAVEVNPSDRNQEISGTYQIQAWTKFDFPGRGNTYSSFKWRWYHFDGVDWDESRKLSRIYKFRGIGKAWDWEVDTENGNYDYLMYADLDMDHPEVVTELKNWGKWYVNTTNIDGFRLDAVKHIKFGFFPDWLSYVRSQTGKPLFTVGEYWSYDINKLHNYITKTNGTMSLFDAPLHNKFYTASKSGGAFDMRTLMTNTLMKDQPTLAVTFVDNHDTEPGQALQSWVDPWFKPLAYAFILTRQEGYPCVFYGDYYGIPQYNIPSLKSKIDPLLIARRDYAYGTQHDYLDHSDIIGWTREGVTEKPGSGLAALITDGPGGSKWMYVGKQHAGKVFYDLTGNRSDTVTINSDGWGEFKVNGGSVSVWVPRKTTVSTIARP

SEQ ID NO: 18850 - protein, 493 aa, Geobacillus stearothermophilus
AAPFNGTMMQYFEWYLPDDGTLWTKVANEANNLSSLGITALWLPPAYKGTSRSDVGYGVYDLYDLGEFNQKGTVRTKYGTKAQYLQAIQAAHAAGMQVYADVVFDHKGGADGTEWVDAVEVNPSDRNQVISGTYQIQAWTKFDFPGRGNTYSSFKWRWYHFDGVDWDESRKLSRIYLFEGIGKAWDWEVDTENGNYDYLMYADLDMDHPEVVTELKNWGPWYVLTTNIDGFRLDAVKHIKFSFFPDWTSYVRSSTGKPLFTVGEYWSYDINKLHNYITKTNGTMSLFDAPLHNKFYTASKSGGAFDMRTLMTNTLMKDQPTLAVTFVDNHDTEPGQALQSWVDPWFKPLAYAFILTRQEGYPCVFYGDYYGIPQYNIPSLKSKIDPLLIARRDYAYGTQHDYLDHSDIIGWTREGVTEKPGSGLAALITDGPGGSKWMYVGKQHAGKVFYDLTGNRSDTVTINSDGWGEFKVNGGSVSVWVPRKTTVSTIARP

SEQ ID NO: 18851 - protein, 493 aa, Geobacillus stearothermophilus
AAPFNGTMMQYFEWYLPDDGTLWTKVANEANNLSSLGITALWLPPAYKGTSRSDVGYGVYDLYDLGEFNQKGTVRTKYGTKAQYLQAIQAAHAAGMQVYADVVFDHKGGADGTEWVDAVEVNPSDRNQEISGTYQIQAWTKFDFPGRGNTYSSFKWRWYHFDGVDWDESRKLSRIYKFRGIGKAWDWEVDTENGNYDYLMYADLDMDHPEVVTELKNWGPWYVLTTNIDGFRLDAVKHIKFQFFPDWLSYVRSSTGKPLFTVGEYWSYDINKLHNYITKTNGTVSLFDAPLHNKFYTASKSGGAFDMRTLMTNTLMKDQPTLAVTFVDNHDTEPGQALQSWVDPWFKPLAYAFILTRQEGYPCVFYGDYYGIPQYNIPSLKSKIDPLLIARRDYAYGTQHDYLDHSDIIGWTREGVTEKPGSGLAALITDGPGGSKWMYVGKQHAGKVFYDLTGNRSDTVTINSDGWGEFKVNGGSVSVWVPRKTTVSTIARP

SEQ ID NO: 18852 - protein, 493 aa, Geobacillus stearothermophilus
AAPFNGTMMQYFEWYLPDDGTLWTKVANEANNLSSLGITALWLPPAYKGTSRSDVGYGVYDLYDLGEFNQKGTVRTKYGTKAQYLQAIQAAHAAGMQVYADVVFDHKGGADGTEWVDAVEVNPSDRNQEISGTYQIQAWTKFDFPGRGNTYSSFKWRWYHFDGVDWDESRKLSRIYKFRGEGKAWDWEVDTENGNYDYLMYADLDMDHPEVVTELKNWGKWYVNTTNIDGFRLDAVKHIKFSFFPDWLSYVRSQTGKPLFTVGEYWSYDINKLHNYITKTNGTMSLFDAPLHNKFYTASKSGGAFDMRTLMTNTLMKDQPTLAVTFVDNHDTEPGQALQSWVDPWFKPLAYAFILTRQEGYPCVFYGDYYGIPQYNIPSLKSKIDPLLIARRDYAYGTQHDYLDHSDIIGWTREGVTEKPGSGLAALITDGPGGSKWMYVGKQHAGKVFYDLTGNRSDTVTINSDGWGEFKVNGGSVSVWVPRKTTVSTIARP

SEQ ID NO: 18853 - protein, 493 aa, Geobacillus stearothermophilus
AAPFNGTMMQYFEWYLPDDGTLWTKVANEANNLSSLGITALWLPPAYKGTSRSDVGYGQYDLYDLGEFNQKGTVRTKYGTKAQYLQAIQAAHAAGMQVYADVVFDHKGGADGTEWVDAVEVNPSDRNQEISGTYQIQAWTKFDFPGRGNTYSSFKWRWYHFDGVDWDESRKLSRIYKFRGIGKAWDWEVDTENGNYDYLMYADLDMDHPEVVTELKNWGKWYVNTTNIDGFRLDAVKHIKFSFFPDWLSYVRSQTGKPLFTVGEYWSYDINKLHNYITKTNGTMSLFDAPLHNKFYTASKSGGAFDMRTLMTNTLMKDQPTLAVTFVDNHDTEPGQALQSWVDPWFKPLAYAFILTRQEGYPCVFYGDYYGIPQYNIPSLKSKIDPLLIARRDYAYGTQHDYLDHSDIIGWTREGVTEKPGSGLAALITDGPGGSKWMYVGKQHAGKVFYDLTGNRSDTVTINSDGWGEFKVNGGSVSVWVPRKTTVSTIARP

SEQ ID NO: 18854 - protein, 493 aa, Geobacillus stearothermophilus
AAPFNGTMMQYFEWYLPDDGTLWTKVANEANNLSSLGITALWLPPAYKGTSRSDVGYGIYDLYDLGEFNQKGTVRTKYGTKAQYLQAIQAAHAAGMQVYADVVFDHKGGADGTEWVDAVEVNPSDRNQEISGTYQIQAWTKFDFPGRGNTYSSFKWRWYHFDGVDWDESRKLSRIYKFRGIGKAWDWEVDTENGNYDYLMYADLDMDHPEVVTELKNWGKWYVNTTNIDGFRLDAVKHIKFSFFPDWLSYVRSQTGKPLFTVGEYWSYDINKLHNYITKTNGTMSLFDAPLHNKFYTASKSGGAFDMRTLMTNTLMKDQPTLAVTFVDNHDTEPGQALQSWVDPWFKPLAYAFILTRQEGYPCVFYGDYYGIPQYNIPSLKSKIDPLLIARRDYAYGTQHDYLDHSDIIGWTREGVTEKPGSGLAALITDGPGGSKWMYVGKQHAGKVFYDLTGNRSDTVTINSDGWGEFKVNGGSVSVWVPRKTTVSTIARP

SEQ ID NO: 18855 - protein, 493 aa, Geobacillus stearothermophilus
AAPFNGTMMQYFEWYLPDDGTLWTKVANEANNLSSLGITALWLPPAYKGTSRSDVGYGVYDLYDLGEFNQKGTVRTKYGTKAQYLQAIQAAHAAGMQVYADVVFDHKGGADGTEWVDAVEVNPSDRNQEISGTYQIQAWTKFDFPGRGNTYSSFKWRWYHFDGVDWDESRKLSRIYKFRGRGKAWDWEVDTENGNYDYLMYADLDMDHPEVVTELKNWGKWYVNTTNIDGFRLDAVKHIKFSFFPDWLSYVRSQTGKPLFTVGEYWSYDINKLHNYITKTNGTMSLFDAPLHNKFYTASKSGGAFDMRTLMTNTLMKDQPTLAVTFVDNHDTEPGQALQSWVDPWFKPLAYAFILTRQEGYPCVFYGDYYGIPQYNIPSLKSKIDPLLIARRDYAYGTQHDYLDHSDIIGWTREGVTEKPGSGLAALITDGPGGSKWMYVGKQHAGKVFYDLTGNRSDTVTINSDGWGEFKVNGGSVSVWVPRKTTVSTIARP

SEQ ID NO: 18856 - protein, 493 aa, Geobacillus stearothermophilus
AAPFNGTMMQYFEWYLPDDGTLWTKVANEANNLSSLGITALWLPPAYKGTSRSDVGYGVYDLYDLGEFNQKGTVRTKYGTKAQYLQAIQAAHAAGMQVYADVVFDHKGGADGTEWVDAVEVNPSDRNQEISGTYQIQAWTKFDFPGRGNTYSSFKWRWYHFDGVDWDESRKLSRIYKFRGIGKAWDWEVDTENGNYDYLMYADLDMDHPEVVTELKNWGKWYVNTTNIDGFRLDAVKHIKFEFFPDWLSYVRSQTGKPLFTVGEYWSYDINKLHNYITKTNGTMSLFDAPLHNKFYTASKSGGAFDMRTLMTNTLMKDQPTLAVTFVDNHDTEPGQALQSWVDPWFKPLAYAFILTRQEGYPCVFYGDYYGIPQYNIPSLKSKIDPLLIARRDYAYGTQHDYLDHSDIIGWTREGVTEKPGSGLAALITDGPGGSKWMYVGKQHAGKVFYDLTGNRSDTVTINSDGWGEFKVNGGSVSVWVPRKTTVSTIARP

SEQ ID NO: 18857 - protein, 493 aa, Geobacillus stearothermophilus
AAPFNGTMMQYFEWYLPDDGTLWTKVANEANNLSSLGITALWLPPAYKGTSRSDVGYGVYDLYDLGEFNQKGTVRTKYGTKAQYLQAIQAAHAAGMQVYADVVFDHKGGADGTEWVDAVEVNPSDRNQEISGTYQIQAWTKFDFPGRGNTYSSFKWRWYHFDGVDWDESRKLSRIYKFRGHGKAWDWEVDTENGNYDYLMYADLDMDHPEVVTELKNWGKWYVNTTNIDGFRLDAVKHIKFSFFPDWLSYVRSQTGKPLFTVGEYWSYDINKLHNYITKTNGTMSLFDAPLHNKFYTASKSGGAFDMRTLMTNTLMKDQPTLAVTFVDNHDTEPGQALQSWVDPWFKPLAYAFILTRQEGYPCVFYGDYYGIPQYNIPSLKSKIDPLLIARRDYAYGTQHDYLDHSDIIGWTREGVTEKPGSGLAALITDGPGGSKWMYVGKQHAGKVFYDLTGNRSDTVTINSDGWGEFKVNGGSVSVWVPRKTTVSTIARP

SEQ ID NO: 18858 - protein, 493 aa, Geobacillus stearothermophilus
AAPFNGTMMQYFEWYLPDDGTLWTKVANEANNLSSLGITALWLPPAYKGTSRSDVGYGVYDLYDLGEFNQKGTVRTKYGTKAQYLQAIQAAHAAGMQVYADVVFDHKGGADGTEWVDAVEVNPSDRNQEISGTYQIQAWTKFDFPGRGNTYSSFKWRWYHFDGVDWDESRKLSRIYKFRGPGKAWDWEVDTENGNYDYLMYADLDMDHPEVVTELKNWGKWYVNTTNIDGFRLDAVKHIKFSFFPDWLSYVRSQTGKPLFTVGEYWSYDINKLHNYITKTNGTMSLFDAPLHNKFYTASKSGGAFDMRTLMTNTLMKDQPTLAVTFVDNHDTEPGQALQSWVDPWFKPLAYAFILTRQEGYPCVFYGDYYGIPQYNIPSLKSKIDPLLIARRDYAYGTQHDYLDHSDIIGWTREGVTEKPGSGLAALITDGPGGSKWMYVGKQHAGKVFYDLTGNRSDTVTINSDGWGEFKVNGGSVSVWVPRKTTVSTIARP

SEQ ID NO: 18859 - protein, 493 aa, Geobacillus stearothermophilus
AAPFNGTMMQYFEWYLPDDGTLWTKVANEANNLSSLGITALWLPPAYKGTSRSDVGYGVYDLYDLGEFNQKGTVRTKYGTKAQYLQAIQAAHAAGMQVYADVVFDHKGGADGTEWVDAVEVNPSDRNQEISGTYQIQAWTKFDFPGRGNTYSSFKWRWYHFDGVDWDESRKLSRIYKFRGFGKAWDWEVDTENGNYDYLMYADLDMDHPEVVTELKNWGKWYVNTTNIDGFRLDAVKHIKFSFFPDWLSYVRSQTGKPLFTVGEYWSYDINKLHNYITKTNGTMSLFDAPLHNKFYTASKSGGAFDMRTLMTNTLMKDQPTLAVTFVDNHDTEPGQALQSWVDPWFKPLAYAFILTRQEGYPCVFYGDYYGIPQYNIPSLKSKIDPLLIARRDYAYGTQHDYLDHSDIIGWTREGVTEKPGSGLAALITDGPGGSKWMYVGKQHAGKVFYDLTGNRSDTVTINSDGWGEFKVNGGSVSVWVPRKTTVSTIARP

SEQ ID NO: 18860 - protein, 493 aa, Geobacillus stearothermophilus
AAPFNGTMMQYFEWYLPDDGTLWTKVANEANNLSSLGITALWLPPAYKGTSRSDVGYGVYDLYDLGEFNQKGTVRTKYGTKAQYLQAIQAAHAAGMQVYADVVFDHKGGADGTEWVDAVEVNPSDRNQEISGTYQIQAWTKFDFPGRGNTYSSFKWRWYHFDGVDWDESRKLSRIYKFRGDGKAWDWEVDTENGNYDYLMYADLDMDHPEVVTELKNWGKWYVNTTNIDGFRLDAVKHIKFSFFPDWLSYVRSQTGKPLFTVGEYWSYDINKLHNYITKTNGTMSLFDAPLHNKFYTASKSGGAFDMRTLMTNTLMKDQPTLAVTFVDNHDTEPGQALQSWVDPWFKPLAYAFILTRQEGYPCVFYGDYYGIPQYNIPSLKSKIDPLLIARRDYAYGTQHDYLDHSDIIGWTREGVTEKPGSGLAALITDGPGGSKWMYVGKQHAGKVFYDLTGNRSDTVTINSDGWGEFKVNGGSVSVWVPRKTTVSTIARP

SEQ ID NO: 18861 - protein, 493 aa, Geobacillus stearothermophilus
AAPFNGTMMQYFEWYLPDDGTLWTKVANEANNLSSLGITALWLPPAYKGTSRSDVGYGVYDLYDLGEFNQKGTVRTKYGTKAQYLQAIQAAHAAGMQVYADVVFDHKGGADGTEWVDAVEVNPSDRNQEISGTYQIQAWTKFDFPGRGNTYSSFKWRWYHFDGVDWDESRKLSRIYKFRGIPKAWDWEVDTENGNYDYLMYADLDMDHPEVVTELKNWGKWYVNTTNIDGFRLDAVKHIKFSFFPDWLSYVRSQTGKPLFTVGEYWSYDINKLHNYITKTNGTMSLFDAPLHNKFYTASKSGGAFDMRTLMTNTLMKDQPTLAVTFVDNHDTEPGQALQSWVDPWFKPLAYAFILTRQEGYPCVFYGDYYGIPQYNIPSLKSKIDPLLIARRDYAYGTQHDYLDHSDIIGWTREGVTEKPGSGLAALITDGPGGSKWMYVGKQHAGKVFYDLTGNRSDTVTINSDGWGEFKVNGGSVSVWVPRKTTVSTIARP

SEQ ID NO: 18862 - protein, 493 aa, Geobacillus stearothermophilus
AAPFNGTMMQYFEWYLPDDGTLWTKVANEANNLSSLGITALWLPPAYKGTSRSDVGYGVYDLYDLGEFNQKGTVRTKYGTKAQYLQAIQAAHAAGMQVYADVVFDHKGGADGTEWVDAVEVNPSDRNQEISGTYQIQAWTKFDFPGRGNTYSSFKWRWYHFDGVDWDESRKLSRIYKFRGLGKAWDWEVDTENGNYDYLMYADLDMDHPEVVTELKNWGKWYVNTTNIDGFRLDAVKHIKFSFFPDWLSYVRSQTGKPLFTVGEYWSYDINKLHNYITKTNGTMSLFDAPLHNKFYTASKSGGAFDMRTLMTNTLMKDQPTLAVTFVDNHDTEPGQALQSWVDPWFKPLAYAFILTRQEGYPCVFYGDYYGIPQYNIPSLKSKIDPLLIARRDYAYGTQHDYLDHSDIIGWTREGVTEKPGSGLAALITDGPGGSKWMYVGKQHAGKVFYDLTGNRSDTVTINSDGWGEFKVNGGSVSVWVPRKTTVSTIARP

SEQ ID NO: 18863 - protein, 493 aa, Geobacillus stearothermophilus
AAPFNGTMMQYFEWYLPDDGTLWTKVANEANNLSSLGITALWLPPAYKGTSRSDVGYGVYDLYDLGEFNQKGTVRTKYGTKAQYLQAIQAAHAAGMQVYADVVFDHKGGADGTEWVDAVEVNPSDRNQEISGTYQIQAWTKFDFPGRGNTYSSFKWRWYHFDGVDWDESRKLSRIYKFRGTGKAWDWEVDTENGNYDYLMYADLDMDHPEVVTELKNWGKWYVNTTNIDGFRLDAVKHIKFSFFPDWLSYVRSQTGKPLFTVGEYWSYDINKLHNYITKTNGTMSLFDAPLHNKFYTASKSGGAFDMRTLMTNTLMKDQPTLAVTFVDNHDTEPGQALQSWVDPWFKPLAYAFILTRQEGYPCVFYGDYYGIPQYNIPSLKSKIDPLLIARRDYAYGTQHDYLDHSDIIGWTREGVTEKPGSGLAALITDGPGGSKWMYVGKQHAGKVFYDLTGNRSDTVTINSDGWGEFKVNGGSVSVWVPRKTTVSTIARP

SEQ ID NO: 18864 - protein, 493 aa, Geobacillus stearothermophilus
AAPFNGTMMQYFEWYLPDDGTLWTKVANEANNLSSLGITALWLPPAYKGTSRSDVGYGVYDLYDLGEFNQKGTVRTKYGTKAQYLQAIQAAHAAGMQVYADVVFDHKGGADGTEWVDAVEVNPSDRNQEISGTYQIQAWTKFDFPGRGNTYSSFKWRWYHFDGVDWDESRKLSRIYKFRGIGKAWDWEVDTENGNYDYLMYADLDMDHPEVVTELKNWGKWYVNTTNIDGFRLDAVKHIKFTFFPDWLSYVRSQTGKPLFTVGEYWSYDINKLHNYITKTNGTMSLFDAPLHNKFYTASKSGGAFDMRTLMTNTLMKDQPTLAVTFVDNHDTEPGQALQSWVDPWFKPLAYAFILTRQEGYPCVFYGDYYGIPQYNIPSLKSKIDPLLIARRDYAYGTQHDYLDHSDIIGWTREGVTEKPGSGLAALITDGPGGSKWMYVGKQHAGKVFYDLTGNRSDTVTINSDGWGEFKVNGGSVSVWVPRKTTVSTIARP

SEQ ID NO: 18865 - protein, 493 aa, Geobacillus stearothermophilus
AAPFNGTMMQYFEWYLPDDGTLWTKVANEANNLSSLGITALWLPPAYKGTSRSDVGYGVYDLYDLGEFNQKGTVRTKYGTKAQYLQAIQAAHAAGMQVYADVVFDHKGGADGTEWVDAVEVNPSDRNQEISGTYQIQAWTKFDFPGRGNTYSSFKWRWYHFDGVDWDESRKLSRIYKFRGGGKAWDWEVDTENGNYDYLMYADLDMDHPEVVTELKNWGKWYVNTTNIDGFRLDAVKHIKFSFFPDWLSYVRSQTGKPLFTVGEYWSYDINKLHNYITKTNGTMSLFDAPLHNKFYTASKSGGAFDMRTLMTNTLMKDQPTLAVTFVDNHDTEPGQALQSWVDPWFKPLAYAFILTRQEGYPCVFYGDYYGIPQYNIPSLKSKIDPLLIARRDYAYGTQHDYLDHSDIIGWTREGVTEKPGSGLAALITDGPGGSKWMYVGKQHAGKVFYDLTGNRSDTVTINSDGWGEFKVNGGSVSVWVPRKTTVSTIARP

SEQ ID NO: 18866 - protein, 493 aa, Geobacillus stearothermophilus
AAPFNGTMMQYFEWYLPDDGTLWTKVANEANNLSSLGITALWLPPAYKGTSRSDVGYGVYDLYDLGEFNQKGTVRTKYGTKAQYLQAIQAAHAAGMQVYADVVFDHKGGADGTEWVDAVEVNPSDRNQVISGTYQIQAWTKFDFPGRGNTYSSFKWRWYHFDGVDWDESRKLSRIYLFEGIGKAWDWEVDTENGNYDYLMYADLDMDHPEVVTELKNWGPWYVLTTNIDGFRLDAVKHIKFQFFPDWTSYVRSSTGKPLFTVGEYWSYDINKLHNYITKTNGTMSLFDAPLHNKFYTASKSGGAFDMRTLMTNTLMKDQPTLAVTFVDNHDTEPGQALQSWVDPWFKPLAYAFILTRQEGYPCVFYGDYYGIPQYNIPSLKSKIDPLLIARRDYAYGTQHDYLDHSDIIGWTREGVTEKPGSGLAALITDGPGGSKWMYVGKQHAGKVFYDLTGNRSDTVTINSDGWGEFKVNGGSVSVWVPRKTTVSTIARP

SEQ ID NO: 18867 - protein, 493 aa, Geobacillus stearothermophilus
AAPFNGTMMQYFEWYLPDDGTLWTKVANEANNLSSLGITALWLPPAYKGTSRSDVGYGVYDLYDLGEFNQKGTVRTKYGTKAQYLQAIQAAHAAGMQVYADVVFDHKGGADGTEWVDAVEVNPSDRNQEISGTYQIQAWTKFDFPGRGNTYSSFKWRWYHFDGVDWDESRKLSRIYKFRGIGKKWDEEVDTENGNYDYLMYADLDMNHPEVVTELKNWGKWYVNTTNIDGFRLDAVKHIKFSFFPDWLSYVRSQTGKPLFTVGEYWSYDINKLHNYITKTDGTMSLFDAPLHNKFYTASKSGGAFDMRTLMTNTLMKDQPTLAVTFVDNHDTEPGQALQSWVDPWFKPLAYAFILTRQEGYPCVFYGDYYGIPQYNIPSLKSKIDPLLIARRDYAYGTQHDYLDHSDIIGWTREGGTEKPGSGLAALITDGPGGSKWMYVGKQHAGKVFYDLTGNRSDTVTINSDGWGEFKVNGGSVSVWVPRKTTVSTIARP

SEQ ID NO: 18868 - protein, 493 aa, Geobacillus stearothermophilus
AAPFNGTMMQYFEWYLPDDGTLWTKVANEANNLSSLGITALWLPPAYKGTSRSDVGYGVYDLYDLGEFNQKGTVRTKYGTKAQYLQAIQAAHAAGMQVYADVVFDHKGGADGTEWVDAVEVNPSDRNQEISGTYQIQAWTKFDFPGRGNTYSSFKWRWYHFDGVDWDESRKLSRIYKFRGIGKAWDWEVDTENGNYDYLMYADLDMDHPEVVTELKNWGKWYVNTTNIDGFRLDAVKHIKFSFFPDWLSYVRSQTGKPLFTVGEYWSYDINKLHNYITKTNGTTSLFDAPLHNKFYTASKSGGAFDMRTLMTNTLMKDQPTLAVTFVDNHDTEPGQALQSWVDPWFKPLAYAFILTRQEGYPCVFYGDYYGIPQYNIPSLKSKIDPLLIARRDYAYGTQHDYLDHSDIIGWTREGVTEKPGSGLAALITDGPGGSKWMYVGKQHAGKVFYDLTGNRSDTVTINSDGWGEFKVNGGSVSVWVPRKTTVSTIARP

SEQ ID NO: 18869 - protein, 493 aa, Geobacillus stearothermophilus
AAPFNGTMMQYFEWYLPDDGTLWTKVANEANNLSSLGITALWLPPAYKGTSRSDVGYGVYDLYDLGEFNQKGTVRTKYGTKAQYLQAIQAAHAAGMQVYADVVFDHKGGADGTEWVDAVEVNPSDRNQEISGTYQIQAWTKFDFPGRGNTYSSFKWRWYHFDGVDWDESRKLSRIYKFRGIAKAWDWEVDTENGNYDYLMYADLDMDHPEVVTELKNWGKWYVNTTNIDGFRLDAVKHIKFSFFPDWLSYVRSQTGKPLFTVGEYWSYDINKLHNYITKTNGTMSLFDAPLHNKFYTASKSGGAFDMRTLMTNTLMKDQPTLAVTFVDNHDTEPGQALQSWVDPWFKPLAYAFILTRQEGYPCVFYGDYYGIPQYNIPSLKSKIDPLLIARRDYAYGTQHDYLDHSDIIGWTREGVTEKPGSGLAALITDGPGGSKWMYVGKQHAGKVFYDLTGNRSDTVTINSDGWGEFKVNGGSVSVWVPRKTTVSTIARP

SEQ ID NO: 18870 - protein, 493 aa, Geobacillus stearothermophilus
AAPFNGTMMQYFEWYLPDDGTLWTKVANEANNLSSLGITALWLPPAYKGTSRSDVGYGVYDLYDLGEFNQKGTVRTKYGTKAQYLQAIQAAHAAGMQVYADVVFDHKGGADGTEWVDAVEVNPSDRNQEISGTYQIQAWTKFDFPGRGNTYSSFKWRWYHFDGVDWDESRKLSRIYKFRGVGKAWDWEVDTENGNYDYLMYADLDMDHPEVVTELKNWGKWYVNTTNIDGFRLDAVKHIKFSFFPDWLSYVRSQTGKPLFTVGEYWSYDINKLHNYITKTNGTMSLFDAPLHNKFYTASKSGGAFDMRTLMTNTLMKDQPTLAVTFVDNHDTEPGQALQSWVDPWFKPLAYAFILTRQEGYPCVFYGDYYGIPQYNIPSLKSKIDPLLIARRDYAYGTQHDYLDHSDIIGWTREGVTEKPGSGLAALITDGPGGSKWMYVGKQHAGKVFYDLTGNRSDTVTINSDGWGEFKVNGGSVSVWVPRKTTVSTIARP

SEQ ID NO: 18871 - protein, 493 aa, Geobacillus stearothermophilus
AAPFNGTMMQYFEWYLPDDGTLWTKVANEANNLSSLGITALWLPPAYKGTSRSDVGYGVYDLYDLGEFNQKGTVRTKYGTKAQYLQAIQAAHAAGMQVYADVVFDHKGGADGTEWVDAVEVNPSDRNQEISGTYQIQAWTKFDFPGRGNTYSSFKWRWYHFDGVDWDESRKLSRIYKFRGCGKAWDWEVDTENGNYDYLMYADLDMDHPEVVTELKNWGKWYVNTTNIDGFRLDAVKHIKFSFFPDWLSYVRSQTGKPLFTVGEYWSYDINKLHNYITKTNGTMSLFDAPLHNKFYTASKSGGAFDMRTLMTNTLMKDQPTLAVTFVDNHDTEPGQALQSWVDPWFKPLAYAFILTRQEGYPCVFYGDYYGIPQYNIPSLKSKIDPLLIARRDYAYGTQHDYLDHSDIIGWTREGVTEKPGSGLAALITDGPGGSKWMYVGKQHAGKVFYDLTGNRSDTVTINSDGWGEFKVNGGSVSVWVPRKTTVSTIARP

SEQ ID NO: 18872 - protein, 493 aa, Geobacillus stearothermophilus
AAPFNGTMMQYFEWYLPDDGTLWTKVANEANNLSSLGITALWLPPAYKGTSRSDVGYGVYDLYDLGEFNQKGTVRTKYGTKAQYLQAIQAAHAAGMQVYADVVFDHKGGADGTEWVDAVEVNPSDRNQEISGTYQIQAWTKFDFPGRGNTYSSFKWRWYHFDGVDWDESRKLSRIYKFRGYGKAWDWEVDTENGNYDYLMYADLDMDHPEVVTELKNWGKWYVNTTNIDGFRLDAVKHIKFSFFPDWLSYVRSQTGKPLFTVGEYWSYDINKLHNYITKTNGTMSLFDAPLHNKFYTASKSGGAFDMRTLMTNTLMKDQPTLAVTFVDNHDTEPGQALQSWVDPWFKPLAYAFILTRQEGYPCVFYGDYYGIPQYNIPSLKSKIDPLLIARRDYAYGTQHDYLDHSDIIGWTREGVTEKPGSGLAALITDGPGGSKWMYVGKQHAGKVFYDLTGNRSDTVTINSDGWGEFKVNGGSVSVWVPRKTTVSTIARP

SEQ ID NO: 18873 - protein, 493 aa, Geobacillus stearothermophilus
AAPFNGTMMQYFEWYLPDDGTLWTKVANEANNLSSLGITALWLPPAYKGTSRSDVGYGVYDLYDLGEFNQKGTVRTKYGTKAQYLQAIQAAHAAGMQVYADVVFDHKGGADGTEWVDAVEVNPSDRNQEISGTYQIQAWTKFDFPGRGNTYSSFKWRWYHFDGVDWDESRKLSRIYKFRGISKAWDWEVDTENGNYDYLMYADLDMDHPEVVTELKNWGKWYVNTTNIDGFRLDAVKHIKFSFFPDWLSYVRSQTGKPLFTVGEYWSYDINKLHNYITKTNGTMSLFDAPLHNKFYTASKSGGAFDMRTLMTNTLMKDQPTLAVTFVDNHDTEPGQALQSWVDPWFKPLAYAFILTRQEGYPCVFYGDYYGIPQYNIPSLKSKIDPLLIARRDYAYGTQHDYLDHSDIIGWTREGVTEKPGSGLAALITDGPGGSKWMYVGKQHAGKVFYDLTGNRSDTVTINSDGWGEFKVNGGSVSVWVPRKTTVSTIARP

SEQ ID NO: 18874 - protein, 493 aa, Bacillus sp.
AAPFNGTMMQYFEWYLPDDGTLWTKVANEANNLSSLGITALWLPPAYKGTSRSDVGYGVYDLYDLGEFNQKGTVRTKYGTKAQYLQAIQAAHAAGMQVYADVVFDHKGGADGTEWVDAVEVNPSDRNQEISGTYQIQAWTKFDFPGRGNTYSSFKWRWYHFDGVDWDESRKLSRIYKFRGIGKAWDWEVDTENGNYDYLMYADLDMDHPEVVTELKNWGKWYVNTTNIDGFRLDAVKHIKFSFFPDWLSYVRSQTGKPLFTVGEYWSYDINKLHNYITKTDGTMSLFDAPLHNKFYTASKSGGAFDMRTLMTNTLMKDQPTLAVTFVDNHDTEPGQALQSWVDPWFKPLAYAFILTRQEGYPCVFYGDYYGIPQYNIPSLKSKIDPLLIARRDYAYGTQHDYLDHSDIIGWTREGVTEKPGSGLAALITDGPGGSKWMYVGKQHAGKVFYDLTGNRSDTVTINSDGWGEFKVNGGSVSVWVPRKTTVSTITRP

SEQ ID NO: 18875 - protein, 493 aa, Geobacillus stearothermophilus
AAPFNGTMMQYFEWYLPDDGTLWTKVANEANNLSSLGITALWLPPAYKGTSRSDVGYGAYDLYDLGEFNQKGTVRTKYGTKAQYLQAIQAAHAAGMQVYADVVFDHKGGADGTEWVDAVEVNPSDRNQVISGTYQIQAWTKFDFPGRGNTYSSFKWRWYHFDGVDWDESRKLSRIYLFEGIGKAWDWEVDTENGNYDYLMYADLDMDYPEVVTELKNWGPWYVLTTNIDGFRLDAVKHIKFQFFPDWLSYVRSSTGKPLFTVGEYWSYDINKLKNYITKTNGTMSLFDAPLHNKFYTASKSGGAFDMRTLMTNTLMKDQPTLAVTFVDNHDTEPGQALQSWVDPWFKPLAYAFILTRQEGYPCVFYGDYYGIPQYNIPSLKSKIDPLLIARRDYAYGTQHDYLDHSDIIGWTREGVTEKPGSGLAALITDGPGGSKWMYVGKQHAGKVFYDLTGNRSDTVTINSDGWGEFKVNGGSVSVWVPRKTTVSTIARP

SEQ ID NO: 18876 - protein, 493 aa, Bacillus stearothermophilus
AAPFNGTMMQYFEWYLPDDGTLWTKVANEANNLSSLGITALWLPPAYKGTSRSDVGYGAYDLYDLGEFNQKGTVRTKYGTKAQYLQAIRAAHAAGMQVYADVVFDHKGGADGTEWVDAVEVNPSDRNQVISGTYQIQAWTKFDFPGRGNTYSSFKWRWYHFDGVDWDESRKLSRIYLFEGIGKAWDWEVDTENGNYDYLMYADLDMDHPEVVTELKNWGPWYVLTTNIDGFRLDAVKHIKFSFFPDWLSYVRSSTGKPLFTVGEYWSYEINKLHNYITKTNGTMSLFDAPLHNKFYTASKSGGAFDMRTLMTNTLMKDQPTLAVTFVDNHDTEPGQALQSWVDPWFKPLAYAFILTRQEGYPCVFYGDYYGIPQYNIPSLKSKIDPLLIARRDYAYGTQHDYLDHSDIIGWTREGVTEKPGSGLAALITDGPGGSKWMYVGKQHAGKVFYDLTGNRSDTVTINSDGWGEFKVNGGSVSVWVPRKTTVSTIARP

SEQ ID NO: 18877 - protein, 493 aa, Geobacillus stearothermophilus
AAPFNGTMMQYFEWYLPDDGTLWTKVANEANNLSSLGITALWLPPAYKGTSRSDVGYGVYDLYDLGEFNQKGTVRTKYGTKAQYLQAIQAAHAAGMQVYADVVFDHKGGADGTEWVDAVEVNPSDRNQEISGTYQIQAWTKFDFPGRGNTYSSFKWRWYHFDGVDWDESRKLSRIYKFRGIGKAWDWEVDTENGNYDYLMYADLDMDHPEVVTELKNWGKWYVNTTNIDGFRLDAVKHIKFLFFPDWLSYVRSQTGKPLFTVGEYWSYDINKLHNYITKTNGTMSLFDAPLHNKFYTASKSGGAFDMRTLMTNTLMKDQPTLAVTFVDNHDTEPGQALQSWVDPWFKPLAYAFILTRQEGYPCVFYGDYYGIPQYNIPSLKSKIDPLLIARRDYAYGTQHDYLDHSDIIGWTREGVTEKPGSGLAALITDGPGGSKWMYVGKQHAGKVFYDLTGNRSDTVTINSDGWGEFKVNGGSVSVWVPRKTTVSTIARP

SEQ ID NO: 18878 - protein, 493 aa, Geobacillus stearothermophilus
AAPFNGTMMQYFEWYLPDDGTLWTKVANEANNLSSLGITALWLPPAYKGTSRSDVGYGVYDLYDLGEFNQKGTVRTKYGTKAQYLQAIQAAHAAGMQVYADVVFDHKGGADGTEWVDAVEVNPSDRNQEISGTYQIQAWTKFDFPGRGNTYSSFKWRWYHFDGVDWDESRKLSRIYKFRGIGKAWDWEVDTENGNYDYLMYADLDMDHPEVVTELKNWGKWYVNTTNIDGFRLDAVKHIKFMFFPDWLSYVRSQTGKPLFTVGEYWSYDINKLHNYITKTNGTMSLFDAPLHNKFYTASKSGGAFDMRTLMTNTLMKDQPTLAVTFVDNHDTEPGQALQSWVDPWFKPLAYAFILTRQEGYPCVFYGDYYGIPQYNIPSLKSKIDPLLIARRDYAYGTQHDYLDHSDIIGWTREGVTEKPGSGLAALITDGPGGSKWMYVGKQHAGKVFYDLTGNRSDTVTINSDGWGEFKVNGGSVSVWVPRKTTVSTIARP

SEQ ID NO: 18879 - protein, 493 aa, Geobacillus stearothermophilus
AAPFNGTMMQYFEWYLPDDGTLWTKVANEANNLSSLGITALWLPPAYKGTSRSDVGYGAYDLYDLGEFNQKGTVRTKYGTKAQYLQAIRAAHAAGMQVYADVVFDHKGGADGTEWVDAVEVNPSDRNQVISGTYQIQAWTKFDFPGRGNTYSSFKWRWYHFDGVDWDESRKLSRIYLFEGIGKAWDWEVDTENGNYDYLMYADLDMDYPEVVTELKNWGPWYVLTTNIDGFRLDAVKHIKFSFFPDWLSYVRSSTGKPLFTVGEYWSYDINKLHNYITKTNGTMSLFDAPLHNKFYTASKSGGAFDMRTLMTNTLMKDQPTLAVTFVDNHDTEPGQALQSWVDPWFKPLAYAFILTRQEGYPCVFYGDYYGIPQYNIPSLKSKIDPLLIARRDYAYGTQHDYLDHSDIIGWTREGVTEKPGSGLAALITDGPGGSKWMYVGKQHAGKVFYDLTGNRSDTVTINSDGWGEFKVNGGSVSVWVPRKTTVSTIARP

SEQ ID NO: 18880 - protein, 493 aa, Geobacillus stearothermophilus
AAPFNGTMMQYFEWYLPDDGTLWTKVANEANNLSSLGITALWLPPAYKGTSRSDVGYGAYDLYDLGEFNQKGTVRTKYGTKAQYLQAIRAAHAAGMQVYADVVFDHKGGADDTEWVDAVEVNPSDRNQVISGTYQIQAWTKFDFPGRGNTYSSFKWRWYHFDGVDWDESRKLSRIYLFEGIGKAWDWEVDTENGNYDYLMYADLDMDHPEVVTELKNWGPWYVLTTNIDGFRLDAVKHIKFSFFPDWLSYVRSSTGKPLFTVGEYWSYDINKLHNYITKTNGTMSLFDAPLHNKFYTASKSGGAFDMRTLMTNTLMKDQPTLAVTFVDNHDTEPGQALQSWVDPWFKPLAYAFILTRQEGYPCVFYGDYYGIPQYNIPSLKSKIDPLLIARRDYAYGTQHDYLDHSDIIGWTREGVTEKPGSGLAALITDGPGGSKWMYVGKQHAGKVFYDLTGNRSDTVTINSDGWGEFKVNGGSVSVWVPRKTTVSTIARP

SEQ ID NO: 18881 - protein, 493 aa, Geobacillus stearothermophilus
AAPFNGTMMQYFEWYLPDDGTLWTKVANEANNLSSLGITALWLPPAYKGTSRSDVGYGVYDLYDLGEFNQKGTVRTKYGTKAQYLQAIQAAHAAGMQVYADVVFDHKGGADGTEWVDAVEVNPSDRNQEISGTYQIQAWTKFDFPGRGNTYSSFKWRWYHFDGVDWDESRKLSRIYKFRGIGKAWDWEVDTENGNYDYLMYADLDMDHPEVVTELKNWGKWYVNTTNIDGFRLDAVKHIKFSFFPDWLSYVRSQTGKPLFTVGEYWSYDINKLHNYITKTNGTMSLFDAPLHNKFYTASKSGGAFDMRTLMTNTLMKDQPTLAVTFVDNHDTEPGQALQSWVDPWFKPLAYAFILTRQEGYPCVFYGDYYGIPQYNIPSLKSKIDPLLIARRDYAYGTQHDYLDHSDIIGWTREGVTEKPGSGLAALITDGPGGSKWMYVGKQHAGKVFYDLTGNRSDTVTINSDGWGEFKVNGGSVSVWVPRKTTVSTIARP

SEQ ID NO: 18882 - protein, 493 aa, Geobacillus stearothermophilus
AAPFNGTMMQYFEWYLPDDGTLWTKVANEANNLSSLGITALWLPPAYKGTSRSDVGYGVYDLYDLGEFNQKGTVRTKYGTKAQYLQAIQAAHAAGMQVYADVVFDHKGGADGTEWVDAVEVNPSDRNQEISGTYQIQAWTKFDFPGRGNTYSSFKWRWYHFDGVDWDESRKLSRIYKFRGIGKAWDWEVDTENGNYDYLMYADLDMDHPEVVTELKNWGKWYVNTTNIDGFRLDAVKHIKFQFFPDWLSYVRSQTGKPLFTVGEYWSYDINKLHNYITKTNGTMSLFDAPLHNKFYTASKSGGAFDMRTLMTNTLMKDQPTLAVTFVDNHDTEPGQALQSWVDPWFKPLAYAFILTRQEGYPCVFYGDYYGIPQYNIPSLKSKIDPLLIARRDYAYGTQHDYLDHSDIIGWTREGVTEKPGSGLAALITDGPGGSKWMYVGKQHAGKVFYDLTGNRSDTVTINSDGWGEFKVNGGSVSVWVPRKTTVSTIARP

SEQ ID NO: 18883 - protein, 493 aa, Geobacillus stearothermophilus
AAPFNGTMMQYFEWYLPDDGTLWTKVANEANNLSSLGITALWLPPAYKGTSRSDVGYGVYDLYDLGEFNQKGTVRTKYGTKAQYLQAIQAAHAAGMQVYADVVFDHKGGADGTEWVDAVEVNPSDRNQEISGTYQIQAWTKFDFPGRGNTYSSFKWRWYHFDGVDWDESRKLSRIYKFRGIGKAWNWEVDTENGNYDYLMYADLDMNHPEVVTELKNWGKWYVNTTNIDGFRLDAVKHIKFSFFPDWLSYVRSQTGKPLFTVGEYWSYDINKLHNYITKTDGTMSLFDAPLHNKFYTASKSGGAFDMRTLMTNTLMKDQPTLAVTFVDNHDTEPGQALQSWVDPWFKPLAYAFILTRQEGYPCVFYGDYYGIPQYNIPSLKSKIDPLLIARRDYAYGTQHDYLDHSDIIGWTREGGTEKPGSGLAALITDGPGGSKWMYVGKQHAGKVFYDLTGNRSDTVTINSDGWGEFKVNGGSVSVWVPRKTTVSTIARP

SEQ ID NO: 18884 - protein, 493 aa, Geobacillus stearothermophilus
AAPFNGTMMQYFEWYLPDDGTLWTKVANEANNLSSLGITALWLPPAYKGTSRSDVGYGEYDLYDLGEFNQKGTVRTKYGTKAQYLQAIQAAHAAGMQVYADVVFDHKGGADGTEWVDAVEVNPSDRNQEISGTYQIQAWTKFDFPGRGNTYSSFKWRWYHFDGVDWDESRKLSRIYKFRGIGKAWDWEVDTENGNYDYLMYADLDMDHPEVVTELKNWGKWYVNTTNIDGFRLDAVKHIKFSFFPDWLSYVRSQTGKPLFTVGEYWSYDINKLHNYITKTNGTMSLFDAPLHNKFYTASKSGGAFDMRTLMTNTLMKDQPTLAVTFVDNHDTEPGQALQSWVDPWFKPLAYAFILTRQEGYPCVFYGDYYGIPQYNIPSLKSKIDPLLIARRDYAYGTQHDYLDHSDIIGWTREGVTEKPGSGLAALITDGPGGSKWMYVGKQHAGKVFYDLTGNRSDTVTINSDGWGEFKVNGGSVSVWVPRKTTVSTIARP

SEQ ID NO: 18885 - protein, 493 aa, Geobacillus stearothermophilus
AAPFNGTMMQYFEWYLPDDGTLWTKVANEANNLSSLGITALWLPPAYKGTSRSDVGYGVYDLYDLGEFNQKGTVRTKYGTKAQYLQAIQAAHAAGMQVYADVVFDHKGGADGTEWVDAVEVNPSDRNQEISGTYQIQAWTKFDFPGRGNTYSSFKWRWYHFDGVDWDESRKLSRIYKFRGAGKAWDWEVDTENGNYDYLMYADLDMDHPEVVTELKNWGKWYVNTTNIDGFRLDAVKHIKFSFFPDWLSYVRSQTGKPLFTVGEYWSYDINKLHNYITKTNGTMSLFDAPLHNKFYTASKSGGAFDMRTLMTNTLMKDQPTLAVTFVDNHDTEPGQALQSWVDPWFKPLAYAFILTRQEGYPCVFYGDYYGIPQYNIPSLKSKIDPLLIARRDYAYGTQHDYLDHSDIIGWTREGVTEKPGSGLAALITDGPGGSKWMYVGKQHAGKVFYDLTGNRSDTVTINSDGWGEFKVNGGSVSVWVPRKTTVSTIARP

SEQ ID NO: 18886 - protein, 493 aa, Geobacillus stearothermophilus
AAPFNGTMMQYFEWYLPDDGTLWTKVANEANNLSSLGITALWLPPAYKGTSRSDVGYGAYDLYDLGEFNQKGTVRTKYGTKAQYLQAIQAAHAAGMQVYADVVFDHKGGADGTEWVDAVEVNPSDRNQVISGTYQIQAWTKFDFPGRGNTYSSFKWRWYHFDGVDWDESRKLSRIYLFEGIGKAWDWEVDTENGNYDYLMYADLDMDYPEVVTELKNWGPWYVLTTNIDGFRLDAVKHIKFQFFPDWLSYVRSSTGKPLFTVGEYWSYDINKLHNFITKTNGTMSLFDAPLHNKFYTASKSGGAFDMRTLMTNTLMKDQPTLAVTFVDNHDTEPGQALQSWVDPWFKPLAYAFILTRQEGYPCVFYGDYYGIPQYNIPSLKSKIDPLLIARRDYAYGTQHDYLDHSDIIGWTREGVTEKPGSGLAALITDGPGGSKWMYVGKQHAGKVFYDLTGNRSDTVTINSDGWGEFKVNGGSVSVWVPRKTTVSTIARP

SEQ ID NO: 18887 - protein, 493 aa, Geobacillus stearothermophilus
AAPFNGTMMQYFEWYLPDDGTLWTKVANEANNLSSLGITALWLPPAYKGTSRSDVGYGAYDLYDLGEFNQKGTVRTKYGTKAQYLQAIRAAHAAGMQVYADVVFDHKGGADGTEWVDAVEVNPSDRNQVISGTYQIQAWTKFDFPGRGNTYSSFKWRWYHFDGVDWDESRKLSRIYLFEGIGKAWDWEVDTENGNYDYLMYADLDMDHPEVVTELKNWGPWYVLTTNIDGFRLDAVKHIKFSFFPDWLSYVRSSTGKPLFTVGEYWSYDLNKLHNYITKTNGTMSLFDAPLHNKFYTASKSGGAFDMRTLMTNTLMKDQPTLAVTFVDNHDTEPGQALQSWVDPWFKPLAYAFILTRQEGYPCVFYGDYYGIPQYNIPSLKSKIDPLLIARRDYAYGTQHDYLDHSDIIGWTREGVTEKPGSGLAALITDGPGGSKWMYVGKQHAGKVFYDLTGNRSDTVTINSDGWGEFKVNGGSVSVWVPRKTTVSTIARP

SEQ ID NO: 18888 - protein, 493 aa, Geobacillus stearothermophilus
AAPFNGTMMQYFEWYLPDDGTLWTKVANEANNLSSLGITALWLPPAYKGTSRSDVGYGVYDLYDLGEFNQKGTVRTKYGTKAQYLQAIQAAHAAGMQVYADVVFDHKGGADGTEWVDAVEVNPSDRNQEISGTYQIQAWTKFDFPGRGNTYSSFKWRWYHFDGVDWDESRKLSRIYKFRGIGKAWDWEVDTENGNYDYLMYADLDMDHPEVVTELKNWGKWYVNTTNIDGFRLDAVKHIKFHFFPDWLSYVRSQTGKPLFTVGEYWSYDINKLHNYITKTNGTMSLFDAPLHNKFYTASKSGGAFDMRTLMTNTLMKDQPTLAVTFVDNHDTEPGQALQSWVDPWFKPLAYAFILTRQEGYPCVFYGDYYGIPQYNIPSLKSKIDPLLIARRDYAYGTQHDYLDHSDIIGWTREGVTEKPGSGLAALITDGPGGSKWMYVGKQHAGKVFYDLTGNRSDTVTINSDGWGEFKVNGGSVSVWVPRKTTVSTIARP

SEQ ID NO: 18889 - protein, 493 aa, Geobacillus stearothermophilus
AAPFNGTMMQYFEWYLPDDGTLWTKVANEANNLSSLGITALWLPPAYKGTSRSDVGYGAYDLYDLGEFNQKGTVRTKYGTKAQYLQAIRAAHAAGMQVYADVVFDHKGGADGTEWVDAVEVNPSDRNQVISGTYQIQAWTKFDFPGRGNTYSSFKWRWYHFDGVDWDESRKLSRIYLFEGIGKAWDWEVDTENGNYDYLMYADLDMDHPEVVTELKNWGPWYVLTTNIDGFRLDAVKHIKFSFFPDWLSYVRSSTGKPLFTVGEYWSYDINKLHNFITKTNGTMSLFDAPLHNKFYTASKSGGAFDMRTLMTNTLMKDQPTLAVTFVDNHDTEPGQALQSWVDPWFKPLAYAFILTRQEGYPCVFYGDYYGIPQYNIPSLKSKIDPLLIARRDYAYGTQHDYLDHSDIIGWTREGVTEKPGSGLAALITDGPGGSKWMYVGKQHAGKVFYDLTGNRSDTVTINSDGWGEFKVNGGSVSVWVPRKTTVSTIARP

SEQ ID NO: 18890 - protein, 493 aa, Geobacillus stearothermophilus
AAPFNGTMMQYFEWYLPDDGTLWTKVANEANNLSSLGITALWLPPAYKGTSRSDVGYGVYDLYDLGEFNQKGTVRTKYGTKAQYLQAIQAAHAAGMQVYADVVFDHKGGADGTEWVDAVEVNPSDRNQEISGTYQIQAWTKFDFPGRGNTYSSFKWRWYHFDGVDWDESRKLSRIYKFRGIGKAWDWEVDTENGNYDYLMYADLDMDHPEVVTELKNWGKWYVNTTNIDGFRLDAVKHIKFDFFPDWLSYVRSQTGKPLFTVGEYWSYDINKLHNYITKTNGTMSLFDAPLHNKFYTASKSGGAFDMRTLMTNTLMKDQPTLAVTFVDNHDTEPGQALQSWVDPWFKPLAYAFILTRQEGYPCVFYGDYYGIPQYNIPSLKSKIDPLLIARRDYAYGTQHDYLDHSDIIGWTREGVTEKPGSGLAALITDGPGGSKWMYVGKQHAGKVFYDLTGNRSDTVTINSDGWGEFKVNGGSVSVWVPRKTTVSTIARP

SEQ ID NO: 18891 - protein, 493 aa, Geobacillus stearothermophilus
AAPFNGTMMQYFEWYLPDDGTLWTKVANEANNLSSLGITALWLPPAYKGTSRSDVGYGVYDLYDLGEFNQKGTVRTKYGTKAQYLQAIQAAHAAGMQVYADVVFDHKGGADGTEWVDAVEVNPSDRNQEISGTYQIQAWTKFDFPGRGNTYSSFKWRWYHFDGVDWDESRKLSRIYKFRGIGKAWDWEVDTENGNYDYLMYADLDMDHPEVVTELKNWGKWYVNTTNIDGFRLDAVKHIKFFFFPDWLSYVRSQTGKPLFTVGEYWSYDINKLHNYITKTNGTMSLFDAPLHNKFYTASKSGGAFDMRTLMTNTLMKDQPTLAVTFVDNHDTEPGQALQSWVDPWFKPLAYAFILTRQEGYPCVFYGDYYGIPQYNIPSLKSKIDPLLIARRDYAYGTQHDYLDHSDIIGWTREGVTEKPGSGLAALITDGPGGSKWMYVGKQHAGKVFYDLTGNRSDTVTINSDGWGEFKVNGGSVSVWVPRKTTVSTIARP

SEQ ID NO: 18892 - protein, 493 aa, Geobacillus stearothermophilus
AAPFNGTMMQYFEWYLPDDGTLWTKVANEANNLSSLGITALWLPPAYKGTSRSDVGYGVYDLYDLGEFNQKGTVRTKYGTKAQYLQAIQAAHAAGMQVYADVVFDHKGGADGTEWVDAVEVNPSDRNQEISGTYQIQAWTKFDFPGRGNTYSSFKWRWYHFDGVDWDESRKLSRIYKFRGIGKAWDWEVDTENGNYDYLMYADLDMDHPEVVTELKNWGKWYVNTTNIDGFRLDAVKHIKFAFFPDWLSYVRSQTGKPLFTVGEYWSYDINKLHNYITKTNGTMSLFDAPLHNKFYTASKSGGAFDMRTLMTNTLMKDQPTLAVTFVDNHDTEPGQALQSWVDPWFKPLAYAFILTRQEGYPCVFYGDYYGIPQYNIPSLKSKIDPLLIARRDYAYGTQHDYLDHSDIIGWTREGVTEKPGSGLAALITDGPGGSKWMYVGKQHAGKVFYDLTGNRSDTVTINSDGWGEFKVNGGSVSVWVPRKTTVSTIARP

SEQ ID NO: 18893 - protein, 493 aa, Geobacillus stearothermophilus
AAPFNGTMMQYFEWYLPDDGTLWTKVANEANNLSSLGITALWLPPAYKGTSRSDVGYGAYDLYDLGEFNQKGTVRTKYGTKAQYLQAIRAAHAAGMQVYADVVFDHKGGADGTEWVDAVEVNPSDRNQVISGTYQIQAWTKFDFPGRGNTYSSFKWRWYHFDGVDWDESRKLSRIYLFEGIGKAWDWEVDTENGNYDYLMYADLDMDHPEVVTELKNWGPWYVLTTNIDGFRLDAVKHIKFSFFPDWLSYVRSSTGKPLFTVGEYWSYDINKLKNYITKTNGTMSLFDAPLHNKFYTASKSGGAFDMRTLMTNTLMKDQPTLAVTFVDNHDTEPGQALQSWVDPWFKPLAYAFILTRQEGYPCVFYGDYYGIPQYNIPSLKSKIDPLLIARRDYAYGTQHDYLDHSDIIGWTREGVTEKPGSGLAALITDGPGGSKWMYVGKQHAGKVFYDLTGNRSDTVTINSDGWGEFKVNGGSVSVWVPRKTTVSTIARP

SEQ ID NO: 18894 - protein, 493 aa, Geobacillus stearothermophilus
AAPFNGTMMQYFEWYLPDDGTLWTKVANEANNLSSLGITALWLPPAYKGTSRSDVGYGVYDLYDLGEFNQKGTVRTKYGTKAQYLQAIQAAHAAGMQVYADVVFDHKGGADGTEWVDAVEVNPSDRNQEISGTYQIQAWTKFDFPGRGNTYSSFKWRWYHFDGVDWDESRKLSRIYKFRGIGKAWDWEVDTEXGNYDYLMYADLDMDHPEVVTELKNWGKWYVNTTNIDGFRLDAVKHIKFSFFPDWLSYVRSQTGKPLFTVGEYWSYDINKLHNYITKTNGTMSLFDAPLHNKFYTASKSGGAFDMRTLMTNTLMKDQPTLAVTFVDNHDTEPGQALQSWVDPWFKPLAYAFILTRQEGYPCVFYGDYYGIPQYNIPSLKSKIDPLLIARRDYAYGTQHDYLDHSDIIGWTREGXTEKPGSGLAALITDGPGGSKWMYVGKQHAGKVFYDLTGNRSDTVTINSDGWGEFKVNGGSVSVWVPRKTTVSTIARP

SEQ ID NO: 18895 - protein, 492 aa, Bacillus stearothermophilus
AAPFNGTMMQYFEWYLPDDGTLWTKVANEANNLSSLGITALWLPPAYKGTSRSDVGYGVYDLYDLGEFNQKGTVRTKYGTKAQYLQAIQALHAAGQVYADVVFDHKGGADGTEWVDAVEVNPSDRNQVISGTYQIQAWTKFDFPGRGNTYSSFKWRWYHFDGVDWDESRKLSRIYLFEGIGKAWDWEVDTENGNYDYLMYADLDMDHPEVVTELKNWGPWYVLTTNIDGFRLDAVKHIKFQFFPDWLSYVRSSTGKPLFTVGEYWSYDINKLHNYITKTNGTMSLFDAPLHNKFYTASKSGGAFDMRTLMTNTLMKDQPTLAVTFVDNHDTEPGQALQSWVDPWFKPLAYAFILTRQEGYPCVFYGDYYGIPQYNIPSLKSKIDPLLIARRDYAYGTQHDYLDHSDIIGWTREGVTEKPGSGLAALITDGPGGSKWMYVGKQHAGKVFYDLTGNRSDTVTINSDGWGEFKVNGGSVSVWVPRKTTVSTIARP

SEQ ID NO: 18896 - protein, 492 aa, Geobacillus stearothermophilus
APFNGTMMQYFEWYLPDDGTLWTKVANEANNLSSLGITALWLPPAYKGTSRSDVGYGVYDLYDLGEFNQKGTVRTKYGTKAQYLQAIQAAHAAGMQVYADVVFDHKGGADGTEWVDAVEVNPSDRNQEISGTYQIQAWTKFDFPGRGNTYSSFKWRWYHFDGVDWDESRKLSRIYKFRGIGKAWDWEVDTENGNYDYLMYADLDMDHPEVVTELKNWGKWYVNTTNIDGFRLDAVKHIKFSFFPDWLSYVRSQTGKPLFTVGEYWSYDINKLHNYITKTNGTMSLFDAPLHNKFYTASKSGGAFDMRTLMTNTLMKDQPTLAVTFVDNHDTEPGQALQSWVDPWFKPLAYAFILTRQEGYPCVFYGDYYGIPQYNIPSLKSKIDPLLIARRDYAYGTQHDYLDHSDIIGWTREGVTEKPGSGLAALITDGPGGSKWMYVGKQHAGKVFYDLTGNRSDTVTINSDGWGEFKVNGGSVSVWVPRKTTVSTIARP

SEQ ID NO: 18897 - protein, 489 aa, Geobacillus stearothermophilus
AAPFNGTMMQYFEWYLPDDGTLWTKVANEANNLSSLGITALWLPPAYKGTSRSDVGYGVYDLYDLGEFNQKGTVRTKYGTKAQYLQAIQALHAAGIQVYADVVFDHKGGADGTEWVDAVEVNPSDRNQVISGTYQIQAWTKFDFPGRGNTYSSFKWRWYHFDGVDWDESRKLSRIYLFEGKAWDWEVDTEFGNYDYLMYADLDMDHPEVVTELKNWGPWYVLTTNIDGFRLDAVKHIKFQFFPDWLSYVRSSTGKPLFTVGEYWSYDINKLHNYITKTNGTMSLFDAPLHNKFYTASKSGGAFDMRTLMTNTLMKDQPTLAVTFVDNHDTEPGQALQSWVDPWFKPLAYAFILTRQEGYPCVFYGDYYGIPQYNIPSLKSKIDPLLIARRDYAYGTQHDYLDHSDIIGWTREGVTEKPGSGLAALITDGPGGSKWMYVGKQHAGKVFYDLTGNRSDTVTINSDGWGEFKVNGGSVSVWVPRKTTVSTIA

SEQ ID NO: 18898 - protein, 489 aa, Geobacillus stearothermophilus
AAPFNGTMMQYFEWYLPDDGTLWTKVANEANNLSSLGITALWLPPAYKGTSRSDVGYGAYDLYDLGEFNQKGTVRTKYGTKAQYLQAIRAAHAAGMQVYADVVFDHKGGADGTEWVDAVEVNPSDRNQVISGTYQIQAWTKFDFPGRGNTYSSFKWYWYHFDGVDWDESRKLSRIYLFEGKAWDWEVDTEFGNYDYLMYADLDMDHPEVVTELKNWGPWYVLTTNIDGFRLDAVKHIKFSFFPDWLSYVRSSTGKPLFTVGEYWSYDINKLHNFITKTNGTMSLFDAPLHNKFYTASKSGGAFDMRTLMTNTLMKDQPTLAVTFVDNHDTEPGQALQSWVDPWFKPLAYAFILTRQEGYPCVFYGDYYGIPQYNIPSLKSKIDPLLIARRDYAYGTQHDYLDHSDIIGWTREGVTEKPGSGLAALITDGPGGSKWMYVGKQHAGKVFYDLTGNRSDTVTINSDGWGEFKVNGGSVSVWVPRKTTVSTIA

SEQ ID NO: 18899 - protein, 489 aa, Geobacillus stearothermophilus
AAPFNGTMMQYFEWYLPDDGTLWTKVANEANNLSSLGITALWLPPAYKGTSRSDVGYGVYDLYDLGEFNQKGTVRTKYGTKAQYLQAIQAAHAAGMQVYADVVFDHKGGADGTEWVDAVEVNPSDRNQEISGTYQIQAWTKFDFPGRGNTYSSFKWRWYHFDGVDWDESRKLSRIYKFRGKAWDWEVDTEFGNYDYLMYADLDMDHPEVVTELKNWGPWYVLTTNIDGFRLDAVKHIKFQFFPDWLSYVRSSTGKPLFTVGEYWSYDINKLHNYITKTNGTMSLFDAPLHNKFYTASKSGGAFDMRTLMTNTLMKDQPTLAVTFVDNHDTEPGQALQSWVDPWFKPLAYAFILTRQEGYPCVFYGDYYGIPQYNIPSLKSKIDPLLIARRDYAYGTQHDYLDHSDIIGWTREGVTEKPGSGLAALITDGPGGSKWMYVGKQHAGKVFYDLTGNRSDTVTINSDGWGEFKVNGGSVSVWVPRKTTVSTIA

SEQ ID NO: 18900 - protein, 489 aa, Geobacillus stearothermophilus
AAPFNGTMMQYFEWYLPDDGTLWTKVANEANNLSSLGITALWLPPAYKGTSRSDVGYGVYDLYDLGEFNQKGTVRTKYGTKAQYLQAIQAAHAAGMQVYADVVFDHKGGADGTEWVDAVEVNPSDRNQEISGTYQIQAWTKFDFPGRGNTYSSFKWRWYHFDGVDWDESRKLSRIYKFRGKAWDWEVDTEFGNYDYLMYADLDMDHPEVVTELKNWGPWYVLTTNIDGFRLDAVKHIKFSFFPDWLSYVRSSTGKPLFTVGEYWSYDINKLHNYITKTNGTMSLFDAPLHNKFYTASKSGGAFDMRTLMTNTLMKDQPTLAVTFVDNHDTEPGQALQSWVDPWFKPLAYAFILTRQEGYPCVFYGDYYGIPQYNIPSLKSKIDPLLIARRDYAYGTQHDYLDHSDIIGWTREGVTEKPGSGLAALITDGPGGSKWMYVGKQHAGKVFYDLTGNRSDTVTINSDGWGEFKVNGGSVSVWVPRKTTVSTIA

SEQ ID NO: 18901 - protein, 489 aa, Geobacillus stearothermophilus
AAPFNGTMMQYFEWYLPDDGTLWTKVANEANNLSSLGITALWLPPAYKGTSRSDVGYGVYDLYDLGEFNQKGTVRTKYGTKAQYLQAIQAAHAAGMQVYADVVFDHKGGADGTEWVDAVEVNPSDRNQVISGTYQIQAWTKFDFPGRGNTYSSFKWRWYHFDGVDWDESRKLSRIYLFEGKAWDWEVDTEFGNYDYLMYADLDMDHPEVVTELKNWGPWYVLTTNIDGFRLDAVKHIKFQFFPDWLSYVRSSTGKPLFTVGEYWSYDINKLHNFITKTNGTMSLFDAPLHNKFYTASKSGGAFDMRTLMTNTLMKDQPTLAVTFVDNHDTEPGQALQSWVDPWFKPLAYAFILTRQEGYPCVFYGDYYGIPQYNIPSLKSKIDPLLIARRDYAYGTQHDYLDHSDIIGWTREGVTEKPGSGLAAMITDGPGGSKWMYVGKQHAGKVFYDLTGNRSDTVTINSDGWGEFKVNGGSVSVWVPRKTTVSTIA

SEQ ID NO: 18902 - protein, 491 aa, Geobacillus stearothermophilus
AAPFNGTMMQYFEWYLPDDGTLWTKVANEANNLSSLGITALWLPPAYKGTSRSDVGYGVYDLYDLGEFNQKGTVRTKYGTKAQYLQAIQAAHAAGMQVYADVVFDHKGGADGTEWVDAVEVNPSDRNQVISGTYQIQAWTKFDFPGRGNTYSSFKWRWYHFDGVDWDESRKLSRIYLFEGXXKAWDWEVDTEFGNYDYLMYADLDMDHPEVVTELKNWGPWYVLTTNIDGFRLDAVKHIKFQFFPDWLSYVRSSTGKPLFTVGEYWSYDINKLHNFITKTNGTMSLFDAPLHNKFYTASKSGGAFDMRTLMTNTLMKDQPTLAVTFVDNHDTEPGQALQSWVDPWFKPLAYAFILTRQEGYPCVFYGDYYGIPQYNIPSLKSKIDPLLIARRDYAYGTQHDYLDHSDIIGWTREGVTEKPGSGLAAMITDGPGGSKWMYVGKQHAGKVFYDLTGNRSDTVTINSDGWGEFKVNGGSVSVWVPRKTTVSTIA

SEQ ID NO: 18903 - protein, 491 aa, Geobacillus stearothermophilus
AAPFNGTMMQYFEWYLPDDGTLWTKVANEANNLSSLGITALWLPPAYKGTSRSDVGYGVYDLYDLGEFNQKGTVRTKYGTKAQYLQAIQAAHAAGMQVYADVVFDHKGGADGTEWVDAVEVNPSDRNQEISGTYQIQAWTKFDFPGRGNTYSSFKWRWYHFDGVDWDESRKLSRIYKFRGXXKAWDWEVDTEFGNYDYLMYADLDMDHPEVVTELKNWGPWYVLTTNIDGFRLDAVKHIKFQFFPDWLSYVRSSTGKPLFTVGEYWSYDINKLHNYITKTNGTMSLFDAPLHNKFYTASKSGGAFDMRTLMTNTLMKDQPTLAVTFVDNHDTEPGQALQSWVDPWFKPLAYAFILTRQEGYPCVFYGDYYGIPQYNIPSLKSKIDPLLIARRDYAYGTQHDYLDHSDIIGWTREGVTEKPGSGLAALITDGPGGSKWMYVGKQHAGKVFYDLTGNRSDTVTINSDGWGEFKVNGGSVSVWVPRKTTVSTIA

SEQ ID NO: 18904 - protein, 491 aa, Geobacillus stearothermophilus
AAPFNGTMMQYFEWYLPDDGTLWTKVANEANNLSSLGITALWLPPAYKGTSRSDVGYGQYDLYDLGEFNQKGTVRTKYGTKAQYLQAIQAAHAAGMQVYADVVFDHKGGADGTEWVDAVEVNPSDRNQEISGTYQIQAWTKFDFPGRGNTYSSFKWRWYHFDGVDWDESRKLSRIYKFRGIGKAWDWEVDTENGNYDYLMYADLDMDHPEVVTELKNWGKWYVNTTNIDGFRLDAVKHIKFSFFPDWLSYVRSQTGKPLFTVGEYWSYDINKLHNYITKTNGTMSLFDAPLHNKFYTASKSGGAFDMRTLMTNTLMKDQPTLAVTFVDNHDTEPGQALQSWVDPWFKPLAYAFILTRQEGYPCVFYGDYYGIPQYNIPSLKSKIDPLLIARRDYAYGTQHDYLDHSDIIGWTREGVTEKPGSGLAALITDGPGGSKWMYVGKQHAGKVFYDLTGNRSDTVTINSDGWGEFKVNGGSVSVWVPRKTTVSTIA

SEQ ID NO: 18905 - protein, 491 aa, Geobacillus stearothermophilus
AAPFNGTMMQYFEWYLPDDGTLWTKVANEANNLSSLGITALWLPPAYKGTSRSDVGYGVYDLYDLGEFNQKGTVRTKYGTKAQYLQAIQAAHAAGMQVYADVVFDHKGGADGTEWVDAVEVNPSDRNQEISGTYQIQAWTKFDFPGRGNTYSSFKWRWYHFDGVDWDESRKLSRIYKFRGXXKAWDWEVDTEFGNYDYLMYADLDMDHPEVVTELKNWGPWYVLTTNIDGFRLDAVKHIKFSFFPDWLSYVRSSTGKPLFTVGEYWSYDINKLHNYITKTNGTMSLFDAPLHNKFYTASKSGGAFDMRTLMTNTLMKDQPTLAVTFVDNHDTEPGQALQSWVDPWFKPLAYAFILTRQEGYPCVFYGDYYGIPQYNIPSLKSKIDPLLIARRDYAYGTQHDYLDHSDIIGWTREGVTEKPGSGLAALITDGPGGSKWMYVGKQHAGKVFYDLTGNRSDTVTINSDGWGEFKVNGGSVSVWVPRKTTVSTIA

SEQ ID NO: 18906 - protein, 491 aa, Geobacillus stearothermophilus
AAPFNGTMMQYFEWYLPDDGTLWTKVANEANNLSSLGITALWLPPAYKGTSRSDVGYGEYDLYDLGEFNQKGTVRTKYGTKAQYLQAIQAAHAAGMQVYADVVFDHKGGADGTEWVDAVEVNPSDRNQEISGTYQIQAWTKFDFPGRGNTYSSFKWRWYHFDGVDWDESRKLSRIYKFRGIGKAWDWEVDTENGNYDYLMYADLDMDHPEVVTELKNWGKWYVNTTNIDGFRLDAVKHIKFSFFPDWLSYVRSQTGKPLFTVGEYWSYDINKLHNYITKTNGTMSLFDAPLHNKFYTASKSGGAFDMRTLMTNTLMKDQPTLAVTFVDNHDTEPGQALQSWVDPWFKPLAYAFILTRQEGYPCVFYGDYYGIPQYNIPSLKSKIDPLLIARRDYAYGTQHDYLDHSDIIGWTREGVTEKPGSGLAALITDGPGGSKWMYVGKQHAGKVFYDLTGNRSDTVTINSDGWGEFKVNGGSVSVWVPRKTTVSTIA

SEQ ID NO: 18907 - protein, 491 aa, Geobacillus stearothermophilus
AAPFNGTMMQYFEWYLPDDGTLWTKVANEANNLSSLGITALWLPPAYKGTSRSDVGYGVYDLYDLGEFNQKGTVRTKYGTKAQYLQAIQAAHAAGMQVYADVVFDHKGGADGTEWVDAVEVNPSDRNQVISGTYQIQAWTKFDFPGRGNTYSSFKWRWYHFDGVDWDESRKLSRIYLFEGXXKAWDWEVDTEFGNYDYLMYADLDMDHPEVVTELKNWGPWYVLTTNIDGFRLDAVKHIKFQFFPDWLSYVRSSTGKPLFTVGEYWSYDINKLHNYITKTNGTMSLFDAPLHNKFYTASKSGGAFDMRTLMTNTLMKDQPTLAVTFVDNHDTEPGQALQSWVDPWFKPLAYAFILTRQEGYPCVFYGDYYGIPQYXXPSLKSKIDPLLIARRDYAYGTQHDYLDHSDIIGWTREGVTEKPGSGLAALITDGPGGSKWMYVGKQHAGKVFYDLTGNRSDTVTINSDGWGEFKVNGGSVSVWVPRKTTVSTIA

SEQ ID NO: 18908 - protein, 491 aa, Geobacillus stearothermophilus
AAPFNGTMMQYFEWYLPDDGTLWTKVANEANNLSSLGITALWLPPAYKGTSRSDVGYGAYDLYDLGEFNQKGTVRTKYGTKAQYLQAIRAAHAAGMQVYADVVFDHKGGADGTEWVDAVEVNPSDRNQVISGTYQIQAWTKFDFPGRGNTYSSFKWRWYHFDGVDWDESRKLSRIYLFEGIGKAWDWEVDTENGNYDYLMYADLDMDHPEVVTELKNWGPWYVLTTNIDGFRLDAVKHIKFSFFPDWLSYVRSSTGKPLFTVGEYWSYEINKLHNYITKTNGTMSLFDAPLHNKFYTASKSGGAFDMRTLMTNTLMKDQPTLAVTFVDNHDTEPGQALQSWVDPWFKPLAYAFILTRQEGYPCVFYGDYYGIPQYNIPSLKSKIDPLLIARRDYAYGTQHDYLDHSDIIGWTREGVTEKPGSGLAALITDGPGGSKWMYVGKQHAGKVFYDLTGNRSDTVTINSDGWGEFKVNGGSVSVWVPRKTTVSTIA

SEQ ID NO: 18909 - protein, 491 aa, Geobacillus stearothermophilus
AAPFNGTMMQYFEWYLPDDGTLWTKVANEANNLSSLGITALWLPPAYKGTSRSDVGYGIYDLYDLGEFNQKGTVRTKYGTKAQYLQAIQAAHAAGMQVYADVVFDHKGGADGTEWVDAVEVNPSDRNQEISGTYQIQAWTKFDFPGRGNTYSSFKWRWYHFDGVDWDESRKLSRIYKFRGIGKAWDWEVDTENGNYDYLMYADLDMDHPEVVTELKNWGKWYVNTTNIDGFRLDAVKHIKFSFFPDWLSYVRSQTGKPLFTVGEYWSYDINKLHNYITKTNGTMSLFDAPLHNKFYTASKSGGAFDMRTLMTNTLMKDQPTLAVTFVDNHDTEPGQALQSWVDPWFKPLAYAFILTRQEGYPCVFYGDYYGIPQYNIPSLKSKIDPLLIARRDYAYGTQHDYLDHSDIIGWTREGVTEKPGSGLAALITDGPGGSKWMYVGKQHAGKVFYDLTGNRSDTVTINSDGWGEFKVNGGSVSVWVPRKTTVSTIA

SEQ ID NO: 18910 - protein, 491 aa, Geobacillus stearothermophilus
AAPFNGTMMQYFEWYLPDDGTLWTKVANEANNLSSLGITALWLPPAYKGTSRSDVGYGAYDLYDLGEFNQKGTVRTKYGTKAQYLQAIRAAHAAGMQVYADVVFDHKGGADGTEWVDAVEVNPSDRNQVISGTYQIQAWTKFDFPGRGNTYSSFKWRWYHFDGVDWDESRKLSRIYLFEGIGKAWDWEVDTENGNYDYLMYADLDMDHPEVVTELKNWGPWYVLTTNIDGFRLDAVKHIKFSFFPDWLSYVRSSTGKPLFTVGEYWSYDLNKLHNYITKTNGTMSLFDAPLHNKFYTASKSGGAFDMRTLMTNTLMKDQPTLAVTFVDNHDTEPGQALQSWVDPWFKPLAYAFILTRQEGYPCVFYGDYYGIPQYNIPSLKSKIDPLLIARRDYAYGTQHDYLDHSDIIGWTREGVTEKPGSGLAALITDGPGGSKWMYVGKQHAGKVFYDLTGNRSDTVTINSDGWGEFKVNGGSVSVWVPRKTTVSTIA

SEQ ID NO: 18911 - protein, 491 aa, Geobacillus stearothermophilus
AAPFNGTMMQYFEWYLPDDGTLWTKVANEANNLSSLGITALWLPPAYKGTSRSDVGYGAYDLYDLGEFNQKGTVRTKYGTKAQYLQAIRAAHAAGMQVYADVVFDHKGGADGTEWVDAVEVNPSDRNQVISGTYQIQAWTKFDFPGRGNTYSSFKWRWYHFDGVDWDESRKLSRIYLFEGIGKAWDWEVDTENGNYDYLMYADLDMDYPEVVTELKNWGPWYVLTTNIDGFRLDAVKHIKFSFFPDWLSYVRSSTGKPLFTVGEYWSYDINKLHNYITKTNGTMSLFDAPLHNKFYTASKSGGAFDMRTLMTNTLMKDQPTLAVTFVDNHDTEPGQALQSWVDPWFKPLAYAFILTRQEGYPCVFYGDYYGIPQYNIPSLKSKIDPLLIARRDYAYGTQHDYLDHSDIIGWTREGVTEKPGSGLAALITDGPGGSKWMYVGKQHAGKVFYDLTGNRSDTVTINSDGWGEFKVNGGSVSVWVPRKTTVSTIA

SEQ ID NO: 18912 - protein, 491 aa, Geobacillus stearothermophilus
AAPFNGTMMQYFEWYLPDDGTLWTKVANEANNLSSLGITALWLPPAYKGTSRSDVGYGAYDLYDLGEFNQKGTVRTKYGTKAQYLQAIRAAHAAGMQVYADVVFDHKGGADGTEWVDAVEVNPSDRNQVISGTYQIQAWTKFDFPGRGNTYSSFKWRWYHFDGVDWDESRKLSRIYLFEGIGKAWDWEVDTENGNYDYLMYADLDMDHPEVVTELKNWGPWYVLTTNIDGFRLDAVKHIKFSFFPDWLSYVRSSTGKPLFTVGEYWSYDINKLHNFITKTNGTMSLFDAPLHNKFYTASKSGGAFDMRTLMTNTLMKDQPTLAVTFVDNHDTEPGQALQSWVDPWFKPLAYAFILTRQEGYPCVFYGDYYGIPQYNIPSLKSKIDPLLIARRDYAYGTQHDYLDHSDIIGWTREGVTEKPGSGLAALITDGPGGSKWMYVGKQHAGKVFYDLTGNRSDTVTINSDGWGEFKVNGGSVSVWVPRKTTVSTIA

SEQ ID NO: 18913 - protein, 491 aa, Geobacillus stearothermophilus
AAPFNGTMMQYFEWYLPDDGTLWTKVANEANNLSSLGITALWLPPAYKGTSRSDVGYGAYDLYDLGEFNQKGTVRTKYGTKAQYLQAIRAAHAAGMQVYADVVFDHKGGADDTEWVDAVEVNPSDRNQVISGTYQIQAWTKFDFPGRGNTYSSFKWRWYHFDGVDWDESRKLSRIYLFEGIGKAWDWEVDTENGNYDYLMYADLDMDHPEVVTELKNWGPWYVLTTNIDGFRLDAVKHIKFSFFPDWLSYVRSSTGKPLFTVGEYWSYDINKLHNYITKTNGTMSLFDAPLHNKFYTASKSGGAFDMRTLMTNTLMKDQPTLAVTFVDNHDTEPGQALQSWVDPWFKPLAYAFILTRQEGYPCVFYGDYYGIPQYNIPSLKSKIDPLLIARRDYAYGTQHDYLDHSDIIGWTREGVTEKPGSGLAALITDGPGGSKWMYVGKQHAGKVFYDLTGNRSDTVTINSDGWGEFKVNGGSVSVWVPRKTTVSTIA

SEQ ID NO: 18914 - protein, 491 aa, Geobacillus stearothermophilus
AAPFNGTMMQYFEWYLPDDGTLWTKVANEANNLSSLGITALWLPPAYKGTSRSDVGYGAYDLYDLGEFNQKGTVRTKYGTKAQYLQAIRAAHAAGMQVYADVVFDHKGGADGTEWVDAVEVNPSDRNQVISGTYQIQAWTKFDFPGRGNTYSSFKWRWYHFDGVDWDESRKLSRIYLFEGIGKAWDWEVDTENGNYDYLMYADLDMDHPEVVTELKNWGPWYVLTTNIDGFRLDAVKHIKFSFFPDWLSYVRSSTGKPLFTVGEYWSYDINKLKNYITKTNGTMSLFDAPLHNKFYTASKSGGAFDMRTLMTNTLMKDQPTLAVTFVDNHDTEPGQALQSWVDPWFKPLAYAFILTRQEGYPCVFYGDYYGIPQYNIPSLKSKIDPLLIARRDYAYGTQHDYLDHSDIIGWTREGVTEKPGSGLAALITDGPGGSKWMYVGKQHAGKVFYDLTGNRSDTVTINSDGWGEFKVNGGSVSVWVPRKTTVSTIA

SEQ ID NO: 18915 - protein, 491 aa, Geobacillus stearothermophilus
AAPFNGTMMQYFEWYLPDDGTLWTKVANEANNLSSLGITALWLPPAYKGTSRSDVGYGVYDLYDLGEFNQKGTVRTKYGTKAQYLQAIQALHAAGIQVYADVVFDHKGGADGTEWVDAVEVNPSDRNQVISGTYQIQAWTKFDFPGRGNTYSSFKWRWYHFDGVDWDESRKLSRIYLFEGXXKAWDWEVDTEFGNYDYLMYADLDMDHPEVVTELKNWGPWYVLTTNIDGFRLDAVKHIKFQFFPDWLSYVRSSTGKPLFTVGEYWSYDINKLHNYITKTNGTMSLFDAPLHNKFYTASKSGGAFDMRTLMTNTLMKDQPTLAVTFVDNHDTEPGQALQSWVDPWFKPLAYAFILTRQEGYPCVFYGDYYGIPQYNIPSLKSKIDPLLIARRDYAYGTQHDYLDHSDIIGWTREGVTEKPGSGLAALITDGPGGSKWMYVGKQHAGKVFYDLTGNRSDTVTINSDGWGEFKVNGGSVSVWVPRKTTVSTIA

SEQ ID NO: 18916 - protein, 491 aa, Geobacillus stearothermophilus
AAPFNGTMMQYFEWYLPDDGTLWTKVANEANNLSSLGITALWLPPAYKGTSRSDVGYGVYDLYDLGEFNQKGTVRTKYGTKAQYLQAIQAAHAAGMQVYADVVFDHKGGADGTEWVDAVEVNPSDRNQEISGTYQIQAWTKFDFPGRGNTYSSFKWRWYHFDGVDWDESRKLSRIYKFRGIGKAWDWEVDTENGNYDYLMYADLDMDHPEVVTELKNWGKWYVNTTNIDGFRLDAVKHIKFSFFPDWLSYVRSQTGKPLFTVGEYWSYDINKLHNYITKTNGTTSLFDAPLHNKFYTASKSGGAFDMRTLMTNTLMKDQPTLAVTFVDNHDTEPGQALQSWVDPWFKPLAYAFILTRQEGYPCVFYGDYYGIPQYNIPSLKSKIDPLLIARRDYAYGTQHDYLDHSDIIGWTREGVTEKPGSGLAALITDGPGGSKWMYVGKQHAGKVFYDLTGNRSDTVTINSDGWGEFKVNGGSVSVWVPRKTTVSTIA

SEQ ID NO: 18917 - protein, 486 aa, Geobacillus stearothermophilus
AAPFNGTMMQYFEWYLPDDGQLWTKVANEANNLSSLGITALWLPPAYKGTSRSDVGYGAYDLYDLGEFNQKGTVRTKYGTKAQYLKAIQAAHAAGMQVYADVVFDHKGGADGTEWVQAVEVNPSDRNQVISGTYQIQAWTKFDFPGRGNTYSSFKWRWYHFDGVDWDESRKLNRIYLFEGKAWDWPVDTEFGNYDYLMYADLDMDYPEVTTELKNWGKWYVNTTNIDGFRLDAVKHIKFYFFPDWLSYVRSSTGKPLFTVGEYWSGDINKLHNYITKTDGTVSLFDAPLHYKFYNASKSGGAFDMRTLMTNTLMKDQPTLAVTFVDNHDTEPGQALQSWVDPWFKPLAYAFILTRQEGYPCVFYGDYYGIPQYNIPSLKHKIDPLLIARRDYAYGTQHDYLDHSDIIGWTREGGTEKPGSGLAALITDGPGGSKWMYVGKQHAGKVFYDLTGNRSDTVTINSDGWGEFKVNGGSVSVWVPRKTTVS

SEQ ID NO: 18918 - protein, 488 aa, Geobacillus stearothermophilus
AAPFNGTMMQYFEWYLPDNGTLWTKVAKQANNLSSLGITALWLPPAYKGTSRSDVGYGVYDLYDLGEFNQKGTVRTKYGTKAQYLRAIRAAHAAGMRVYADVVFDHKGGADGTEWVDAVEVNPSDRNQEISGTYQIQAWTKFDFPGRGNTYSSFKWRWYHFDGVDWDESRKLSRIYKFRGIGKAWDWEVDTENGNYDYLMYADLDMDHPEVVTELKNWGKWYVKTTNIDGFRLDAVKHIKFSFFPDWLSYVRSQTGKPLFTVGEYWSYDIKKLHNYITKTKGTMSLFDAPLHNKFYTASKSGGAFNMRTLMTNTLMKNRPTLAVTFVDNHDTEPGQALQSWVDPWFKPLAYAFILTREEGYPCVFYGDYYGIPQYNIPSLKSKIDPLLIARRNYAYGTQHDYLDHSDIIGWTREGVTEKPGSGLAALITDGPGGSKWMYVGKEHAGKVFYDLTGNRSNTVTINSDGWGEFKVNGGSVSVWVPRKTTVS

SEQ ID NO: 18919 - protein, 486 aa, Geobacillus stearothermophilus
AAPFNGTMMQYFEWYLPDDGTLWKRVQNDANHLSSLGITALWLPPAYKGTSRSDVGYGAYDLYDLGEFNQKGTVRTKYGTKAQYLSAIQSAHSAGMQVYADVVFDHKGGADGTEWVDAVEVNPSDRNQVISGTYQIQAWTKFDFPGRGNTYSSFKWRWYHFDGVDWDESRKLSRIYLFEGKAWDWEVDTEFGNYDYLMYADLDMDHPEVTTELKNWGKWYVNTTNIDGFRLDAVKHIKFSFFPDWLSYVRSSTGKPLFTVGEYWSGDINKLHNYITKTDGTVSLFDAPLHYKFYNASKSGGAFDMRTLMTNTLMKDQPTLAVTFVDNHDTEPGQALQSWVDPWFKPLAYAFILTRQEGYPCVFYGDYYGIPQYNIPSLKSKIDPLLIARRDYAYGTQHDYLDHSDIIGWTREGGTEKPGSGLAALITDGPGGSKWMYVGKQHAGKVFYDLTGNRSDTVTINSDGWGEFKVNGGSVSVWVPRKTTVS

SEQ ID NO: 18920 - protein, 488 aa, Geobacillus stearothermophilus
AAPFNGTMMQYFEWYLPDDGTLWTKVANEANNLSSLGITALWLPPAYKGTSRSDVGYGVYDLYDLGEFNQKGTVRTKYGTKAQYLQAIQAAHAAGMQVYADVVFDHKGGADGTEWVDAVEVNPSDRNQEISGTYQIQAWTKFDFPGRGNTYSSFKWRWYHFDGVDWDESRKLSRIYKFRXXGKAWDWEVDTEXGNYDYLMYADLDMDHPEVVTELKNWGKWYVNTTNIDGFRLDAVKHIKFSFFPDWLSYVRSQTGKPLFTVGEYWSYDINKLHNYITKTNGTMSLFDAPLHNKFYTASKSGGAFDMRTLMTNTLMKDQPTLAVTFVDNHDTEPGQALQSWVDPWFKPLAYAFILTRQEGYPCVFYGDYYGIPQYNIPSLKSKIDPLLIARRDYAYGTQHDYLDHSDIIGWTREGXTEKPGSGLAALITDGPGGSKWMYVGKQHAGKVFYDLTGNRSDTVTINSDGWGEFKVNGGSVSVWVPRKTTVS

SEQ ID NO: 18921 - protein, 485 aa, Geobacillus stearothermophilus
ANLNGTMMQYFEWYLPDDGTLWTKVANEANNLSSLGITALWLPPAYKGTSRSDVGYGVYDLYDLGEFNQKGTVRTKYGTKAQYLQAIQAAHAAGMQVYADVVFDHKGGADGTEWVDAVEVNPSDRNQEISGTYQIQAWTKFDFPGRGNTYSSFKWRWYHFDGVDWDESRKLSRIYKFRGKAWDWEVDTEFGNYDYLMYADLDMDHPEVVTELKNWGKWYVNTTNIDGFRLDAVKHIKFSFFPDWLSYVRSQTGKPLFTVGEYWSYDINKLHNYITKTNGTMSLFDAPLHNKFYTASKSGGAFDMRTLMTNTLMKDQPTLAVTFVDNHDTEPGQALQSWVDPWFKPLAYAFILTRQEGYPCVFYGDYYGIPQYNIPSLKSKIDPLLIARRDYAYGTQHDYLDHSDIIGWTREGGTEKPGSGLAALITDGPGGSKWMYVGKQHAGKVFYDLTGNRSDTVTINSDGWGEFKVNGGSVSVWVPRKTTVS

SEQ ID NO: 18922 - protein, 487 aa, Geobacillus stearothermophilus
APFNGTMMQYFEWYLPDDGTLWTKVANEANNLSSLGITALWLPPAYKGTSRSDVGYGVYDLYDLGEFNQKGTVRTKYGTKAQYLQAIQAAHAAGMQVYADVVFDHKGGADGTEWVDAVEVNPSDRNQEISGTYQIQAWTKFDFPGRGNTYSSFKWRWYHFDGVDWDESRKLSRIYKFRGIGKAWDWEVDTENGNYDYLMYADLDMDHPEVVTELKNWGKWYVNTTNIDGFRLDAVKHIKFSFFPDWLSYVRSQTGKPLFTVGEYWSYDINKLHNYITKTNGTMSLFDAPLHNKFYTASKSGGAFDMRTLMTNTLMKDQPTLAVTFVDNHDTEPGQALQSWVDPWFKPLAYAFILTRQEGYPCVFYGDYYGIPQYNIPSLKSKIDPLLIARRDYAYGTQHDYLDHSDIIGWTREGVTEKPGSGLAALITDGPGGSKWMYVGKQHAGKVFYDLTGNRSDTVTINSDGWGEFKVNGGSVSVWVPRKTTVS

SEQ ID NO: 18923 - protein, 484 aa, unidentified
AAPFNGTMMQYFEWYLPDDGTLWTKVANEANNLSSLGITALWLPPAYKGTSRSDVGYGVYDLYDLGEFNQKGTVRTKYGTKAQYLQAIQAAHAAGMQVYADVVFDHKGGADGTEWVDAVEVNPSDRNQEISGTYQIQAWTKFDFPGRGNTYSSFKWRWYHFDGVDWDESRKLSRIYKFIGKAWDWEVDTENGNYDYLMYADLDMDHPEVVTELKNWGKWYVNTTNIDGFRLDAVKHIKFSFFPDWLSYVRSQTGKPLFTVGEYWSYDINKLHNYITKTNGTMSLFDAPLHNKFYTASKSGGAFDMRTLMTNTLMKDQPTLAVTFVDNHDTEPGQALQSWVDPWFKPLAYAFILTRQEGYPCVFYGDYYGIPQYNIPSLKSKIDPLLIARRDYAYGTQHDYLDHSDIIGWTREGVTEKPGSGLAALITDGPGGSKWMYVGKQHAGKVFYDLTGNRSDTVTINSDGWGEFKVNGGSVSVWVPRKTT

SEQ ID NO: 18924 - protein, 485 aa, Geobacillus stearothermophilus
AAPFNGTMMQYFEWYLPDDGTLWTKVANEANNLSSLGITALWLPPAYKGTSRSDVGYGVYDLYDLGEFNQKGTVRTKYGTKAQYLQAIQAAHAAGMQVYADVVFDHKGGADGTEWVDAVEVNPSDRNQEISGTYQIQAWTKFDFPGRGNTYSSFKWRWYHFDGVDWDESRKLSRIYKFRGGKAWDWEVDTENGNYDYLMYADLDMDHPEVVTELKNWGKWYVNTTNIDGFRLDAVKHIKFSFFPDWLSYVRSQTGKPLFTVGEYWSYDINKLHNYITKTNGTMSLFDAPLHNKFYTASKSGGAFDMRTLMTNTLMKDQPTLAVTFVDNHDTEPGQALQSWVDPWFKPLAYAFILTRQEGYPCVFYGDYYGIPQYNIPSLKSKIDPLLIARRDYAYGTQHDYLDHSDIIGWTREGVTEKPGSGLAALITDGPGGSKWMYVGKQHAGKVFYDLTGNRSDTVTINSDGWGEFKVNGGSVSVWVPRKTT

SEQ ID NO: 18925 - protein, 486 aa, Geobacillus stearothermophilus
AAPFNGTMMQYFEWYLPDDGTLWTKVANEANNLSSLGITALWLPPAYKGTSRSDVGYGVYDLYDLGEFNQKGTVRTKYGTKAQYLQAIQAAHAAGMQVYADVVFDHKGGADGTEWVDAVEVNPSDRNQEISGTYQIQAWTKFDFPGRGNTYSSFKWRWYHFDGVDWDESRKLSRIYKFRGIGKAWDWEVDTENGNYDYLMYADLDMDHPEVVTELKNWGKWYVNTTNIDGFRLDAVKHIKFLFFPDWLSYVRSQTGKPLFTVGEYWSYDINKLHNYITKTNGTMSLFDAPLHNKFYTASKSGGAFDMRTLMTNTLMKDQPTLAVTFVDNHDTEPGQALQSWVDPWFKPLAYAFILTRQEGYPCVFYGDYYGIPQYNIPSLKSKIDPLLIARRDYAYGTQHDYLDHSDIIGWTREGVTEKPGSGLAALITDGPGGSKWMYVGKQHAGKVFYDLTGNRSDTVTINSDGWGEFKVNGGSVSVWVPRKTT

SEQ ID NO: 18926 - protein, 486 aa, Geobacillus stearothermophilus
AAPFNGTMMQYFEWYLPDDGTLWTKVANEANNLSSLGITALWLPPAYKGTSRSDVGYGVYDLYDLGEFNQKGTVRTKYGTKAQYLQAIQAAHAAGMQVYADVVFDHKGGADGTEWVDAVEVNPSDRNQEISGTYQIQAWTKFDFPGRGNTYSSFKWRWYHFDGVDWDESRKLSRIYKFRGIGKAWDWEVDTENGNYDYLMYADLDMDHPEVVTELKNWGKWYVNTTNIDGFRLDAVKHIKFDFFPDWLSYVRSQTGKPLFTVGEYWSYDINKLHNYITKTNGTMSLFDAPLHNKFYTASKSGGAFDMRTLMTNTLMKDQPTLAVTFVDNHDTEPGQALQSWVDPWFKPLAYAFILTRQEGYPCVFYGDYYGIPQYNIPSLKSKIDPLLIARRDYAYGTQHDYLDHSDIIGWTREGVTEKPGSGLAALITDGPGGSKWMYVGKQHAGKVFYDLTGNRSDTVTINSDGWGEFKVNGGSVSVWVPRKTT

SEQ ID NO: 18927 - protein, 486 aa, Geobacillus stearothermophilus
AAPFNGTMMQYFEWYLPDDGTLWTKVANEANNLSSLGITALWLPPAYKGTSRSDVGYGVYDLYDLGEFNQKGTVRTKYGTKAQYLQAIQAAHAAGMQVYADVVFDHKGGADGTEWVDAVEVNPSDRNQEISGTYQIQAWTKFDFPGRGNTYSSFKWRWYHFDGVDWDESRKLSRIYKFRGIGKAWDWEVDTENGNYDYLMYADLDMDHPEVVTELKNWGKWYVNTTNIDGFRLDAVKHIKFHFFPDWLSYVRSQTGKPLFTVGEYWSYDINKLHNYITKTNGTMSLFDAPLHNKFYTASKSGGAFDMRTLMTNTLMKDQPTLAVTFVDNHDTEPGQALQSWVDPWFKPLAYAFILTRQEGYPCVFYGDYYGIPQYNIPSLKSKIDPLLIARRDYAYGTQHDYLDHSDIIGWTREGVTEKPGSGLAALITDGPGGSKWMYVGKQHAGKVFYDLTGNRSDTVTINSDGWGEFKVNGGSVSVWVPRKTT

SEQ ID NO: 18928 - protein, 486 aa, Geobacillus stearothermophilus
AAPFNGTMMQYFEWYLPDDGTLWTKVANEANNLSSLGITALWLPPAYKGTSRSDVGYGVYDLYDLGEFNQKGTVRTKYGTKAQYLQAIQAAHAAGMQVYADVVFDHKGGADGTEWVDAVEVNPSDRNQEISGTYQIQAWTKFDFPGRGNTYSSFKWRWYHFDGVDWDESRKLSRIYKFRGIGKAWDWEVDTENGNYDYLMYADLDMDHPEVVTELKNWGKWYVNTTNIDGFRLDAVKHIKFTFFPDWLSYVRSQTGKPLFTVGEYWSYDINKLHNYITKTNGTMSLFDAPLHNKFYTASKSGGAFDMRTLMTNTLMKDQPTLAVTFVDNHDTEPGQALQSWVDPWFKPLAYAFILTRQEGYPCVFYGDYYGIPQYNIPSLKSKIDPLLIARRDYAYGTQHDYLDHSDIIGWTREGVTEKPGSGLAALITDGPGGSKWMYVGKQHAGKVFYDLTGNRSDTVTINSDGWGEFKVNGGSVSVWVPRKTT

SEQ ID NO: 18929 - protein, 486 aa, Geobacillus stearothermophilus
AAPFNGTMMQYFEWYLPDDGTLWTKVANEANNLSSLGITALWLPPAYKGTSRSDVGYGVYDLYDLGEFNQKGTVRTKYGTKAQYLQAIQAAHAAGMQVYADVVFDHKGGADGTEWVDAVEVNPSDRNQEISGTYQIQAWTKFDFPGRGNTYSSFKWRWYHFDGVDWDESRKLSRIYKFRGIGKAWDWEVDTENGNYDYLMYADLDMDHPEVVTELKNWGKWYVNTTNIDGFRLDAVKHIKFQFFPDWLSYVRSQTGKPLFTVGEYWSYDINKLHNYITKTNGTMSLFDAPLHNKFYTASKSGGAFDMRTLMTNTLMKDQPTLAVTFVDNHDTEPGQALQSWVDPWFKPLAYAFILTRQEGYPCVFYGDYYGIPQYNIPSLKSKIDPLLIARRDYAYGTQHDYLDHSDIIGWTREGVTEKPGSGLAALITDGPGGSKWMYVGKQHAGKVFYDLTGNRSDTVTINSDGWGEFKVNGGSVSVWVPRKTT

SEQ ID NO: 18930 - protein, 486 aa, Geobacillus stearothermophilus
AAPFNGTMMQYFEWYLPDDGTLWTKVANEANNLSSLGITALWLPPAYKGTSRSDVGYGVYDLYDLGEFNQKGTVRTKYGTKAQYLQAIQAAHAAGMQVYADVVFDHKGGADGTEWVDAVEVNPSDRNQEISGTYQIQAWTKFDFPGRGNTYSSFKWRWYHFDGVDWDESRKLSRIYKFRGIGKAWDWEVDTENGNYDYLMYADLDMDHPEVVTELKNWGKWYVNTTNIDGFRLDAVKHIKFNFFPDWLSYVRSQTGKPLFTVGEYWSYDINKLHNYITKTNGTMSLFDAPLHNKFYTASKSGGAFDMRTLMTNTLMKDQPTLAVTFVDNHDTEPGQALQSWVDPWFKPLAYAFILTRQEGYPCVFYGDYYGIPQYNIPSLKSKIDPLLIARRDYAYGTQHDYLDHSDIIGWTREGVTEKPGSGLAALITDGPGGSKWMYVGKQHAGKVFYDLTGNRSDTVTINSDGWGEFKVNGGSVSVWVPRKTT

SEQ ID NO: 18931 - protein, 486 aa, Geobacillus stearothermophilus
AAPFNGTMMQYFEWYLPDDGTLWTKVANEANNLSSLGITALWLPPAYKGTSRSDVGYGVYDLYDLGEFNQKGTVRTKYGTKAQYLQAIQAAHAAGMQVYADVVFDHKGGADGTEWVDAVEVNPSDRNQEISGTYQIQAWTKFDFPGRGNTYSSFKWRWYHFDGVDWDESRKLSRIYKFRGIGKAWDWEVDTENGNYDYLMYADLDMDHPEVVTELKNWGKWYVNTTNIDGFRLDAVKHIKFGFFPDWLSYVRSQTGKPLFTVGEYWSYDINKLHNYITKTNGTMSLFDAPLHNKFYTASKSGGAFDMRTLMTNTLMKDQPTLAVTFVDNHDTEPGQALQSWVDPWFKPLAYAFILTRQEGYPCVFYGDYYGIPQYNIPSLKSKIDPLLIARRDYAYGTQHDYLDHSDIIGWTREGVTEKPGSGLAALITDGPGGSKWMYVGKQHAGKVFYDLTGNRSDTVTINSDGWGEFKVNGGSVSVWVPRKTT

SEQ ID NO: 18932 - protein, 486 aa, Geobacillus stearothermophilus
AAPFNGTMMQYFEWYLPDDGTLWTKVANEANNLSSLGITALWLPPAYKGTSRSDVGYGVYDLYDLGEFNQKGTVRTKYGTKAQYLQAIQAAHAAGMQVYADVVFDHKGGADGTEWVDAVEVNPSDRNQEISGTYQIQAWTKFDFPGRGNTYSSFKWRWYHFDGVDWDESRKLSRIYKFRGIGKAWDWEVDTENGNYDYLMYADLDMDHPEVVTELKNWGKWYVNTTNIDGFRLDAVKHIKFEFFPDWLSYVRSQTGKPLFTVGEYWSYDINKLHNYITKTNGTMSLFDAPLHNKFYTASKSGGAFDMRTLMTNTLMKDQPTLAVTFVDNHDTEPGQALQSWVDPWFKPLAYAFILTRQEGYPCVFYGDYYGIPQYNIPSLKSKIDPLLIARRDYAYGTQHDYLDHSDIIGWTREGVTEKPGSGLAALITDGPGGSKWMYVGKQHAGKVFYDLTGNRSDTVTINSDGWGEFKVNGGSVSVWVPRKTT

SEQ ID NO: 18933 - protein, 486 aa, Geobacillus stearothermophilus
AAPFNGTMMQYFEWYLPDDGTLWTKVANEANNLSSLGITALWLPPAYKGTSRSDVGYGVYDLYDLGEFNQKGTVRTKYGTKAQYLQAIQAAHAAGMQVYADVVFDHKGGADGTEWVDAVEVNPSDRNQEISGTYQIQAWTKFDFPGRGNTYSSFKWRWYHFDGVDWDESRKLSRIYKFRGIGKAWDWEVDTENGNYDYLMYADLDMDHPEVVTELKNWGKWYVNTTNIDGFRLDAVKHIKFMFFPDWLSYVRSQTGKPLFTVGEYWSYDINKLHNYITKTNGTMSLFDAPLHNKFYTASKSGGAFDMRTLMTNTLMKDQPTLAVTFVDNHDTEPGQALQSWVDPWFKPLAYAFILTRQEGYPCVFYGDYYGIPQYNIPSLKSKIDPLLIARRDYAYGTQHDYLDHSDIIGWTREGVTEKPGSGLAALITDGPGGSKWMYVGKQHAGKVFYDLTGNRSDTVTINSDGWGEFKVNGGSVSVWVPRKTT

SEQ ID NO: 18934 - protein, 486 aa, Geobacillus stearothermophilus
AAPFNGTMMQYFEWYLPDDGTLWTKVANEANNLSSLGITALWLPPAYKGTSRSDVGYGVYDLYDLGEFNQKGTVRTKYGTKAQYLQAIQAAHAAGMQVYADVVFDHKGGADGTEWVDAVEVNPSDRNQEISGTYQIQAWTKFDFPGRGNTYSSFKWRWYHFDGVDWDESRKLSRIYKFRGIGKAWDWEVDTENGNYDYLMYADLDMDHPEVVTELKNWGKWYVNTTNIDGFRLDAVKHIKFFFFPDWLSYVRSQTGKPLFTVGEYWSYDINKLHNYITKTNGTMSLFDAPLHNKFYTASKSGGAFDMRTLMTNTLMKDQPTLAVTFVDNHDTEPGQALQSWVDPWFKPLAYAFILTRQEGYPCVFYGDYYGIPQYNIPSLKSKIDPLLIARRDYAYGTQHDYLDHSDIIGWTREGVTEKPGSGLAALITDGPGGSKWMYVGKQHAGKVFYDLTGNRSDTVTINSDGWGEFKVNGGSVSVWVPRKTT

SEQ ID NO: 18935 - protein, 486 aa, Geobacillus stearothermophilus
AAPFNGTMMQYFEWYLPDDGTLWTKVANEANNLSSLGITALWLPPAYKGTSRSDVGYGVYDLYDLGEFNQKGTVRTKYGTKAQYLQAIQAAHAAGMQVYADVVFDHKGGADGTEWVDAVEVNPSDRNQEISGTYQIQAWTKFDFPGRGNTYSSFKWRWYHFDGVDWDESRKLSRIYKFRGIGKAWDWEVDTENGNYDYLMYADLDMDHPEVVTELKNWGKWYVNTTNIDGFRLDAVKHIKFAFFPDWLSYVRSQTGKPLFTVGEYWSYDINKLHNYITKTNGTMSLFDAPLHNKFYTASKSGGAFDMRTLMTNTLMKDQPTLAVTFVDNHDTEPGQALQSWVDPWFKPLAYAFILTRQEGYPCVFYGDYYGIPQYNIPSLKSKIDPLLIARRDYAYGTQHDYLDHSDIIGWTREGVTEKPGSGLAALITDGPGGSKWMYVGKQHAGKVFYDLTGNRSDTVTINSDGWGEFKVNGGSVSVWVPRKTT

SEQ ID NO: 18936 - protein, 486 aa, Geobacillus stearothermophilus [sequence omitted]

SEQ ID NO: 18937 - protein, 483 aa, Synthetic construct
VNGTLMQYFEWYTPNDGQHWKRLQNDAEHLSDIGITAVWIPPAYKGLSQSDNGYGPYDLYDLGEFQQKGTVRTKYGTKSELQDAIGSLHSRNVQVYGDVVLNHKAGADYTENVTAVEVNPSNRNQETSGEYNIQAWTGFNFPGRGTTYSNFKWQWFHFDGTDWDQSRSLSRIFKFRGTGKAWDWEVSSENGNYDYLMYADIDYDHPDVVAETKKWGIWYANELSLDGFRIDAAKHIKFSFLRDWVQAVRQATGKEMFTVAEYWQNNAGKLENYLNKTSFNQSVFDVPLHFNLQAASSQGGGYDMRRLLDGTVVSRHPEKAVTFVENHDTQPGQSLESTVQTWFKPLAYAFILTRESGYPQVFYGDMYGTKGTSPKEIPSLKDNIEPILKARKEYAYGPQHDYIDHPDVIGWTREGDSSAAKSGLAALITDGPGGSKRMYAGLKNAGETWYDITGNRSDTVKIGSDGWGEFHVNDGSVSIYVQK

SEQ ID NO: 18938 - protein, 483 aa, Geobacillus stearothermophilus
ANLNGTMMQYFEWYLPDDGTLWTKVANEANNLSSLGITALWLPPAYKGTSRSDVGYGVYDLYDLGEFNQKGTVRTKYGTKAQYLQAIQAAHAAGMQVYADVVFDHKGGADGTEWVDAVEVNPSDRNQEISGTYQIQAWTKFDFPGRGNTYSSFKWRWYHFDGVDWDESRKLSRIYKFRGKAWDWEVDTEFGNYDYLMYADLDMDHPEVVTELKNWGKWYVNTTNIDGFRLDAVKHIKFSFFPDWLSYVRSQTGKPLFTVGEYWSYDINKLHNYITKTNGTMSLFDAPLHNKFYTASKSGGAFDMRTLMTNTLMKDQPTLAVTFVDNHDTEPGQALQSWVDPWFKPLAYAFILTRQEGYPCVFYGDYYGIPQYNIPSLKSKIDPLLIARRDYAYGTQHDYLDHSDIIGWTREGGTEKPGSGLAALITDGPGGSKWMYVGKQHAGKVFYDLTGNRSDTVTINSDGWGEFKVNGGSVSVWVPRKTT

SEQ ID NO: 18939 - protein, 482 aa, Bacillus sp.
HHNGTNGTMMQYFEWHLPNDGNHWNRLRDDASNLRNRGITAIWIPPAWKGTSQNDVGYGAYDLYDLGEFNQKGTVRTKYGTRSQLESAIHALKNNGVQVYGDVVMNHKAGADGTEFVDAVEVDPSNRNQETSGTYQIQAWTKFDFPGRGNTYSSFKWRWYHFDGTDWDESRKLNRIYKFRGKAWDWEVDTENGNYDYLMFADLDMDHPEVVNELRRWGEWYTNTLNLDGFRIDAVKHIKYSFTRDWLTHVRNATGKEMFAVAEFWKNDLGALENYLNKTNWNHSVFDVPLHYNLYNASNSGGNYDMAKLLNGTVVQKHPMHAVTFVDNHDSQPGESLESFVQEWFKPLAYALILTREQGYPSVFYGDYYGIPTHSVPAMKAKIDPILEARQNFAYGTQHDYFDHHNIIGWTREGNTTHPNSGLATIMSDGPGGEKWMYVGQNKAGQVWHDITGNKPGTVTINADGWANFSVNGGSVSIWVKR

SEQ ID NO: 18940 - protein, 482 aa, Bacillus sp.
HHNGTNGTMMQYFEWHLPNDGNHWNRLRDDASNLRNRGITAIWIPPAWKGTSQNDVGYGAYDLYDLGEFNQKGTVRTKYGTRSQLESAIHALKNNGVQVYGDVVMNHKAGADGTEFVDAVEVDPSNRNQETSGTYTIQAWTKFDFPGRGNTYSSFKWRWYHFDGTDWDESRKLNRIYKFTGKAWDWEVDTENGNYDYLMFADLDMDHPEVVNELRRWGEWYTNTLNLDGFRIDAVKHIKYSFTRDWLTHVRNATGKEMFAVAEFWKNDLGALENYLNKTNWNHSVFDVPLHYNLYNASNSGGNYDMAKLLNGTVVQKHPMHAVTFVDNHDSQPGESLESFVQEWFKPLAYALILTREQGYPSVFYGDYYGIPTHSVPAMKAKIDPILEARQNFAYGTQHDYFDHHNIIGWTREGNTTHPNSGLATIMSDGPGGEKWMYVGQNKAGQVWHDITGNKPGTVTINADGWANFSVNGGSVSIWVKR

SEQ ID NO: 18941 - protein, 484 aa, Bacillus sp.
HHNGTNGTMMQYFEWHLPNDGNHWNRLRDDASNLRNRGITAIWIPPAWKGTSQNDVGYGAYDLYDLGEFNQKGTVRTKYGTRSQLESAIHALKNNGVQVYGDVVMNHKAGADGTEFVDAVEVDPSNRNQETSGTYQIQAWTKFDFPGRGNTYSSFKWRWYHFDGTDWDESRKLNRIYKFRSTGKAWDWEVDTENGNYDYLMFADLDMDHPEVVNELRRWGEWYTNTLNLDGFRIDAVKHIKYSFTRDWLTHVRNATGKEMFAVAEFWKNDLGALENYLNKTNWNHSVFDVPLHYNLYNASNSGGNYDMAKLLNGTVVQKHPMHAVTFVDNHDSQPGESLESFVQEWFKPLAYALILTREQGYPSVFYGDYYGIPTHSVPAMKAKIDPILEARQNFAYGTQHDYFDHHNIIGWTREGNTTHPNSGLATIMSDGPGGEKWMYVGQNKAGQVWHDITGNKPGTVTINADGWANFSVNGGSVSIWVKR

SEQ ID NO: 18942 - protein, 484 aa, Geobacillus stearothermophilus
AAPFNGTMMQYFEWYLPDDGTLWTKVANEANNLSSLGITALWLPPAYKGTSRSDVGYGVYDLYDLGEFNQKGTVRTKYGTKAQYLQAIQAAHAAGMQVYADVVFDHKGGADGTEWVDAVEVNPSDRNQEISGTYQIQAWTKFDFPGRGNTYSSFKWRWYHFDGVDWDESRKLSRIYKFRGIGKAWDWEVDTENGNYDYLMYADLDMDHPEVVTELKNWGKWYVNTTNIDGFRLDAVKHIKFSFFPDWLSYVRSQTGKPLFTVGEYWSADINKLHNYITKTNGTMSLFDAPLHFKFYTASKSGGAFDMRTLMTNTLMKDQPTLAVTFVDNHDTEPGQALQSWVDPWFKPLAYAFILTRQEGYPCVFYGDYYGIPQYNIPSLKSKIDPLLIARRDYAYGTQHDYLDHSDIIGWTREGVTEKPGSGLAALITDGPGGSKWMYVGKQHAGKVFYDLTGNRSDTVTINSDGWGEFKVNGGSVSVWVPRK

SEQ ID NO: 18943 - protein, 484 aa, Geobacillus stearothermophilus
AAPFNGTMMQYFEWYLPDDGTLWTKVANEANNLSSLGITALWLPPAYKGTSRSDVGYGVYDLYDLGEFNQKGTVRTKYGTKAQYLQAIQAAHAAGMQVYADVVFDHKGGADGTEWVDAVEVNPSDRNQEISGTYQIQAWTKFDFPGRGNTYSSFKWRWYHFDGVDWDESRKLSRIYKFRGIGKAWDWEVDTENGNYDYLMYADLDMDHPEVVTELKNWGKWYVNTTNIDGFRLDAVKHIKFSFFPDWLSYVRSQTGKPLFTVGEYWSADINKLHNYITKTNGTMSLFDAPLHWKFYTASKSGGAFDMRTLMTNTLMKDQPTLAVTFVDNHDTEPGQALQSWVDPWFKPLAYAFILTRQEGYPCVFYGDYYGIPQYNIPSLKSKIDPLLIARRDYAYGTQHDYLDHSDIIGWTREGVTEKPGSGLAALITDGPGGSKWMYVGKQHAGKVFYDLTGNRSDTVTINSDGWGEFKVNGGSVSVWVPRK

SEQ ID NO: 18944 - protein, 484 aa, Geobacillus stearothermophilus
AAPFNGTMMQYFEWYLPDDGTLWTKVANEANNLSSLGITALWLPPAYKGTSRSDVGYGVYDLYDLGEFNQKGTVRTKYGTKAQYLQAIQAAHAAGMQVYADVVFDHKGGADGTEWVDAVEVNPSDRNQEISGTYQIQAWTKFDFPGRGNTYSSFKWRWYHFDGVDWDESRKLSRIYKFRGIGKAWDWEVDTENGNYDYLMYADLDMDHPEVVTELKNWGKWYVNTTNIDGFRLDAVKHIKFSFFPDWLSYVRSQTGKPLFTVGEYWSPDINKLHNYITKTNGTMSLFDAPLHFKFYTASKSGGAFDMRTLMTNTLMKDQPTLAVTFVDNHDTEPGQALQSWVDPWFKPLAYAFILTRQEGYPCVFYGDYYGIPQYNIPSLKSKIDPLLIARRDYAYGTQHDYLDHSDIIGWTREGVTEKPGSGLAALITDGPGGSKWMYVGKQHAGKVFYDLTGNRSDTVTINSDGWGEFKVNGGSVSVWVPRK

SEQ ID NO: 18945 - protein, 484 aa, Geobacillus stearothermophilus
AAPFNGTMMQYFEWYLPDDGTLWTKVANEANNLSSLGITALWLPPAYKGTSRSDVGYGVYDLYDLGEFNQKGTVRTKYGTKAQYLQAIQAAHAAGMQVYADVVFDHKGGADGTEWVDAVEVNPSDRNQEISGTYQIQAWTKFDFPGRGNTYSSFKWRWYHFDGVDWDESRKLSRIYKFRGIGKAWDWEVDTENGNYDYLMYADLDMDHPEVVTELKNWGKWYVNTTNIDGFRLDAVKHIKFSFFPDWLSYVRSQTGKPLFTVGEYWSLDINKLHNYITKTNGTMSLFDAPLHQKFYTASKSGGAFDMRTLMTNTLMKDQPTLAVTFVDNHDTEPGQALQSWVDPWFKPLAYAFILTRQEGYPCVFYGDYYGIPQYNIPSLKSKIDPLLIARRDYAYGTQHDYLDHSDIIGWTREGVTEKPGSGLAALITDGPGGSKWMYVGKQHAGKVFYDLTGNRSDTVTINSDGWGEFKVNGGSVSVWVPRK

SEQ ID NO: 18946 - protein, 484 aa, Geobacillus stearothermophilus
AAPFNGTMMQYFEWYLPDDGTLWTKVANEANNLSSLGITALWLPPAYKGTSRSDVGYGVYDLYDLGEFNQKGTVRTKYGTKAQYLQAIQAAHAAGMQVYADVVFDHKGGADGTEWVDAVEVNPSDRNQEISGTYQIQAWTKFDFPGRGNTYSSFKWRWYHFDGVDWDESRKLSRIYKFRGIGKAWDWEVDTENGNYDYLMYADLDMDHPEVVTELKNWGKWYVNTTNIDGFRLDAVKHIKFSFFPDWLSYVRSQTGKPLFTVGEYWSMDINKLHNYITKTNGTMSLFDAPLHHKFYTASKSGGAFDMRTLMTNTLMKDQPTLAVTFVDNHDTEPGQALQSWVDPWFKPLAYAFILTRQEGYPCVFYGDYYGIPQYNIPSLKSKIDPLLIARRDYAYGTQHDYLDHSDIIGWTREGVTEKPGSGLAALITDGPGGSKWMYVGKQHAGKVFYDLTGNRSDTVTINSDGWGEFKVNGGSVSVWVPRK

SEQ ID NO: 18947 - protein, 484 aa, Geobacillus stearothermophilus
AAPFNGTMMQYFEWYLPDDGTLWTKVANEANNLSSLGITALWLPPAYKGTSRSDVGYGVYDLYDLGEFNQKGTVRTKYGTKAQYLQAIQAAHAAGMQVYADVVFDHKGGADGTEWVDAVEVNPSDRNQEISGTYQIQAWTKFDFPGRGNTYSSFKWRWYHFDGVDWDESRKLSRIYKFRGIGKAWDWEVDTENGNYDYLMYADLDMDHPEVVTELKNWGKWYVNTTNIDGFRLDAVKHIKFSFFPDWLSYVRSQTGKPLFTVGEYWSTDINKLHNYITKTNGTMSLFDAPLHQKFYTASKSGGAFDMRTLMTNTLMKDQPTLAVTFVDNHDTEPGQALQSWVDPWFKPLAYAFILTRQEGYPCVFYGDYYGIPQYNIPSLKSKIDPLLIARRDYAYGTQHDYLDHSDIIGWTREGVTEKPGSGLAALITDGPGGSKWMYVGKQHAGKVFYDLTGNRSDTVTINSDGWGEFKVNGGSVSVWVPRK

SEQ ID NO: 18948 - protein, 484 aa, Geobacillus stearothermophilus
AAPFNGTMMQYFEWYLPDDGTLWTKVANEANNLSSLGITALWLPPAYKGTSRSDVGYGVYDLYDLGEFNQKGTVRTKYGTKAQYLQAIQAAHAAGMQVYADVVFDHKGGADGTEWVDAVEVNPSDRNQEISGTYQIQAWTKFDFPGRGNTYSSFKWRWYHFDGVDWDESRKLSRIYKFRGIGKAWDWEVDTENGNYDYLMYADLDMDHPEVVTELKNWGKWYVNTTNIDGFRLDAVKHIKFSFFPDWLSYVRSQTGKPLFTVGEYWSSDINKLHNYITKTNGTMSLFDAPLHWKFYTASKSGGAFDMRTLMTNTLMKDQPTLAVTFVDNHDTEPGQALQSWVDPWFKPLAYAFILTRQEGYPCVFYGDYYGIPQYNIPSLKSKIDPLLIARRDYAYGTQHDYLDHSDIIGWTREGVTEKPGSGLAALITDGPGGSKWMYVGKQHAGKVFYDLTGNRSDTVTINSDGWGEFKVNGGSVSVWVPRK

SEQ ID NO: 18949 - protein, 484 aa, Geobacillus stearothermophilus
AAPFNGTMMQYFEWYLPDDGTLWTKVANEANNLSSLGITALWLPPAYKGTSRSDVGYGVYDLYDLGEFNQKGTVRTKYGTKAQYLQAIQAAHAAGMQVYADVVFDHKGGADGTEWVDAVEVNPSDRNQEISGTYQIQAWTKFDFPGRGNTYSSFKWRWYHFDGVDWDESRKLSRIYKFRGIGKAWDWEVDTENGNYDYLMYADLDMDHPEVVTELKNWGKWYVNTTNIDGFRLDAVKHIKFSFFPDWLSYVRSQTGKPLFTVGEYWSVDINKLHNYITKTNGTMSLFDAPLHQKFYTASKSGGAFDMRTLMTNTLMKDQPTLAVTFVDNHDTEPGQALQSWVDPWFKPLAYAFILTRQEGYPCVFYGDYYGIPQYNIPSLKSKIDPLLIARRDYAYGTQHDYLDHSDIIGWTREGVTEKPGSGLAALITDGPGGSKWMYVGKQHAGKVFYDLTGNRSDTVTINSDGWGEFKVNGGSVSVWVPRK

SEQ ID NO: 18950 - protein, 484 aa, Geobacillus stearothermophilus
AAPFNGTMMQYFEWYLPDDGTLWTKVANEANNLSSLGITALWLPPAYKGTSRSDVGYGVYDLYDLGEFNQKGTVRTKYGTKAQYLQAIQAAHAAGMQVYADVVFDHKGGADGTEWVDAVEVNPSDRNQEISGTYQIQAWTKFDFPGRGNTYSSFKWRWYHFDGVDWDESRKLSRIYKFRGIGKAWDWEVDTENGNYDYLMYADLDMDHPEVVTELKNWGKWYVNTTNIDGFRLDAVKHIKFSFFPDWLSYVRSQTGKPLFTVGEYWSLDINKLHNYITKTNGTMSLFDAPLHFKFYTASKSGGAFDMRTLMTNTLMKDQPTLAVTFVDNHDTEPGQALQSWVDPWFKPLAYAFILTRQEGYPCVFYGDYYGIPQYNIPSLKSKIDPLLIARRDYAYGTQHDYLDHSDIIGWTREGVTEKPGSGLAALITDGPGGSKWMYVGKQHAGKVFYDLTGNRSDTVTINSDGWGEFKVNGGSVSVWVPRK

SEQ ID NO: 18951 - protein, 484 aa, Geobacillus stearothermophilus
AAPFNGTMMQYFEWYLPDDGTLWTKVANEANNLSSLGITALWLPPAYKGTSRSDVGYGVYDLYDLGEFNQKGTVRTKYGTKAQYLQAIQAAHAAGMQVYADVVFDHKGGADGTEWVDAVEVNPSDRNQEISGTYQIQAWTKFDFPGRGNTYSSFKWRWYHFDGVDWDESRKLSRIYKFRGIGKAWDWEVDTENGNYDYLMYADLDMDHPEVVTELKNWGKWYVNTTNIDGFRLDAVKHIKFSFFPDWLSYVRSQTGKPLFTVGEYWSSDINKLHNYITKTNGTMSLFDAPLHQKFYTASKSGGAFDMRTLMTNTLMKDQPTLAVTFVDNHDTEPGQALQSWVDPWFKPLAYAFILTRQEGYPCVFYGDYYGIPQYNIPSLKSKIDPLLIARRDYAYGTQHDYLDHSDIIGWTREGVTEKPGSGLAALITDGPGGSKWMYVGKQHAGKVFYDLTGNRSDTVTINSDGWGEFKVNGGSVSVWVPRK

SEQ ID NO: 18952 - protein, 484 aa, Geobacillus stearothermophilus
AAPFNGTMMQYFEWYLPDDGTLWTKVANEANNLSSLGITALWLPPAYKGTSRSDVGYGVYDLYDLGEFNQKGTVRTKYGTKAQYLQAIQAAHAAGMQVYADVVFDHKGGADGTEWVDAVEVNPSDRNQEISGTYQIQAWTKFDFPGRGNTYSSFKWRWYHFDGVDWDESRKLSRIYKFRGIGKAWDWEVDTENGNYDYLMYADLDMDHPEVVTELKNWGKWYVNTTNIDGFRLDAVKHIKFSFFPDWLSYVRSQTGKPLFTVGEYWSADINKLHNYITKTNGTMSLFDAPLHHKFYTASKSGGAFDMRTLMTNTLMKDQPTLAVTFVDNHDTEPGQALQSWVDPWFKPLAYAFILTRQEGYPCVFYGDYYGIPQYNIPSLKSKIDPLLIARRDYAYGTQHDYLDHSDIIGWTREGVTEKPGSGLAALITDGPGGSKWMYVGKQHAGKVFYDLTGNRSDTVTINSDGWGEFKVNGGSVSVWVPRK

SEQ ID NO: 18953 - protein, 484 aa, Geobacillus stearothermophilus
AAPFNGTMMQYFEWYLPDDGTLWTKVANEANNLSSLGITALWLPPAYKGTSRSDVGYGVYDLYDLGEFNQKGTVRTKYGTKAQYLQAIQAAHAAGMQVYADVVFDHKGGADGTEWVDAVEVNPSDRNQEISGTYQIQAWTKFDFPGRGNTYSSFKWRWYHFDGVDWDESRKLSRIYKFRGIGKAWDWEVDTENGNYDYLMYADLDMDHPEVVTELKNWGKWYVNTTNIDGFRLDAVKHIKFSFFPDWLSYVRSQTGKPLFTVGEYWSVDINKLHNYITKTNGTMSLFDAPLHAKFYTASKSGGAFDMRTLMTNTLMKDQPTLAVTFVDNHDTEPGQALQSWVDPWFKPLAYAFILTRQEGYPCVFYGDYYGIPQYNIPSLKSKIDPLLIARRDYAYGTQHDYLDHSDIIGWTREGVTEKPGSGLAALITDGPGGSKWMYVGKQHAGKVFYDLTGNRSDTVTINSDGWGEFKVNGGSVSVWVPRK

SEQ ID NO: 18954 - protein, 484 aa, Geobacillus stearothermophilus
AAPFNGTMMQYFEWYLPDDGTLWTKVANEANNLSSLGITALWLPPAYKGTSRSDVGYGVYDLYDLGEFNQKGTVRTKYGTKAQYLQAIQAAHAAGMQVYADVVFDHKGGADGTEWVDAVEVNPSDRNQEISGTYQIQAWTKFDFPGRGNTYSSFKWRWYHFDGVDWDESRKLSRIYKFRGIGKAWDWEVDTENGNYDYLMYADLDMDHPEVVTELKNWGKWYVNTTNIDGFRLDAVKHIKFSFFPDWLSYVRSQTGKPLFTVGEYWSLDINKLHNYITKTNGTMSLFDAPLHHKFYTASKSGGAFDMRTLMTNTLMKDQPTLAVTFVDNHDTEPGQALQSWVDPWFKPLAYAFILTRQEGYPCVFYGDYYGIPQYNIPSLKSKIDPLLIARRDYAYGTQHDYLDHSDIIGWTREGVTEKPGSGLAALITDGPGGSKWMYVGKQHAGKVFYDLTGNRSDTVTINSDGWGEFKVNGGSVSVWVPRK

SEQ ID NO: 18955 - protein, 484 aa, Geobacillus stearothermophilus
AAPFNGTMMQYFEWYLPDDGTLWTKVANEANNLSSLGITALWLPPAYKGTSRSDVGYGVYDLYDLGEFNQKGTVRTKYGTKAQYLQAIQAAHAAGMQVYADVVFDHKGGADGTEWVDAVEVNPSDRNQEISGTYQIQAWTKFDFPGRGNTYSSFKWRWYHFDGVDWDESRKLSRIYKFRGIGKAWDWEVDTENGNYDYLMYADLDMDHPEVVTELKNWGKWYVNTTNIDGFRLDAVKHIKFSFFPDWLSYVRSQTGKPLFTVGEYWSLDINKLHNYITKTNGTMSLFDAPLHAKFYTASKSGGAFDMRTLMTNTLMKDQPTLAVTFVDNHDTEPGQALQSWVDPWFKPLAYAFILTRQEGYPCVFYGDYYGIPQYNIPSLKSKIDPLLIARRDYAYGTQHDYLDHSDIIGWTREGVTEKPGSGLAALITDGPGGSKWMYVGKQHAGKVFYDLTGNRSDTVTINSDGWGEFKVNGGSVSVWVPRK

SEQ ID NO: 18956 - protein, 484 aa, Geobacillus stearothermophilus
AAPFNGTMMQYFEWYLPDDGTLWTKVANEANNLSSLGITALWLPPAYKGTSRSDVGYGVYDLYDLGEFNQKGTVRTKYGTKAQYLQAIQAAHAAGMQVYADVVFDHKGGADGTEWVDAVEVNPSDRNQEISGTYQIQAWTKFDFPGRGNTYSSFKWRWYHFDGVDWDESRKLSRIYKFRGIGKAWDWEVDTENGNYDYLMYADLDMDHPEVVTELKNWGKWYVNTTNIDGFRLDAVKHIKFSFFPDWLSYVRSQTGKPLFTVGEYWSIDINKLHNYITKTNGTMSLFDAPLHAKFYTASKSGGAFDMRTLMTNTLMKDQPTLAVTFVDNHDTEPGQALQSWVDPWFKPLAYAFILTRQEGYPCVFYGDYYGIPQYNIPSLKSKIDPLLIARRDYAYGTQHDYLDHSDIIGWTREGVTEKPGSGLAALITDGPGGSKWMYVGKQHAGKVFYDLTGNRSDTVTINSDGWGEFKVNGGSVSVWVPRK

SEQ ID NO: 18957 - protein, 484 aa, Geobacillus stearothermophilus
AAPFNGTMMQYFEWYLPDDGTLWTKVANEANNLSSLGITALWLPPAYKGTSRSDVGYGVYDLYDLGEFNQKGTVRTKYGTKAQYLQAIQAAHAAGMQVYADVVFDHKGGADGTEWVDAVEVNPSDRNQEISGTYQIQAWTKFDFPGRGNTYSSFKWRWYHFDGVDWDESRKLSRIYKFRGIGKAWDWEVDTENGNYDYLMYADLDMDHPEVVTELKNWGKWYVNTTNIDGFRLDAVKHIKFSFFPDWLSYVRSQTGKPLFTVGEYWSIDINKLHNYITKTNGTMSLFDAPLHHKFYTASKSGGAFDMRTLMTNTLMKDQPTLAVTFVDNHDTEPGQALQSWVDPWFKPLAYAFILTRQEGYPCVFYGDYYGIPQYNIPSLKSKIDPLLIARRDYAYGTQHDYLDHSDIIGWTREGVTEKPGSGLAALITDGPGGSKWMYVGKQHAGKVFYDLTGNRSDTVTINSDGWGEFKVNGGSVSVWVPRK

SEQ ID NO: 18958 - protein, 484 aa, Geobacillus stearothermophilus
AAPFNGTMMQYFEWYLPDDGTLWTKVANEANNLSSLGITALWLPPAYKGTSRSDVGYGVYDLYDLGEFNQKGTVRTKYGTKAQYLQAIQAAHAAGMQVYADVVFDHKGGADGTEWVDAVEVNPSDRNQEISGTYQIQAWTKFDFPGRGNTYSSFKWRWYHFDGVDWDESRKLSRIYKFRGIGKAWDWEVDTENGNYDYLMYADLDMDHPEVVTELKNWGKWYVNTTNIDGFRLDAVKHIKFSFFPDWLSYVRSQTGKPLFTVGEYWSPDINKLHNYITKTNGTMSLFDAPLHAKFYTASKSGGAFDMRTLMTNTLMKDQPTLAVTFVDNHDTEPGQALQSWVDPWFKPLAYAFILTRQEGYPCVFYGDYYGIPQYNIPSLKSKIDPLLIARRDYAYGTQHDYLDHSDIIGWTREGVTEKPGSGLAALITDGPGGSKWMYVGKQHAGKVFYDLTGNRSDTVTINSDGWGEFKVNGGSVSVWVPRK

SEQ ID NO: 18959 - protein, 484 aa, Geobacillus stearothermophilus
AAPFNGTMMQYFEWYLPDDGTLWTKVANEANNLSSLGITALWLPPAYKGTSRSDVGYGVYDLYDLGEFNQKGTVRTKYGTKAQYLQAIQAAHAAGMQVYADVVFDHKGGADGTEWVDAVEVNPSDRNQEISGTYQIQAWTKFDFPGRGNTYSSFKWRWYHFDGVDWDESRKLSRIYKFRGIGKAWDWEVDTENGNYDYLMYADLDMDHPEVVTELKNWGKWYVNTTNIDGFRLDAVKHIKFSFFPDWLSYVRSQTGKPLFTVGEYWSIDINKLHNYITKTNGTMSLFDAPLHWKFYTASKSGGAFDMRTLMTNTLMKDQPTLAVTFVDNHDTEPGQALQSWVDPWFKPLAYAFILTRQEGYPCVFYGDYYGIPQYNIPSLKSKIDPLLIARRDYAYGTQHDYLDHSDIIGWTREGVTEKPGSGLAALITDGPGGSKWMYVGKQHAGKVFYDLTGNRSDTVTINSDGWGEFKVNGGSVSVWVPRK

SEQ ID NO: 18960 - protein, 484 aa, Geobacillus stearothermophilus
AAPFNGTMMQYFEWYLPDDGTLWTKVANEANNLSSLGITALWLPPAYKGTSRSDVGYGVYDLYDLGEFNQKGTVRTKYGTKAQYLQAIQAAHAAGMQVYADVVFDHKGGADGTEWVDAVEVNPSDRNQEISGTYQIQAWTKFDFPGRGNTYSSFKWRWYHFDGVDWDESRKLSRIYKFRGIGKAWDWEVDTENGNYDYLMYADLDMDHPEVVTELKNWGKWYVNTTNIDGFRLDAVKHIKFSFFPDWLSYVRSQTGKPLFTVGEYWSSDINKLHNYITKTNGTMSLFDAPLHHKFYTASKSGGAFDMRTLMTNTLMKDQPTLAVTFVDNHDTEPGQALQSWVDPWFKPLAYAFILTRQEGYPCVFYGDYYGIPQYNIPSLKSKIDPLLIARRDYAYGTQHDYLDHSDIIGWTREGVTEKPGSGLAALITDGPGGSKWMYVGKQHAGKVFYDLTGNRSDTVTINSDGWGEFKVNGGSVSVWVPRK

SEQ ID NO: 18961 - protein, 484 aa, Geobacillus stearothermophilus
AAPFNGTMMQYFEWYLPDDGTLWTKVANEANNLSSLGITALWLPPAYKGTSRSDVGYGVYDLYDLGEFNQKGTVRTKYGTKAQYLQAIQAAHAAGMQVYADVVFDHKGGADGTEWVDAVEVNPSDRNQEISGTYQIQAWTKFDFPGRGNTYSSFKWRWYHFDGVDWDESRKLSRIYKFRGIGKAWDWEVDTENGNYDYLMYADLDMDHPEVVTELKNWGKWYVNTTNIDGFRLDAVKHIKFSFFPDWLSYVRSQTGKPLFTVGEYWSIDINKLHNYITKTNGTMSLFDAPLHQKFYTASKSGGAFDMRTLMTNTLMKDQPTLAVTFVDNHDTEPGQALQSWVDPWFKPLAYAFILTRQEGYPCVFYGDYYGIPQYNIPSLKSKIDPLLIARRDYAYGTQHDYLDHSDIIGWTREGVTEKPGSGLAALITDGPGGSKWMYVGKQHAGKVFYDLTGNRSDTVTINSDGWGEFKVNGGSVSVWVPRK

SEQ ID NO: 18962 - protein, 484 aa, Geobacillus stearothermophilus
AAPFNGTMMQYFEWYLPDDGTLWTKVANEANNLSSLGITALWLPPAYKGTSRSDVGYGVYDLYDLGEFNQKGTVRTKYGTKAQYLQAIQAAHAAGMQVYADVVFDHKGGADGTEWVDAVEVNPSDRNQEISGTYQIQAWTKFDFPGRGNTYSSFKWRWYHFDGVDWDESRKLSRIYKFRGIGKAWDWEVDTENGNYDYLMYADLDMDHPEVVTELKNWGKWYVNTTNIDGFRLDAVKHIKFSFFPDWLSYVRSQTGKPLFTVGEYWSSDINKLHNYITKTNGTMSLFDAPLHFKFYTASKSGGAFDMRTLMTNTLMKDQPTLAVTFVDNHDTEPGQALQSWVDPWFKPLAYAFILTRQEGYPCVFYGDYYGIPQYNIPSLKSKIDPLLIARRDYAYGTQHDYLDHSDIIGWTREGVTEKPGSGLAALITDGPGGSKWMYVGKQHAGKVFYDLTGNRSDTVTINSDGWGEFKVNGGSVSVWVPRK

SEQ ID NO: 18963 - protein, 484 aa, Geobacillus stearothermophilus
AAPFNGTMMQYFEWYLPDDGTLWTKVANEANNLSSLGITALWLPPAYKGTSRSDVGYGVYDLYDLGEFNQKGTVRTKYGTKAQYLQAIQAAHAAGMQVYADVVFDHKGGADGTEWVDAVEVNPSDRNQEISGTYQIQAWTKFDFPGRGNTYSSFKWRWYHFDGVDWDESRKLSRIYKFRGIGKAWDWEVDTENGNYDYLMYADLDMDHPEVVTELKNWGKWYVNTTNIDGFRLDAVKHIKFSFFPDWLSYVRSQTGKPLFTVGEYWSVDINKLHNYITKTNGTMSLFDAPLHWKFYTASKSGGAFDMRTLMTNTLMKDQPTLAVTFVDNHDTEPGQALQSWVDPWFKPLAYAFILTRQEGYPCVFYGDYYGIPQYNIPSLKSKIDPLLIARRDYAYGTQHDYLDHSDIIGWTREGVTEKPGSGLAALITDGPGGSKWMYVGKQHAGKVFYDLTGNRSDTVTINSDGWGEFKVNGGSVSVWVPRK

SEQ ID NO: 18964 - protein, 484 aa, Geobacillus stearothermophilus
AAPFNGTMMQYFEWYLPDDGTLWTKVANEANNLSSLGITALWLPPAYKGTSRSDVGYGVYDLYDLGEFNQKGTVRTKYGTKAQYLQAIQAAHAAGMQVYADVVFDHKGGADGTEWVDAVEVNPSDRNQEISGTYQIQAWTKFDFPGRGNTYSSFKWRWYHFDGVDWDESRKLSRIYKFRGIGKAWDWEVDTENGNYDYLMYADLDMDHPEVVTELKNWGKWYVNTTNIDGFRLDAVKHIKFSFFPDWLSYVRSQTGKPLFTVGEYWSIDINKLHNYITKTNGTMSLFDAPLHFKFYTASKSGGAFDMRTLMTNTLMKDQPTLAVTFVDNHDTEPGQALQSWVDPWFKPLAYAFILTRQEGYPCVFYGDYYGIPQYNIPSLKSKIDPLLIARRDYAYGTQHDYLDHSDIIGWTREGVTEKPGSGLAALITDGPGGSKWMYVGKQHAGKVFYDLTGNRSDTVTINSDGWGEFKVNGGSVSVWVPRK

SEQ ID NO: 18965 - protein, 484 aa, Geobacillus stearothermophilus
AAPFNGTMMQYFEWYLPDDGTLWTKVANEANNLSSLGITALWLPPAYKGTSRSDVGYGVYDLYDLGEFNQKGTVRTKYGTKAQYLQAIQAAHAAGMQVYADVVFDHKGGADGTEWVDAVEVNPSDRNQEISGTYQIQAWTKFDFPGRGNTYSSFKWRWYHFDGVDWDESRKLSRIYKFRGIGKAWDWEVDTENGNYDYLMYADLDMDHPEVVTELKNWGKWYVNTTNIDGFRLDAVKHIKFSFFPDWLSYVRSQTGKPLFTVGEYWSMDINKLHNYITKTNGTMSLFDAPLHAKFYTASKSGGAFDMRTLMTNTLMKDQPTLAVTFVDNHDTEPGQALQSWVDPWFKPLAYAFILTRQEGYPCVFYGDYYGIPQYNIPSLKSKIDPLLIARRDYAYGTQHDYLDHSDIIGWTREGVTEKPGSGLAALITDGPGGSKWMYVGKQHAGKVFYDLTGNRSDTVTINSDGWGEFKVNGGSVSVWVPRK

SEQ ID NO: 18966 - protein, 484 aa, Geobacillus stearothermophilus
AAPFNGTMMQYFEWYLPDDGTLWTKVANEANNLSSLGITALWLPPAYKGTSRSDVGYGVYDLYDLGEFNQKGTVRTKYGTKAQYLQAIQAAHAAGMQVYADVVFDHKGGADGTEWVDAVEVNPSDRNQEISGTYQIQAWTKFDFPGRGNTYSSFKWRWYHFDGVDWDESRKLSRIYKFRGIGKAWDWEVDTENGNYDYLMYADLDMDHPEVVTELKNWGKWYVNTTNIDGFRLDAVKHIKFSFFPDWLSYVRSQTGKPLFTVGEYWSPDINKLHNYITKTNGTMSLFDAPLHWKFYTASKSGGAFDMRTLMTNTLMKDQPTLAVTFVDNHDTEPGQALQSWVDPWFKPLAYAFILTRQEGYPCVFYGDYYGIPQYNIPSLKSKIDPLLIARRDYAYGTQHDYLDHSDIIGWTREGVTEKPGSGLAALITDGPGGSKWMYVGKQHAGKVFYDLTGNRSDTVTINSDGWGEFKVNGGSVSVWVPRK

SEQ ID NO: 18967 - protein, 484 aa, Geobacillus stearothermophilus
AAPFNGTMMQYFEWYLPDDGTLWTKVANEANNLSSLGITALWLPPAYKGTSRSDVGYGVYDLYDLGEFNQKGTVRTKYGTKAQYLQAIQAAHAAGMQVYADVVFDHKGGADGTEWVDAVEVNPSDRNQEISGTYQIQAWTKFDFPGRGNTYSSFKWRWYHFDGVDWDESRKLSRIYKFRGIGKAWDWEVDTENGNYDYLMYADLDMDHPEVVTELKNWGKWYVNTTNIDGFRLDAVKHIKFSFFPDWLSYVRSQTGKPLFTVGEYWSADINKLHNYITKTNGTMSLFDAPLHAKFYTASKSGGAFDMRTLMTNTLMKDQPTLAVTFVDNHDTEPGQALQSWVDPWFKPLAYAFILTRQEGYPCVFYGDYYGIPQYNIPSLKSKIDPLLIARRDYAYGTQHDYLDHSDIIGWTREGVTEKPGSGLAALITDGPGGSKWMYVGKQHAGKVFYDLTGNRSDTVTINSDGWGEFKVNGGSVSVWVPRK

SEQ ID NO: 18968 - protein, 484 aa, Geobacillus stearothermophilus
AAPFNGTMMQYFEWYLPDDGTLWTKVANEANNLSSLGITALWLPPAYKGTSRSDVGYGVYDLYDLGEFNQKGTVRTKYGTKAQYLQAIQAAHAAGMQVYADVVFDHKGGADGTEWVDAVEVNPSDRNQEISGTYQIQAWTKFDFPGRGNTYSSFKWRWYHFDGVDWDESRKLSRIYKFRGIGKAWDWEVDTENGNYDYLMYADLDMDHPEVVTELKNWGKWYVNTTNIDGFRLDAVKHIKFSFFPDWLSYVRSQTGKPLFTVGEYWSMDINKLHNYITKTNGTMSLFDAPLHWKFYTASKSGGAFDMRTLMTNTLMKDQPTLAVTFVDNHDTEPGQALQSWVDPWFKPLAYAFILTRQEGYPCVFYGDYYGIPQYNIPSLKSKIDPLLIARRDYAYGTQHDYLDHSDIIGWTREGVTEKPGSGLAALITDGPGGSKWMYVGKQHAGKVFYDLTGNRSDTVTINSDGWGEFKVNGGSVSVWVPRK

SEQ ID NO: 18969 - protein, 484 aa, Geobacillus stearothermophilus
AAPFNGTMMQYFEWYLPDDGTLWTKVANEANNLSSLGITALWLPPAYKGTSRSDVGYGVYDLYDLGEFNQKGTVRTKYGTKAQYLQAIQAAHAAGMQVYADVVFDHKGGADGTEWVDAVEVNPSDRNQEISGTYQIQAWTKFDFPGRGNTYSSFKWRWYHFDGVDWDESRKLSRIYKFRGIGKAWDWEVDTENGNYDYLMYADLDMDHPEVVTELKNWGKWYVNTTNIDGFRLDAVKHIKFSFFPDWLSYVRSQTGKPLFTVGEYWSSDINKLHNYITKTNGTMSLFDAPLHAKFYTASKSGGAFDMRTLMTNTLMKDQPTLAVTFVDNHDTEPGQALQSWVDPWFKPLAYAFILTRQEGYPCVFYGDYYGIPQYNIPSLKSKIDPLLIARRDYAYGTQHDYLDHSDIIGWTREGVTEKPGSGLAALITDGPGGSKWMYVGKQHAGKVFYDLTGNRSDTVTINSDGWGEFKVNGGSVSVWVPRK

SEQ ID NO: 18970 - protein, 484 aa, Geobacillus stearothermophilus
AAPFNGTMMQYFEWYLPDDGTLWTKVANEANNLSSLGITALWLPPAYKGTSRSDVGYGVYDLYDLGEFNQKGTVRTKYGTKAQYLQAIQAAHAAGMQVYADVVFDHKGGADGTEWVDAVEVNPSDRNQEISGTYQIQAWTKFDFPGRGNTYSSFKWRWYHFDGVDWDESRKLSRIYKFRGIGKAWDWEVDTENGNYDYLMYADLDMDHPEVVTELKNWGKWYVNTTNIDGFRLDAVKHIKFSFFPDWLSYVRSQTGKPLFTVGEYWSTDINKLHNYITKTNGTMSLFDAPLHFKFYTASKSGGAFDMRTLMTNTLMKDQPTLAVTFVDNHDTEPGQALQSWVDPWFKPLAYAFILTRQEGYPCVFYGDYYGIPQYNIPSLKSKIDPLLIARRDYAYGTQHDYLDHSDIIGWTREGVTEKPGSGLAALITDGPGGSKWMYVGKQHAGKVFYDLTGNRSDTVTINSDGWGEFKVNGGSVSVWVPRK

SEQ ID NO: 18971 - protein, 484 aa, Geobacillus stearothermophilus
AAPFNGTMMQYFEWYLPDDGTLWTKVANEANNLSSLGITALWLPPAYKGTSRSDVGYGVYDLYDLGEFNQKGTVRTKYGTKAQYLQAIQAAHAAGMQVYADVVFDHKGGADGTEWVDAVEVNPSDRNQEISGTYQIQAWTKFDFPGRGNTYSSFKWRWYHFDGVDWDESRKLSRIYKFRGIGKAWDWEVDTENGNYDYLMYADLDMDHPEVVTELKNWGKWYVNTTNIDGFRLDAVKHIKFSFFPDWLSYVRSQTGKPLFTVGEYWSTDINKLHNYITKTNGTMSLFDAPLHHKFYTASKSGGAFDMRTLMTNTLMKDQPTLAVTFVDNHDTEPGQALQSWVDPWFKPLAYAFILTRQEGYPCVFYGDYYGIPQYNIPSLKSKIDPLLIARRDYAYGTQHDYLDHSDIIGWTREGVTEKPGSGLAALITDGPGGSKWMYVGKQHAGKVFYDLTGNRSDTVTINSDGWGEFKVNGGSVSVWVPRK

SEQ ID NO: 18972 - protein, 484 aa, Geobacillus stearothermophilus
AAPFNGTMMQYFEWYLPDDGTLWTKVANEANNLSSLGITALWLPPAYKGTSRSDVGYGVYDLYDLGEFNQKGTVRTKYGTKAQYLQAIQAAHAAGMQVYADVVFDHKGGADGTEWVDAVEVNPSDRNQEISGTYQIQAWTKFDFPGRGNTYSSFKWRWYHFDGVDWDESRKLSRIYKFRGIGKAWDWEVDTENGNYDYLMYADLDMDHPEVVTELKNWGKWYVNTTNIDGFRLDAVKHIKFSFFPDWLSYVRSQTGKPLFTVGEYWSPDINKLHNYITKTNGTMSLFDAPLHHKFYTASKSGGAFDMRTLMTNTLMKDQPTLAVTFVDNHDTEPGQALQSWVDPWFKPLAYAFILTRQEGYPCVFYGDYYGIPQYNIPSLKSKIDPLLIARRDYAYGTQHDYLDHSDIIGWTREGVTEKPGSGLAALITDGPGGSKWMYVGKQHAGKVFYDLTGNRSDTVTINSDGWGEFKVNGGSVSVWVPRK

SEQ ID NO: 18973 - protein, 484 aa, Geobacillus stearothermophilus
AAPFNGTMMQYFEWYLPDDGTLWTKVANEANNLSSLGITALWLPPAYKGTSRSDVGYGVYDLYDLGEFNQKGTVRTKYGTKAQYLQAIQAAHAAGMQVYADVVFDHKGGADGTEWVDAVEVNPSDRNQEISGTYQIQAWTKFDFPGRGNTYSSFKWRWYHFDGVDWDESRKLSRIYKFRGIGKAWDWEVDTENGNYDYLMYADLDMDHPEVVTELKNWGKWYVNTTNIDGFRLDAVKHIKFSFFPDWLSYVRSQTGKPLFTVGEYWSLDINKLHNYITKTNGTMSLFDAPLHWKFYTASKSGGAFDMRTLMTNTLMKDQPTLAVTFVDNHDTEPGQALQSWVDPWFKPLAYAFILTRQEGYPCVFYGDYYGIPQYNIPSLKSKIDPLLIARRDYAYGTQHDYLDHSDIIGWTREGVTEKPGSGLAALITDGPGGSKWMYVGKQHAGKVFYDLTGNRSDTVTINSDGWGEFKVNGGSVSVWVPRK

SEQ ID NO: 18974 - protein, 484 aa, Geobacillus stearothermophilus
AAPFNGTMMQYFEWYLPDDGTLWTKVANEANNLSSLGITALWLPPAYKGTSRSDVGYGVYDLYDLGEFNQKGTVRTKYGTKAQYLQAIQAAHAAGMQVYADVVFDHKGGADGTEWVDAVEVNPSDRNQEISGTYQIQAWTKFDFPGRGNTYSSFKWRWYHFDGVDWDESRKLSRIYKFRGIGKAWDWEVDTENGNYDYLMYADLDMDHPEVVTELKNWGKWYVNTTNIDGFRLDAVKHIKFSFFPDWLSYVRSQTGKPLFTVGEYWSVDINKLHNYITKTNGTMSLFDAPLHFKFYTASKSGGAFDMRTLMTNTLMKDQPTLAVTFVDNHDTEPGQALQSWVDPWFKPLAYAFILTRQEGYPCVFYGDYYGIPQYNIPSLKSKIDPLLIARRDYAYGTQHDYLDHSDIIGWTREGVTEKPGSGLAALITDGPGGSKWMYVGKQHAGKVFYDLTGNRSDTVTINSDGWGEFKVNGGSVSVWVPRK

SEQ ID NO: 18975 - protein, 484 aa, Geobacillus stearothermophilus
AAPFNGTMMQYFEWYLPDDGTLWTKVANEANNLSSLGITALWLPPAYKGTSRSDVGYGVYDLYDLGEFNQKGTVRTKYGTKAQYLQAIQAAHAAGMQVYADVVFDHKGGADGTEWVDAVEVNPSDRNQEISGTYQIQAWTKFDFPGRGNTYSSFKWRWYHFDGVDWDESRKLSRIYKFRGIGKAWDWEVDTENGNYDYLMYADLDMDHPEVVTELKNWGKWYVNTTNIDGFRLDAVKHIKFSFFPDWLSYVRSQTGKPLFTVGEYWSTDINKLHNYITKTNGTMSLFDAPLHAKFYTASKSGGAFDMRTLMTNTLMKDQPTLAVTFVDNHDTEPGQALQSWVDPWFKPLAYAFILTRQEGYPCVFYGDYYGIPQYNIPSLKSKIDPLLIARRDYAYGTQHDYLDHSDIIGWTREGVTEKPGSGLAALITDGPGGSKWMYVGKQHAGKVFYDLTGNRSDTVTINSDGWGEFKVNGGSVSVWVPRK

SEQ ID NO: 18976 - protein, 484 aa, Geobacillus stearothermophilus
AAPFNGTMMQYFEWYLPDDGTLWTKVANEANNLSSLGITALWLPPAYKGTSRSDVGYGVYDLYDLGEFNQKGTVRTKYGTKAQYLQAIQAAHAAGMQVYADVVFDHKGGADGTEWVDAVEVNPSDRNQEISGTYQIQAWTKFDFPGRGNTYSSFKWRWYHFDGVDWDESRKLSRIYKFRGIGKAWDWEVDTENGNYDYLMYADLDMDHPEVVTELKNWGKWYVNTTNIDGFRLDAVKHIKFSFFPDWLSYVRSQTGKPLFTVGEYWSADINKLHNYITKTNGTMSLFDAPLHQKFYTASKSGGAFDMRTLMTNTLMKDQPTLAVTFVDNHDTEPGQALQSWVDPWFKPLAYAFILTRQEGYPCVFYGDYYGIPQYNIPSLKSKIDPLLIARRDYAYGTQHDYLDHSDIIGWTREGVTEKPGSGLAALITDGPGGSKWMYVGKQHAGKVFYDLTGNRSDTVTINSDGWGEFKVNGGSVSVWVPRK

SEQ ID NO: 18977 - protein, 484 aa, Geobacillus stearothermophilus
AAPFNGTMMQYFEWYLPDDGTLWTKVANEANNLSSLGITALWLPPAYKGTSRSDVGYGVYDLYDLGEFNQKGTVRTKYGTKAQYLQAIQAAHAAGMQVYADVVFDHKGGADGTEWVDAVEVNPSDRNQEISGTYQIQAWTKFDFPGRGNTYSSFKWRWYHFDGVDWDESRKLSRIYKFRGIGKAWDWEVDTENGNYDYLMYADLDMDHPEVVTELKNWGKWYVNTTNIDGFRLDAVKHIKFSFFPDWLSYVRSQTGKPLFTVGEYWSMDINKLHNYITKTNGTMSLFDAPLHFKFYTASKSGGAFDMRTLMTNTLMKDQPTLAVTFVDNHDTEPGQALQSWVDPWFKPLAYAFILTRQEGYPCVFYGDYYGIPQYNIPSLKSKIDPLLIARRDYAYGTQHDYLDHSDIIGWTREGVTEKPGSGLAALITDGPGGSKWMYVGKQHAGKVFYDLTGNRSDTVTINSDGWGEFKVNGGSVSVWVPRK

SEQ ID NO: 18978 - protein, 484 aa, Geobacillus stearothermophilus
AAPFNGTMMQYFEWYLPDDGTLWTKVANEANNLSSLGITALWLPPAYKGTSRSDVGYGVYDLYDLGEFNQKGTVRTKYGTKAQYLQAIQAAHAAGMQVYADVVFDHKGGADGTEWVDAVEVNPSDRNQEISGTYQIQAWTKFDFPGRGNTYSSFKWRWYHFDGVDWDESRKLSRIYKFRGIGKAWDWEVDTENGNYDYLMYADLDMDHPEVVTELKNWGKWYVNTTNIDGFRLDAVKHIKFSFFPDWLSYVRSQTGKPLFTVGEYWSTDINKLHNYITKTNGTMSLFDAPLHWKFYTASKSGGAFDMRTLMTNTLMKDQPTLAVTFVDNHDTEPGQALQSWVDPWFKPLAYAFILTRQEGYPCVFYGDYYGIPQYNIPSLKSKIDPLLIARRDYAYGTQHDYLDHSDIIGWTREGVTEKPGSGLAALITDGPGGSKWMYVGKQHAGKVFYDLTGNRSDTVTINSDGWGEFKVNGGSVSVWVPRK

SEQ ID NO: 18979 - protein, 484 aa, Geobacillus stearothermophilus
AAPFNGTMMQYFEWYLPDDGTLWTKVANEANNLSSLGITALWLPPAYKGTSRSDVGYGVYDLYDLGEFNQKGTVRTKYGTKAQYLQAIQAAHAAGMQVYADVVFDHKGGADGTEWVDAVEVNPSDRNQEISGTYQIQAWTKFDFPGRGNTYSSFKWRWYHFDGVDWDESRKLSRIYKFRGIGKAWDWEVDTENGNYDYLMYADLDMDHPEVVTELKNWGKWYVNTTNIDGFRLDAVKHIKFSFFPDWLSYVRSQTGKPLFTVGEYWSMDINKLHNYITKTNGTMSLFDAPLHQKFYTASKSGGAFDMRTLMTNTLMKDQPTLAVTFVDNHDTEPGQALQSWVDPWFKPLAYAFILTRQEGYPCVFYGDYYGIPQYNIPSLKSKIDPLLIARRDYAYGTQHDYLDHSDIIGWTREGVTEKPGSGLAALITDGPGGSKWMYVGKQHAGKVFYDLTGNRSDTVTINSDGWGEFKVNGGSVSVWVPRK

SEQ ID NO: 18980 - protein, 484 aa, Geobacillus stearothermophilus
AAPFNGTMMQYFEWYLPDDGTLWTKVANEANNLSSLGITALWLPPAYKGTSRSDVGYGVYDLYDLGEFNQKGTVRTKYGTKAQYLQAIQAAHAAGMQVYADVVFDHKGGADGTEWVDAVEVNPSDRNQEISGTYQIQAWTKFDFPGRGNTYSSFKWRWYHFDGVDWDESRKLSRIYKFRGIGKAWDWEVDTENGNYDYLMYADLDMDHPEVVTELKNWGKWYVNTTNIDGFRLDAVKHIKFSFFPDWLSYVRSQTGKPLFTVGEYWSVDINKLHNYITKTNGTMSLFDAPLHHKFYTASKSGGAFDMRTLMTNTLMKDQPTLAVTFVDNHDTEPGQALQSWVDPWFKPLAYAFILTRQEGYPCVFYGDYYGIPQYNIPSLKSKIDPLLIARRDYAYGTQHDYLDHSDIIGWTREGVTEKPGSGLAALITDGPGGSKWMYVGKQHAGKVFYDLTGNRSDTVTINSDGWGEFKVNGGSVSVWVPRK

SEQ ID NO: 18981 - protein, 484 aa, Geobacillus stearothermophilus
AAPFNGTMMQYFEWYLPDDGTLWTKVANEANNLSSLGITALWLPPAYKGTSRSDVGYGVYDLYDLGEFNQKGTVRTKYGTKAQYLQAIQAAHAAGMQVYADVVFDHKGGADGTEWVDAVEVNPSDRNQEISGTYQIQAWTKFDFPGRGNTYSSFKWRWYHFDGVDWDESRKLSRIYKFRGIGKAWDWEVDTENGNYDYLMYADLDMDHPEVVTELKNWGKWYVNTTNIDGFRLDAVKHIKFSFFPDWLSYVRSQTGKPLFTVGEYWSYDINKLHNYITKTNGTMSLFDAPLHNKFYTASKSGGAFDMRTLMTNTLMKDQPTLAVTFVDNHDTEPGQALQSWVDPWFKPLAYAFILTRQEGYPCVFYGDYYGIPQYNIPSLKSKIDPLLIARRDYAYGTQHDYLDHSDIIGWTREGVTEKPGSGLAALITDGPGGSKWMYVGKQHAGKVFYDLTGNRSDTVTINSDGWGEFKVNGGSVSVWVPRK

SEQ ID NO: 18982 - protein, 484 aa, Geobacillus stearothermophilus
AAPFNGTMMQYFEWYLPDDGTLWTKVANEANNLSSLGITALWLPPAYKGTSRSDVGYGVYDLYDLGEFNQKGTVRTKYGTKAQYLQAIQAAHAAGMQVYADVVFDHKGGADGTEWVDAVEVNPSDRNQEISGTYQIQAWTKFDFPGRGNTYSSFKWRWYHFDGVDWDESRKLSRIYKFRGIGKAWDWEVDTENGNYDYLMYADLDMDHPEVVTELKNWGKWYVNTTNIDGFRLDAVKHIKFSFFPDWLSYVRSQTGKPLFTVGEYWSPDINKLHNYITKTNGTMSLFDAPLHQKFYTASKSGGAFDMRTLMTNTLMKDQPTLAVTFVDNHDTEPGQALQSWVDPWFKPLAYAFILTRQEGYPCVFYGDYYGIPQYNIPSLKSKIDPLLIARRDYAYGTQHDYLDHSDIIGWTREGVTEKPGSGLAALITDGPGGSKWMYVGKQHAGKVFYDLTGNRSDTVTINSDGWGEFKVNGGSVSVWVPRK

SEQ ID NO: 18983 - protein, 481 aa, Geobacillus stearothermophilus
AAPFNGTMMQYFEWYLPDDGTLWTKVANEANNLSSLGITALWLPPAYKGTSRSDVGYGVYDLYDLGEFNQKGTVRTKYGTEAQYLQAIQAAHAAGMQVYADVVFDHKGGADGTEWVDAVEVNPSDRNQEISGTYQIQAWTKFDFPGRGNTYSSFKWRWYHFDGVDWDESRKLSRIYKFRGKAWDWEVDTEFGNYDYLMYADLDMDHPEVVTELKNWGKWYVNTTNIDGFRLDAVKHIKFSFFPDWLSYVRSQTGKPLFTVGEYWSYDINKLHNYITKTDGTMSLFDAPLHNKFYTASKSGGAFDMRTLMTNTLMKDQPTLAVTFVDNHDTEPVQALQSWVDPWFKPLAYAFILTRQEGYPCVFYGDYYGIPQYNIPSLKSKIDPLLIARRDYAYGTQHDYLDHRDIIGWTREGGTEKPGSGLAALITDGPGGSKWMYVGKQHAGKVFYDLTGNRSDTVTINSDGWGEFKVNGGSVSVWVPR

SEQ ID NO: 18984 - protein, 483 aa, Geobacillus stearothermophilus
AAPFNGTMMQYFEWYLPDDGTLWTKVANEANNLSSLGITALWLPPAYKGTSRSDVGYGVYDLYDLGEFNQKGTVRTKYGTKAQYLQAIQAAHAAGMQVYADVVFDHKGGADGTEWVDAVEVNPSDRNQEISGTYQIQAWTKFDFPGRGNTYSSFKWRWYHFDGVDWDESRKLSRIYKFRGIGKAWDWEVDTENGNYDYLMYADLDMDHPEVVTELKNWGKWYVNTTNIDGFRLDAVKHIKFSFFPDWLSYVRSQTGKPLFTVGEYWSYDINKLHNYITKTNGTMSLFDAPLHNKFYTASKSGGAFDMRTLMTNTLMKDQPTLAVTFVDNHDTEPGQALQSWVDPWFKPLAYAFILTRQEGYPCVFYGDYYGIPQYNIPSLKSKIDPLLIARRDYAYGTQHDYLDHSDIIGWTREGVTEKPGSGLAALITDGPGGSKWMYVGKQHAGKVFYDLTGNRSDTVTINSDGWGEFKVNGGSVSVWVPR

SEQ ID NO: 18985 - protein, 483 aa, Geobacillus stearothermophilus
APFNGTMMQYFEWYLPDDGTLWTKVANEANNLSSLGITALWLPPAYKGTSRSDVGYGVYDLYDLGEFNQKGTVRTKYGTKAQYLQAIQAAHAAGMQVYADVVFDHKGGADGTEWVDAVEVNPSDRNQEISGTYQIQAWTKFDFPGRGNTYSSFKWRWYHFDGVDWDESRKLSRIYKFRGIGKAWDWEVDTENGNYDYLMYADLDMDHPEVVTELKNWGKWYVNTTNIDGFRLDAVKHIKFSFFPDWLSYVRSQTGKPLFTVGEYWSYDINKLHNYITKTNGTMSLFDAPLHNKFYTASKSGGAFDMRTLMTNTLMKDQPTLAVTFVDNHDTEPGQALQSWVDPWFKPLAYAFILTRQEGYPCVFYGDYYGIPQYNIPSLKSKIDPLLIARRDYAYGTQHDYLDHSDIIGWTREGVTEKPGSGLAALITDGPGGSKWMYVGKQHAGKVFYDLTGNRSDTVTINSDGWGEFKVNGGSVSVWVPRK

SEQ ID NO: 18986 - protein, 480 aa, Geobacillus stearothermophilus
ANLNGTMMQYFEWYLPDDGTLWTKVANEANNLSSLGITALWLPPAYKGTSRSDVGYGVYDLYDLGEFNQKGTVRTKYGTKAQYLQAIQAAHAAGMQVYADVVFDHKGGADGTEWVDAVEVNPSDRNQEISGTYQIQAWTKFDFPGRGNTYSSFKWRWYHFDGVDWDESRKLSRIYKFRGKAWDWEVDTEFGNYDYLMYADLDMDHPEVVTELKNWGKWYVNTTNIDGFRLDAVKHIKFSFFPDWLSYVRSQTGKPLFTVGEYWSYDINKLHNYITKTNGTMSLFDAPLHNKFYTASKSGGAFDMRTLMTNTLMKDQPTLAVTFVDNHDTEPGQALQSWVDPWFKPLAYAFILTRQEGYPCVFYGDYYGIPQYNIPSLKSKIDPLLIARRDYAYGTQHDYLDHSDIIGWTREGGTEKPGSGLAALITDGPGGSKWMYVGKQHAGKVFYDLTGNRSDTVTINSDGWGEFKVNGGSVSVWVPR

SEQ ID NO: 18987 - protein, 481 aa, Bacillus acidicola
PFNGTMMQYFEWYLPDDGTLWTKVANEANNLSSLGINALWLPPAYKGTSRSDVGYGVYDLYDLGEFNQKGTVRTKYGTKAQYLQAIQAAHAAGMQVYADVVFDHKGGADGTEWVDAVEVNPSDRNQEISGTYQIQAWTKFDFPGRGNTYSSFKWRWYHFDGVDWDESRKLSRIYKFRGIGKAWDWEVDTEFGNYDYLMYADLDMDHPEVVTELKNWGKWYVNTTNIDGFRLDAVKHIKFSFFPDWLSYVRSQTGKPLFTVGEYWSYDINKLHNYITKTDGTMSLFDAPLHNKFYTASKSGGAFDMRTLMTNTLMKDQPHLAVTFVDNHDTEPGQALQSWVDPWFKPLAYAFILTRQEGYPCVFYGDYYGIPQYNIPSLKSKIDPLLIARRDYAYGTQHDYLDHSDIIGWTREGVTEKPGSGLAALITDGPGGSKWMYVGKQHAGKVFYDLTGNRSDTVTINSDGWGEFKVNGGSVSVWVPR

SEQ ID NO: 18988 - protein, 534 aa, Geobacillus stearothermophilus
LAFLLTALLFCPTGQPAKAAAPFNGTMMQYFEWYLPDDGTLWTKVANEANNLSSLGITALWLPPAYKGTSRSDVGYGVYDLYDLGEFNQKGAVRTKYGTKAQYLQAIQAAHAAGMQVYADVVFDHKGGADGTEWVDAVEVNPSDRNQEISGTYQIQAWTKFDFPGRGNTYSSFKWRWYHFDGVDWDESRKLSRIYKFRGIGKAWDWEVDTENGNYDYLMYADLDMDHPEVVTELKSWGKWYVNTTNIDGFRLDAVKHIKFSFFPDWLSYVRSQTGKPLFTVGEYWSYDINKLHNYIMKTNGTMSLFDAPLHNKFYTASKSGGTFDMRTLMTNTLMKDQPTLAVTFVDNHDTEPGQALQSWVDPWFKPLAYAFILTRQEGYPCVFYGDYYGIPQYNIPSLKSKIDPLLIARRDYAYGTQHDYLDHSDIIGWTREGVTEKPGSGLAALITDGPGGSKWMYVGKQHAGKVFYDLTGNRSDTVTINSDGWGEFKVNGGSVSVWVPRKTTVSTIAWSITTRPWTDEFVRWTEPRLVAWP

SEQ ID NO: 18989 - protein, 492 aa, Geobacillus stearothermophilus
AAPFNGTMMQYFEWYLPDDGTLWTKVANEANNLSSLGITALWLPPAYKGTSRSDVGYGVYDLYDLGEFNQKGTVRTKYGTKAQYLQAIQAAHAAGMQVYADVVFDHKGGADGTEWVDAVEVNPSDRNQEISGTYQIQAWTKFDFPGRGNTYSSFKWRWYHFDGVDWDESRKLSRIYKFRGIGAWDWEVDTENGNYDYLMYADLDMDHPEVVTELKNWGKWYVNTTNIDGFRLDAVKHIKFSFFPDWLSYVRSQTGKPLFTVGEYWSYDINKLHNYITKTNGTMSLFDAPLHNKFYTASKSGGAFDMRTLMTNTLMKDQPTLAVTFVDNHDTEPGQALQSWVDPWFKPLAYAFILTRQEGYPCVFYGDYYGIPQYNIPSLKSKIDPLLIARRDYAYGTQHDYLDHSDIIGWTREGVTEKPGSGLAALITDGPGGSKWMYVGKQHAGKVFYDLTGNRSDTVTINSDGWGEFKVNGGSVSVWVPRKTTVSTIARP

SEQ ID NO: 18990 - protein, 492 aa, Geobacillus stearothermophilus
AAPFNGTMMQYFEWYLPDDGTLWTKVANEANNLSSLGITALWLPPAYKGTSRSDVGYGVYDLYDLGEFNQKGTVRTKYGTKAQYLQAIQAAHAAGMQVYADVVFDHKGGADGTEWVDAVEVNPSDRNQEISGTYQIQAWTKFDFPGRGNTYSSFKWRWYHFDGVDWDESRKLSRIYKRGIGKAWDWEVDTENGNYDYLMYADLDMDHPEVVTELKNWGKWYVNTTNIDGFRLDAVKHIKFSFFPDWLSYVRSQTGKPLFTVGEYWSYDINKLHNYITKTNGTMSLFDAPLHNKFYTASKSGGAFDMRTLMTNTLMKDQPTLAVTFVDNHDTEPGQALQSWVDPWFKPLAYAFILTRQEGYPCVFYGDYYGIPQYNIPSLKSKIDPLLIARRDYAYGTQHDYLDHSDIIGWTREGVTEKPGSGLAALITDGPGGSKWMYVGKQHAGKVFYDLTGNRSDTVTINSDGWGEFKVNGGSVSVWVPRKTTVSTIARP

SEQ ID NO: 18991 - protein, 493 aa, Geobacillus stearothermophilus
AAPFNGTMMQYFEWYLPDDGTLWTKVANEANNLSSLGITALWLPPAYKGTSRSDVGYGVYDLYDLGEFNQKGTVRTKYGTKAQYLQAIQAAHAAGMQVYADVVFDHKGGADGTEWVDAVEVNPSDRNQEISGTYQIQAWTKFDFPGRGNTYSSFKWRWYHFDGVDWDESRKLSRIYKFRGIGKAWDWEVDTENGNYDYLMYADLDMDHPEVVTELKNWGKWYVDTTNIDGFRLDAVKHIKFSFFPDWLSYVRSQTGKPLFTVGEYWSYDINKLHNYITKTNGTMSLFDAPLHNKFYTASKSGGAFDMRTLMTNTLMKDQPTLAVTFVDNHDTEPGQALQSWVDPWFKPLAYAFILTRQEGYPCVFYGDYYGIPQYNIPSLKSKIDPLLIARRDYAYGTQHDYLDHSDIIGWTREGVTEKPGSGLAALITDGPGGSKWMYVGKQHAGKVFYDLTGNRSDTVTINSDGWGEFKVNGGSVSVWVPRKTTVSTIARP

SEQ ID NO: 18992 - protein, 493 aa, Geobacillus stearothermophilus
AAPFNGTMMQYFEWYLPDDGTLWTKVANEANNLSSLGITALWLPPAYKGTSRSDVGYGAYDLYDLGEFNQKGTVRTKYGTKAQYLQAIRAAHAAGMQVYADVVFDHKGGADGTEWVDAVEVNPSDRNQVISGTYQIQAWTKFDFPGRGNTYSSFKWRWYHFDGVDWDESRKLSRIYLFEGIGKAWDWEVDTENGNYDYLMYADLDMDHPEVVTELKNWGPWYVLTTNIDGFRLDAVKHIKFSFFPDWLSYVRSSTGKPLFTVGEYWSYDLNKLKNYITKTNGTMSLFDAPLHNKFYTASKSGGAFDMRTLMTNTLMKDQPTLAVTFVDNHDTEPGQALQSWVDPWFKPLAYAFILTRQEGYPCVFYGDYYGIPQYNIPSLKSKIDPLLIARRDYAYGTQHDYLDHSDIIGWTREGVTEKPGSGLAALITDGPGGSKWMYVGKQHAGKVFYDLTGNRSDTVTINSDGWGEFKVNGGSVSVWVPRKTTVSTIARP

SEQ ID NO: 18993 - protein, 493 aa, Geobacillus stearothermophilus
AAPFNGTMMQYFEWYLPDDGTLWTKVANEANNLSSLGITALWLPPAYKGTSRSDVGYGVYDLYDLGEFNQKGTVRTKYGTKAQYLQAIQAAHAAGMRVYADVVFDHKGGADGTEWVDAVEVNPSDRNQEISGTYQIQAWTKFDFPGRGNTYSSFKWRWYHFDGVDWDESRKLSRIYKFRGIGKAWDWEVDTENGNYDYLMYADLDMDHPEVVTELKNWGKWYVNTTNIDGFRLDAVKHIKFSFFPDWLSYVRSQTGKPLFTVGEYWSYDINKLHNYITKTNGTMSLFDAPLHNKFYTASKSGGAFDMRTLMTNTLMKDQPTLAVTFVDNHDTEPGQALQSWVDPWFKPLAYAFILTRQEGYPCVFYGDYYGIPQYNIPSLKSKIDPLLIARRDYAYGTQHDYLDHSDIIGWTREGVTEKPGSGLAALITDGPGGSKWMYVGKQHAGKVFYDLTGNRSDTVTINSDGWGEFKVNGGSVSVWVPRKTTVSTIARP

SEQ ID NO: 18994 - protein, 493 aa, Geobacillus stearothermophilus
AAPFNGTMMQYFEWYLPDDGTLWTKVANEANNLSSLGITALWLPPAYKGTSRSDVGYGVYDLYDLGEFNQKGTVRTKYGTKAQYLQAIQAAHAAGMQVYADVVFDHKGGADGTEWVDAVEVNPSDRNQVISGTYQIQAWTKFDFPGRGNTYSSFKWRWYHFDGVDWDESRKLSRIYLFEGIGKAWDWEVDTENGNYDYLMYADLDMDHPEVVTELKNWGPWYVLTTNIDGFRLDAVKHIKFQFFPDWLSYVRSSTGKPLFTVGEYWSYDINKLHNYITKTNGTMSLFDAPLHNKFYTASKSGGAFDMRTLMTNTLMKDQPTLAVTFVDNHDTEPGQALQSWVDPWFKPLAYAFILTRQEGYPCVFYGDYYGIPQYXXPSLKSKIDPLLIARRDYAYGTQHDYLDHSDIIGWTREGVTEKPGSGLAALITDGPGGSKWMYVGKQHAGKVFYDLTGNRSDTVTINSDGWGEFKVNGGSVSVWVPRKTTVSTIARP

SEQ ID NO: 18995 - protein, 493 aa, Geobacillus stearothermophilus
AAPFNGTMMQYFEWYLPDDGTLWTKVANEANNLSSLGITALWLPPAYKGTSRSDVGYGVYDLYDLGEFNQKGTVRTKYGTKAQYLQAIQAAHAAGMQVYADVVFDHKGGADGTEWVDAVEVNPSDRNQEISGTYQIQAWTKFDFPGRGNTYSSFKWRWYHFDGVDWDESRKLSRIYKFRGIGKAWDWEVDTENGNYDYLMYADLDMDHPEVVTELKNWGPWYVLTTNIDGFRLDAVKHIKFSFFPDWLSYVRSSTGKPLFTVGEYWSYDINKLHNYITKTNGTMSLFDAPLHNKFYTASKSGGAFDMRTLMTNTLMKDQPTLAVTFVDNHDTEPGQALQSWVDPWFKPLAYAFILTRQEGYPCVFYGDYYGIPQYNIPSLKSKIDPLLIARRDYAYGTQHDYLDHSDIIGWTREGVTEKPGSGLAALITDGPGGSKWMYVGKQHAGKVFYDLTGNRSDTVTINSDGWGEFKVNGGSVSVWVPRKTTVSTIARP

SEQ ID NO: 18996 - protein, 493 aa, Geobacillus stearothermophilus
AAPFNGTMMQYFEWYLPDDGTLWTKVANEANNLSSLGITALWLPPAYKGTSRSDVGYGVYDLYDLGEFNQKGTVRTKYGTKAQYLQAIQAAHAAGMQVYADVVFDHKGGADGTEWVDAVEVNPSDRNQEISGTYQIQAWTKFDFPGRGNTYSSFKWRWYHFDGVDWDESRKLSRIYKFRGIGKAWDWEVDTENGNYDYLMYADLDMDHPEVVTELKNWGKWYVNTTNIDGFRLDAVKHIKFSFFPDWLSYVRSQTGKPLFTVGEYWSYDINKLHNYITKTNGTMSLFDAPLHNKFYTASKSGGAFDMRTLMTNTLMKDQPTLAVTFVDNHDTEPGQALQSWVDPWFKPLAYAFILTRQEGYPCVFYGDYYGIPQYNIPSLKSKIDPLLIARRDYAYGTQHDYLDHSDIIGWTREGVTEKPGSGLAALITDGPGGSKWMYVGKRHAGKVFYDLTGNRSDTVTINSDGWGEFKVNGGSVSVWVPRKTTVSTIARP

SEQ ID NO: 18997 - protein, 493 aa, Geobacillus stearothermophilus
AAPFNGTMMQYFEWYLPDDGTLWTKVANEANNLSSLGITALWLPPAYKGTSRSDVGYGVYDLYDLGEFNQKGTVRTKYGTKAQYLQAIQAAHAAGMQVYADVVFDHKGGADGTEWVDAVEVNPSDRNQEISGTYQIQAWTKFDFPGRGNTYSSFKWRWYHFDGVDWDESRKLSRIYKFRGIGKAWDWEVDTENGNYDYLMYADLDMDHPEVVTELKNWGKWYVNTTNIDGFRLDAVKHIKFSFFPDWLSYVRSQTGKPLFTVGEYWSYDINKLHNYITKTNGTMSLFDAPLHNKFYTASKSGGAFDMRTLMTNTLMKDQPTLAVTFVDNHDTEPGQALQSWVDPWFKPLAYAFILTRREGYPCVFYGDYYGIPQYNIPSLKSKIDPLLIARRDYAYGTQHDYLDHSDIIGWTREGVTEKPGSGLAALITDGPGGSKWMYVGKQHAGKVFYDLTGNRSDTVTINSDGWGEFKVNGGSVSVWVPRKTTVSTIARP

SEQ ID NO: 18998 - protein, 493 aa, Geobacillus stearothermophilus
AAPFNGTMMQYFEWYLPDDGTLWTKVANEANNLSSLGITALWLPPAYKGTSRSDVGYGVYDLYDLGEFNQKGTVRTKYGTKAQYLQAIQAAHAAGMQVYADVVFDHKGGADGTEWVDAVEVNPSDRNQEISGTYQIQAWTKFDFPGRGNTYSSFKWRWYHFNGVDWDESRKLSRIYKFRGIGKAWNWEVDTENGNYDYLMYADLDMNHPEVVTELKNWGKWYVNTTNIDGFRLDAVKHIKFSFFPDWLSYVRSQTGKPLFTVGEYWSYDINKLHNYITKTDGTMSLFDAPLHNKFYTASKSGGAFDMRTLMTNTLMKDQPTLAVTFVDNHDTEPGQALQSWVDPWFKPLAYAFILTRQEGYPCVFYGDYYGIPQYNIPSLKSKIDPLLIARRDYAYGTQHDYLDHSDIIGWTREGGTEKPGSGLAALITDGPGGSKWMYVGKQHAGKVFYDLTGNRSDTVTINSDGWGEFKVNGGSVSVWVPRKTTVSTIARP

SEQ ID NO: 18999 - protein, 493 aa, Geobacillus stearothermophilus
AAPFNGTMMQYFEWYLPDDGTLWTKVANEANNLSSLGITALWLPPAYKGTSRSDVGYGVYDLYDLGEFNQKGTVRTKYGTKAQYLQAIQAAHAAGMQVYADVVFDHKGGADGTEWVDAVEVNPSDRNQEISGTYQIQAWTKFDFPGRGNTYSSFKWRWYHFDGVDWDESRKLSRIYKFRGIGKAWDWEVDTENGNYDYLMYADLDMDHPEVVTELKNWGKWYVNTTNIDGFRLDAVKHIKFSFFPDWLSYVRSQTGKPLFTVGEYWSYDINKLHNYITKTNGTMSLFDAPLHNKFYTASKSGGAFDMRTLMTNTLMKDQPTLAVTFVDNHDTEPGQALQSWVDPWFKPLAYAFILTREEGYPCVFYGDYYGIPQYNIPSLKSKIDPLLIARRDYAYGTQHDYLDHSDIIGWTREGVTEKPGSGLAALITDGPGGSKWMYVGKQHAGKVFYDLTGNRSDTVTINSDGWGEFKVNGGSVSVWVPRKTTVSTIARP

SEQ ID NO: 19000 - protein, 493 aa, Geobacillus stearothermophilus
AAPFNGTMMQYFEWYLPDDGTLWTKVANEANNLSSLGITALWLPPAYKGTSRSDVGYGVYDLYDLGEFNQKGTVRTKYGTKAQYLQAIQAAHAAGMQVYADVVFDHKGGADGTEWVDAVEVNPSDRNQEISGTYQIQAWTKFDFPGRGNTYSSFKWRWYHFDGVDWDESRKLSRIYKFRGIGKAWDWEVDTENGNYDYLMYADLDMDHPEVVTELKNWGKWYVNTTNIDGFRLDAVKHIKFQFFPDWLSYVRSQTGKPLFTVGEYWSYDINKLHNYITKTNGTMSLFDAPLHNKFYTASKSGGAFDMRTLMTNTLMKDQPTLAVTFVDNHDTEPGQALQSWVDPWFKPLAYAFILTREEGYPCVFYGDYYGIPQYNIPSLKSKIDPLLIARRDYAYGTQHDYLDHSDIIGWTREGVTEKPGSGLAALITDGPGGSKWMYVGKQHAGKVFYDLTGNRSDTVTINSDGWGEFKVNGGSVSVWVPRKTTVSTIARP

SEQ ID NO: 19001 - protein, 493 aa, Bacillus stearothermophilus
AAPFNGTMMQYFEWYLPDDGTLWTKVANEANNLSSLGITALWLPPAYKGTSRSDVGYGVYDLYDLGEFNQKGTVRTKYGTKAQYLQAIQAAHAAGMQVYADVVFDHKGGADGTEWVDAVEVNPSDRNQEISGTYQIQAWTKFDFPGRGNTYSSFKWRWYHFDGVDWDESRKLSRIYKFEGIGKAWDWEVDTENGNYDYLMYADLDMDHPEVVTELKNWGPWYVLTTNIDGFRLDAVKHIKFQFFPDWLSYVRSSTGKPLFTVGEYWSYDINKLHNYITKTNGTMSLFDAPLHNKFYTASKSGGAFDMRTLMTNTLMKDQPTLAVTFVDNHDTEPGQALQSWVDPWFKPLAYAFILTRQEGYPCVFYGDYYGIPQYNIPSLKSKIDPLLIARRDYAYGTQHDYLDHSDIIGWTREGVTEKPGSGLAALITDGPGGSKWMYVGKQHAGKVFYDLTGNRSDTVTINSDGWGEFKVNGGSVSVWVPRKTTVSTIARP

SEQ ID NO: 19002 - protein, 493 aa, Geobacillus stearothermophilus
AAPFNGTMMQYFEWYLPDDGTLWTKVANEANNLSSLGITALWLPPAYKGTSRSDVGYGVYDLYDLGEFNQKGTVRTKYGTKAQYLQAIQAAHAAGMQVYADVVFDHKGGADGTEWVDAVEVNPSDRNQEISGTYQIQAWTKFDFPGRGNTYSSFKWRWYHFDGVDWDESRKLSRIYKFRGIGKKWNEEVDTENGNYDYLMYADLDMNHPEVVTELKNWGKWYVNTTNIDGFRLDAVKHIKFSFFPDWLSYVRSQTGKPLFTVGEYWSYDINKLHNYITKTDGTMSLFDAPLHNKFYTASKSGGAFDMRTLMTNTLMKDQPTLAVTFVDNHDTEPGQALQSWVDPWFKPLAYAFILTRQEGYPCVFYGDYYGIPQYNIPSLKSKIDPLLIARRDYAYGTQHDYLDHSDIIGWTREGGTEKPGSGLAALITDGPGGSKWMYVGKQHAGKVFYDLTGNRSDTVTINSDGWGEFKVNGGSVSVWVPRKTTVSTIARP

SEQ ID NO: 19003 - protein, 493 aa, Geobacillus stearothermophilus
AAPFNGTMMQYFEWYLPDDGTLWTKVANEANNLSSLGITALWLPPAYKGTSRSDVGYGVYDLYDLGEFNQKGTVRTKYGTKAQYLQAIQAAHAAGMRVYADVVFDHKGGADGTEWVDAVEVNPSDRNQEISGTYQIQAWTKFDFPGRGNTYSSFKWRWYHFDGVDWDESRKLSRIYKFRGIGKAWDWEVDTENGNYDYLMYADLDMDHPEVVTELKNWGKWYVNTTNIDGFRLDAVKHIKFQFFPDWLSYVRSQTGKPLFTVGEYWSYDINKLHNYITKTNGTMSLFDAPLHNKFYTASKSGGAFDMRTLMTNTLMKDQPTLAVTFVDNHDTEPGQALQSWVDPWFKPLAYAFILTRQEGYPCVFYGDYYGIPQYNIPSLKSKIDPLLIARRDYAYGTQHDYLDHSDIIGWTREGVTEKPGSGLAALITDGPGGSKWMYVGKQHAGKVFYDLTGNRSDTVTINSDGWGEFKVNGGSVSVWVPRKTTVSTIARP

SEQ ID NO: 19004 - protein, 493 aa, Geobacillus stearothermophilus
AAPFNGTMMQYFEWYLPDDGTLWTKVANEANNLSSLGITALWLPPAYKGTSRSDVGYGAYDLYDLGEFNQKGTVRTKYGTKAQYLQAIRAAHAAGMQVYADVVFDHKGGADDTEWVDAVEVNPSDRNQVISGTYQIQAWTKFDFPGRGNTYSSFKWRWYHFDGVDWDESRKLSRIYLFEGIGKAWDWEVDTENGNYDYLMYADLDMDYPEVVTELKNWGPWYVLTTNIDGFRLDAVKHIKFSFFPDWLSYVRSSTGKPLFTVGEYWSYDINKLHNYITKTNGTMSLFDAPLHNKFYTASKSGGAFDMRTLMTNTLMKDQPTLAVTFVDNHDTEPGQALQSWVDPWFKPLAYAFILTRQEGYPCVFYGDYYGIPQYNIPSLKSKIDPLLIARRDYAYGTQHDYLDHSDIIGWTREGVTEKPGSGLAALITDGPGGSKWMYVGKQHAGKVFYDLTGNRSDTVTINSDGWGEFKVNGGSVSVWVPRKTTVSTIARP

SEQ ID NO: 19005 - protein, 493 aa, Geobacillus stearothermophilus
AAPFNGTMMQYFEWYLPDDGTLWTKVANEANNLSSLGITALWLPPAYKGTSRSDVGYGVYDLYDLGEFNQKGTVRTKYGTKAQYLQAIQAAHAAGMQVYADVVFDHKGGADGTEWVDAVEVNPSDRNQEISGTYQIQAWTKFDFPGRGNTYSSFKWRWYHFDGVDWDESRKLSRIYKFRGIGKAWDWEVDTENGNYDYLMYADLDMDHPEVVTELKNWGKWYVNTTNIDGFRLDAVKHIKFSFFPDWVSYVRSQTGKPLFTVGEYWSYDINKLHNYITKTNGTMSLFDAPLHNKFYTASKSGGAFDMRTLMTNTLMKDQPTLAVTFVDNHDTEPGQALQSWVDPWFKPLAYAFILTRQEGYPCVFYGDYYGIPQYNIPSLKSKIDPLLIARRDYAYGTQHDYLDHSDIIGWTREGVTEKPGSGLAALITDGPGGSKWMYVGKQHAGKVFYDLTGNRSDTVTINSDGWGEFKVNGGSVSVWVPRKTTVSTIARP

SEQ ID NO: 19006 - protein, 493 aa, Geobacillus stearothermophilus
AAPFNGTMMQYFEWYLPDDGTLWTKVANEANNLSSLGITALWLPPAYKGTSRSDVGYGVYDLYDLGEFNQKGTVRTKYGTKAQYLQAIQALHAAGIQVYADVVFDHKGGADGTEWVDAVEVNPSDRNQVISGTYQIQAWTKFDFPGRGNTYSSFKWRWYHFDGVDWDESRKLSRIYLFEGIGKAWDWEVDTENGNYDYLMYADLDMDHPEVVTELKNWGPWYVLTTNIDGFRLDAVKHIKFQFFPDWLSYVRSSTGKPLFTVGEYWSYDINKLHNYITKTNGTMSLFDAPLHNKFYTASKSGGAFDMRTLMTNTLMKDQPTLAVTFVDNHDTEPGQALQSWVDPWFKPLAYAFILTRQEGYPCVFYGDYYGIPQYNIPSLKSKIDPLLIARRDYAYGTQHDYLDHSDIIGWTREGVTEKPGSGLAALITDGPGGSKWMYVGKQHAGKVFYDLTGNRSDTVTINSDGWGEFKVNGGSVSVWVPRKTTVSTIARP

SEQ ID NO: 19007 - protein, 493 aa, Geobacillus stearothermophilus
AAPFNGTMMQYFEWYLPDDGTLWTKVANEANNLSSLGITALWLPPAYKGTSRSDVGYGVYDLYDLGEFNQKGTVRTKYGTKAQYLQAIQAAHAAGMQVYADVVFDHKGGADGTEWVDAVEVNPSDRNQEISGTYQIQAWTKFDFPGRGNTYSSFKWRWYHFDGVDWDESRKLSRIYKFRGIGKAWDWEVDTENGNYDYLMYADLDMDHPEVVTELKNWGKWYVNTTNIDGFRLDAVKHIKFSFFPDWLSYVRSQTGKPLFTVGEYWSYDINKLHNYITKTNGTMSLFDAPLHNKFYTASKSGGAFDMRTLMTNTLMKDQPTLAVTFVDNHDTEPGQALQSWVDPWFKPLAYAFILTRQEGYPCVFYGDYYGIPQYNIPSLKSKIDPLLIARRDYAYGTQHDYLDHSDIIGWTREGVTEKPGSGLAALITDGPGGSKWMYVGKEHAGKVFYDLTGNRSDTVTINSDGWGEFKVNGGSVSVWVPRKTTVSTIARP

SEQ ID NO: 19008 - protein, 493 aa, Geobacillus stearothermophilus
AAPFNGTMMQYFEWYLPDDGTLWTKVANEANNLSSLGITALWLPPAYKGTSRSDVGYGVYDLYDLGEFNQKGTVRTKYGTKAQYLQAIQAAHAAGMQVYADVVFDHKGGADGTEWVDAVEVNPSDRNQEISGTYQIQAWTKFDFPGRGNTYSSFKWRWYHFDGVDWDESRKLSRIYKFRGIGKAWDWEVDTENGNYDYLMYADLDMDHPEVVTELKNWGKWYVNTTNIDGFRLDAVKHIKFQFFPDWLSYVRSQTGKPLFTVGEYWSYDINKLHNYITKTNGTMSLFDAPLHNKFYTASKSGGAFDMRTLMTNTLMKDRPTLAVTFVDNHDTEPGQALQSWVDPWFKPLAYAFILTRQEGYPCVFYGDYYGIPQYNIPSLKSKIDPLLIARRDYAYGTQHDYLDHSDIIGWTREGVTEKPGSGLAALITDGPGGSKWMYVGKQHAGKVFYDLTGNRSDTVTINSDGWGEFKVNGGSVSVWVPRKTTVSTIARP

SEQ ID NO: 19009 - protein, 493 aa, Geobacillus stearothermophilus
AAPFNGTMMQYFEWYLPDDGTLWTKVANEANNLSSLGITALWLPPAYKGTSRSDVGYGVYDLYDLGEFNQKGTVRTKYGTKAQYLQAIQAAHAAGMQVYADVVFDHKGGADGTEWVDAVEVNPSDRNQEISGTYQIQAWTKFDFPGRGNTYSSFKWRWYHFDGVDWDESRKLSRIYKFRGIGKAWDWEVDTENGNYDYLMYADLDMDHPEVVTELKNWGKWYVDTTNIDGFRLDAVKHIKFQFFPDWLSYVRSQTGKPLFTVGEYWSYDINKLHNYITKTNGTMSLFDAPLHNKFYTASKSGGAFDMRTLMTNTLMKDQPTLAVTFVDNHDTEPGQALQSWVDPWFKPLAYAFILTRQEGYPCVFYGDYYGIPQYNIPSLKSKIDPLLIARRDYAYGTQHDYLDHSDIIGWTREGVTEKPGSGLAALITDGPGGSKWMYVGKQHAGKVFYDLTGNRSDTVTINSDGWGEFKVNGGSVSVWVPRKTTVSTIARP

SEQ ID NO: 19010 - protein, 493 aa, Geobacillus stearothermophilus
AAPFNGTMMQYFEWYLPDDGTLWTKVANEANNLSSLGITALWLPPAYKGTSRSDVGYGVYDLYDLGEFNQKGTVRTKYGTKAQYLQAIQAAHAAGMQVYADVVFDHKGGADGTEWVDAVEVNPSDRNQEISGTYQIQAWTKFDFPGRGNTYSSFKWRWYHFDGVDWDESRKLSRIYKFRGIGKAWDWEVDTENGNYDYLMYADLDMDHPEVVTELKNWGKWYVNTTNIDGFRLDAVKHIKFSFFPDWTSYVRSQTGKPLFTVGEYWSYDINKLHNYITKTNGTMSLFDAPLHNKFYTASKSGGAFDMRTLMTNTLMKDQPTLAVTFVDNHDTEPGQALQSWVDPWFKPLAYAFILTRQEGYPCVFYGDYYGIPQYNIPSLKSKIDPLLIARRDYAYGTQHDYLDHSDIIGWTREGVTEKPGSGLAALITDGPGGSKWMYVGKQHAGKVFYDLTGNRSDTVTINSDGWGEFKVNGGSVSVWVPRKTTVSTIARP

SEQ ID NO: 19011 - protein, 493 aa, Geobacillus stearothermophilus
AAPFNGTMMQYFEWYLPDDGTLWTKVANEANNLSSLGITALWLPPAYKGTSRSDVGYGVYDLYDLGEFNQKGTVRTKYGTKAQYLQAIQAAHAAGMQVYADVVFDHKGGADGTEWVDAVEVNPSDRNQEISGTYQIQAWTKFDFPGRGNTYSSFKWRWYHFDGVDWDESRKLSRIYKFRGIGKAWDWEVDTENGNYDYLMYADLDMDHPEVVTELKNWGKWYVNTTNIDGFRLDAVKHIKFSFFPDWLSYVRSQTGKPLFTVGEYWSYDINKLHNYITKTNGTMSLFDAPLHNKFYTASKSGGAFDMRTLMTNTLMKDEPTLAVTFVDNHDTEPGQALQSWVDPWFKPLAYAFILTRQEGYPCVFYGDYYGIPQYNIPSLKSKIDPLLIARRDYAYGTQHDYLDHSDIIGWTREGVTEKPGSGLAALITDGPGGSKWMYVGKQHAGKVFYDLTGNRSDTVTINSDGWGEFKVNGGSVSVWVPRKTTVSTIARP

SEQ ID NO: 19012 - protein, 493 aa, Geobacillus stearothermophilus
AAPFNGTMMQYFEWYLPDDGTLWTKVANEANNLSSLGITALWLPPAYKGTSRSDVGYGVYDLYDLGEFNQKGTVRTKYGTKAQYLQAIQAAHAAGMQVYADVVFDHKGGADGTEWVDAVEVNPSDRNQEISGTYQIQAWTKFDFPGRGNTYSSFKWRWYHFDGVDWDESRKLSRIYKFRGIGKAWDWEVDTENGNYDYLMYADLDMDHPEVVTELKNWGKWYVNTTNIDGFRLDAVKHIKFQFFPDWLSYVRSQTGKPLFTVGEYWSYDINKLHNYITKTNGTMSLFDAPLHNKFYTASKSGGAFDMRTLMTNTLMKDQPTLAVTFVDNHDTEPGQALQSWVDPWFKPLAYAFILTRQEGYPCVFYGDYYGIPQYNIPSLKSKIDPLLIARRDYAYGTQHDYLDHSDIIGWTREGVTEKPGSGLAALITDGPGGSKWMYVGKEHAGKVFYDLTGNRSDTVTINSDGWGEFKVNGGSVSVWVPRKTTVSTIARP

SEQ ID NO: 19013 - protein, 493 aa, Bacillus stearothermophilus
AAPFNGTMMQYFEWYLPDDGTLWTKVANEANNLSSLGITALWLPPAYKGTSRSDVGYGVYDLYDLGEFNQKGTVRTKYGTKAQYLQAIQAAHAAGMQVYADVVFDHKGGADGTEWVDAVEVNPSDRNQEISGTYQIQAWTKFDFPGRGNTYSSFKWRWYHFDGVDWDESRKLSRIYKFRGIGKAWDWEVDTENGNYDYLMYADLDMDHPEVVTELKNWGPWYVLTTNIDGFRLDAVKHIKFQFFPDWLSYVRSSTGKPLFTVGEYWSYDINKLHNYITKTNGTMSLFDAPLHNKFYTASKSGGAFDMRTLMTNTLMKDQPTLAVTFVDNHDTEPGQALQSWVDPWFKPLAYAFILTRQEGYPCVFYGDYYGIPQYNIPSLKSKIDPLLIARRDYAYGTQHDYLDHSDIIGWTREGVTEKPGSGLAALITDGPGGSKWMYVGKQHAGKVFYDLTGNRSDTVTINSDGWGEFKVNGGSVSVWVPRKTTVSTIARP

SEQ ID NO: 19014 - protein, 493 aa, Geobacillus stearothermophilus
AAPFNGTMMQYFEWYLPDDGTLWTKVANEANNLSSLGITALWLPPAYKGTSRSDVGYGVYDLYDLGEFNQKGTVRTKYGTKAQYLQAIQAAHAAGMQVYADVVFDHKGGADGTEWVDAVEVNPSDRNQEISGTYQIQAWTKFDFPGRGNTYSSFKWRWYHFDGVDWDESRKLSRIYKFRGIGKAWDWEVDTENGNYDYLMYADLDMDHPEVVTELKNWGKWYVNTTNIDGFRLDAVKHIKFSFFPDWLSYVRSQTGKPLFTVGEYWSYDINKLHNYITKTNGTMSLFDAPLHNKFYTASKSGGAFDMRTLMTNTLMKDRPTLAVTFVDNHDTEPGQALQSWVDPWFKPLAYAFILTRQEGYPCVFYGDYYGIPQYNIPSLKSKIDPLLIARRDYAYGTQHDYLDHSDIIGWTREGVTEKPGSGLAALITDGPGGSKWMYVGKQHAGKVFYDLTGNRSDTVTINSDGWGEFKVNGGSVSVWVPRKTTVSTIARP

SEQ ID NO: 19015 - protein, 493 aa, Geobacillus stearothermophilus
AAPFNGTMMQYFEWYLPDDGTLWTKVANEANNLSSLGITALWLPPAYKGTSRSDVGYGVYDLYDLGEFNQKGTVRTKYGTKAQYLQAIQAAHAAGMEVYADVVFDHKGGADGTEWVDAVEVNPSDRNQEISGTYQIQAWTKFDFPGRGNTYSSFKWRWYHFDGVDWDESRKLSRIYKFRGIGKAWDWEVDTENGNYDYLMYADLDMDHPEVVTELKNWGKWYVNTTNIDGFRLDAVKHIKFSFFPDWLSYVRSQTGKPLFTVGEYWSYDINKLHNYITKTNGTMSLFDAPLHNKFYTASKSGGAFDMRTLMTNTLMKDQPTLAVTFVDNHDTEPGQALQSWVDPWFKPLAYAFILTRQEGYPCVFYGDYYGIPQYNIPSLKSKIDPLLIARRDYAYGTQHDYLDHSDIIGWTREGVTEKPGSGLAALITDGPGGSKWMYVGKQHAGKVFYDLTGNRSDTVTINSDGWGEFKVNGGSVSVWVPRKTTVSTIARP

SEQ ID NO: 19016 - protein, 493 aa, Geobacillus stearothermophilus
AAPFNGTMMQYFEWYLPDDGTLWTKVANEANNLSSLGITALWLPPAYKGTSRSDVGYGVYDLYDLGEFNQKGTVRTKYGTKAQYLQAIQAAHAAGMQVYADVVFDHKGGADGTEWVDAVEVNPSDRNQEISGTYQIQAWTKFDFPGRGNTYSSFKWRWYHFDGVDWDESRKLSRIYKFRGIGKAWDWEVDTENGNYDYLMYADLDMDHPEVVTELKNWGKWYVNTTNIDGFRLDAVKHIKFQFFPDWLSYVRSQTGKPLFTVGEYWSYDINKLHNYITKTNGTMSLFDAPLHNKFYTASKSGGAFDMRTLMTNTLMKDEPTLAVTFVDNHDTEPGQALQSWVDPWFKPLAYAFILTRQEGYPCVFYGDYYGIPQYNIPSLKSKIDPLLIARRDYAYGTQHDYLDHSDIIGWTREGVTEKPGSGLAALITDGPGGSKWMYVGKQHAGKVFYDLTGNRSDTVTINSDGWGEFKVNGGSVSVWVPRKTTVSTIARP

SEQ ID NO: 19017 - protein, 493 aa, Geobacillus stearothermophilus
AAPFNGTMMQYFEWYLPDDGTLWTKVANEANNLSSLGITALWLPPAYKGTSRSDVGYGVYDLYDLGEFNQKGTVRTKYGTKAQYLQAIQAAHAAGMQVYADVVFDHKGGADGTEWVDAVEVNPSDRNQEISGTYQIQAWTKFDFPGRGNTYSSFKWRWYHFDGVDWDESRKLSRIYKFRGIGKAWDWEVDTENGNYDYLMYADLDMDHPEVVTELKNWGKWYVNTTNIDGFRLDAVKHIKFQFFPDWLSYVRSQTGKPLFTVGEYWSYDINKLHNYITKTNGTMSLFDAPLHNKFYTASKSGGAFDMRTLMTNTLMKDQPTLAVTFVDNHDTEPGQALQSWVDPWFKPLAYAFILTRQEGYPCVFYGDYYGIPQYNIPSLKSKIDPLLIARRDYAYGTQHDYLDHSDIIGWTREGVTEKPGSGLAALITDGPGGSKWMYVGKRHAGKVFYDLTGNRSDTVTINSDGWGEFKVNGGSVSVWVPRKTTVSTIARP

SEQ ID NO: 19018 - protein, 493 aa, Geobacillus stearothermophilus
AAPFNGTMMQYFEWYLPDDGTLWTKVANEANNLSSLGITALWLPPAYKGTSRSDVGYGVYDLYDLGEFNQKGTVRTKYGTKAQYLQAIQAAHAAGMQVYADVVFDHKGGADGTEWVDAVEVNPSDRNQEISGTYQIQAWTKFDFPGRGNTYSSFKWRWYHFNGVDWDESRKLSRIYKFRGIGKKWNWEVDTENGNYDYLMYADLDMNHPEVVTELKNWGKWYVNTTNIDGFRLDAVKHIKFSFFPDWLSYVRSQTGKPLFTVGEYWSYDINKLHNYITKTDGTMSLFDAPLHNKFYTASKSGGAFDMRTLMTNTLMKDQPTLAVTFVDNHDTEPGQALQSWVDPWFKPLAYAFILTRQEGYPCVFYGDYYGIPQYNIPSLKSKIDPLLIARRDYAYGTQHDYLDHSDIIGWTREGGTEKPGSGLAALITDGPGGSKWMYVGKQHAGKVFYDLTGNRSDTVTINSDGWGEFKVNGGSVSVWVPRKTTVSTIARP

SEQ ID NO: 19019 - protein, 493 aa, Geobacillus stearothermophilus
AAPFNGTMMQYFEWYLPDDGTLWTKVANEANNLSSLGITALWLPPAYKGTSRSDVGYGVYDLYDLGEFNQKGTVRTKYGTKAQYLQAIQAAHAAGMQVYADVVFDHKGGADGTEWVDAVEVNPSDRNQVISGTYQIQAWTKFDFPGRGNTYSSFKWRWYHFDGVDWDESRKLSRIYLFEGIGKAWDWEVDTENGNYDYLMYADLDMDHPEVVTELKNWGPWYVLTTNIDGFRLDAVKHIKFQFFPDWLSYVRSSTGKPLFTVGEYWSYDINKLHNFITKTNGTMSLFDAPLHNKFYTASKSGGAFDMRTLMTNTLMKDQPTLAVTFVDNHDTEPGQALQSWVDPWFKPLAYAFILTRQEGYPCVFYGDYYGIPQYNIPSLKSKIDPLLIARRDYAYGTQHDYLDHSDIIGWTREGVTEKPGSGLAAMITDGPGGSKWMYVGKQHAGKVFYDLTGNRSDTVTINSDGWGEFKVNGGSVSVWVPRKTTVSTIARP

SEQ ID NO: 19020 - protein, 493 aa, Geobacillus stearothermophilus
AAPFNGTMMQYFEWYLPDDGTLWTKVANEANNLSSLGITALWLPPAYKGTSRSDVGYGVYDLYDLGEFNQKGTVRTKYGTKAQYLQAIQAAHAAGMEVYADVVFDHKGGADGTEWVDAVEVNPSDRNQEISGTYQIQAWTKFDFPGRGNTYSSFKWRWYHFDGVDWDESRKLSRIYKFRGIGKAWDWEVDTENGNYDYLMYADLDMDHPEVVTELKNWGKWYVNTTNIDGFRLDAVKHIKFQFFPDWLSYVRSQTGKPLFTVGEYWSYDINKLHNYITKTNGTMSLFDAPLHNKFYTASKSGGAFDMRTLMTNTLMKDQPTLAVTFVDNHDTEPGQALQSWVDPWFKPLAYAFILTRQEGYPCVFYGDYYGIPQYNIPSLKSKIDPLLIARRDYAYGTQHDYLDHSDIIGWTREGVTEKPGSGLAALITDGPGGSKWMYVGKQHAGKVFYDLTGNRSDTVTINSDGWGEFKVNGGSVSVWVPRKTTVSTIARP

SEQ ID NO: 19021 - protein, 493 aa, Geobacillus stearothermophilus
AAPFNGTMMQYFEWYLPDDGTLWTKVANEANNLSSLGITALWLPPAYKGTSRSDVGYGVYDLYDLGEFNQKGTVRTKYGTKAQYLQAIQAAHAAGMQVYADVVFDHKGGADGTEWVDAVEVNPSDRNQEISGTYQIQAWTKFDFPGRGNTYSSFKWRWYHFDGVDWDESRKLSRIYKFRGIGKAWDWEVDTENGNYDYLMYADLDMDHPEVVTELKNWGPWYVLTTNIDGFRLDAVKHIKFSFFPDWLSYVRSSTGKPLFTVGEYWSYDINKLHNYITKTNGTTSLFDAPLHNKFYTASKSGGAFDMRTLMTNTLMKDQPTLAVTFVDNHDTEPGQALQSWVDPWFKPLAYAFILTRQEGYPCVFYGDYYGIPQYNIPSLKSKIDPLLIARRDYAYGTQHDYLDHSDIIGWTREGVTEKPGSGLAALITDGPGGSKWMYVGKQHAGKVFYDLTGNRSDTVTINSDGWGEFKVNGGSVSVWVPRKTTVSTIARP

SEQ ID NO: 19022 - protein, 489 aa, Geobacillus stearothermophilus
AAPFNGTMMQYFEWYLPDDGTLWTKVANEANNLSSLGITALWLPPAYKGTSRSDVGYGVYDLYDLGEFNQKGTVRTKYGTKAQYLQAIQAAHAAGMQVYADVVFDHKGGADGTEWVDAVEVNPSDRNQEISGTYQIQAWTKFDFPGRGNTYSSFKWRWYHFDGVDWDESRKLSRIYKFRGKAWDWEVDTENGFYDYLMYADLDMDHPEVVTELKNWGKWYVNTTNIDGFRLDAVKHIKFSFFPDWLSYVRSQTGKPLFTVGEYWSYDINKLHNYITKTNGTMSLFDAPLHNKFYTASKSGGAFDMRTLMTNTLMKDQPTLAVTFVDNHDTEPGQALQSWVDPWFKPLAYAFILTRQEGYPCVFYGDYYGIPQYNIPSLKSKIDPLLIARRDYAYGTQHDYLDHSDIIGWTREGVTEKPGSGLAALITDGPGGSKWMYVGKQHAGKVFYDLTGNRSDTVTINSDGWGEFKVNGGSVSVWVPRKTTVSTIA

SEQ ID NO: 19023 - protein, 491 aa, Geobacillus stearothermophilus
AAPFNGTMMQYFEWYLPDDGTLWTKVANEANNLSSLGITALWLPPAYKGTSRSDVGYGVYDLYDLGEFNQKGTVRTKYGTKAQYLQAIQAAHAAGMQVYADVVFDHKGGADGTEWVDAVEVNPSDRNQEISGTYQIQAWTKFDFPGRGNTYSSFKWRWYHFDGVDWDESRKLSRIYKFRGIGKAWDWEVDTENGNYDYLMYADLDMDHPEVVTELKNWGPWYVLTTNIDGFRLDAVKHIKFSFFPDWLSYVRSSTGKPLFTVGEYWSYDINKLHNYITKTNGTMSLFDAPLHNKFYTASKSGGAFDMRTLMTNTLMKDQPTLAVTFVDNHDTEPGQALQSWVDPWFKPLAYAFILTRQEGYPCVFYGDYYGIPQYNIPSLKSKIDPLLIARRDYAYGTQHDYLDHSDIIGWTREGVTEKPGSGLAALITDGPGGSKWMYVGKQHAGKVFYDLTGNRSDTVTINSDGWGEFKVNGGSVSVWVPRKTTVSTIA

SEQ ID NO: 19024 - protein, 491 aa, Geobacillus stearothermophilus
AAPFNGTMMQYFEWYLPDDGTLWTKVANEANNLSSLGITALWLPPAYKGTSRSDVGYGVYDLYDLGEFNQKGTVRTKYGTKAQYLQAIQALHAAGIQVYADVVFDHKGGADGTEWVDAVEVNPSDRNQVISGTYQIQAWTKFDFPGRGNTYSSFKWRWYHFDGVDWDESRKLSRIYLFEGIGKAWDWEVDTENGNYDYLMYADLDMDHPEVVTELKNWGPWYVLTTNIDGFRLDAVKHIKFQFFPDWLSYVRSSTGKPLFTVGEYWSYDINKLHNYITKTNGTMSLFDAPLHNKFYTASKSGGAFDMRTLMTNTLMKDQPTLAVTFVDNHDTEPGQALQSWVDPWFKPLAYAFILTRQEGYPCVFYGDYYGIPQYNIPSLKSKIDPLLIARRDYAYGTQHDYLDHSDIIGWTREGVTEKPGSGLAALITDGPGGSKWMYVGKQHAGKVFYDLTGNRSDTVTINSDGWGEFKVNGGSVSVWVPRKTTVSTIA

SEQ ID NO: 19025 - protein, 491 aa, Geobacillus stearothermophilus
AAPFNGTMMQYFEWYLPDDGTLWTKVANEANNLSSLGITALWLPPAYKGTSRSDVGYGVYDLYDLGEFNQKGTVRTKYGTKAQYLQAIQAAHAAGMQVYADVVFDHKGGADGTEWVDAVEVNPSDRNQVISGTYQIQAWTKFDFPGRGNTYSSFKWRWYHFDGVDWDESRKLSRIYLFEGIGKAWDWEVDTENGNYDYLMYADLDMDHPEVVTELKNWGPWYVLTTNIDGFRLDAVKHIKFQFFPDWLSYVRSSTGKPLFTVGEYWSYDINKLHNFITKTNGTMSLFDAPLHNKFYTASKSGGAFDMRTLMTNTLMKDQPTLAVTFVDNHDTEPGQALQSWVDPWFKPLAYAFILTRQEGYPCVFYGDYYGIPQYNIPSLKSKIDPLLIARRDYAYGTQHDYLDHSDIIGWTREGVTEKPGSGLAAMITDGPGGSKWMYVGKQHAGKVFYDLTGNRSDTVTINSDGWGEFKVNGGSVSVWVPRKTTVSTIA

SEQ ID NO: 19026 - protein, 491 aa, Geobacillus stearothermophilus
AAPFNGTMMQYFEWYLPDDGTLWTKVANEANNLSSLGITALWLPPAYKGTSRSDVGYGVYDLYDLGEFNQKGTVRTKYGTKAQYLQAIQAAHAAGMQVYADVVFDHKGGADGTEWVDAVEVNPSDRNQEISGTYQIQAWTKFDFPGRGNTYSSFKWRWYHFDGVDWDESRKLSRIYKFRGIGKAWDWEVDTENGNYDYLMYADLDMDHPEVVTELKNWGPWYVLTTNIDGFRLDAVKHIKFQFFPDWLSYVRSSTGKPLFTVGEYWSYDINKLHNYITKTNGTMSLFDAPLHNKFYTASKSGGAFDMRTLMTNTLMKDQPTLAVTFVDNHDTEPGQALQSWVDPWFKPLAYAFILTRQEGYPCVFYGDYYGIPQYNIPSLKSKIDPLLIARRDYAYGTQHDYLDHSDIIGWTREGVTEKPGSGLAALITDGPGGSKWMYVGKQHAGKVFYDLTGNRSDTVTINSDGWGEFKVNGGSVSVWVPRKTTVSTIA

SEQ ID NO: 19027 - protein, 491 aa, Geobacillus stearothermophilus
AAPFNGTMMQYFEWYLPDDGTLWTKVANEANNLSSLGITALWLPPAYKGTSRSDVGYGVYDLYDLGEFNQKGTVRTKYGTKAQYLQAIQAAHAAGMQVYADVVFDHKGGADGTEWVDAVEVNPSDRNQVISGTYQIQAWTKFDFPGRGNTYSSFKWRWYHFDGVDWDESRKLSRIYLFEGIGKAWDWEVDTENGNYDYLMYADLDMDHPEVVTELKNWGPWYVLTTNIDGFRLDAVKHIKFQFFPDWLSYVRSSTGKPLFTVGEYWSYDINKLHNYITKTNGTMSLFDAPLHNKFYTASKSGGAFDMRTLMTNTLMKDQPTLAVTFVDNHDTEPGQALQSWVDPWFKPLAYAFILTRQEGYPCVFYGDYYGIPQYXXPSLKSKIDPLLIARRDYAYGTQHDYLDHSDIIGWTREGVTEKPGSGLAALITDGPGGSKWMYVGKQHAGKVFYDLTGNRSDTVTINSDGWGEFKVNGGSVSVWVPRKTTVSTIA

SEQ ID NO: 19028 - protein, 515 aa, Geobacillus stearothermophilus
AAPFNGTMMQYFEWYLPDDGTLWTKVANEANNLSSLGITALWLPPAYKGTSRSDVGYGVYILYDLGEXNQKGTVRTKYGTKAQYLQAIQAAHAAGMQVYADVVFDHKGGADGTEWVDAVEVNPSDRNQEISGTYQIQAWTKFDFPGRGNTYSSFKWRWYHFDGVDWDESRKLSRIYKFRGIGKAWDWEVDTENGNYDYLMYADLDMDHPEVVTELKNWGKWYVNTTNIDGXRLDAVKHIKFSFFPDWLSYVRSQTGKPLXTVGEYWSYDXNKLHNYITKTXGTMSLFDAPLXNKFYTASKSGGAFDMRXLMTNTLMKDQPTLAVTFVDNHDTEPGQALQSWVDPWFKPLAYAFILTRQEGYPCVFYGDYYGIPQYNIPSLKSKXDPLLIARRDYAYGXQHDYLDHSDIXGXTREGGTXKPGSGLAALITDGPGGSKWXYVGKQHAGKVFXDLTGNRSDTVTINSDGWGEFKVNGGSVSVXVPRKTTVSTIARPITTRPWTGEXVRWIEPRXVAWP

SEQ ID NO: 19029 - protein, 486 aa, Geobacillus stearothermophilus
AAPFNGTMMQYFEWYLPDDGTLWTKVANEANNLSSLGITALWLPPAYKGTSRSDVGYGVYDLYDLGEFNQKGTVRTKYGTKAQYLQAIQAAHAAGMQVYADVVFDHKGGADGTEWVDAVEVNPSDRNQEISGTYQIQAWTKFDFPGRGNTYSSFKWRWYHFDGVDWDESRKLSRIYKFRGIGKAWDWEVDTENGNYDYLMYADLDMDHPEVVTELKNWGKWYVNTTNIDGFRLDAVKHIKFQFFPDWLSYVRSQTGKPLFTVGEYWSYDINKLHNYITKINGTMSLFDAPLHNKFYTASKSGGAFDMRTLMTNTLMKDQPTLAVTFVDNHDTEPGQALQSWVDPWFKPLAYAFILTRQEGYPCVFYGDYYGIPQYNIPSLKSKIDPLLIARRDYAYGTQHDYLDHSDIIGWTREGVTEKPGSGLAALITDGPGGSKWMYVGKQHAGKVFYDLTGNRSDTVTINSDGWGEFKVNGGSVSVWVPRKTT

SEQ ID NO: 19030 - protein, 486 aa, Geobacillus stearothermophilus
AAPFNGTMMQYFEWYLPDDGTLWTKVANEANNLSSLGITALWLPPAYKGTSRSDVGYGVYDLYDLGEFNQKGTVRTKYGTKAQYLQAIQAAHAAGMQVYADVVFDHKGGADGTEWVDAVEVNPSDRNQEISGTYQIQAWTKFDFPGRGNTYSSFKWRWYHFDGVDWDESRKLSRIYKFRGIGKAWDWEVDTENGNYDYLMYADLDMDHPEVVTELKNWGKWYVNTTNIDGFRLDAVKHIKFQFFPDWLSYVRSQTGKPLFTVGEYWSYDINKLHNYITKTNGTMSLFDAPLHNKFYTASKSGGAFDMRTLMTNTLMKDQPTLAVTFVDNHDTEPGQALQSWVDPWFKPLAYAFILTRQEGYPCVFYGDYYGIPQYNIPSLKSKIDPLLIARRDYAYGTQHDYLDHSDIIGWTREGVTEKPGSGLAALITDGPGGSKWMYVGKRHAGKVFYDLTGNRSDTVTINSDGWGEFKVNGGSVSVWVPRKTT

SEQ ID NO: 19031 - protein, 486 aa, Geobacillus stearothermophilus
AAPFNGTMMQYFEWYLPDDGTLWTKVANEANNLSSLGITALWLPPAYKGTSRSDVGYGVYDLYDLGEFNQKGTVRTKYGTKAQYLQAIQAAHAAGMEVYADVVFDHKGGADGTEWVDAVEVNPSDRNQEISGTYQIQAWTKFDFPGRGNTYSSFKWRWYHFDGVDWDESRKLSRIYKFRGIGKAWDWEVDTENGNYDYLMYADLDMDHPEVVTELKNWGKWYVNTTNIDGFRLDAVKHIKFQFFPDWLSYVRSQTGKPLFTVGEYWSYDINKLHNYITKTNGTMSLFDAPLHNKFYTASKSGGAFDMRTLMTNTLMKDQPTLAVTFVDNHDTEPGQALQSWVDPWFKPLAYAFILTRQEGYPCVFYGDYYGIPQYNIPSLKSKIDPLLIARRDYAYGTQHDYLDHSDIIGWTREGVTEKPGSGLAALITDGPGGSKWMYVGKQHAGKVFYDLTGNRSDTVTINSDGWGEFKVNGGSVSVWVPRKTT

SEQ ID NO: 19032 - protein, 486 aa, Geobacillus stearothermophilus
AAPFNGTMMQYFEWYLPDDGTLWTKVANEANNLSSLGITALWLPPAYKGTSRSDVGYGVYDLYDLGEFNQKGTVRTKYGTKAQYLQAIQAAHAAGMQVYADVVFDHKGGADGTEWVDAVEVNPSDRNQEISGTYQIQAWTKFDFPGRGNTYSSFKWRWYHFDGVDWDESRKLSRIYKFRGIGKAWDWEVDTENGNYDYLMYADLDMDHPEVVTELKNWGKWYVNTTNIDGFRLDAVKHIKFQFFPDWLSYVRSQTGKPLFTVGEYWSYDINKLHNYITKTNGTMSLFDAPLHNKFYTASKSGGAFDMRTLMTNTLMKDQPTLAVTFVDNHDTEPGQALQSWVDPWFKPLAYAFILTRREGYPCVFYGDYYGIPQYNIPSLKSKIDPLLIARRDYAYGTQHDYLDHSDIIGWTREGVTEKPGSGLAALITDGPGGSKWMYVGKQHAGKVFYDLTGNRSDTVTINSDGWGEFKVNGGSVSVWVPRKTT

SEQ ID NO: 19033 - protein, 486 aa, Geobacillus stearothermophilus
AAPFNGTMMQYFEWYLPDDGTLWTKVANEANNLSSLGITALWLPPAYKGTSRSDVGYGVYDLYDLGEFNQKGTVRTKYGTKAQYLQAIQAAHAAGMQVYADVVFDHKGGADGTEWVDAVEVNPSDRNQEISGTYQIQAWTKFDFPGRGNTYSSFKWRWYHFDGVDWDESRKLSRIYKFRGIGKAWDWEVDTENGNYDYLMYADLDMDHPEVVTELKNWGKWYVNTTNIDGFRLDAVKHIKFQFFPDWLSYVRSQTGKPLFTVGEYWSYDINKLHNYITKTNGTMSLFDAPLHNKFYTASKSGGAFDMRTLMTNTLMKDQPTLAVTFVDNHDTEPGQALQSWVDPWFKPLAYAFILTREEGYPCVFYGDYYGIPQYNIPSLKSKIDPLLIARRDYAYGTQHDYLDHSDIIGWTREGVTEKPGSGLAALITDGPGGSKWMYVGKQHAGKVFYDLTGNRSDTVTINSDGWGEFKVNGGSVSVWVPRKTT

SEQ ID NO: 19034 - protein, 486 aa, Geobacillus stearothermophilus
AAPFNGTMMQYFEWYLPDDGTLWTKVANEANNLSSLGITALWLPPAYKGTSRSDVGYGVYDLYDLGEFNQKGTVRTKYGTKAQYLQAIQAAHAAGMQVYADVVFDHKGGADGTEWVDAVEVNPSDRNQEISGTYQIQAWTKFDFPGRGNTYSSFKWRWYHFDGVDWDESRKLSRIYKFRGIGKAWDWEVDTENGNYDYLMYADLDMDHPEVVTELKNWGKWYVNTTNIDGFRLDAVKHIKFQFFPDWLSYVRSQTGKPLFTVGEYWSYDINKLHNYITKTNGTMSLFDAPLHNKFYTASKSGGAFDMRTLMTNTLMKDRPTLAVTFVDNHDTEPGQALQSWVDPWFKPLAYAFILTRQEGYPCVFYGDYYGIPQYNIPSLKSKIDPLLIARRDYAYGTQHDYLDHSDIIGWTREGVTEKPGSGLAALITDGPGGSKWMYVGKQHAGKVFYDLTGNRSDTVTINSDGWGEFKVNGGSVSVWVPRKTT

SEQ ID NO: 19035 - protein, 486 aa, Geobacillus stearothermophilus
AAPFNGTMMQYFEWYLPDDGTLWTKVANEANNLSSLGITALWLPPAYKGTSRSDVGYGVYDLYDLGEFNQKGTVRTKYGTKAQYLQAIQAAHAAGMQVYADVVFDHKGGADGTEWVDAVEVNPSDRNQEISGTYQIQAWTKFDFPGRGNTYSSFKWRWYHFDGVDWDESRKLSRIYKFRGIGKAWDWEVDTENGNYDYLMYADLDMDHPEVVTELKNWGKWYVNTTNIDGFRLDAVKHIKFQFFPDWLSYVRSQTGKPLFTVGEYWSYDINKLHNYITKTNGTMSLFDAPLHNKFYTASKSGGAFDMRTLMTNTLMKDQPTLAVTFVDNHDTEPGQALQSWVDPWFKPLAYAFILTRQEGYPCVFYGDYYGIPQYNIPSLKSKIDPLLIARRDYAYGTQHDYLDHSDIIGWTREGVTEKPGSGLAALITDGPGGSKWMYVGKEHAGKVFYDLTGNRSDTVTINSDGWGEFKVNGGSVSVWVPRKTT

SEQ ID NO: 19036 - protein, 486 aa, Geobacillus stearothermophilus
AAPFNGTMMQYFEWYLPDDGTLWTKVANEANNLSSLGITALWLPPAYKGTSRSDVGYGVYDLYDLGEFNQKGTVRTKYGTKAQYLQAIQAAHAAGMRVYADVVFDHKGGADGTEWVDAVEVNPSDRNQEISGTYQIQAWTKFDFPGRGNTYSSFKWRWYHFDGVDWDESRKLSRIYKFRGIGKAWDWEVDTENGNYDYLMYADLDMDHPEVVTELKNWGKWYVNTTNIDGFRLDAVKHIKFQFFPDWLSYVRSQTGKPLFTVGEYWSYDINKLHNYITKTNGTMSLFDAPLHNKFYTASKSGGAFDMRTLMTNTLMKDQPTLAVTFVDNHDTEPGQALQSWVDPWFKPLAYAFILTRQEGYPCVFYGDYYGIPQYNIPSLKSKIDPLLIARRDYAYGTQHDYLDHSDIIGWTREGVTEKPGSGLAALITDGPGGSKWMYVGKQHAGKVFYDLTGNRSDTVTINSDGWGEFKVNGGSVSVWVPRKTT

SEQ ID NO: 19037 - protein, 486 aa, Geobacillus stearothermophilus
AAPFNGTMMQYFEWYLPDDGTLWTKVANEANNLSSLGITALWLPPAYKGTSRSDVGYGVYDLYDLGEFNQKGTVRTKYGTKAQYLQAIQAAHAAGMQVYADVVFDHKGGADGTEWVDAVEVNPSDRNQEISGTYQIQAWTKFDFPGRGNTYSSFKWRWYHFDGVDWDESRKLSRIYKFRGIGKAWDWEVDTENGNYDYLMYADLDMDHPEVVTELKNWGKWYVNTTNIDGFRLDAVKHIKFQFFPDWLSYVRSQTGKPLFTVGEYWSYDINKLHNYITKTNGTMSLFDAPLHNKFYTASKSGGAFDMRTLMTNTLMKDEPTLAVTFVDNHDTEPGQALQSWVDPWFKPLAYAFILTRQEGYPCVFYGDYYGIPQYNIPSLKSKIDPLLIARRDYAYGTQHDYLDHSDIIGWTREGVTEKPGSGLAALITDGPGGSKWMYVGKQHAGKVFYDLTGNRSDTVTINSDGWGEFKVNGGSVSVWVPRKTT

SEQ ID NO: 19038 - protein, 482 aa, Bacillus sp.
HHNGTNGTMMQYFEWHLPNDGNHWNRLRDDASNLRNRGITAIWIPPAWKGTSQNDVGYGAYDLYDLGEFNQKGTVRTKYGTRSQLESAIHALKNNGVQVYGDVVMNHKAGADGTEFVDAVEVDPSNRNQETSGTYQIQAWTKFDFPGRGNTYSSFKWRWYHFDGTDWDISRKLNRIYKFTGKAWDWEVDTENGNYDYLMFADLDMDHPEVVNELRRWGEWYTNTLNLDGFRIDAVKHIKYSFTRDWLTHVRNATGKEMFAVAEFWKNDLGALENYLNKTNWNHSVFDVPLHYNLYNASNSGGNYDMAKLLNGTVVQKHPMHAVTFVDNHDSQPGESLESFVQEWFKPLAYALILTREQGYPSVFYGDYYGIPTHSVPAMKAKIDPILEARQNFAYGTQHDYFDHHNIIGWTREGNTTHPNSGLATIMSDGPGGEKWMYVGQNKAGQVWHDITGNKPGTVTINADGWANFSVNGGSVSIWVKR

SEQ ID NO: 19039 - protein, 482 aa, Bacillus sp.
HHNGTNGTMMQYFEWHLPNDGNHWNRLRDDASNLRNRGITAIWIPPAWKGTSQNDVGYGAYDLYDLGEFNQKGTVRTKYGTRSQLESAIHALKNNGVQVYGDVVMNHKAGADGTEFVDAVEVDPSNRNQETSGTYQIQAWTKFDFPGRGNTYSSFKWRWYHFDGTDWDESRKLNRIYKFTGKAWDWEVDTENGNYDYLMFADLDMDHPEVVNELRRWGEWYTNTLNLDGFRIDAVKHIKYSFTRDWLTHVRNATGKEMFAVAEFWKNDLGALENYLNKTNWNHSVFDVPLHYNLYNASNSGGNYDMAKLLNGTVVQKHPMHAVTFVDNHDSQPGESLESFVQEWFKPLAYALILTREQGYPSVFYGDYYGIPTHSVPAMKAKIDPILEARQNFAYGTQHDYFDHHNIIGWTREGNTTHPNSGLATIMSDGPGGEKWMYVGQNKAGQVWHDITGNKPGTVTINADGWANFSVNGGSVSIWVKR

SEQ ID NO: 19040 - protein, 482 aa, Bacillus sp.
HHNGTNGTMMQYFEWHLPNDGNHWNRLRDDASNLRNRGITAIWIPPAWKGTSQNDVGYGAYDLYDLGEFNQKGTVRTKYGTRSQLESAIHALKNNGVQVYGDVVMNHKAGADGTEFVDAVEVDPSNRNQETSGTYQIQAWTKFDFPGRGNTYSSFKWRWYHFDGTDWDESRKLNRIYKFSGKAWDWEVDTENGNYDYLMFADLDMDHPEVVNELRRWGEWYTNTLNLDGFRIDAVKHIKYSFTRDWLTHVRNATGKEMFAVAEFWKNDLGALENYLNKTNWNHSVFDVPLHYNLYNASNSGGNYDMAKLLNGTVVQKHPMHAVTFVDNHDSQPGESLESFVQEWFKPLAYALILTREQGYPSVFYGDYYGIPTHSVPAMKAKIDPILEARQNFAYGTQHDYFDHHNIIGWTREGNTTHPNSGLATIMSDGPGGEKWMYVGQNKAGQVWHDITGNKPGTVTINADGWANFSVNGGSVSIWVKR

SEQ ID NO: 19041 - protein, 482 aa, Bacillus sp.
HHNGTNGTMMQYFEWHLPNDGNHWNRLRDDASNLRNRGITAIWIPPAWKGTSQNDVGYGAYDLYDLGEFNQKGTVRTKYGTRSQLESAIHALKNNGVQVYGDVVMNHKAGADGTEFVDAVEVDPSNRNQETSGTYQIQAWTKFDFPGRGNTYSSFKWRWYHFDGTDWDESRKLNRIYKFRSKAWDWEVDTENGNYDYLMFADLDMDHPEVVNELRRWGEWYTNTLNLDGFRIDAVKHIKYSFTRDWLTHVRNATGKEMFAVAEFWKNDLGALENYLNKTNWNHSVFDVPLHYNLYNASNSGGNYDMAKLLNGTVVQKHPMHAVTFVDNHDSQPGESLESFVQEWFKPLAYALILTREQGYPSVFYGDYYGIPTHSVPAMKAKIDPILEARQNFAYGTQHDYFDHHNIIGWTREGNTTHPNSGLATIMSDGPGGEKWMYVGQNKAGQVWHDITGNKPGTVTINADGWANFSVNGGSVSIWVKR

SEQ ID NO: 19042 - protein, 482 aa, Bacillus sp.
HHNGTNGTMMQYFEWHLPNDGNHWNRLRDDASNLRNRGITAIWIPPAWKGTSQNDVGYGAYDLYDLGEFNQKGTVRTKYGTRSQLESAIHALKNNGVQVYGDVVMNHKAGADGTEFVDAVEVDPSNRNQETSGTYQIQAWTKFDFPGRGNTYSSFKWRWYHFDGTDWDESRKLNRIYKFTGKAWDWEVDTENGNYDYLMFADRDMDHPEVVNELRRWGEWYTNTLNLDGFRIDAVKHIKYSFTRDWLTHVRNATGKEMFAVAEFWKNDLGALENYLNKTNWNHSVFDVPLHYNLYNASNSGGNYDMAKLLNGTVVQKHPMHAVTFVDNHDSQPGESLESFVQEWFKPLAYALILTREQGYPSVFYGDYYGIPTHSVPAMKAKIDPILEARQNFAYGTQHDYFDHHNIIGWTREGNTTHPNSGLATIMSDGPGGEKWMYVGQNKAGQVWHDITGNKPGTVTINADGWANFSVNGGSVSIWVKR

SEQ ID NO: 19043 - protein, 482 aa, Bacillus sp.
HHNGTNGTMMQYFEWHLPNDGNHWNRLRDDASNLRNRGITAIWIPPAWKGTSQNDVGYGAYDLYDLGEFNQKGTVRTKYGTRSQLESAIHALKNNGVQVYGDVVMNHKAGADGTEFVDAVEVDPSNRNQETSGTYQIQAWTKFDFPGRGNTYSSFKWRWYHFDGTDWDESRKLNRIYKFRTKAWDWEVDTENGNYDYLMFADLDMDHPEVVNELRRWGEWYTNTLNLDGFRIDAVKHIKYSFTRDWLTHVRNATGKEMFAVAEFWKNDLGALENYLNKTNWNHSVFDVPLHYNLYNASNSGGNYDMAKLLNGTVVQKHPMHAVTFVDNHDSQPGESLESFVQEWFKPLAYALILTREQGYPSVFYGDYYGIPTHSVPAMKAKIDPILEARQNFAYGTQHDYFDHHNIIGWTREGNTTHPNSGLATIMSDGPGGEKWMYVGQNKAGQVWHDITGNKPGTVTINADGWANFSVNGGSVSIWVKR

SEQ ID NO: 19044 - protein, 482 aa, Bacillus sp.
HHNGTNGTMMQYFEWHLPNDGNHWNRLRDDASNLRNRGITAIWIPPAWKGTSQNDVGYGAYDLYDLGEFNQKGTVRTKYGTRSQLESAIHALKNNGVQVYGDVVMNHKAGADGTEFVDAVEVDPSNRNQETSGTYQIQAWTKFDFPGRGNTYSSFKWRWYHFDGTDWDVSRKLNRIYKFTGKAWDWEVDTENGNYDYLMFADLDMDHPEVVNELRRWGEWYTNTLNLDGFRIDAVKHIKYSFTRDWLTHVRNATGKEMFAVAEFWKNDLGALENYLNKTNWNHSVFDVPLHYNLYNASNSGGNYDMAKLLNGTVVQKHPMHAVTFVDNHDSQPGESLESFVQEWFKPLAYALILTREQGYPSVFYGDYYGIPTHSVPAMKAKIDPILEARQNFAYGTQHDYFDHHNIIGWTREGNTTHPNSGLATIMSDGPGGEKWMYVGQNKAGQVWHDITGNKPGTVTINADGWANFSVNGGSVSIWVKR

SEQ ID NO: 19045 - protein, 533 aa, Bacillus licheniformis
LLAFLLTVSLFCPTGQPAKAAAPFNGTMMQYFEWYLPDDGTLWTKVANEANNLSSLGITALWLPPAYKGTSRSDVGYGAYDLYDLGEFNQKGTVRTKYGTKAQYLQAIRAAHAAGMQVYADVVFDHKGGADGTEWVDAVEVNPSDRNQVISGTYQIQAWTKFDFPGRGNTYSSFKWRWYHFDGVDWDESRKLSRIYLFEGKAWDWEVDTEFGNYDYLMYADLDMDYPEVVTELKNWGPWYVLTTNIDGFRLDAVKHIKFSFFPDWLSYVRSSTGKPLFTVGEYWSYDINKLHNYITKTDGTMSLFDAPLHNKFYTASKSGGAFDMRTLMTNTLMKDQPTLAVTFVDNHDTEPGQALQSWVDPWFKPLAYAFILTRQEGYPCVFYGDYYGIPQYNIPSLKSKIDPLLIARRDYAYGTQHDYLDHSDIIGWTREGGTEKPGSGLAALITDGPGGSKWMYVGKQHAGKVFYDLTGNRSDTVTINSDGWGEFKVNGGSVSVWVPRKTTVSTIARPITTRPWTGEFVRWTEPRLVAWP

SEQ ID NO: 19046 - protein, 532 aa, Geobacillus stearothermophilus
LAFLLTALLFCPTGQPAKAAAPFNGTMMQYFEWYLPDDGTLWTKVANEANNLSSLGITALWLPPAYKGTSRSDVGYGVYDLYDLGEFNQKGAVRTKYGTKAQYLQAIQAAHAAGMQVYADVVFDHKGGADGTEWVDAVEVNPSDRNQRISGTYQIQAWTKFDFPGRGNTYSSFKWRWYHFDGVDWDESRKLSRIYKFRGKAWDWEVDTENGNYDYLMYADLDMDHPEVVTELKSWGKWYVNTTNIDGFRLDAVKHIKFSFFPDWLSYVRSQTGKPLFTVGEYWSYDINKLHNYIMKTNGTMSLFDAPLHNKFYTASKSGGTFDMRTLMTNTLMKDQPTLAVTFVDNHDTEPGQALQSWVDPWFKPLAYAFILTRQEGYPCVFYGDYYGIPQYNIPSLKSKIDPLLIARRDYAYGTQHDYLDHSDIIGWTREGVTEKPGSGLAALITDGPGGSKWMYVGKQHAGKVFYDLTGNRSDTVTINSDGWGEFKVNGGSVSVWVPRKTTVSTIAWSITTRPWTDEFVRWTEPRLVAWP

SEQ ID NO: 19047 - protein, 534 aa, Geobacillus stearothermophilus
LAFLLTALLFCPTGQPAKAAAPFNGTMMQYFEWYLPDDGTLWTKVANEANNLSSLGITALWLPPAYKGTSRSDVGYGVYDLYDLGEFNQKGAVRTKYGTKAQYLQAIQAAHAAGMQVYADVVFDHKGGADGTEWVDAVEVNPSDRNQEISGTYQIQAWTKFDFPGRGNTYSSFKWRWYHFDGVDWDESRKLSRIYKFRGIGKAWDWEVDTENGNYDYLMYADLDMDHPEVVTELKSWGKWYVNTTNIDGFRLDAVKHIKFSFFPDWLSDVRSQTGKPLFTVGEYWSYDINKLHNYIMKTNGTMSLFDAPLHNKFYTASKSGGTFDMRTLMTNTLMKDQPTLAVTFVDNHDTEPGQALQSWVDPWFKPLAYAFILTRQEGYPCVFYGDYYGIPQYNIPSLKSKIDPLLIARRDYAYGTQHDYLDHSDIIGWTREGVTEKPGSGLAALITDGPGGSKWMYVGKQHAGKVFYDLTGNRSDTVTINSDGWGEFKVNGGSVSVWVPRKTTVSTIAWSITTRPWTDEFVRWTEPRLVAWP

SEQ ID NO: 19048 - protein, 535 aa, Geobacillus stearothermophilus
LAFLLTALLFCPTGQPAKAAAPFNGTMMQYFEWYLPDDGTLWTKVANEANNLSSLGITALWLPPAYKGTSRSDVGYGVYDLYDLGEFNQKGAVRTKYGTKAQYLQAIQAAHAAGMQVYADVVFDHKGGADGTEWVDAVEVNPSDRNQEISGTYQIQAWTKFDFPGRGNTYSSFKWRWYHFDGVDWDESRKLSRIYKFRGIGKAWDWEVDTENGNYDYLMYADLDMDHPEVVTELKSWGKWYVNTTNIDGFRLDAVKHIKFSFFPDWLSDVRSQTGKPLFTVGEYWSYDINKLHNTYIMKTNGTMSLFDAPLHNKFYTASKSGGTFDMRTLMTNTLMKDQPTLAVTFVDNHDTEPGQALQSWVDPWFKPLAYAFILTRQEGYPCVFYGDYYGIPQYNIPSLKSKIDPLLIARRDYAYGTQHDYLDHSDIIGWTREGVTEKPGSGLAALITDGPGGSKWMYVGKQHAGKVFYDLTGNRSDTVTINSDGWGEFKVNGGSVSVWVPRKTTVSTIAWSITTRPWTDEFVRWTEPRLVAWP

SEQ ID NO: 19049 - protein, 493 aa, Geobacillus stearothermophilus
AAPFNGTMMQYFEWYLPDDGTLWTKVANEANNLSSLGITALWLPPAYKGTSRSDVGYGVYDLYDLGEFNQKGTVRTKYGTKAQYLQAIQAAHAAGMEVYADVVFDHKGGADGTEWVDAVEVNPSDRNQEISGTYQIQAWTKFDFPGRGNTYSSFKWRWYHFDGVDWDESRKLSRIYKFRGIGKAWDWEVDTENGNYDYLMYADLDMDHPEVVTELKNWGKWYVNTTNIDGFRLDAVKHIKFQFFPDWLSYVRSQTGKPLFTVGEYWSYDINKLHNYITKTNGTMSLFDAPLHNKFYTASKSGGAFDMRTLMTNTLMKDQPTLAVTFVDNHDTEPGQALQSWVDPWFKPLAYAFILTRREGYPCVFYGDYYGIPQYNIPSLKSKIDPLLIARRDYAYGTQHDYLDHSDIIGWTREGVTEKPGSGLAALITDGPGGSKWMYVGKQHAGKVFYDLTGNRSDTVTINSDGWGEFKVNGGSVSVWVPRKTTVSTIARP

SEQ ID NO: 19050 - protein, 493 aa, Geobacillus stearothermophilus
AAPFNGTMMQYFEWYLPDDGTLWTKVANEANNLSSLGITALWLPPAYKGTSRSDVGYGVYDLYDLGEFNQKGTVRTKYGTKAQYLQAIQAAHAAGMQVYADVVFDHKGGADGTEWVDAVEVNPSDRNQEISGTYQIQAWTKFDFPGRGNTYSSFKWRWYHFDGVDWDESRKLSRIYKFRGIGKAWDWEVDTENGNYDYLMYADLDMDHPEVVTELKNWGKWYVNTTNIDGFRLDAVKHIKFQFFPDWLSYVRSQTGKPLFTVGEYWSYDINKLHNYITKTNGTMSLFDAPLHNKFYTASKSGGAFDMRTLMTNTLMKDEPTLAVTFVDNHDTEPGQALQSWVDPWFKPLAYAFILTRREGYPCVFYGDYYGIPQYNIPSLKSKIDPLLIARRDYAYGTQHDYLDHSDIIGWTREGVTEKPGSGLAALITDGPGGSKWMYVGKQHAGKVFYDLTGNRSDTVTINSDGWGEFKVNGGSVSVWVPRKTTVSTIARP

SEQ ID NO: 19051 - protein, 493 aa, Geobacillus stearothermophilus
AAPFNGTMMQYFEWYLPDDGTLWTKVANEANNLSSLGITALWLPPAYKGTSRSDVGYGVYDLYDLGEFNQKGTVRTKYGTKAQYLQAIQAAHAAGMRVYADVVFDHKGGADGTEWVDAVEVNPSDRNQEISGTYQIQAWTKFDFPGRGNTYSSFKWRWYHFDGVDWDESRKLSRIYKFRGIGKAWDWEVDTENGNYDYLMYADLDMDHPEVVTELKNWGKWYVNTTNIDGFRLDAVKHIKFQFFPDWLSYVRSQTGKPLFTVGEYWSYDINKLHNYITKTNGTMSLFDAPLHNKFYTASKSGGAFDMRTLMTNTLMKDQPTLAVTFVDNHDTEPGQALQSWVDPWFKPLAYAFILTRREGYPCVFYGDYYGIPQYNIPSLKSKIDPLLIARRDYAYGTQHDYLDHSDIIGWTREGVTEKPGSGLAALITDGPGGSKWMYVGKQHAGKVFYDLTGNRSDTVTINSDGWGEFKVNGGSVSVWVPRKTTVSTIARP

SEQ ID NO: 19052 - protein, 493 aa, Geobacillus stearothermophilus
AAPFNGTMMQYFEWYLPDDGTLWTKVANEANNLSSLGITALWLPPAYKGTSRSDVGYGVYDLYDLGEFNQKGTVRTKYGTKAQYLQAIQAAHAAGMQVYADVVFDHKGGADGTEWVDAVEVNPSDRNQEISGTYQIQAWTKFDFPGRGNTYSSFKWRWYHFDGVDWDESRKLSRIYKFRGIGKAWDWEVDTENGNYDYLMYADLDMDHPEVVTELKNWGKWYVNTTNIDGFRLDAVKHIKFSFFPDWLSYVRSQTGKPLFTVGEYWSYDINKLHNYITKTNGTMSLFDAPLHNKFYTASKSGGAFDMRTLMTNTLMKDEPTLAVTFVDNHDTEPGQALQSWVDPWFKPLAYAFILTREEGYPCVFYGDYYGIPQYNIPSLKSKIDPLLIARRDYAYGTQHDYLDHSDIIGWTREGVTEKPGSGLAALITDGPGGSKWMYVGKQHAGKVFYDLTGNRSDTVTINSDGWGEFKVNGGSVSVWVPRKTTVSTIARP

SEQ ID NO: 19053 - protein, 493 aa, Geobacillus stearothermophilus
AAPFNGTMMQYFEWYLPDDGTLWTKVANEANNLSSLGITALWLPPAYKGTSRSDVGYGVYDLYDLGEFNQKGTVRTKYGTKAQYLQAIQAAHAAGMQVYADVVFDHKGGADGTEWVDAVEVNPSDRNQEISGTYQIQAWTKFDFPGRGNTYSSFKWRWYHFDGVDWDESRKLSRIYKFRGIGKAWDWEVDTENGNYDYLMYADLDMDHPEVVTELKNWGKWYVNTTNIDGFRLDAVKHIKFSFFPDWLSYVRSQTGKPLFTVGEYWSYDINKLHNYITKTNGTMSLFDAPLHNKFYTASKSGGAFDMRTLMTNTLMKDRPTLAVTFVDNHDTEPGQALQSWVDPWFKPLAYAFILTRQEGYPCVFYGDYYGIPQYNIPSLKSKIDPLLIARRDYAYGTQHDYLDHSDIIGWTREGVTEKPGSGLAALITDGPGGSKWMYVGKEHAGKVFYDLTGNRSDTVTINSDGWGEFKVNGGSVSVWVPRKTTVSTIARP

SEQ ID NO: 19054 - protein, 493 aa, Geobacillus stearothermophilus
AAPFNGTMMQYFEWYLPDDGTLWTKVAREANNLSSLGITALWLPPAYKGTSRSDVGYGVYDLYDLGEFNQKGTVRTKYGTKAQYLQAIQAAHAAGMQVYADVVFDHKGGADGTEWVDAVEVNPSDRNQEISGTYQIQAWTKFDFPGRGNTYSSFKWRWYHFDGVDWDESRKLSRIYKFRGIGKAWDWEVDTENGNYDYLMYADLDMDHPEVVTELKNWGKWYVNTTNIDGFRLDAVKHIKFSFFPDWLSYVRSQTGKPLFTVGEYWSYDINKLHNYITKTNGTMSLFDAPLHNKFYTASKSGGAFDMRTLMTNTLMKNQPTLAVTFVDNHDTEPGQALQSWVDPWFKPLAYAFILTRQEGYPCVFYGDYYGIPQYNIPSLKSKIDPLLIARRDYAYGTQHDYLDHSDIIGWTREGVTEKPGSGLAALITDGPGGSKWMYVGKQHAGKVFYDLTGNRSDTVTINSDGWGEFKVNGGSVSVWVPRKTTVSTIARP

SEQ ID NO: 19055 - protein, 493 aa, Geobacillus stearothermophilus
AAPFNGTMMQYFEWYLPDDGTLWTKVANEANNLSSLGITALWLPPAYKGTSRSDVGYGVYDLYDLGEFNQKGTVRTKYGTKAQYLQAIQAAHAAGMRVYADVVFDHKGGADGTEWVDAVEVNPSDRNQEISGTYQIQAWTKFDFPGRGNTYSSFKWRWYHFDGVDWDESRKLSRIYKFRGIGKAWDWEVDTENGNYDYLMYADLDMDHPEVVTELKNWGKWYVNTTNIDGFRLDAVKHIKFQFFPDWLSYVRSQTGKPLFTVGEYWSYDINKLHNYITKTNGTMSLFDAPLHNKFYTASKSGGAFDMRTLMTNTLMKDQPTLAVTFVDNHDTEPGQALQSWVDPWFKPLAYAFILTRQEGYPCVFYGDYYGIPQYNIPSLKSKIDPLLIARRDYAYGTQHDYLDHSDIIGWTREGVTEKPGSGLAALITDGPGGSKWMYVGKRHAGKVFYDLTGNRSDTVTINSDGWGEFKVNGGSVSVWVPRKTTVSTIARP

SEQ ID NO: 19056 - protein, 493 aa, Geobacillus stearothermophilus
AAPFNGTMMQYFEWYLPDDGTLWTKVANEANNLSSLGITALWLPPAYKGTSRSDVGYGVYDLYDLGEFNQKGTVRTKYGTKAQYLQAIQAAHAAGMQVYADVVFDHKGGADGTEWVDAVEVNPSDRNQEISGTYQIQAWTKFDFPGRGNTYSSFKWRWYHFNGVDWDESRKLSRIYKFRGIGKAWNWEVDTENGNYDYLMYANLDMNHPEVVTELKNWGKWYVNTTNIDGFRLDAVKHIKFSFFPDWLSYVRSQTGKPLFTVGEYWSYDINKLHNYITKTDGTMSLFDAPLHNKFYTASKSGGAFDMRTLMTNTLMKDQPTLAVTFVDNHDTEPGQALQSWVDPWFKPLAYAFILTRQEGYPCVFYGDYYGIPQYNIPSLKSKIDPLLIARRDYAYGTQHDYLDHSDIIGWTREGGTEKPGSGLAALITDGPGGSKWMYVGKQHAGKVFYDLTGNRSDTVTINSDGWGEFKVNGGSVSVWVPRKTTVSTIARP

SEQ ID NO: 19057 - protein, 493 aa, Geobacillus stearothermophilus
AAPFNGTMMQYFEWYLPDDGTLWTKVANEANNLSSLGITALWLPPAYKGTSRSDVGYGVYDLYDLGEFNQKGTVRTKYGTKAQYLQAIQAAHAAGMQVYADVVFDHKGGADGTEWVDAVEVNPSDRNQEISGTYQIQAWTKFDFPGRGNTYSSFKWRWYHFDGVDWDESRKLSRIYKFRGIGKAWDWEVDTENGNYDYLMYADLDMDHPEVVTELKNWGKWYVNTTNIDGFRLDAVKHIKFSFFPDWLSYVRSQTGKPLFTVGEYWSYDINKLHNYITKTNGTMSLFDAPLHNKFYTASKSGGAFDMRTLMTNTLMKDRPTLAVTFVDNHDTEPGQALQSWVDPWFKPLAYAFILTRREGYPCVFYGDYYGIPQYNIPSLKSKIDPLLIARRDYAYGTQHDYLDHSDIIGWTREGVTEKPGSGLAALITDGPGGSKWMYVGKQHAGKVFYDLTGNRSDTVTINSDGWGEFKVNGGSVSVWVPRKTTVSTIARP

SEQ ID NO: 19058 - protein, 493 aa, Geobacillus stearothermophilus
AAPFNGTMMQYFEWYLPDDGTLWTKVANEANNLSSLGITALWLPPAYKGTSRSDVGYGVYDLYDLGEFNQKGTVRTKYGTKAQYLQAIQAAHAAGMRVYADVVFDHKGGADGTEWVDAVEVNPSDRNQEISGTYQIQAWTKFDFPGRGNTYSSFKWRWYHFDGVDWDESRKLSRIYKFRGIGKAWDWEVDTENGNYDYLMYADLDMDHPEVVTELKNWGKWYVNTTNIDGFRLDAVKHIKFSFFPDWLSYVRSQTGKPLFTVGEYWSYDINKLHNYITKTNGTMSLFDAPLHNKFYTASKSGGAFDMRTLMTNTLMKDQPTLAVTFVDNHDTEPGQALQSWVDPWFKPLAYAFILTRREGYPCVFYGDYYGIPQYNIPSLKSKIDPLLIARRDYAYGTQHDYLDHSDIIGWTREGVTEKPGSGLAALITDGPGGSKWMYVGKQHAGKVFYDLTGNRSDTVTINSDGWGEFKVNGGSVSVWVPRKTTVSTIARP

SEQ ID NO: 19059 - protein, 493 aa, Geobacillus stearothermophilus
AAPFNGTMMQYFEWYLPDDGTLWTKVANEANNLSSLGITALWLPPAYKGTSRSDVGYGVYDLYDLGEFNQKGTVRTKYGTKAQYLQAIQAAHAAGMQVYADVVFDHKGGADGTEWVDAVEVNPSDRNQEISGTYQIQAWTKFDFPGRGNTYSSFKWRWYHFDGVDWDESRKLSRIYKFRGIGKAWDWEVDTENGNYDYLMYADLDMDHPEVVTELKNWGKWYVNTTNIDGFRLDAVKHIKFSFFPDWLSYVRSQTGKPLFTVGEYWSYDINKLHNYITKTNGTMSLFDAPLHNKFYTASKSGGAFDMRTLMTNTLMKDEPTLAVTFVDNHDTEPGQALQSWVDPWFKPLAYAFILTRQEGYPCVFYGDYYGIPQYNIPSLKSKIDPLLIARRDYAYGTQHDYLDHSDIIGWTREGVTEKPGSGLAALITDGPGGSKWMYVGKRHAGKVFYDLTGNRSDTVTINSDGWGEFKVNGGSVSVWVPRKTTVSTIARP

SEQ ID NO: 19060 - protein, 493 aa, Geobacillus stearothermophilus
AAPFNGTMMQYFEWYLPDDGTLWTKVANEANNLSSLGITALWLPPAYKGTSRSDVGYGVYDLYDLGEFNQKGTVRTKYGTKAQYLQAIQAAHAAGMQVYADVVFDHKGGADGTEWVDAVEVNPSDRNQEISGTYQIQAWTKFDFPGRGNTYSSFKWRWYHFDGVDWDESRKLSRIYKFRGIGKAWDWEVDTENGNYDYLMYADLDMDHPEVVTELKNWGKWYVNTTNIDGFRLDAVKHIKFSFFPDWLSYVRSQTGKPLFTVGEYWSYDINKLHNYITKTNGTMSLFDAPLHNKFYTASKSGGAFDMRTLMTNTLMKDEPTLAVTFVDNHDTEPGQALQSWVDPWFKPLAYAFILTRQEGYPCVFYGDYYGIPQYNIPSLKSKIDPLLIARRDYAYGTQHDYLDHSDIIGWTREGVTEKPGSGLAALITDGPGGSKWMYVGKEHAGKVFYDLTGNRSDTVTINSDGWGEFKVNGGSVSVWVPRKTTVSTIARP

SEQ ID NO: 19061 - protein, 493 aa, Geobacillus stearothermophilus
AAPFNGTMMQYFEWYLPDDGTLWTKVANEANNLSSLGITALWLPPAYKGTSRSDVGYGVYDLYDLGEFNQKGTVRTKYGTKAQYLQAIQAAHAAGMQVYADVVFDHKGGADGTEWVDAVEVNPSDRNQEISGTYQIQAWTKFDFPGRGNTYSSFKWRWYHFDGVDWDESRKLSRIYKFRGIGKAWDWEVDTENGNYDYLMYADLDMDHPEVVTELKNWGKWYVNTTNIDGFRLDAVKHIKFSFFPDWLSYVRSQTGKPLFTVGEYWSYDINKLHNYITKTNGTMSLFDAPLHNKFYTASKSGGAFDMRTLMTNTLMKDQPTLAVTFVDNHDTEPGQALQSWVDPWFKPLAYAFILTREEGYPCVFYGDYYGIPQYNIPSLKSKIDPLLIARRDYAYGTQHDYLDHSDIIGWTREGVTEKPGSGLAALITDGPGGSKWMYVGKEHAGKVFYDLTGNRSDTVTINSDGWGEFKVNGGSVSVWVPRKTTVSTIARP

SEQ ID NO: 19062 - protein, 493 aa, Geobacillus stearothermophilus
AAPFNGTMMQYFEWYLPDDGTLWTKVANEANNLSSLGITALWLPPAYKGTSRSDVGYGVYDLYDLGEFNQKGTVRTKYGTKAQYLQAIQAAHAAGMRVYADVVFDHKGGADGTEWVDAVEVNPSDRNQEISGTYQIQAWTKFDFPGRGNTYSSFKWRWYHFDGVDWDESRKLSRIYKFRGIGKAWDWEVDTENGNYDYLMYADLDMDHPEVVTELKNWGKWYVNTTNIDGFRLDAVKHIKFQFFPDWLSYVRSQTGKPLFTVGEYWSYDINKLHNYITKTNGTMSLFDAPLHNKFYTASKSGGAFDMRTLMTNTLMKDQPTLAVTFVDNHDTEPGQALQSWVDPWFKPLAYAFILTRQEGYPCVFYGDYYGIPQYNIPSLKSKIDPLLIARRDYAYGTQHDYLDHSDIIGWTREGVTEKPGSGLAALITDGPGGSKWMYVGKEHAGKVFYDLTGNRSDTVTINSDGWGEFKVNGGSVSVWVPRKTTVSTIARP

SEQ ID NO: 19063 - protein, 493 aa, Geobacillus stearothermophilus
AAPFNGTMMQYFEWYLPDDGTLWTKVANEANNLSSLGITALWLPPAYKGTSRSDVGYGVYDLYDLGEFNQKGTVRTKYGTKAQYLQAIQAAHAAGMEVYADVVFDHKGGADGTEWVDAVEVNPSDRNQEISGTYQIQAWTKFDFPGRGNTYSSFKWRWYHFDGVDWDESRKLSRIYKFRGIGKAWDWEVDTENGNYDYLMYADLDMDHPEVVTELKNWGKWYVNTTNIDGFRLDAVKHIKFSFFPDWLSYVRSQTGKPLFTVGEYWSYDINKLHNYITKTNGTMSLFDAPLHNKFYTASKSGGAFDMRTLMTNTLMKDRPTLAVTFVDNHDTEPGQALQSWVDPWFKPLAYAFILTRQEGYPCVFYGDYYGIPQYNIPSLKSKIDPLLIARRDYAYGTQHDYLDHSDIIGWTREGVTEKPGSGLAALITDGPGGSKWMYVGKQHAGKVFYDLTGNRSDTVTINSDGWGEFKVNGGSVSVWVPRKTTVSTIARP

SEQ ID NO: 19064 - protein, 493 aa, Geobacillus stearothermophilus
AAPFNGTMMQYFEWYLPDDGTLWTKVANEANNLSSLGITALWLPPAYKGTSRSDVGYGVYDLYDLGEFNQKGTVRTKYGTKAQYLQAIQAAHAAGMRVYADVVFDHKGGADGTEWVDAVEVNPSDRNQEISGTYQIQAWTKFDFPGRGNTYSSFKWRWYHFDGVDWDESRKLSRIYKFRGIGKAWDWEVDTENGNYDYLMYADLDMDHPEVVTELKNWGKWYVNTTNIDGFRLDAVKHIKFQFFPDWLSYVRSQTGKPLFTVGEYWSYDINKLHNYITKTNGTMSLFDAPLHNKFYTASKSGGAFDMRTLMTNTLMKDEPTLAVTFVDNHDTEPGQALQSWVDPWFKPLAYAFILTRQEGYPCVFYGDYYGIPQYNIPSLKSKIDPLLIARRDYAYGTQHDYLDHSDIIGWTREGVTEKPGSGLAALITDGPGGSKWMYVGKQHAGKVFYDLTGNRSDTVTINSDGWGEFKVNGGSVSVWVPRKTTVSTIARP

SEQ ID NO: 19065 - protein, 493 aa, Geobacillus stearothermophilus
AAPFNGTMMQYFEWYLPDDGTLWTKVANEANNLSSLGITALWLPPAYKGTSRSDVGYGVYDLYDLGEFNQKGTVRTKYGTKAQYLQAIQAAHAAGMEVYADVVFDHKGGADGTEWVDAVEVNPSDRNQEISGTYQIQAWTKFDFPGRGNTYSSFKWRWYHFDGVDWDESRKLSRIYKFRGIGKAWDWEVDTENGNYDYLMYADLDMDHPEVVTELKNWGKWYVNTTNIDGFRLDAVKHIKFQFFPDWLSYVRSQTGKPLFTVGEYWSYDINKLHNYITKTNGTMSLFDAPLHNKFYTASKSGGAFDMRTLMTNTLMKDQPTLAVTFVDNHDTEPGQALQSWVDPWFKPLAYAFILTREEGYPCVFYGDYYGIPQYNIPSLKSKIDPLLIARRDYAYGTQHDYLDHSDIIGWTREGVTEKPGSGLAALITDGPGGSKWMYVGKQHAGKVFYDLTGNRSDTVTINSDGWGEFKVNGGSVSVWVPRKTTVSTIARP

SEQ ID NO: 19066 - protein, 493 aa, Geobacillus stearothermophilus
AAPFNGTMMQYFEWYLPDDGTLWTKVANEANNLSSLGITALWLPPAYKGTSRSDVGYGVYDLYDLGEFNQKGTVRTKYGTKAQYLQAIQAAHAAGMEVYADVVFDHKGGADGTEWVDAVEVNPSDRNQEISGTYQIQAWTKFDFPGRGNTYSSFKWRWYHFDGVDWDESRKLSRIYKFRGIGKAWDWEVDTENGNYDYLMYADLDMDHPEVVTELKNWGKWYVNTTNIDGFRLDAVKHIKFQFFPDWLSYVRSQTGKPLFTVGEYWSYDINKLHNYITKTNGTMSLFDAPLHNKFYTASKSGGAFDMRTLMTNTLMKDQPTLAVTFVDNHDTEPGQALQSWVDPWFKPLAYAFILTRQEGYPCVFYGDYYGIPQYNIPSLKSKIDPLLIARRDYAYGTQHDYLDHSDIIGWTREGVTEKPGSGLAALITDGPGGSKWMYVGKEHAGKVFYDLTGNRSDTVTINSDGWGEFKVNGGSVSVWVPRKTTVSTIARP

SEQ ID NO: 19067 - protein, 493 aa, Geobacillus stearothermophilus
AAPFNGTMMQYFEWYLPDDGTLWTKVANEANNLSSLGITALWLPPAYKGTSRSDVGYGVYDLYDLGEFNQKGTVRTKYGTKAQYLQAIQAAHAAGMRVYADVVFDHKGGADGTEWVDAVEVNPSDRNQEISGTYQIQAWTKFDFPGRGNTYSSFKWRWYHFDGVDWDESRKLSRIYKFRGIGKAWDWEVDTENGNYDYLMYADLDMDHPEVVTELKNWGKWYVNTTNIDGFRLDAVKHIKFQFFPDWLSYVRSQTGKPLFTVGEYWSYDINKLHNYITKTNGTMSLFDAPLHNKFYTASKSGGAFDMRTLMTNTLMKDQPTLAVTFVDNHDTEPGQALQSWVDPWFKPLAYAFILTREEGYPCVFYGDYYGIPQYNIPSLKSKIDPLLIARRDYAYGTQHDYLDHSDIIGWTREGVTEKPGSGLAALITDGPGGSKWMYVGKQHAGKVFYDLTGNRSDTVTINSDGWGEFKVNGGSVSVWVPRKTTVSTIARP

SEQ ID NO: 19068 - protein, 493 aa, Geobacillus stearothermophilus
AAPFNGTMMQYFEWYLPDDGTLWTKVANEANNLSSLGITALWLPPAYKGTSRSDVGYGVYDLYDLGEFNQKGTVRTKYGTKAQYLQAIQALHAAGIQVYADVVFDHKGGADGTEWVDAVEVNPSDRNQVISGTYQIQAWTKFDFPGRGNTYSSFKWRWYHFDGVDWDESRKLSRIYEFRGIGKAWDWEVDTENGNYDYLMYADLDMDHPEVVTELKNWGPWYVLTTNIDGFRLDAVKHIKFQFFPDWLSYVRSSTGKPLFTVGEYWSYDINKLHNYITKTNGTMSLFDAPLHNKFYTASKSGGAFDMRTLMTNTLMKDQPTLAVTFVDNHDTEPGQALQSWVDPWFKPLAYAFILTRQEGYPCVFYGDYYGIPQYNIPSLKSKIDPLLIARRDYAYGTQHDYLDHSDIIGWTREGVTEKPGSGLAALITDGPGGSKWMYVGKQHAGKVFYDLTGNRSDTVTINSDGWGEFKVNGGSVSVWVPRKTTVSTIARP

SEQ ID NO: 19069 - protein, 493 aa, Geobacillus stearothermophilus
AAPFNGTMMQYFEWYLPDDGTLWTKVANEANNLSSLGITALWLPPAYKGTSRSDVGYGVYDLYDLGEFNQKGTVRTKYGTKAQYLQAIQAAHAAGMQVYADVVFDHKGGADGTEWVDAVEVNPSDRNQEISGTYQIQAWTKFDFPGRGNTYSSFKWRWYHFDGVDWDESRKLSRIYKFRGIGKAWDWEVDTENGNYDYLMYADLDMDHPEVVTELKNWGKWYVNTTNIDGFRLDAVKHIKFSFFPDWLSYVRSQTGKPLFTVGEYWSYDINKLHNYITKTNGTMSLFDAPLHNKFYTASKSGGAFDMRTLMTNTLMKDRPTLAVTFVDNHDTEPGQALQSWVDPWFKPLAYAFILTRQEGYPCVFYGDYYGIPQYNIPSLKSKIDPLLIARRDYAYGTQHDYLDHSDIIGWTREGVTEKPGSGLAALITDGPGGSKWMYVGKRHAGKVFYDLTGNRSDTVTINSDGWGEFKVNGGSVSVWVPRKTTVSTIARP

SEQ ID NO: 19070 - protein, 493 aa, Geobacillus stearothermophilus
AAPFNGTMMQYFEWYLPDDGTLWTKVANEANNLSSLGITALWLPPAYKGTSRSDVGYGVYDLYDLGEFNQKGTVRTKYGTKAQYLQAIQAAHAAGMQVYADVVFDHKGGADGTEWVDAVEVNPSDRNQEISGTYQIQAWTKFDFPGRGNTYSSFKWRWYHFDGVDWDESRKLSRIYKFRGIGKAWDWEVDTENGNYDYLMYADLDMDHPEVVTELKNWGKWYVNTTNIDGFRLDAVKHIKFQFFPDWLSYVRSQTGKPLFTVGEYWSYDINKLHNYITKTNGTMSLFDAPLHNKFYTASKSGGAFDMRTLMTNTLMKDQPTLAVTFVDNHDTEPGQALQSWVDPWFKPLAYAFILTRREGYPCVFYGDYYGIPQYNIPSLKSKIDPLLIARRDYAYGTQHDYLDHSDIIGWTREGVTEKPGSGLAALITDGPGGSKWMYVGKRHAGKVFYDLTGNRSDTVTINSDGWGEFKVNGGSVSVWVPRKTTVSTIARP

SEQ ID NO: 19071 - protein, 493 aa, Geobacillus stearothermophilus
AAPFNGTMMQYFEWYLPDDGTLWTKVANEANNLSSLGITALWLPPAYKGTSRSDVGYGVYDLYDLGEFNQKGTVRTKYGTKAQYLQAIQAAHAAGMQVYADVVFDHKGGADGTEWVDAVEVNPSDRNQEISGTYQIQAWTKFDFPGRGNTYSSFKWRWYHFDGVDWDESRKLSRIYKFRGIGKAWDWEVDTENGNYDYLMYADLDMDHPEVVTELKNWGKWYVNTTNIDGFRLDAVKHIKFSFFPDWLSYVRSQTGKPLFTVGEYWSYDINKLHNYITKTNGTMSLFDAPLHNKFYTASKSGGAFDMRTLMTNTLMKDQPTLAVTFVDNHDTEPGQALQSWVDPWFKPLAYAFILTRREGYPCVFYGDYYGIPQYNIPSLKSKIDPLLIARRDYAYGTQHDYLDHSDIIGWTREGVTEKPGSGLAALITDGPGGSKWMYVGKEHAGKVFYDLTGNRSDTVTINSDGWGEFKVNGGSVSVWVPRKTTVSTIARP

SEQ ID NO: 19072 - protein, 493 aa, Geobacillus stearothermophilus
AAPFNGTMMQYFEWYLPDDGTLWTKVADEANNLSSLGITALWLPPAYKGTSRSDVGYGVYDLYDLGEFNQKGTVRTKYGTKAQYLQAIQAAHAAGMQVYADVVFDHKGGADGTEWVDAVEVNPSDRNQEISGTYQIQAWTKFDFPGRGNTYSSFKWRWYHFDGVDWDESRKLSRIYKFRGIGKAWDWEVDTENGNYDYLMYADLDMDHPEVVTELKNWGKWYVNTTNIDGFRLDAVKHIKFSFFPDWLSYVRSQTGKPLFTVGEYWSYDINKLHNYITKTNGTMSLFDAPLHNKFYTASKSGGAFDMQTLMTNTLMKDQPTLAVTFVDNHDTEPGQALQSWVDPWFKPLAYAFILTRQEGYPCVFYGDYYGIPQYNIPSLKSKIDPLLIARRDYAYGTQHDYLDHSDIIGWTREGVTEKPGSGLAALITDGPGGSKWMYVGKQHAGKVFYDLTGNRSDTVTINSDGWGEFKVNGGSVSVWVPRKTTVSTIARP

SEQ ID NO: 19073 - protein, 493 aa, Geobacillus stearothermophilus
AAPFNGTMMQYFEWYLPDDGTLWTKVANEANNLSSLGITALWLPPAYKGTSRSDVGYGVYDLYDLGEFNQKGTVRTKYGTKAQYLQAIQAAHAAGMQVYADVVFDHKGGADGTEWVDAVEVNPSDRNQEISGTYQIQAWTKFDFPGRGNTYSSFKWRWYHFDGVDWDESRKLSRIYKFRGIGKAWDWEVDTENGNYDYLMYADLDMDHPEVVTELKNWGKWYVNTTNIDGFRLDAVKHIKFQFFPDWLSYVRSQTGKPLFTVGEYWSYDINKLHNYITKTNGTMSLFDAPLHNKFYTASKSGGAFDMRTLMTNTLMKDQPTLAVTFVDNHDTEPGQALQSWVDPWFKPLAYAFILTREEGYPCVFYGDYYGIPQYNIPSLKSKIDPLLIARRDYAYGTQHDYLDHSDIIGWTREGVTEKPGSGLAALITDGPGGSKWMYVGKEHAGKVFYDLTGNRSDTVTINSDGWGEFKVNGGSVSVWVPRKTTVSTIARP

SEQ ID NO: 19074 - protein, 493 aa, Geobacillus stearothermophilus
AAPFNGTMMQYFEWYLPDDGTLWTKVANEANNLSSLGITALWLPPAYKGTSRSDVGYGVYDLYDLGEFNQKGTVRTKYGTKAQYLQAIQAAHAAGMRVYADVVFDHKGGADGTEWVDAVEVNPSDRNQEISGTYQIQAWTKFDFPGRGNTYSSFKWRWYHFDGVDWDESRKLSRIYKFRGIGKAWDWEVDTENGNYDYLMYADLDMDHPEVVTELKNWGKWYVNTTNIDGFRLDAVKHIKFSFFPDWLSYVRSQTGKPLFTVGEYWSYDINKLHNYITKTNGTMSLFDAPLHNKFYTASKSGGAFDMRTLMTNTLMKDRPTLAVTFVDNHDTEPGQALQSWVDPWFKPLAYAFILTRQEGYPCVFYGDYYGIPQYNIPSLKSKIDPLLIARRDYAYGTQHDYLDHSDIIGWTREGVTEKPGSGLAALITDGPGGSKWMYVGKQHAGKVFYDLTGNRSDTVTINSDGWGEFKVNGGSVSVWVPRKTTVSTIARP

SEQ ID NO: 19075 - protein, 493 aa, Geobacillus stearothermophilus
AAPFNGTMMQYFEWYLPDDGTLWTKVANEANNLSSLGITALWLPPAYKGTSRSDVGYGVYDLYDLGEFNQKGTVRTKYGTKAQYLQAIQAAHAAGMQVYADVVFDHKGGADGTEWVDAVEVNPSDRNQEISGTYQIQAWTKFDFPGRGNTYSSFKWRWYHFDGVDWDESRKLSRIYKFRGIGKAWDWEVDTENGNYDYLMYADLDMDHPEVVTELKNWGKWYVNTTNIDGFRLDAVKHIKFQFFPDWLSYVRSQTGKPLFTVGEYWSYDINKLHNYITKTNGTMSLFDAPLHNKFYTASKSGGAFDMRTLMTNTLMKDQPTLAVTFVDNHDTEPGQALQSWVDPWFKPLAYAFILTRREGYPCVFYGDYYGIPQYNIPSLKSKIDPLLIARRDYAYGTQHDYLDHSDIIGWTREGVTEKPGSGLAALITDGPGGSKWMYVGKEHAGKVFYDLTGNRSDTVTINSDGWGEFKVNGGSVSVWVPRKTTVSTIARP

SEQ ID NO: 19076 - protein, 493 aa, Geobacillus stearothermophilus
AAPFNGTMMQYFEWYLPDDGTLWTKVANEANNLSSLGITALWLPPAYKGTSRSDVGYGVYDLYDLGEFNQKGTVRTKYGTKAQYLQAIQAAHAAGMEVYADVVFDHKGGADGTEWVDAVEVNPSDRNQEISGTYQIQAWTKFDFPGRGNTYSSFKWRWYHFDGVDWDESRKLSRIYKFRGIGKAWDWEVDTENGNYDYLMYADLDMDHPEVVTELKNWGKWYVNTTNIDGFRLDAVKHIKFQFFPDWLSYVRSQTGKPLFTVGEYWSYDINKLHNYITKTNGTMSLFDAPLHNKFYTASKSGGAFDMRTLMTNTLMKDEPTLAVTFVDNHDTEPGQALQSWVDPWFKPLAYAFILTRQEGYPCVFYGDYYGIPQYNIPSLKSKIDPLLIARRDYAYGTQHDYLDHSDIIGWTREGVTEKPGSGLAALITDGPGGSKWMYVGKQHAGKVFYDLTGNRSDTVTINSDGWGEFKVNGGSVSVWVPRKTTVSTIARP

SEQ ID NO: 19077 - protein, 493 aa, Geobacillus stearothermophilus
AAPFNGTMMQYFEWYLPDDGTLWTKVANEANNLSSLGITALWLPPAYKGTSRSDVGYGVYDLYDLGEFNQKGTVRTKYGTKAQYLQAIQAAHAAGMRVYADVVFDHKGGADGTEWVDAVEVNPSDRNQEISGTYQIQAWTKFDFPGRGNTYSSFKWRWYHFDGVDWDESRKLSRIYKFRGIGKAWDWEVDTENGNYDYLMYADLDMDHPEVVTELKNWGKWYVNTTNIDGFRLDAVKHIKFQFFPDWLSYVRSQTGKPLFTVGEYWSYDINKLHNYITKTNGTMSLFDAPLHNKFYTASKSGGAFDMRTLMTNTLMKDRPTLAVTFVDNHDTEPGQALQSWVDPWFKPLAYAFILTRQEGYPCVFYGDYYGIPQYNIPSLKSKIDPLLIARRDYAYGTQHDYLDHSDIIGWTREGVTEKPGSGLAALITDGPGGSKWMYVGKQHAGKVFYDLTGNRSDTVTINSDGWGEFKVNGGSVSVWVPRKTTVSTIARP

SEQ ID NO: 19078 - protein, 493 aa, Geobacillus stearothermophilus
AAPFNGTMMQYFEWYLPDDGTLWTKVANEANNLSSLGITALWLPPAYKGTSRSDVGYGVYDLYDLGEFNQKGTVRTKYGTKAQYLQAIQAAHAAGMQVYADVVFDHKGGADGTEWVDAVEVNPSDRNQEISGTYQIQAWTKFDFPGRGNTYSSFKWRWYHFDGVDWDESRKLSRIYKFRGIGKAWDWEVDTENGNYDYLMYADLDMDHPEVVTELKNWGKWYVNTTNIDGFRLDAVKHIKFQFFPDWLSYVRSQTGKPLFTVGEYWSYDINKLHNYITKTNGTMSLFDAPLHNKFYTASKSGGAFDMRTLMTNTLMKDRPTLAVTFVDNHDTEPGQALQSWVDPWFKPLAYAFILTRQEGYPCVFYGDYYGIPQYNIPSLKSKIDPLLIARRDYAYGTQHDYLDHSDIIGWTREGVTEKPGSGLAALITDGPGGSKWMYVGKEHAGKVFYDLTGNRSDTVTINSDGWGEFKVNGGSVSVWVPRKTTVSTIARP

SEQ ID NO: 19079 - protein, 493 aa, Geobacillus stearothermophilus
AAPFNGTMMQYFEWYLPDDGTLWTKVANEANNLSSLGITALWLPPAYKGTSRSDVGYGVYDLYDLGEFNQKGTVRTKYGTKAQYLQAIQAAHAAGMRVYADVVFDHKGGADGTEWVDAVEVNPSDRNQEISGTYQIQAWTKFDFPGRGNTYSSFKWRWYHFDGVDWDESRKLSRIYKFRGIGKAWDWEVDTENGNYDYLMYADLDMDHPEVVTELKNWGKWYVNTTNIDGFRLDAVKHIKFSFFPDWLSYVRSQTGKPLFTVGEYWSYDINKLHNYITKTNGTMSLFDAPLHNKFYTASKSGGAFDMRTLMTNTLMKDEPTLAVTFVDNHDTEPGQALQSWVDPWFKPLAYAFILTRQEGYPCVFYGDYYGIPQYNIPSLKSKIDPLLIARRDYAYGTQHDYLDHSDIIGWTREGVTEKPGSGLAALITDGPGGSKWMYVGKQHAGKVFYDLTGNRSDTVTINSDGWGEFKVNGGSVSVWVPRKTTVSTIARP

SEQ ID NO: 19080 - protein, 493 aa, Geobacillus stearothermophilus
AAPFNGTMMQYFEWYLPDDGTLWTKVANEANNLSSLGITALWLPPAYKGTSRSDVGYGVYDLYDLGEFNQKGTVRTKYGTKAQYLQAIQAAHAAGMQVYADVVFDHKGGADGTEWVDAVEVNPSDRNQEISGTYQIQAWTKFDFPGRGNTYSSFKWRWYHFNGVDWDESRKLSRIYKFRGIGKKWNEEVDTENGNYDYLMYADLDMNHPEVVTELKNWGKWYVNTTNIDGFRLDAVKHIKFSFFPDWLSYVRSQTGKPLFTVGEYWSYDINKLHNYITKTDGTMSLFDAPLHNKFYTASKSGGAFDMRTLMTNTLMKDQPTLAVTFVDNHDTEPGQALQSWVDPWFKPLAYAFILTRQEGYPCVFYGDYYGIPQYNIPSLKSKIDPLLIARRDYAYGTQHDYLDHSDIIGWTREGGTEKPGSGLAALITDGPGGSKWMYVGKQHAGKVFYDLTGNRSDTVTINSDGWGEFKVNGGSVSVWVPRKTTVSTIARP

SEQ ID NO: 19081 - protein, 493 aa, Geobacillus stearothermophilus
AAPFNGTMMQYFEWYLPDDGTLWTKVANEANNLSSLGITALWLPPAYKGTSRSDVGYGVYDLYDLGEFNQKGTVRTKYGTKAQYLQAIQAAHAAGMEVYADVVFDHKGGADGTEWVDAVEVNPSDRNQEISGTYQIQAWTKFDFPGRGNTYSSFKWRWYHFDGVDWDESRKLSRIYKFRGIGKAWDWEVDTENGNYDYLMYADLDMDHPEVVTELKNWGKWYVNTTNIDGFRLDAVKHIKFQFFPDWLSYVRSQTGKPLFTVGEYWSYDINKLHNYITKTNGTMSLFDAPLHNKFYTASKSGGAFDMRTLMTNTLMKDQPTLAVTFVDNHDTEPGQALQSWVDPWFKPLAYAFILTRQEGYPCVFYGDYYGIPQYNIPSLKSKIDPLLIARRDYAYGTQHDYLDHSDIIGWTREGVTEKPGSGLAALITDGPGGSKWMYVGKRHAGKVFYDLTGNRSDTVTINSDGWGEFKVNGGSVSVWVPRKTTVSTIARP

SEQ ID NO: 19082 - protein, 493 aa, Geobacillus stearothermophilus
AAPFNGTMMQYFEWYLPDDGTLWTKVANEANNLSSLGITALWLPPAYKGTSRSDVGYGVYDLYDLGEFNQKGTVRTKYGTKAQYLQAIQAAHAAGMQVYADVVFDHKGGADGTEWVDAVEVNPSDRNQEISGTYQIQAWTKFDFPGRGNTYSSFKWRWYHFDGVDWDESRKLSRIYKFRGIGKAWDWEVDTENGNYDYLMYADLDMDHPEVVTELKNWGKWYVNTTNIDGFRLDAVKHIKFQFFPDWLSYVRSQTGKPLFTVGEYWSYDINKLHNYITKTNGTMSLFDAPLHNKFYTASKSGGAFDMRTLMTNTLMKDEPTLAVTFVDNHDTEPGQALQSWVDPWFKPLAYAFILTRQEGYPCVFYGDYYGIPQYNIPSLKSKIDPLLIARRDYAYGTQHDYLDHSDIIGWTREGVTEKPGSGLAALITDGPGGSKWMYVGKEHAGKVFYDLTGNRSDTVTINSDGWGEFKVNGGSVSVWVPRKTTVSTIARP

SEQ ID NO: 19083 - protein, 493 aa, Geobacillus stearothermophilus
AAPFNGTMMQYFEWYLPDDGTLWTKVANEANNLSSLGITALWLPPAYKGTSRSDVGYGVYDLYDLGEFNQKGTVRTKYGTKAQYLQAIQAAHAAGMRVYADVVFDHKGGADGTEWVDAVEVNPSDRNQEISGTYQIQAWTKFDFPGRGNTYSSFKWRWYHFDGVDWDESRKLSRIYKFRGIGKAWDWEVDTENGNYDYLMYADLDMDHPEVVTELKNWGKWYVNTTNIDGFRLDAVKHIKFSFFPDWLSYVRSQTGKPLFTVGEYWSYDINKLHNYITKTNGTMSLFDAPLHNKFYTASKSGGAFDMRTLMTNTLMKDQPTLAVTFVDNHDTEPGQALQSWVDPWFKPLAYAFILTREEGYPCVFYGDYYGIPQYNIPSLKSKIDPLLIARRDYAYGTQHDYLDHSDIIGWTREGVTEKPGSGLAALITDGPGGSKWMYVGKQHAGKVFYDLTGNRSDTVTINSDGWGEFKVNGGSVSVWVPRKTTVSTIARP

SEQ ID NO: 19084 - protein, 493 aa, Geobacillus stearothermophilus
AAPFNGTMMQYFEWYLPDDGTLWTKVANEANNLSSLGITALWLPPAYKGTSRSDVGYGVYDLYDLGEFNQKGTVRTKYGTKAQYLQAIQAAHAAGMRVYADVVFDHKGGADGTEWVDAVEVNPSDRNQEISGTYQIQAWTKFDFPGRGNTYSSFKWRWYHFDGVDWDESRKLSRIYKFRGIGKAWDWEVDTENGNYDYLMYADLDMDHPEVVTELKNWGKWYVNTTNIDGFRLDAVKHIKFSFFPDWLSYVRSQTGKPLFTVGEYWSYDINKLHNYITKTNGTMSLFDAPLHNKFYTASKSGGAFDMRTLMTNTLMKDQPTLAVTFVDNHDTEPGQALQSWVDPWFKPLAYAFILTRQEGYPCVFYGDYYGIPQYNIPSLKSKIDPLLIARRDYAYGTQHDYLDHSDIIGWTREGVTEKPGSGLAALITDGPGGSKWMYVGKEHAGKVFYDLTGNRSDTVTINSDGWGEFKVNGGSVSVWVPRKTTVSTIARP

SEQ ID NO: 19085 - protein, 493 aa, Geobacillus stearothermophilus
AAPFNGTMMQYFEWYLPDDGTLWTKVANEANNLSSLGITALWLPPAYKGTSRSDVGYGVYDLYDLGEFNQKGTVRTKYGTKAQYLQAIQAAHAAGMQVYADVVFDHKGGADGTEWVDAVEVNPSDRNQEISGTYQIQAWTKFDFPGRGNTYSSFKWRWYHFDGVDWDESRKLSRIYKFRGIGKAWDWEVDTENGNYDYLMYADLDMDHPEVVTELKNWGKWYVNTTNIDGFRLDAVKHIKFQFFPDWLSYVRSQTGKPLFTVGEYWSYDINKLHNYITKTNGTMSLFDAPLHNKFYTASKSGGAFDMRTLMTNTLMKDRPTLAVTFVDNHDTEPGQALQSWVDPWFKPLAYAFILTRQEGYPCVFYGDYYGIPQYNIPSLKSKIDPLLIARRDYAYGTQHDYLDHSDIIGWTREGVTEKPGSGLAALITDGPGGSKWMYVGKRHAGKVFYDLTGNRSDTVTINSDGWGEFKVNGGSVSVWVPRKTTVSTIARP

SEQ ID NO: 19086 - protein, 493 aa, Geobacillus stearothermophilus
AAPFNGTMMQYFEWYLPDDGTLWTKVANEANNLSSLGITALWLPPAYKGTSRSDVGYGVYDLYDLGEFNQKGTVRTKYGTKAQYLQAIQAAHAAGMQVYADVVFDHKGGADGTEWVDAVEVNPSDRNQEISGTYQIQAWTKFDFPGRGNTYSSFKWRWYHFDGVDWDESRKLSRIYKFRGIGKAWDWEVDTENGNYDYLMYADLDMDHPEVVTELKNWGKWYVNTTNIDGFRLDAVKHIKFQFFPDWLSYVRSQTGKPLFTVGEYWSYDINKLHNYITKTNGTMSLFDAPLHNKFYTASKSGGAFDMRTLMTNTLMKDQPTLAVTFVDNHDTEPGQALQSWVDPWFKPLAYAFILTREEGYPCVFYGDYYGIPQYNIPSLKSKIDPLLIARRDYAYGTQHDYLDHSDIIGWTREGVTEKPGSGLAALITDGPGGSKWMYVGKRHAGKVFYDLTGNRSDTVTINSDGWGEFKVNGGSVSVWVPRKTTVSTIARP

SEQ ID NO: 19087 - protein, 493 aa, Geobacillus stearothermophilus
AAPFNGTMMQYFEWYLPDDGTLWTKVANEANNLSSLGITALWLPPAYKGTSRSDVGYGVYDLYDLGEFNQKGTVRTKYGTKAQYLQAIQAAHAAGMEVYADVVFDHKGGADGTEWVDAVEVNPSDRNQEISGTYQIQAWTKFDFPGRGNTYSSFKWRWYHFDGVDWDESRKLSRIYKFRGIGKAWDWEVDTENGNYDYLMYADLDMDHPEVVTELKNWGKWYVNTTNIDGFRLDAVKHIKFQFFPDWLSYVRSQTGKPLFTVGEYWSYDINKLHNYITKTNGTMSLFDAPLHNKFYTASKSGGAFDMRTLMTNTLMKDRPTLAVTFVDNHDTEPGQALQSWVDPWFKPLAYAFILTRQEGYPCVFYGDYYGIPQYNIPSLKSKIDPLLIARRDYAYGTQHDYLDHSDIIGWTREGVTEKPGSGLAALITDGPGGSKWMYVGKQHAGKVFYDLTGNRSDTVTINSDGWGEFKVNGGSVSVWVPRKTTVSTIARP

SEQ ID NO: 19088 - protein, 493 aa, Geobacillus stearothermophilus
AAPFNGTMMQYFEWYLPDDGTLWTKVANEANNLSSLGITALWLPPAYKGTSRSDVGYGVYDLYDLGEFNQKGTVRTKYGTKAQYLQAIQAAHAAGMQVYADVVFDHKGGADGTEWVDAVEVNPSDRNQEISGTYQIQAWTKFDFPGRGNTYSSFKWRWYHFDGVDWDESRKLSRIYKFRGIGKAWDWEVDTENGNYDYLMYADLDMDHPEVVTELKNWGKWYVNTTNIDGFRLDAVKHIKFSFFPDWLSYVRSQTGKPLFTVGEYWSYDINKLHNYITKTNGTMSLFDAPLHNKFYTASKSGGAFDMRTLMTNTLMKDEPTLAVTFVDNHDTEPGQALQSWVDPWFKPLAYAFILTRREGYPCVFYGDYYGIPQYNIPSLKSKIDPLLIARRDYAYGTQHDYLDHSDIIGWTREGVTEKPGSGLAALITDGPGGSKWMYVGKQHAGKVFYDLTGNRSDTVTINSDGWGEFKVNGGSVSVWVPRKTTVSTIARP

SEQ ID NO: 19089 - protein, 493 aa, Geobacillus stearothermophilus
AAPFNGTMMQYFEWYLPDDGTLWTKVANEANNLSSLGITALWLPPAYKGTSRSDVGYGVYDLYDLGEFNQKGTVRTKYGTKAQYLQAIQAAHAAGMQVYADVVFDHKGGADGTEWVDAVEVNPSDRNQEISGTYQIQAWTKFDFPGRGNTYSSFKWRWYHFDGVDWDESRKLSRIYKFRGIGKAWDWEVDTENGNYDYLMYADLDMDHPEVVTELKNWGKWYVNTTNIDGFRLDAVKHIKFQFFPDWLSYVRSQTGKPLFTVGEYWSYDINKLHNYITKTNGTMSLFDAPLHNKFYTASKSGGAFDMRTLMTNTLMKDEPTLAVTFVDNHDTEPGQALQSWVDPWFKPLAYAFILTRQEGYPCVFYGDYYGIPQYNIPSLKSKIDPLLIARRDYAYGTQHDYLDHSDIIGWTREGVTEKPGSGLAALITDGPGGSKWMYVGKRHAGKVFYDLTGNRSDTVTINSDGWGEFKVNGGSVSVWVPRKTTVSTIARP

SEQ ID NO: 19090 - protein, 493 aa, Geobacillus stearothermophilus
AAPFNGTMMQYFEWYLPDDGTLWTKVANEANNLSSLGITALWLPPAYKGTSRSDVGYGVYDLYDLGEFNQKGTVRTKYGTKAQYLQAIQAAHAAGMQVYADVVFDHKGGADGTEWVDAVEVNPSDRNQEISGTYQIQAWTKFDFPGRGNTYSSFKWRWYHFDGVDWDESRKLSRIYKFRGIGKAWDWEVDTEXGNYDYLMYADLDMDHPEVVTELKNWGKWYVNTTNIDGFRLDAVKHIKFSFFPDWLSYVRSQTGKPLFTVGEYWSYDINKLHNYITKTNGTMSLFDAPLHNKFYTASKSGGAFDMRTLMTNTLMKDQPTLAVTFVDNHDTEPGQALQSWVDPWFKPLAYAFILTRQEGYPCVFYGDYYGIPQYNIPSLKSKIDPLLIARRDYAYGTQHDYLDHSDIIGWTREGXTEKPGSGLAALITDGPGGSKWMYVGKQHAGKVFYDLTGNRSDTVTINSDGWGEFKVNGGSVSVWVPRKTTVSIAARP

SEQ ID NO: 19091 - protein, 493 aa, Geobacillus stearothermophilus
AAPFNGTMMQYFEWYLPDDGTLWTKVANEANNLSSLGITALWLPPAYKGTSRSDVGYGVYDLYDLGEFNQKGTVRTKYGTKAQYLQAIQAAHAAGMQVYADVVFDHKGGADGTEWVDAVEVNPSDRNQEISGTYQIQAWTKFDFPGRGNTYSSFKWRWYHFDGVDWDESRKLSRIYKFRGIGKAWDWEVDTENGNYDYLMYADLDMDHPEVVTELKNWGKWYVNTTNIDGFRLDAVKHIKFSFFPDWLSYVRSQTGKPLFTVGEYWSYDINKLHNYITKTNGTMSLFDAPLHNKFYTASKSGGAFDMRTLMTNTLMKDQPTLAVTFVDNHDTEPGQALQSWVDPWFKPLAYAFILTREEGYPCVFYGDYYGIPQYNIPSLKSKIDPLLIARRDYAYGTQHDYLDHSDIIGWTREGVTEKPGSGLAALITDGPGGSKWMYVGKRHAGKVFYDLTGNRSDTVTINSDGWGEFKVNGGSVSVWVPRKTTVSTIARP

SEQ ID NO: 19092 - protein, 493 aa, Geobacillus stearothermophilus
AAPFNGTMMQYFEWYLPDDGTLWTKVANEANNLSSLGITALWLPPAYKGTSRSDVGYGVYDLYDLGEFNQKGTVRTKYGTKAQYLQAIQAAHAAGMQVYADVVFDHKGGADGTEWVDAVEVNPSDRNQEISGTYQIQAWTKFDFPGRGNTYSSFKWRWYHFDGVDWDESRKLSRIYKFRGIGKAWDWEVDTENGNYDYLMYADLDMDHPEVVTELKNWGKWYVNTTNIDGFRLDAVKHIKFSFFPDWLSYVRSQTGKPLFTVGEYWSYDINKLHNYITKTNGTMSLFDAPLHNKFYTASKSGGAFDMRTLMTNTLMKDRPTLAVTFVDNHDTEPGQALQSWVDPWFKPLAYAFILTREEGYPCVFYGDYYGIPQYNIPSLKSKIDPLLIARRDYAYGTQHDYLDHSDIIGWTREGVTEKPGSGLAALITDGPGGSKWMYVGKQHAGKVFYDLTGNRSDTVTINSDGWGEFKVNGGSVSVWVPRKTTVSTIARP

SEQ ID NO: 19093 - protein, 493 aa, Geobacillus stearothermophilus
AAPFNGTMMQYFEWYLPDDGTLWTKVANEANNLSSLGITALWLPPAYKGTSRSDVGYGVYDLYDLGEFNQKGTVRTKYGTKAQYLQAIQAAHAAGMQVYADVVFDHKGGADGTEWVDAVEVNPSDRNQEISGTYQIQAWTKFDFPGRGNTYSSFKWRWYHFDGVDWDESRKLSRIYKFRGIGKAWDWEVDTENGNYDYLMYADLDMDHPEVVTELKNWGKWYVNTTNIDGFRLDAVKHIKFQFFPDWLSYVRSQTGKPLFTVGEYWSYDINKLHNYITKTNGTMSLFDAPLHNKFYTASKSGGAFDMRTLMTNTLMKDEPTLAVTFVDNHDTEPGQALQSWVDPWFKPLAYAFILTREEGYPCVFYGDYYGIPQYNIPSLKSKIDPLLIARRDYAYGTQHDYLDHSDIIGWTREGVTEKPGSGLAALITDGPGGSKWMYVGKQHAGKVFYDLTGNRSDTVTINSDGWGEFKVNGGSVSVWVPRKTTVSTIARP

SEQ ID NO: 19094 - protein, 493 aa, Geobacillus stearothermophilus
AAPFNGTMMQYFEWYLPDDGTLWTKVANEANNLSSLGITALWLPPAYKGTSRSDVGYGVYDLYDLGEFNQKGTVRTKYGTKAQYLQAIQAAHAAGMEVYADVVFDHKGGADGTEWVDAVEVNPSDRNQEISGTYQIQAWTKFDFPGRGNTYSSFKWRWYHFDGVDWDESRKLSRIYKFRGIGKAWDWEVDTENGNYDYLMYADLDMDHPEVVTELKNWGKWYVNTTNIDGFRLDAVKHIKFSFFPDWLSYVRSQTGKPLFTVGEYWSYDINKLHNYITKTNGTMSLFDAPLHNKFYTASKSGGAFDMRTLMTNTLMKDQPTLAVTFVDNHDTEPGQALQSWVDPWFKPLAYAFILTREEGYPCVFYGDYYGIPQYNIPSLKSKIDPLLIARRDYAYGTQHDYLDHSDIIGWTREGVTEKPGSGLAALITDGPGGSKWMYVGKQHAGKVFYDLTGNRSDTVTINSDGWGEFKVNGGSVSVWVPRKTTVSTIARP

SEQ ID NO: 19095 - protein, 493 aa, Geobacillus stearothermophilus
AAPFNGTMMQYFEWYLPDDGTLWTKVANEANNLSSLGITALWLPPAYKGTSRSDVGYGVYDLYDLGEFNQKGTVRTKYGTKAQYLQAIQAAHAAGMEVYADVVFDHKGGADGTEWVDAVEVNPSDRNQEISGTYQIQAWTKFDFPGRGNTYSSFKWRWYHFDGVDWDESRKLSRIYKFRGIGKAWDWEVDTENGNYDYLMYADLDMDHPEVVTELKNWGKWYVNTTNIDGFRLDAVKHIKFSFFPDWLSYVRSQTGKPLFTVGEYWSYDINKLHNYITKTNGTMSLFDAPLHNKFYTASKSGGAFDMRTLMTNTLMKDEPTLAVTFVDNHDTEPGQALQSWVDPWFKPLAYAFILTRQEGYPCVFYGDYYGIPQYNIPSLKSKIDPLLIARRDYAYGTQHDYLDHSDIIGWTREGVTEKPGSGLAALITDGPGGSKWMYVGKQHAGKVFYDLTGNRSDTVTINSDGWGEFKVNGGSVSVWVPRKTTVSTIARP

SEQ ID NO: 19096 - protein, 493 aa, Geobacillus stearothermophilus
AAPFNGTMMQYFEWYLPDDGTLWTKVANEANNLSSLGITALWLPPAYKGTSRSDVGYGVYDLYDLGEFNQKGTVRTKYGTKAQYLQAIQAAHAAGMEVYADVVFDHKGGADGTEWVDAVEVNPSDRNQEISGTYQIQAWTKFDFPGRGNTYSSFKWRWYHFDGVDWDESRKLSRIYKFRGIGKAWDWEVDTENGNYDYLMYADLDMDHPEVVTELKNWGKWYVNTTNIDGFRLDAVKHIKFSFFPDWLSYVRSQTGKPLFTVGEYWSYDINKLHNYITKTNGTMSLFDAPLHNKFYTASKSGGAFDMRTLMTNTLMKDQPTLAVTFVDNHDTEPGQALQSWVDPWFKPLAYAFILTRREGYPCVFYGDYYGIPQYNIPSLKSKIDPLLIARRDYAYGTQHDYLDHSDIIGWTREGVTEKPGSGLAALITDGPGGSKWMYVGKQHAGKVFYDLTGNRSDTVTINSDGWGEFKVNGGSVSVWVPRKTTVSTIARP

SEQ ID NO: 19097 - protein, 493 aa, Geobacillus stearothermophilus
AAPFNGTMMQYFEWYLPDDGTLWTKVANEANNLSSLGITALWLPPAYKGTSRSDVGYGVYDLYDLGEFNQKGTVRTKYGTKAQYLQAIQAAHAAGMEVYADVVFDHKGGADGTEWVDAVEVNPSDRNQEISGTYQIQAWTKFDFPGRGNTYSSFKWRWYHFDGVDWDESRKLSRIYKFRGIGKAWDWEVDTENGNYDYLMYADLDMDHPEVVTELKNWGKWYVNTTNIDGFRLDAVKHIKFSFFPDWLSYVRSQTGKPLFTVGEYWSYDINKLHNYITKTNGTMSLFDAPLHNKFYTASKSGGAFDMRTLMTNTLMKDQPTLAVTFVDNHDTEPGQALQSWVDPWFKPLAYAFILTRQEGYPCVFYGDYYGIPQYNIPSLKSKIDPLLIARRDYAYGTQHDYLDHSDIIGWTREGVTEKPGSGLAALITDGPGGSKWMYVGKEHAGKVFYDLTGNRSDTVTINSDGWGEFKVNGGSVSVWVPRKTTVSTIARP

SEQ ID NO: 19098 - protein, 493 aa, Geobacillus stearothermophilus
AAPFNGTMMQYFEWYLPDDGTLWTKVANEANNLSSLGITALWLPPAYKGTSRSDVGYGVYDLYDLGEFNQKGTVRTKYGTKAQYLQAIQAAHAAGMRVYADVVFDHKGGADGTEWVDAVEVNPSDRNQEISGTYQIQAWTKFDFPGRGNTYSSFKWRWYHFDGVDWDESRKLSRIYKFRGIGKAWDWEVDTENGNYDYLMYADLDMDHPEVVTELKNWGKWYVNTTNIDGFRLDAVKHIKFSFFPDWLSYVRSQTGKPLFTVGEYWSYDINKLHNYITKTNGTMSLFDAPLHNKFYTASKSGGAFDMRTLMTNTLMKDQPTLAVTFVDNHDTEPGQALQSWVDPWFKPLAYAFILTRQEGYPCVFYGDYYGIPQYNIPSLKSKIDPLLIARRDYAYGTQHDYLDHSDIIGWTREGVTEKPGSGLAALITDGPGGSKWMYVGKRHAGKVFYDLTGNRSDTVTINSDGWGEFKVNGGSVSVWVPRKTTVSTIARP

SEQ ID NO: 19099 - protein, 493 aa, Geobacillus stearothermophilus
AAPFNGTMMQYFEWYLPDDGTLWTKVANEANNLSSLGITALWLPPAYKGTSRSDVGYGVYDLYDLGEFNQKGTVRTKYGTKAQYLQAIQAAHAAGMQVYADVVFDHKGGADGTEWVDAVEVNPSDRNQEISGTYQIQAWTKFDFPGRGNTYSSFKWRWYHFDGVDWDESRKLSRIYKFRGIGKAWDWEVDTENGNYDYLMYADLDMDHPEVVTELKNWGKWYVNTTNIDGFRLDAVKHIKFSFFPDWLSYVRSQTGKPLFTVGEYWSYDINKLHNYITKTNGTMSLFDAPLHNKFYTASKSGGAFDMRTLMTNTLMKDQPTLAVTFVDNHDTEPGQALQSWVDPWFKPLAYAFILTRREGYPCVFYGDYYGIPQYNIPSLKSKIDPLLIARRDYAYGTQHDYLDHSDIIGWTREGVTEKPGSGLAALITDGPGGSKWMYVGKRHAGKVFYDLTGNRSDTVTINSDGWGEFKVNGGSVSVWVPRKTTVSTIARP

SEQ ID NO: 19100 - protein, 493 aa, Geobacillus stearothermophilus
AAPFNGTMMQYFEWYLPDDGTLWTKVANEANNLSSLGITALWLPPAYKGTSRSDVGYGVYDLYDLGEFNQKGTVRTKYGTKAQYLQAIQAAHAAGMEVYADVVFDHKGGADGTEWVDAVEVNPSDRNQEISGTYQIQAWTKFDFPGRGNTYSSFKWRWYHFDGVDWDESRKLSRIYKFRGIGKAWDWEVDTENGNYDYLMYADLDMDHPEVVTELKNWGKWYVNTTNIDGFRLDAVKHIKFSFFPDWLSYVRSQTGKPLFTVGEYWSYDINKLHNYITKTNGTMSLFDAPLHNKFYTASKSGGAFDMRTLMTNTLMKDQPTLAVTFVDNHDTEPGQALQSWVDPWFKPLAYAFILTRQEGYPCVFYGDYYGIPQYNIPSLKSKIDPLLIARRDYAYGTQHDYLDHSDIIGWTREGVTEKPGSGLAALITDGPGGSKWMYVGKRHAGKVFYDLTGNRSDTVTINSDGWGEFKVNGGSVSVWVPRKTTVSTIARP

SEQ ID NO: 19101 - protein, 493 aa, Geobacillus stearothermophilus
AAPFNGTMMQYFEWYLPDDGTLWTKVANEANNLSSLGITALWLPPAYKGTSRSDVGYGVYDLYDLGEFNQKGTVRTKYGTKAQYLQAIQAAHAAGMQVYADVVFDHKGGADGTEWVDAVEVNPSDRNQEISGTYQIQAWTKFDFPGRGNTYSSFKWRWYHFDGVDWDESRKLSRIYKFRGIGKAWDWEVDTENGNYDYLMYADLDMDHPEVVTELKNWGKWYVNTTNIDGFRLDAVKHIKFQFFPDWLSYVRSQTGKPLFTVGEYWSYDINKLHNYITKTNGTMSLFDAPLHNKFYTASKSGGAFDMRTLMTNTLMKDRPTLAVTFVDNHDTEPGQALQSWVDPWFKPLAYAFILTREEGYPCVFYGDYYGIPQYNIPSLKSKIDPLLIARRDYAYGTQHDYLDHSDIIGWTREGVTEKPGSGLAALITDGPGGSKWMYVGKQHAGKVFYDLTGNRSDTVTINSDGWGEFKVNGGSVSVWVPRKTTVSTIARP

SEQ ID NO: 19102 - protein, 493 aa, Geobacillus stearothermophilus
AAPFNGTMMQYFEWYLPDDGTLWTKVANEANNLSSLGITALWLPPAYKGTSRSDVGYGVYDLYDLGEFNQKGTVRTKYGTKAQYLQAIQAAHAAGMQVYADVVFDHKGGADGTEWVDAVEVNPSDRNQEISGTYQIQAWTKFDFPGRGNTYSSFKWRWYHFDGVDWDESRKLSRIYKFRGIGKAWDWEVDTENGNYDYLMYADLDMDHPEVVTELKNWGKWYVNTTNIDGFRLDAVKHIKFSFFPDWLSYVRSQTGKPLFTVGEYWSYDINKLHNYITKTNGTMSLFDAPLHNKFYTASKSGGAFDMRTLMTNTLMKDQPTLAVTFVDNHDTEPGQALQSWVDPWFKPLAYAFILTRQEGYPCVFYGDYYGIPQYNIPSLKSKIDPLLIARRDYAYGTQHDYLDHSDIIGWTREGVTEKPGSGLAALITDGPGGSKWMYVGKQHAGKVFYDLTGNRSDTVTITSDGWGEFKVNGGSVSVWVPRKTTVSTITRP

SEQ ID NO: 19103 - protein, 493 aa, Geobacillus stearothermophilus
AAPFNGTMMQYFEWYLPDDGTLWTKVANEANNLSSLGITALWLPPAYKGTSRSDVGYGVYDLYDLGEFNQKGTVRTKYGTKAQYLQAIQAAHAAGMQVYADVVFDHKGGADGTEWVDAVEVNPSDRNQEISGTYQIQAWTKFDFPGRGNTYSSFKWRWYHFDGVDWDESRKLSRIYKFRGIGKAWDWEVDTENGNYDYLMYADLDMDHPEVVTELKNWGKWYVNTTNIDGFRLDAVKHIKFQFFPDWLSYVRSQTGKPLFTVGEYWSYDINKLHNYITKTNGTMSLFDAPLHNKFYTASKSGGAFDMRTLMTNTLMKDRPTLAVTFVDNHDTEPGQALQSWVDPWFKPLAYAFILTRREGYPCVFYGDYYGIPQYNIPSLKSKIDPLLIARRDYAYGTQHDYLDHSDIIGWTREGVTEKPGSGLAALITDGPGGSKWMYVGKQHAGKVFYDLTGNRSDTVTINSDGWGEFKVNGGSVSVWVPRKTTVSTIARP

SEQ ID NO: 19104 - protein, 488 aa, unidentified
AAPFNGTMMQYFEWYLPDDGTLWTKVANEANNLSSLGITALWLPPAYKGTSRSDVGYGVYDLYDLGEFNQKGAVRTKYGTKAQYLQAIQAAHAAGMQVYADVVFDHKGGADGTEWVDAVEVNPSDRNQEISGTYQIQAWTKFDFPGRGNTYSSFKWRWYHFDGVDWDESRKLSRIYKFRGIGKAWDWEVDTENGNYDYLMYADLDMDHPQVVTELKSWGKWYVNTTNIDGFPLDAVKHIKFSFFPDWVSDVRSQTAKPLFTVGEYGSYDINKFHNYFMKTNGTMSLFDAPLHNKFYNAPKSGGTFDMRTLMTNTLMKDQPTLAVTFVDNHDTEPAQAPQSWVVPWFKPLAYAFILTRQEGYPCVFYGDYYGIPQYNIPSLKSKIDPLLIARRDYAYGTQHDYLDHSDIIGWTREGVTEKPGSGLAALITDGPGGSKWMYVGKQHAGKVFYDLTGNRSDTVTINSDGWGEFKVNGGSVSVWVPRKTTVS

SEQ ID NO: 19105 - protein, 485 aa, Geobacillus stearothermophilus
FNGTMMQYFEWYLPDDGTLWTKVANEANNLSSLGITALWLPPAYKGTSRSDVGYGVYDLYDLGEFNQKGTVRTKYGTKAQYLQAIQAAHAAGMQVYADVVFDHKGGADGTEWVDAVEVNPSDRNQEISGTYQIQAWTKFDFPGRGNTYSSFKWRWYHFDGVDWDESRKLSRIYKFRGKAWDWEVDTEFGNYDYLMYADLDMDHPEVVTELKNWGKWYVNTTNIDGFRLDAVKHIKFSFFPDWLSYVRSQTGKPLFTVGEYWSYDINKLHNYITKTDGTMSLFDAPLHNKFYTASKSGGAFDMRTLMTNTLMKDQPTLAVTFVDNHDTEPGQALQSWVDPWFKPLAYAFILTRQEGYPCVFYGDYYGIPQYNIPSLKSKIDPLLIARRDYAYGTQHDYLDHSDIIGWTREGGTEKPGSGLAALITDGPGGSKWMYVGKQHAGKVFYDLTGNRSDTVTINSDGWGEFKVNGGSVSVWVPKISTTSQI

SEQ ID NO: 19106 - protein, 486 aa, Geobacillus stearothermophilus
AAPFNGTMMQYFEWYLPDDGTLWTKVANEANNLSSLGITALWLPPAYKGTSRSDVGYGVYDLYDLGEFNQKGTVRTKYGTKAQYLQAIQAAHAAGMQVYADVVFDHKGGADGTEWVDAVEVNPSDRNQEISGTYQIQAWTKFDFPGRGNTYSSFKWRWYHFDGVDWDESRKLSRIYKFRGIGKAWDWEVDTENGNYDYLMYADLDMDHPEVVTELKNWGKWYVNTTNIDGFRLDAVKHIKFQFFPDWLSYVRSQTGKPLFTVGEYWSYDINKLHNYITKTNGTMSLFDAPLHNKFYTASKSGGAFDMRTLMTNTLMKDQPTLAVTFVDNHDTEPGQALQSWVDPWFKPLAYAFILTREEGYPCVFYGDYYGIPQYNIPSLKSKIDPLLIARRDYAYGTQHDYLDHSDIIGWTREGVTEKPGSGLAALITDGPGGSKWMYVGKEHAGKVFYDLTGNRSDTVTINSDGWGEFKVNGGSVSVWVPRKTT

SEQ ID NO: 19107 - protein, 486 aa, Geobacillus stearothermophilus
AAPFNGTMMQYFEWYLPDDGTLWTKVANEANNLSSLGITALWLPPAYKGTSRSDVGYGVYDLYDLGEFNQKGTVRTKYGTKAQYLQAIQAAHAAGMRVYADVVFDHKGGADGTEWVDAVEVNPSDRNQEISGTYQIQAWTKFDFPGRGNTYSSFKWRWYHFDGVDWDESRKLSRIYKFRGIGKAWDWEVDTENGNYDYLMYADLDMDHPEVVTELKNWGKWYVNTTNIDGFRLDAVKHIKFQFFPDWLSYVRSQTGKPLFTVGEYWSYDINKLHNYITKTNGTMSLFDAPLHNKFYTASKSGGAFDMRTLMTNTLMKDQPTLAVTFVDNHDTEPGQALQSWVDPWFKPLAYAFILTRREGYPCVFYGDYYGIPQYNIPSLKSKIDPLLIARRDYAYGTQHDYLDHSDIIGWTREGVTEKPGSGLAALITDGPGGSKWMYVGKQHAGKVFYDLTGNRSDTVTINSDGWGEFKVNGGSVSVWVPRKTT

SEQ ID NO: 19108 - protein, 486 aa, Geobacillus stearothermophilus
AAPFNGTMMQYFEWYLPDDGTLWTKVANEANNLSSLGITALWLPPAYKGTSRSDVGYGVYDLYDLGEFNQKGTVRTKYGTKAQYLQAIQAAHAAGMEVYADVVFDHKGGADGTEWVDAVEVNPSDRNQEISGTYQIQAWTKFDFPGRGNTYSSFKWRWYHFDGVDWDESRKLSRIYKFRGIGKAWDWEVDTENGNYDYLMYADLDMDHPEVVTELKNWGKWYVNTTNIDGFRLDAVKHIKFQFFPDWLSYVRSQTGKPLFTVGEYWSYDINKLHNYITKTNGTMSLFDAPLHNKFYTASKSGGAFDMRTLMTNTLMKDEPTLAVTFVDNHDTEPGQALQSWVDPWFKPLAYAFILTRQEGYPCVFYGDYYGIPQYNIPSLKSKIDPLLIARRDYAYGTQHDYLDHSDIIGWTREGVTEKPGSGLAALITDGPGGSKWMYVGKQHAGKVFYDLTGNRSDTVTINSDGWGEFKVNGGSVSVWVPRKTT

SEQ ID NO: 19109 - protein, 486 aa, Geobacillus stearothermophilus
AAPFNGTMMQYFEWYLPDDGTLWTKVANEANNLSSLGITALWLPPAYKGTSRSDVGYGVYDLYDLGEFNQKGTVRTKYGTKAQYLQAIQAAHAAGMQVYADVVFDHKGGADGTEWVDAVEVNPSDRNQEISGTYQIQAWTKFDFPGRGNTYSSFKWRWYHFDGVDWDESRKLSRIYKFRGIGKAWDWEVDTENGNYDYLMYADLDMDHPEVVTELKNWGKWYVNTTNIDGFRLDAVKHIKFQFFPDWLSYVRSQTGKPLFTVGEYWSYDINKLHNYITKTNGTMSLFDAPLHNKFYTASKSGGAFDMRTLMTNTLMKDRPTLAVTFVDNHDTEPGQALQSWVDPWFKPLAYAFILTRQEGYPCVFYGDYYGIPQYNIPSLKSKIDPLLIARRDYAYGTQHDYLDHSDIIGWTREGVTEKPGSGLAALITDGPGGSKWMYVGKEHAGKVFYDLTGNRSDTVTINSDGWGEFKVNGGSVSVWVPRKTT

SEQ ID NO: 19110 - protein, 486 aa, Geobacillus stearothermophilus
AAPFNGTMMQYFEWYLPDDGTLWTKVANEANNLSSLGITALWLPPAYKGTSRSDVGYGVYDLYDLGEFNQKGTVRTKYGTKAQYLQAIQAAHAAGMQVYADVVFDHKGGADGTEWVDAVEVNPSDRNQEISGTYQIQAWTKFDFPGRGNTYSSFKWRWYHFDGVDWDESRKLSRIYKFRGIGKAWDWEVDTENGNYDYLMYADLDMDHPEVVTELKNWGKWYVNTTNIDGFRLDAVKHIKFQFFPDWLSYVRSQTGKPLFTVGEYWSYDINKLHNYITKTNGTMSLFDAPLHNKFYTASKSGGAFDMRTLMTNTLMKDRPTLAVTFVDNHDTEPGQALQSWVDPWFKPLAYAFILTRQEGYPCVFYGDYYGIPQYNIPSLKSKIDPLLIARRDYAYGTQHDYLDHSDIIGWTREGVTEKPGSGLAALITDGPGGSKWMYVGKRHAGKVFYDLTGNRSDTVTINSDGWGEFKVNGGSVSVWVPRKTT

SEQ ID NO: 19111 - protein, 486 aa, Geobacillus stearothermophilus
AAPFNGTMMQYFEWYLPDDGTLWTKVANEANNLSSLGITALWLPPAYKGTSRSDVGYGVYDLYDLGEFNQKGTVRTKYGTKAQYLQAIQAAHAAGMRVYADVVFDHKGGADGTEWVDAVEVNPSDRNQEISGTYQIQAWTKFDFPGRGNTYSSFKWRWYHFDGVDWDESRKLSRIYKFRGIGKAWDWEVDTENGNYDYLMYADLDMDHPEVVTELKNWGKWYVNTTNIDGFRLDAVKHIKFQFFPDWLSYVRSQTGKPLFTVGEYWSYDINKLHNYITKTNGTMSLFDAPLHNKFYTASKSGGAFDMRTLMTNTLMKDQPTLAVTFVDNHDTEPGQALQSWVDPWFKPLAYAFILTRQEGYPCVFYGDYYGIPQYNIPSLKSKIDPLLIARRDYAYGTQHDYLDHSDIIGWTREGVTEKPGSGLAALITDGPGGSKWMYVGKEHAGKVFYDLTGNRSDTVTINSDGWGEFKVNGGSVSVWVPRKTT

SEQ ID NO: 19112 - protein, 486 aa, Geobacillus stearothermophilus
AAPFNGTMMQYFEWYLPDDGTLWTKVANEANNLSSLGITALWLPPAYKGTSRSDVGYGVYDLYDLGEFNQKGTVRTKYGTKAQYLQAIQAAHAAGMEVYADVVFDHKGGADGTEWVDAVEVNPSDRNQEISGTYQIQAWTKFDFPGRGNTYSSFKWRWYHFDGVDWDESRKLSRIYKFRGIGKAWDWEVDTENGNYDYLMYADLDMDHPEVVTELKNWGKWYVNTTNIDGFRLDAVKHIKFSFFPDWLSYVRSQTGKPLFTVGEYWSYDINKLHNYITKTNGTMSLFDAPLHNKFYTASKSGGAFDMRTLMTNTLMKDQPTLAVTFVDNHDTEPGQALQSWVDPWFKPLAYAFILTRREGYPCVFYGDYYGIPQYNIPSLKSKIDPLLIARRDYAYGTQHDYLDHSDIIGWTREGVTEKPGSGLAALITDGPGGSKWMYVGKQHAGKVFYDLTGNRSDTVTINSDGWGEFKVNGGSVSVWVPRKTT

SEQ ID NO: 19113 - protein, 486 aa, Geobacillus stearothermophilus
AAPFNGTMMQYFEWYLPDDGTLWTKVANEANNLSSLGITALWLPPAYKGTSRSDVGYGVYDLYDLGEFNQKGTVRTKYGTKAQYLQAIQAAHAAGMEVYADVVFDHKGGADGTEWVDAVEVNPSDRNQEISGTYQIQAWTKFDFPGRGNTYSSFKWRWYHFDGVDWDESRKLSRIYKFRGIGKAWDWEVDTENGNYDYLMYADLDMDHPEVVTELKNWGKWYVNTTNIDGFRLDAVKHIKFQFFPDWLSYVRSQTGKPLFTVGEYWSYDINKLHNYITKTNGTMSLFDAPLHNKFYTASKSGGAFDMRTLMTNTLMKDQPTLAVTFVDNHDTEPGQALQSWVDPWFKPLAYAFILTREEGYPCVFYGDYYGIPQYNIPSLKSKIDPLLIARRDYAYGTQHDYLDHSDIIGWTREGVTEKPGSGLAALITDGPGGSKWMYVGKQHAGKVFYDLTGNRSDTVTINSDGWGEFKVNGGSVSVWVPRKTT

SEQ ID NO: 19114 - protein, 486 aa, Geobacillus stearothermophilus
AAPFNGTMMQYFEWYLPDDGTLWTKVANEANNLSSLGITALWLPPAYKGTSRSDVGYGVYDLYDLGEFNQKGTVRTKYGTKAQYLQAIQAAHAAGMRVYADVVFDHKGGADGTEWVDAVEVNPSDRNQEISGTYQIQAWTKFDFPGRGNTYSSFKWRWYHFDGVDWDESRKLSRIYKFRGIGKAWDWEVDTENGNYDYLMYADLDMDHPEVVTELKNWGKWYVNTTNIDGFRLDAVKHIKFQFFPDWLSYVRSQTGKPLFTVGEYWSYDINKLHNYITKTNGTMSLFDAPLHNKFYTASKSGGAFDMRTLMTNTLMKDEPTLAVTFVDNHDTEPGQALQSWVDPWFKPLAYAFILTRQEGYPCVFYGDYYGIPQYNIPSLKSKIDPLLIARRDYAYGTQHDYLDHSDIIGWTREGVTEKPGSGLAALITDGPGGSKWMYVGKQHAGKVFYDLTGNRSDTVTINSDGWGEFKVNGGSVSVWVPRKTT

SEQ ID NO: 19115 - protein, 486 aa, Geobacillus stearothermophilus
AAPFNGTMMQYFEWYLPDDGTLWTKVANEANNLSSLGITALWLPPAYKGTSRSDVGYGVYDLYDLGEFNQKGTVRTKYGTKAQYLQAIQAAHAAGMEVYADVVFDHKGGADGTEWVDAVEVNPSDRNQEISGTYQIQAWTKFDFPGRGNTYSSFKWRWYHFDGVDWDESRKLSRIYKFRGIGKAWDWEVDTENGNYDYLMYADLDMDHPEVVTELKNWGKWYVNTTNIDGFRLDAVKHIKFQFFPDWLSYVRSQTGKPLFTVGEYWSYDINKLHNYITKTNGTMSLFDAPLHNKFYTASKSGGAFDMRTLMTNTLMKDRPTLAVTFVDNHDTEPGQALQSWVDPWFKPLAYAFILTRQEGYPCVFYGDYYGIPQYNIPSLKSKIDPLLIARRDYAYGTQHDYLDHSDIIGWTREGVTEKPGSGLAALITDGPGGSKWMYVGKQHAGKVFYDLTGNRSDTVTINSDGWGEFKVNGGSVSVWVPRKTT

SEQ ID NO: 19116 - protein, 486 aa, Geobacillus stearothermophilus
AAPFNGTMMQYFEWYLPDDGTLWTKVANEANNLSSLGITALWLPPAYKGTSRSDVGYGVYDLYDLGEFNQKGTVRTKYGTKAQYLQAIQAAHAAGMQVYADVVFDHKGGADGTEWVDAVEVNPSDRNQEISGTYQIQAWTKFDFPGRGNTYSSFKWRWYHFDGVDWDESRKLSRIYKFRGIGKAWDWEVDTENGNYDYLMYADLDMDHPEVVTELKNWGKWYVNTTNIDGFRLDAVKHIKFQFFPDWLSYVRSQTGKPLFTVGEYWSYDINKLHNYITKTNGTMSLFDAPLHNKFYTASKSGGAFDMRTLMTNTLMKDRPTLAVTFVDNHDTEPGQALQSWVDPWFKPLAYAFILTREEGYPCVFYGDYYGIPQYNIPSLKSKIDPLLIARRDYAYGTQHDYLDHSDIIGWTREGVTEKPGSGLAALITDGPGGSKWMYVGKQHAGKVFYDLTGNRSDTVTINSDGWGEFKVNGGSVSVWVPRKTT

SEQ ID NO: 19117 - protein, 486 aa, Geobacillus stearothermophilus
AAPFNGTMMQYFEWYLPDDGTLWTKVANEANNLSSLGITALWLPPAYKGTSRSDVGYGVYDLYDLGEFNQKGTVRTKYGTKAQYLQAIQAAHAAGMRVYADVVFDHKGGADGTEWVDAVEVNPSDRNQEISGTYQIQAWTKFDFPGRGNTYSSFKWRWYHFDGVDWDESRKLSRIYKFRGIGKAWDWEVDTENGNYDYLMYADLDMDHPEVVTELKNWGKWYVNTTNIDGFRLDAVKHIKFQFFPDWLSYVRSQTGKPLFTVGEYWSYDINKLHNYITKTNGTMSLFDAPLHNKFYTASKSGGAFDMRTLMTNTLMKDQPTLAVTFVDNHDTEPGQALQSWVDPWFKPLAYAFILTRQEGYPCVFYGDYYGIPQYNIPSLKSKIDPLLIARRDYAYGTQHDYLDHSDIIGWTREGVTEKPGSGLAALITDGPGGSKWMYVGKRHAGKVFYDLTGNRSDTVTINSDGWGEFKVNGGSVSVWVPRKTT

SEQ ID NO: 19118 - protein, 486 aa, Geobacillus stearothermophilus
AAPFNGTMMQYFEWYLPDDGTLWTKVANEANNLSSLGITALWLPPAYKGTSRSDVGYGVYDLYDLGEFNQKGTVRTKYGTKAQYLQAIQAAHAAGMQVYADVVFDHKGGADGTEWVDAVEVNPSDRNQEISGTYQIQAWTKFDFPGRGNTYSSFKWRWYHFDGVDWDESRKLSRIYKFRGIGKAWDWEVDTENGNYDYLMYADLDMDHPEVVTELKNWGKWYVNTTNIDGFRLDAVKHIKFQFFPDWLSYVRSQTGKPLFTVGEYWSYDINKLHNYITKTNGTMSLFDAPLHNKFYTASKSGGAFDMRTLMTNTLMKDEPTLAVTFVDNHDTEPGQALQSWVDPWFKPLAYAFILTRQEGYPCVFYGDYYGIPQYNIPSLKSKIDPLLIARRDYAYGTQHDYLDHSDIIGWTREGVTEKPGSGLAALITDGPGGSKWMYVGKEHAGKVFYDLTGNRSDTVTINSDGWGEFKVNGGSVSVWVPRKTT

SEQ ID NO: 19119 - protein, 486 aa, Geobacillus stearothermophilus
AAPFNGTMMQYFEWYLPDDGTLWTKVANEANNLSSLGITALWLPPAYKGTSRSDVGYGVYDLYDLGEFNQKGTVRTKYGTKAQYLQAIQAAHAAGMQVYADVVFDHKGGADGTEWVDAVEVNPSDRNQEISGTYQIQAWTKFDFPGRGNTYSSFKWRWYHFDGVDWDESRKLSRIYKFRGIGKAWDWEVDTENGNYDYLMYADLDMDHPEVVTELKNWGKWYVNTTNIDGFRLDAVKHIKFQFFPDWLSYVRSQTGKPLFTVGEYWSYDINKLHNYITKTNGTMSLFDAPLHNKFYTASKSGGAFDMRTLMTNTLMKDEPTLAVTFVDNHDTEPGQALQSWVDPWFKPLAYAFILTREEGYPCVFYGDYYGIPQYNIPSLKSKIDPLLIARRDYAYGTQHDYLDHSDIIGWTREGVTEKPGSGLAALITDGPGGSKWMYVGKQHAGKVFYDLTGNRSDTVTINSDGWGEFKVNGGSVSVWVPRKTT

SEQ ID NO: 19120 - protein, 486 aa, Geobacillus stearothermophilus
AAPFNGTMMQYFEWYLPDDGTLWTKVANEANNLSSLGITALWLPPAYKGTSRSDVGYGVYDLYDLGEFNQKGTVRTKYGTKAQYLQAIQAAHAAGMEVYADVVFDHKGGADGTEWVDAVEVNPSDRNQEISGTYQIQAWTKFDFPGRGNTYSSFKWRWYHFDGVDWDESRKLSRIYKFRGIGKAWDWEVDTENGNYDYLMYADLDMDHPEVVTELKNWGKWYVNTTNIDGFRLDAVKHIKFQFFPDWLSYVRSQTGKPLFTVGEYWSYDINKLHNYITKTNGTMSLFDAPLHNKFYTASKSGGAFDMRTLMTNTLMKDQPTLAVTFVDNHDTEPGQALQSWVDPWFKPLAYAFILTRQEGYPCVFYGDYYGIPQYNIPSLKSKIDPLLIARRDYAYGTQHDYLDHSDIIGWTREGVTEKPGSGLAALITDGPGGSKWMYVGKRHAGKVFYDLTGNRSDTVTINSDGWGEFKVNGGSVSVWVPRKTT

SEQ ID NO: 19121 - protein, 486 aa, Geobacillus stearothermophilus
AAPFNGTMMQYFEWYLPDDGTLWTKVANEANNLSSLGITALWLPPAYKGTSRSDVGYGVYDLYDLGEFNQKGTVRTKYGTKAQYLQAIQAAHAAGMRVYADVVFDHKGGADGTEWVDAVEVNPSDRNQEISGTYQIQAWTKFDFPGRGNTYSSFKWRWYHFDGVDWDESRKLSRIYKFRGIGKAWDWEVDTENGNYDYLMYADLDMDHPEVVTELKNWGKWYVNTTNIDGFRLDAVKHIKFQFFPDWLSYVRSQTGKPLFTVGEYWSYDINKLHNYITKTNGTMSLFDAPLHNKFYTASKSGGAFDMRTLMTNTLMKDRPTLAVTFVDNHDTEPGQALQSWVDPWFKPLAYAFILTRQEGYPCVFYGDYYGIPQYNIPSLKSKIDPLLIARRDYAYGTQHDYLDHSDIIGWTREGVTEKPGSGLAALITDGPGGSKWMYVGKQHAGKVFYDLTGNRSDTVTINSDGWGEFKVNGGSVSVWVPRKTT

SEQ ID NO: 19122 - protein, 486 aa, Geobacillus stearothermophilus
AAPFNGTMMQYFEWYLPDDGTLWTKVANEANNLSSLGITALWLPPAYKGTSRSDVGYGVYDLYDLGEFNQKGTVRTKYGTKAQYLQAIQAAHAAGMQVYADVVFDHKGGADGTEWVDAVEVNPSDRNQEISGTYQIQAWTKFDFPGRGNTYSSFKWRWYHFDGVDWDESRKLSRIYKFRGIGKAWDWEVDTENGNYDYLMYADLDMDHPEVVTELKNWGKWYVNTTNIDGFRLDAVKHIKFQFFPDWLSYVRSQTGKPLFTVGEYWSYDINKLHNYITKTNGTMSLFDAPLHNKFYTASKSGGAFDMRTLMTNTLMKDQPTLAVTFVDNHDTEPGQALQSWVDPWFKPLAYAFILTRREGYPCVFYGDYYGIPQYNIPSLKSKIDPLLIARRDYAYGTQHDYLDHSDIIGWTREGVTEKPGSGLAALITDGPGGSKWMYVGKRHAGKVFYDLTGNRSDTVTINSDGWGEFKVNGGSVSVWVPRKTT

SEQ ID NO: 19123 - protein, 486 aa, Geobacillus stearothermophilus
AAPFNGTMMQYFEWYLPDDGTLWTKVANEANNLSSLGITALWLPPAYKGTSRSDVGYGVYDLYDLGEFNQKGTVRTKYGTKAQYLQAIQAAHAAGMQVYADVVFDHKGGADGTEWVDAVEVNPSDRNQEISGTYQIQAWTKFDFPGRGNTYSSFKWRWYHFDGVDWDESRKLSRIYKFRGIGKAWDWEVDTENGNYDYLMYADLDMDHPEVVTELKNWGKWYVNTTNIDGFRLDAVKHIKFQFFPDWLSYVRSQTGKPLFTVGEYWSYDINKLHNYITKTNGTMSLFDAPLHNKFYTASKSGGAFDMRTLMTNTLMKDQPTLAVTFVDNHDTEPGQALQSWVDPWFKPLAYAFILTREEGYPCVFYGDYYGIPQYNIPSLKSKIDPLLIARRDYAYGTQHDYLDHSDIIGWTREGVTEKPGSGLAALITDGPGGSKWMYVGKRHAGKVFYDLTGNRSDTVTINSDGWGEFKVNGGSVSVWVPRKTT

SEQ ID NO: 19124 - protein, 486 aa, Geobacillus stearothermophilus
AAPFNGTMMQYFEWYLPDDGTLWTKVANEANNLSSLGITALWLPPAYKGTSRSDVGYGVYDLYDLGEFNQKGTVRTKYGTKAQYLQAIQAAHAAGMQVYADVVFDHKGGADGTEWVDAVEVNPSDRNQEISGTYQIQAWTKFDFPGRGNTYSSFKWRWYHFDGVDWDESRKLSRIYKFRGIGKAWDWEVDTENGNYDYLMYADLDMDHPEVVTELKNWGKWYVNTTNIDGFRLDAVKHIKFQFFPDWLSYVRSQTGKPLFTVGEYWSYDINKLHNYITKTNGTMSLFDAPLHNKFYTASKSGGAFDMRTLMTNTLMKDRPTLAVTFVDNHDTEPGQALQSWVDPWFKPLAYAFILTRREGYPCVFYGDYYGIPQYNIPSLKSKIDPLLIARRDYAYGTQHDYLDHSDIIGWTREGVTEKPGSGLAALITDGPGGSKWMYVGKQHAGKVFYDLTGNRSDTVTINSDGWGEFKVNGGSVSVWVPRKTT

SEQ ID NO: 19125 - protein, 486 aa, Geobacillus stearothermophilus
AAPFNGTMMQYFEWYLPDDGTLWTKVANEANNLSSLGITALWLPPAYKGTSRSDVGYGVYDLYDLGEFNQKGTVRTKYGTKAQYLQAIQAAHAAGMQVYADVVFDHKGGADGTEWVDAVEVNPSDRNQEISGTYQIQAWTKFDFPGRGNTYSSFKWRWYHFDGVDWDESRKLSRIYKFRGIGKAWDWEVDTENGNYDYLMYADLDMDHPEVVTELKNWGKWYVNTTNIDGFRLDAVKHIKFQFFPDWLSYVRSQTGKPLFTVGEYWSYDINKLHNYITKTNGTMSLFDAPLHNKFYTASKSGGAFDMRTLMTNTLMKDEPTLAVTFVDNHDTEPGQALQSWVDPWFKPLAYAFILTRQEGYPCVFYGDYYGIPQYNIPSLKSKIDPLLIARRDYAYGTQHDYLDHSDIIGWTREGVTEKPGSGLAALITDGPGGSKWMYVGKRHAGKVFYDLTGNRSDTVTINSDGWGEFKVNGGSVSVWVPRKTT

SEQ ID NO: 19126 - protein, 486 aa, Geobacillus stearothermophilus
AAPFNGTMMQYFEWYLPDDGTLWTKVANEANNLSSLGITALWLPPAYKGTSRSDVGYGVYDLYDLGEFNQKGTVRTKYGTKAQYLQAIQAAHAAGMEVYADVVFDHKGGADGTEWVDAVEVNPSDRNQEISGTYQIQAWTKFDFPGRGNTYSSFKWRWYHFDGVDWDESRKLSRIYKFRGIGKAWDWEVDTENGNYDYLMYADLDMDHPEVVTELKNWGKWYVNTTNIDGFRLDAVKHIKFSFFPDWLSYVRSQTGKPLFTVGEYWSYDINKLHNYITKTNGTMSLFDAPLHNKFYTASKSGGAFDMRTLMTNTLMKDQPTLAVTFVDNHDTEPGQALQSWVDPWFKPLAYAFILTRQEGYPCVFYGDYYGIPQYNIPSLKSKIDPLLIARRDYAYGTQHDYLDHSDIIGWTREGVTEKPGSGLAALITDGPGGSKWMYVGKEHAGKVFYDLTGNRSDTVTINSDGWGEFKVNGGSVSVWVPRKTT

SEQ ID NO: 19127 - protein, 486 aa, Geobacillus stearothermophilus
AAPFNGTMMQYFEWYLPDDGTLWTKVANEANNLSSLGITALWLPPAYKGTSRSDVGYGVYDLYDLGEFNQKGTVRTKYGTKAQYLQAIQAAHAAGMQVYADVVFDHKGGADGTEWVDAVEVNPSDRNQEISGTYQIQAWTKFDFPGRGNTYSSFKWRWYHFDGVDWDESRKLSRIYKFRGIGKAWDWEVDTENGNYDYLMYADLDMDHPEVVTELKNWGKWYVNTTNIDGFRLDAVKHIKFQFFPDWLSYVRSQTGKPLFTVGEYWSYDINKLHNYITKTNGTMSLFDAPLHNKFYTASKSGGAFDMRTLMTNTLMKDEPTLAVTFVDNHDTEPGQALQSWVDPWFKPLAYAFILTRREGYPCVFYGDYYGIPQYNIPSLKSKIDPLLIARRDYAYGTQHDYLDHSDIIGWTREGVTEKPGSGLAALITDGPGGSKWMYVGKQHAGKVFYDLTGNRSDTVTINSDGWGEFKVNGGSVSVWVPRKTT

SEQ ID NO: 19128 - protein, 486 aa, Geobacillus stearothermophilus
AAPFNGTMMQYFEWYLPDDGTLWTKVANEANNLSSLGITALWLPPAYKGTSRSDVGYGVYDLYDLGEFNQKGTVRTKYGTKAQYLQAIQAAHAAGMRVYADVVFDHKGGADGTEWVDAVEVNPSDRNQEISGTYQIQAWTKFDFPGRGNTYSSFKWRWYHFDGVDWDESRKLSRIYKFRGIGKAWDWEVDTENGNYDYLMYADLDMDHPEVVTELKNWGKWYVNTTNIDGFRLDAVKHIKFQFFPDWLSYVRSQTGKPLFTVGEYWSYDINKLHNYITKTNGTMSLFDAPLHNKFYTASKSGGAFDMRTLMTNTLMKDQPTLAVTFVDNHDTEPGQALQSWVDPWFKPLAYAFILTREEGYPCVFYGDYYGIPQYNIPSLKSKIDPLLIARRDYAYGTQHDYLDHSDIIGWTREGVTEKPGSGLAALITDGPGGSKWMYVGKQHAGKVFYDLTGNRSDTVTINSDGWGEFKVNGGSVSVWVPRKTT

SEQ ID NO: 19129 - protein, 486 aa, Geobacillus stearothermophilus
AAPFNGTMMQYFEWYLPDDGTLWTKVANEANNLSSLGITALWLPPAYKGTSRSDVGYGVYDLYDLGEFNQKGTVRTKYGTKAQYLQAIQAAHAAGMEVYADVVFDHKGGADGTEWVDAVEVNPSDRNQEISGTYQIQAWTKFDFPGRGNTYSSFKWRWYHFDGVDWDESRKLSRIYKFRGIGKAWDWEVDTENGNYDYLMYADLDMDHPEVVTELKNWGKWYVNTTNIDGFRLDAVKHIKFQFFPDWLSYVRSQTGKPLFTVGEYWSYDINKLHNYITKTNGTMSLFDAPLHNKFYTASKSGGAFDMRTLMTNTLMKDQPTLAVTFVDNHDTEPGQALQSWVDPWFKPLAYAFILTRREGYPCVFYGDYYGIPQYNIPSLKSKIDPLLIARRDYAYGTQHDYLDHSDIIGWTREGVTEKPGSGLAALITDGPGGSKWMYVGKQHAGKVFYDLTGNRSDTVTINSDGWGEFKVNGGSVSVWVPRKTT

SEQ ID NO: 19130 - protein, 486 aa, Geobacillus stearothermophilus
AAPFNGTMMQYFEWYLPDDGTLWTKVANEANNLSSLGITALWLPPAYKGTSRSDVGYGVYDLYDLGEFNQKGTVRTKYGTKAQYLQAIQAAHAAGMEVYADVVFDHKGGADGTEWVDAVEVNPSDRNQEISGTYQIQAWTKFDFPGRGNTYSSFKWRWYHFDGVDWDESRKLSRIYKFRGIGKAWDWEVDTENGNYDYLMYADLDMDHPEVVTELKNWGKWYVNTTNIDGFRLDAVKHIKFQFFPDWLSYVRSQTGKPLFTVGEYWSYDINKLHNYITKTNGTMSLFDAPLHNKFYTASKSGGAFDMRTLMTNTLMKDQPTLAVTFVDNHDTEPGQALQSWVDPWFKPLAYAFILTRQEGYPCVFYGDYYGIPQYNIPSLKSKIDPLLIARRDYAYGTQHDYLDHSDIIGWTREGVTEKPGSGLAALITDGPGGSKWMYVGKEHAGKVFYDLTGNRSDTVTINSDGWGEFKVNGGSVSVWVPRKTT

SEQ ID NO: 19131 - protein, 486 aa, Geobacillus stearothermophilus
AAPFNGTMMQYFEWYLPDDGTLWTKVANEANNLSSLGITALWLPPAYKGTSRSDVGYGVYDLYDLGEFNQKGTVRTKYGTKAQYLQAIQAAHAAGMQVYADVVFDHKGGADGTEWVDAVEVNPSDRNQEISGTYQIQAWTKFDFPGRGNTYSSFKWRWYHFDGVDWDESRKLSRIYKFRGIGKAWDWEVDTENGNYDYLMYADLDMDHPEVVTELKNWGKWYVNTTNIDGFRLDAVKHIKFQFFPDWLSYVRSQTGKPLFTVGEYWSYDINKLHNYITKTNGTMSLFDAPLHNKFYTASKSGGAFDMRTLMTNTLMKDQPTLAVTFVDNHDTEPGQALQSWVDPWFKPLAYAFILTRREGYPCVFYGDYYGIPQYNIPSLKSKIDPLLIARRDYAYGTQHDYLDHSDIIGWTREGVTEKPGSGLAALITDGPGGSKWMYVGKEHAGKVFYDLTGNRSDTVTINSDGWGEFKVNGGSVSVWVPRKTT

SEQ ID NO: 19132 - protein, 483 aa, Synthetic construct
VNGTLMQYFEWYTPNDGQHWKRLQNDAEHLSDIGITAVWIPPAYKGLSQSDNGYGPYDLYDLGEFQQKGTVRTKYGTKSELQDAIGSLHSRNVQVYGDVVLNHKAGADSTEWVDAVEVNPSNRNQETSGTYQIQAWTKFDFPGRGNTYSSFKWRWYHFDGTDWDESRKLNRIYKFRGTGKAWDWEVDTENGNYDYLMFADLDYDHPDVVAETKKWGIWYANELSLDGFRIDAAKHIKFSFLRDWVQAVRQATGKEMFTVAEYWQNNAGKLENYLNKTSFNQSVFDVPLHFNLQAASSQGGGYDMRRLLDGTVVSRHPEKAVTFVENHDTQPGQSLESTVQTWFKPLAYAFILTRESGYPQVFYGDMYGTKGTSPKEIPSLKDNIEPILKARKEYAYGPQHDYIDHPDVIGWTREGDSSAAKSGLAALITDGPGGSKRMYAGLKNAGETWYDITGNRSDTVKIGSDGWGEFHVNDGSVSIYVQK

SEQ ID NO: 19133 - protein, 483 aa, Synthetic construct
VNGTLMQYFEWYTPNDGQHWKRLQNDAEHLSDIGITAVWIPPAYKGLSQSDNGYGPYDLYDLGEFQQKGTVRTKYGTKSELQDAIGSLHSRNVQVYGDVVLNHKAGADGTEFVDAVEVNPSNRNQETSGTYQIQAWTKFDFPGRGNTYSSFKWRWYHFDGTDWDESRKLNRIYKFRGTGKAWDWEVDTENGNYDYLMFADLDYDHPDVVAETKKWGIWYANELSLDGFRIDAAKHIKFSFLRDWVQAVRQATGKEMFTVAEYWQNNAGKLENYLNKTSFNQSVFDVPLHFNLQAASSQGGGYDMRRLLDGTVVSRHPEKAVTFVENHDTQPGQSLESTVQTWFKPLAYAFILTRESGYPQVFYGDMYGTKGTSPKEIPSLKDNIEPILKARKEYAYGPQHDYIDHPDVIGWTREGDSSAAKSGLAALITDGPGGSKRMYAGLKNAGETWYDITGNRSDTVKIGSDGWGEFHVNDGSVSIYVQK

SEQ ID NO: 19134 - protein, 484 aa, Synthetic construct
VNGTLMQYFEWYTPNDGQHWKRLQNDAEHLSDIGITAVWIPPAYKGLSQSDNGYGPYDLYDLGEFQQKGTVRTKYGTKSELQDAIGSLHSRNVQVYGDVVLNHKGGADATENVLAVEVNPNNRNQEISGDYTIEAWTKFDFPGRGNTYSDFKWRWYHFDGVDWDQSRQFQNRIYKFRGDGKAWDWEVDSENGNYDYLMYADVDYDHPDVVAETKKWGIWYANELSLDGFRIDAAKHIKFSFLRDWVQAVRQATGKEMFTVAEYWQNNAGKLENYLNKTSFNQSVFDVPLHFNLQAASSQGGGYDMRRLLDGTVVSRHPEKAVTFVENHDTQPGQSLESTVQTWFKPLAYAFILTRESGYPQVFYGDMYGTKGTSPKEIPSLKDNIEPILKARKEYAYGPQHDYIDHPDVIGWTREGDSSAAKSGLAALITDGPGGSKRMYAGLKNAGETWYDITGNRSDTVKIGSDGWGEFHVNDGSVSIYVQK

SEQ ID NO: 19135 - protein, 482 aa, Bacillus sp.
HHNGTNGTMMQYFEWHLPNDGNHWNRLRDDASNLRNRGITAIWIPPAWKGTSQNDVGYGAYDLYDLGEFNQKGTVRTKYGTRSQLESAIHALKNNGVQVYGDVVMNHKAGGDGTEFVDAVEVDPSNRNQETSGTYQIQAWTKFDFPGRGNTYSSFKWRWYHFDGTDWDESRKLNRIYKFTGKAWDWEVDTENGNYDYLMFADLDMDHPEVVNELRRWGEWYTNTLNLDGFRIDAVKHIKYSFTRDWLTHVRNATGKEMFAVAEFWKNDLGALENYLNKTNWNHSVFDVPLHYNLYNASNSGGNYDMAKLLNGTVVQKHPMHAVTFVDNHDSQPGESLESFVQEWFKPLAYALILTREQGYPSVFYGDYYGIPTHSVPAMKAKIDPILEARQNFAYGTQHDYFDHHNIIGWTREGNTTHPNSGLATIMSDGPGGEKWMYVGQNKAGQVWHDITGNKPGTVTINADGWANFSVNGGSVSIWVKR

SEQ ID NO: 19136 - protein, 482 aa, Bacillus sp.
HHNGTNGTMMQYFEWHLPNDGNHWNRLRDDASNLRNRGITAIWIPPAWKGTSQNDVGYGAYDLYDLGEFNQKGTVRTKYGTRSQLESAIHALKNNGVQVYGDVVMNHKAGADGTEFVDAVEVDPSNRNQETSGTYQIQAWTKFDFPGRGNTYSSFKWRWYHFDGTDWDESRKLNRIYKFSTKAWDWEVDTENGNYDYLMFADLDMDHPEVVNELRRWGEWYTNTLNLDGFRIDAVKHIKYSFTRDWLTHVRNATGKEMFAVAEFWKNDLGALENYLNKTNWNHSVFDVPLHYNLYNASNSGGNYDMAKLLNGTVVQKHPMHAVTFVDNHDSQPGESLESFVQEWFKPLAYALILTREQGYPSVFYGDYYGIPTHSVPAMKAKIDPILEARQNFAYGTQHDYFDHHNIIGWTREGNTTHPNSGLATIMSDGPGGEKWMYVGQNKAGQVWHDITGNKPGTVTINADGWANFSVNGGSVSIWVKR

SEQ ID NO: 19137 - protein, 482 aa, Bacillus sp.
HHNGTNGTMMQYFEWHLPNDGNHWNRLRDDASNLRNRGITAIWIPPAWKGTSQNDVGYGAYDLYDLGEFNQKGTVRTKYGTRSQLESAIHALKNNGVQVYGDVVMNHKAGADGTEFVDAVEVDPSNRNQETSGTYQIQAWTKFDFPGRGNTYSSFKWRHYHFDGTDWDESRKLNRIYKFTGKAWDWEVDTENGNYDYLMFADLDMDHPEVVNELRRWGEWYTNTLNLDGFRIDAVKHIKYSFTRDWLTHVRNATGKEMFAVAEFWKNDLGALENYLNKTNWNHSVFDVPLHYNLYNASNSGGNYDMAKLLNGTVVQKHPMHAVTFVDNHDSQPGESLESFVQEWFKPLAYALILTREQGYPSVFYGDYYGIPTHSVPAMKAKIDPILEARQNFAYGTQHDYFDHHNIIGWTREGNTTHPNSGLATIMSDGPGGEKWMYVGQNKAGQVWHDITGNKPGTVTINADGWANFSVNGGSVSIWVKR

SEQ ID NO: 19138 - protein, 482 aa, Bacillus sp.
HHNGTNGTMMQYFEWHLPNDGNHWNRLRDDASNLRNRGITAIWIPPAWKGTSQNDVGYGAYDLYDLGEFNQKGTVRTKYGTRSQLESAIHALKNNGVQVYGDVVMNHKAGADGTEFGDAVEVDPSNRNQETSGTYQIQAWTKFDFPGRGNTYSSFKWRWYHFDGTDWDESRKLNRIYKFTGKAWDWEVDTENGNYDYLMFADLDMDHPEVVNELRRWGEWYTNTLNLDGFRIDAVKHIKYSFTRDWLTHVRNATGKEMFAVAEFWKNDLGALENYLNKTNWNHSVFDVPLHYNLYNASNSGGNYDMAKLLNGTVVQKHPMHAVTFVDNHDSQPGESLESFVQEWFKPLAYALILTREQGYPSVFYGDYYGIPTHSVPAMKAKIDPILEARQNFAYGTQHDYFDHHNIIGWTREGNTTHPNSGLATIMSDGPGGEKWMYVGQNKAGQVWHDITGNKPGTVTINADGWANFSVNGGSVSIWVKR

SEQ ID NO: 19139 - protein, 482 aa, Bacillus sp.
HHNGTNGTMMQYFEWHLPNDGNHWNRLRDDASNLRNRGITAIWIPPAWKGTSQNDVGYGAYDLYDLGEFNQKGTVRTKYGTRSQLESAIHALKNNGVQVYGDVVMNHKAGADGTEFVDAVEVDPSNRNQETSGTYQIQAWTKFDFPGRGNTLSSFKWRWYHFDGTDWDESRKLNRIYKFTGKAWDWEVDTENGNYDYLMFADLDMDHPEVVNELRRWGEWYTNTLNLDGFRIDAVKHIKYSFTRDWLTHVRNATGKEMFAVAEFWKNDLGALENYLNKTNWNHSVFDVPLHYNLYNASNSGGNYDMAKLLNGTVVQKHPMHAVTFVDNHDSQPGESLESFVQEWFKPLAYALILTREQGYPSVFYGDYYGIPTHSVPAMKAKIDPILEARQNFAYGTQHDYFDHHNIIGWTREGNTTHPNSGLATIMSDGPGGEKWMYVGQNKAGQVWHDITGNKPGTVTINADGWANFSVNGGSVSIWVKR

SEQ ID NO: 19140 - protein, 482 aa, Bacillus sp.
HHNGTNGTMMQYFEWHLPNDGNHWNRLRDDASNLRNRGITAIWIPPAWKGTSQNDVGYGAYDLYDLGEFNQKGTVRTKYGTRSQLESAIHALKNNGVQVYGDVVMNHKAGADGTEFVDAVEVDPSNRNQETSGTYQIQAWTKFDFPGRGNTYSSFKWRWYHFDGTDWDESRKLNRIYKFTGKAWDCEVDTENGNYDYLMFADLDMDHPEVVNELRRWGEWYTNTLNLDGFRIDAVKHIKYSFTRDWLTHVRNATGKEMFAVAEFWKNDLGALENYLNKTNWNHSVFDVPLHYNLYNASNSGGNYDMAKLLNGTVVQKHPMHAVTFVDNHDSQPGESLESFVQEWFKPLAYALILTREQGYPSVFYGDYYGIPTHSVPAMKAKIDPILEARQNFAYGTQHDYFDHHNIIGWTREGNTTHPNSGLATIMSDGPGGEKWMYVGQNKAGQVWHDITGNKPGTVTINADGWANFSVNGGSVSIWVKR

SEQ ID NO: 19141 - protein, 482 aa, Bacillus sp.
HHNGTNGTMMQYFEWHLPNDGNHWNRLRDDASNLRNRGITAIWIPPAWKGTSQNDVGYGAYDLYDLGEFNQKGTVRTKYGTRSQLESAIHALKNNGVQVYGDVVMNHKAGADGTEFVDAVEVDPSNRNQETSGTYQIQAWTKFDFPGRGNTYSSFKWRWYHFDGTDWDESRKLNRIDKFTGKAWDWEVDTENGNYDYLMFADLDMDHPEVVNELRRWGEWYTNTLNLDGFRIDAVKHIKYSFTRDWLTHVRNATGKEMFAVAEFWKNDLGALENYLNKTNWNHSVFDVPLHYNLYNASNSGGNYDMAKLLNGTVVQKHPMHAVTFVDNHDSQPGESLESFVQEWFKPLAYALILTREQGYPSVFYGDYYGIPTHSVPAMKAKIDPILEARQNFAYGTQHDYFDHHNIIGWTREGNTTHPNSGLATIMSDGPGGEKWMYVGQNKAGQVWHDITGNKPGTVTINADGWANFSVNGGSVSIWVKR

SEQ ID NO: 19142 - protein, 482 aa, Bacillus sp.
HHNGTNGTMMQYFEWHLPNDGNHWNRLRDDASNLRNRGITAIWIPPAWKGTSQNDVGYGAYDLYDLGEFNQKGTVRTKYGTRSQLESAIHALKNNGVQVYGDVVMNHKAGADGTEFVDAVEVDPSNRNQETSGTYQIQAWTKFDFPGRGNTYSSFKWRWYHFDGTDEDESRKLNRIYKFTGKAWDWEVDTENGNYDYLMFADLDMDHPEVVNELRRWGEWYTNTLNLDGFRIDAVKHIKYSFTRDWLTHVRNATGKEMFAVAEFWKNDLGALENYLNKTNWNHSVFDVPLHYNLYNASNSGGNYDMAKLLNGTVVQKHPMHAVTFVDNHDSQPGESLESFVQEWFKPLAYALILTREQGYPSVFYGDYYGIPTHSVPAMKAKIDPILEARQNFAYGTQHDYFDHHNIIGWTREGNTTHPNSGLATIMSDGPGGEKWMYVGQNKAGQVWHDITGNKPGTVTINADGWANFSVNGGSVSIWVKR

SEQ ID NO: 19143 - protein, 482 aa, Bacillus sp.
HHNGTNGTMMQYFEWHLPNDGNHWNRLRDDASNLRNRGITAIWIPPAWKGTSQNDVGYGAYDLYDLGEFNQKGTVRTKYGTRSQLESAIHALKNNGVQVYGDVVMNHKAGADGTEFVDAVEVDPSNRNQETSGTYQIQAWTKFDFPGRGNTYSSFKWRWYHFDGTDPDESRKLNRIYKFTGKAWDWEVDTENGNYDYLMFADLDMDHPEVVNELRRWGEWYTNTLNLDGFRIDAVKHIKYSFTRDWLTHVRNATGKEMFAVAEFWKNDLGALENYLNKTNWNHSVFDVPLHYNLYNASNSGGNYDMAKLLNGTVVQKHPMHAVTFVDNHDSQPGESLESFVQEWFKPLAYALILTREQGYPSVFYGDYYGIPTHSVPAMKAKIDPILEARQNFAYGTQHDYFDHHNIIGWTREGNTTHPNSGLATIMSDGPGGEKWMYVGQNKAGQVWHDITGNKPGTVTINADGWANFSVNGGSVSIWVKR

SEQ ID NO: 19144 - protein, 482 aa, Bacillus sp.
HHNGTNGTMMQYFEWHLPNDGNHWNRLRDDASNLRNRGITAIWIPPAWKGTSQNDVGYGAYDLYDLGEFNQKGTVRTKYGTRSQLESAIHALKNNGVQVYGDVVMNHKAGLDGTEFVDAVEVDPSNRNQETSGTYQIQAWTKFDFPGRGNTYSSFKWRWYHFDGTDWDESRKLNRIYKFTGKAWDWEVDTENGNYDYLMFADLDMDHPEVVNELRRWGEWYTNTLNLDGFRIDAVKHIKYSFTRDWLTHVRNATGKEMFAVAEFWKNDLGALENYLNKTNWNHSVFDVPLHYNLYNASNSGGNYDMAKLLNGTVVQKHPMHAVTFVDNHDSQPGESLESFVQEWFKPLAYALILTREQGYPSVFYGDYYGIPTHSVPAMKAKIDPILEARQNFAYGTQHDYFDHHNIIGWTREGNTTHPNSGLATIMSDGPGGEKWMYVGQNKAGQVWHDITGNKPGTVTINADGWANFSVNGGSVSIWVKR

SEQ ID NO: 19145 - protein, 482 aa, Bacillus sp.
HHNGTNGTMMQYFEWHLPNDGNHWNRLRDDASNLRNRGITAIWIPPAWKGTSQNDVGYGAYDLYDLGEFNQKGTVRTKYGTRSQLESAIHALKNNGVQVYGDVVMNHKAGADGTEFVDAVEVDPSNRNQETSGTYQIQAWTKFDFPGRGNTYSSFKWRWYHFDGTDWDESRKLNRIYAFTGKAWDWEVDTENGNYDYLMFADLDMDHPEVVNELRRWGEWYTNTLNLDGFRIDAVKHIKYSFTRDWLTHVRNATGKEMFAVAEFWKNDLGALENYLNKTNWNHSVFDVPLHYNLYNASNSGGNYDMAKLLNGTVVQKHPMHAVTFVDNHDSQPGESLESFVQEWFKPLAYALILTREQGYPSVFYGDYYGIPTHSVPAMKAKIDPILEARQNFAYGTQHDYFDHHNIIGWTREGNTTHPNSGLATIMSDGPGGEKWMYVGQNKAGQVWHDITGNKPGTVTINADGWANFSVNGGSVSIWVKR

SEQ ID NO: 19146 - protein, 482 aa, Bacillus sp.
HHNGTNGTMMQYFEWHLPNDGNHWNRLRDDASNLRNRGITAIWIPPAWKGTSQNDVGYGAYDLYDLGEFNQKGTVRTKYGTRSQLESAIHALKNNGVQVYGDVVMNHKAGADGTEFVDAVEVDPSNRNQETSGTYQIQAWTKFDFPGRGNTYSSFKWRWPHFDGTDWDESRKLNRIYKFTGKAWDWEVDTENGNYDYLMFADLDMDHPEVVNELRRWGEWYTNTLNLDGFRIDAVKHIKYSFTRDWLTHVRNATGKEMFAVAEFWKNDLGALENYLNKTNWNHSVFDVPLHYNLYNASNSGGNYDMAKLLNGTVVQKHPMHAVTFVDNHDSQPGESLESFVQEWFKPLAYALILTREQGYPSVFYGDYYGIPTHSVPAMKAKIDPILEARQNFAYGTQHDYFDHHNIIGWTREGNTTHPNSGLATIMSDGPGGEKWMYVGQNKAGQVWHDITGNKPGTVTINADGWANFSVNGGSVSIWVKR

SEQ ID NO: 19147 - protein, 482 aa, Bacillus sp.
HHNGTNGTMMQYFEWHLPNDGNHWNRLRDDASNLRNRGITAIWIPPAWKGTSQNDVGYGAYDLYDLGEFNQKGTVRTKYGTRSQLESAIHALKNNGVQVYGDVVMNHKAGADGTEFVDAVEVDPSNRNQETSGTYQIQAWTEFDFPGRGNTYSSFKWRWYHFDGTDWDESRKLNRIYKFTGKAWDWEVDTENGNYDYLMFADLDMDHPEVVNELRRWGEWYTNTLNLDGFRIDAVKHIKYSFTRDWLTHVRNATGKEMFAVAEFWKNDLGALENYLNKTNWNHSVFDVPLHYNLYNASNSGGNYDMAKLLNGTVVQKHPMHAVTFVDNHDSQPGESLESFVQEWFKPLAYALILTREQGYPSVFYGDYYGIPTHSVPAMKAKIDPILEARQNFAYGTQHDYFDHHNIIGWTREGNTTHPNSGLATIMSDGPGGEKWMYVGQNKAGQVWHDITGNKPGTVTINADGWANFSVNGGSVSIWVKR

SEQ ID NO: 19148 - protein, 482 aa, Bacillus sp.
HHNGTNGTMMQYFEWHLPNDGNHWNRLRDDASNLRNRGITAIWIPPAWKGTSQNDVGYGAYDLYDLGEFNQKGTVRTKYGTRSQLESAIHALKNNGVQVYGDVVMNHKAGADGTEFVDAVEVDPSNRNQETSGTYQIQAWTKFDFPGRGNTYSSFKWRWYHFDGTDDDESRKLNRIYKFTGKAWDWEVDTENGNYDYLMFADLDMDHPEVVNELRRWGEWYTNTLNLDGFRIDAVKHIKYSFTRDWLTHVRNATGKEMFAVAEFWKNDLGALENYLNKTNWNHSVFDVPLHYNLYNASNSGGNYDMAKLLNGTVVQKHPMHAVTFVDNHDSQPGESLESFVQEWFKPLAYALILTREQGYPSVFYGDYYGIPTHSVPAMKAKIDPILEARQNFAYGTQHDYFDHHNIIGWTREGNTTHPNSGLATIMSDGPGGEKWMYVGQNKAGQVWHDITGNKPGTVTINADGWANFSVNGGSVSIWVKR

SEQ ID NO: 19149 - protein, 482 aa, Bacillus sp.
HHNGTNGTMMQYFEWHLPNDGNHWNRLRDDASNLRNRGITAIWIPPAWKGTSQNDVGYGAYDLYDLGEFNQKGTVRTKYGTRSQLESAIHALKNNGVQVYGDVVMNHKAGADGTEFVDAVEVDPSNRNQETSGTYQIQAWTKFDFPGRGNTYSSFKWRWYHFDGTDWDESRKLNRIYKFTPKAWDWEVDTENGNYDYLMFADLDMDHPEVVNELRRWGEWYTNTLNLDGFRIDAVKHIKYSFTRDWLTHVRNATGKEMFAVAEFWKNDLGALENYLNKTNWNHSVFDVPLHYNLYNASNSGGNYDMAKLLNGTVVQKHPMHAVTFVDNHDSQPGESLESFVQEWFKPLAYALILTREQGYPSVFYGDYYGIPTHSVPAMKAKIDPILEARQNFAYGTQHDYFDHHNIIGWTREGNTTHPNSGLATIMSDGPGGEKWMYVGQNKAGQVWHDITGNKPGTVTINADGWANFSVNGGSVSIWVKR

SEQ ID NO: 19150 - protein, 482 aa, Bacillus sp.
HHNGTNGTMMQYFEWHLPNDGNHWNRLRDDASNLRNRGITAIWIPPAWKGTSQNDVGYGAYDLYDLGEFNQKGTVRTKYGTRSQLESAIHALKNNGVQVYGDVVMNHKAGADGTEFVDAVEVDPSNRNQETSGTYQIQAWTKFDFPGRGNTYSSFKWRWYHFDGTDWDESRKLNRIYKFTGKAWDWEVDTENGNYDYLMFFDLDMDHPEVVNELRRWGEWYTNTLNLDGFRIDAVKHIKYSFTRDWLTHVRNATGKEMFAVAEFWKNDLGALENYLNKTNWNHSVFDVPLHYNLYNASNSGGNYDMAKLLNGTVVQKHPMHAVTFVDNHDSQPGESLESFVQEWFKPLAYALILTREQGYPSVFYGDYYGIPTHSVPAMKAKIDPILEARQNFAYGTQHDYFDHHNIIGWTREGNTTHPNSGLATIMSDGPGGEKWMYVGQNKAGQVWHDITGNKPGTVTINADGWANFSVNGGSVSIWVKR

SEQ ID NO: 19151 - protein, 482 aa, Bacillus sp.
HHNGTNGTMMQYFEWHLPNDGNHWNRLRDDASNLRNRGITAIWIPPAWKGTSQNDVGYGAYDLYDLGEFNQKGTVRTKYGTRSQLESAIHALKNNGVQVYGDVVMNHKAGADGKEFVDAVEVDPSNRNQETSGTYQIQAWTKFDFPGRGNTYSSFKWRWYHFDGTDWDVSRKLNRIYKFTGKAWDWEVDTENGNYDYLMFADLDMDHPEVVNELRRWGEWYTNTLNLDGFRIDAVKHIKYSFTRDWLTHVRNATGKEMFAVAEFWKNDLGALENYLNKTNWNHSVFDVPLHYNLYNASNSGGNYDMAKLLNGTVVQKHPMHAVTFVDNHDSQPGESLESFVQEWFKPLAYALILTREQGYPSVFYGDYYGIPTHSVPAMKAKIDPILEARQNFAYGTQHDYFDHHNIIGWTREGNTTHPNSGLATIMSDGPGGEKWMYVGQNKAGQVWHDITGNKPGTVTINADGWANFSVNGGSVSIWVKR

SEQ ID NO: 19152 - protein, 482 aa, Bacillus sp.
HHNGTNGTMMQYFEWHLPNDGNHWNRLRDDASNLRNRGITAIWIPPAWKGTSQNDVGYGAYDLYDLGEFNQKGTVRTKYGTRSQLESAIHALKNNGVQVYGDVVMNHKAGADGKEFVDAVEVDPSNRNQETSGTYQIQAWTKFDFPGRGNTYSSFKWRWYHFDGTDWDESRKLNRIYKFTGKAWDWEVDTENGNYDYLMFADLDMDHPEVVNELRRWGEWYTNTLNLDGFRIDAVKHIKYSFTRDWLTHVRNATGKEMFAVAEFWKNDLGALENYLNKTNWNHSVFDVPLHYNLYNASNSGGNYDMAKLLNGTVVQKHPMHAVTFVDNHDSQPGESLESFVQEWFKPLAYALILTREQGYPSVFYGDYYGIPTHSVPAMKAKIDPILEARQNFAYGTQHDYFDHHNIIGWTREGNTTHPNSGLATIMSDGPGGEKWMYVGQNKAGQVWHDITGNKPGTVTINADGWANFSVNGGSVSIWVKR

SEQ ID NO: 19153 - protein, 482 aa, Bacillus sp.
HHNGTNGTMMQYFEWHLPNDGNHWNRLRDDASNLRNRGITAIWIPPAWKGTSQNDVGYGAYDLYDLGEFNQKGTVRTKYGTRSQLESAIHALKNNGVQVYGDVVMNHKAGADGTEFVDAVEVDPSNRNQETSGTYQIQAWTKFDFPGRGNTYSSFKWRWYHFDGTDSDESRKLNRIYKFTGKAWDWEVDTENGNYDYLMFADLDMDHPEVVNELRRWGEWYTNTLNLDGFRIDAVKHIKYSFTRDWLTHVRNATGKEMFAVAEFWKNDLGALENYLNKTNWNHSVFDVPLHYNLYNASNSGGNYDMAKLLNGTVVQKHPMHAVTFVDNHDSQPGESLESFVQEWFKPLAYALILTREQGYPSVFYGDYYGIPTHSVPAMKAKIDPILEARQNFAYGTQHDYFDHHNIIGWTREGNTTHPNSGLATIMSDGPGGEKWMYVGQNKAGQVWHDITGNKPGTVTINADGWANFSVNGGSVSIWVKR

SEQ ID NO: 19154 - protein, 482 aa, Bacillus sp.
HHNGTNGTMMQYFEWHLPNDGNHWNRLRDDASNLRNRGITAIWIPPAWKGTSQNDVGYGAYDLYDLGEFNQKGTVRTKYGTRSQLESAIHALKNNGVQVYGDVVMNHKAGADGTEFVDAVEVDPSNRNQETSGTYQIQAWTKFDFPGRGNTYSSFKWRLYHFDGTDWDESRKLNRIYKFTGKAWDWEVDTENGNYDYLMFADLDMDHPEVVNELRRWGEWYTNTLNLDGFRIDAVKHIKYSFTRDWLTHVRNATGKEMFAVAEFWKNDLGALENYLNKTNWNHSVFDVPLHYNLYNASNSGGNYDMAKLLNGTVVQKHPMHAVTFVDNHDSQPGESLESFVQEWFKPLAYALILTREQGYPSVFYGDYYGIPTHSVPAMKAKIDPILEARQNFAYGTQHDYFDHHNIIGWTREGNTTHPNSGLATIMSDGPGGEKWMYVGQNKAGQVWHDITGNKPGTVTINADGWANFSVNGGSVSIWVKR

SEQ ID NO: 19155 - protein, 482 aa, Bacillus sp.
HHNGTNGTMMQYFEWHLPNDGNHWNRLRDDASNLRNRGITAIWIPPAWKGTSQNDVGYGAYDLYDLGEFNQKGTVRTKYGTRSQLESAIHALKNNGVQVYGDVVMNHKAKADGTEFVDAVEVDPSNRNQETSGTYQIQAWTKFDFPGRGNTYSSFKWRWYHFDGTDWDESRKLNRIYKFTGKAWDWEVDTENGNYDYLMFADLDMDHPEVVNELRRWGEWYTNTLNLDGFRIDAVKHIKYSFTRDWLTHVRNATGKEMFAVAEFWKNDLGALENYLNKTNWNHSVFDVPLHYNLYNASNSGGNYDMAKLLNGTVVQKHPMHAVTFVDNHDSQPGESLESFVQEWFKPLAYALILTREQGYPSVFYGDYYGIPTHSVPAMKAKIDPILEARQNFAYGTQHDYFDHHNIIGWTREGNTTHPNSGLATIMSDGPGGEKWMYVGQNKAGQVWHDITGNKPGTVTINADGWANFSVNGGSVSIWVKR

SEQ ID NO: 19156 - protein, 482 aa, Bacillus sp.
HHNGTNGTMMQYFEWHLPNDGNHWNRLRDDASNLRNRGITAIWIPPAWKGTSQNDVGYGAYDLYDLGEFNQKGTVRTKYGTRSQLESAIHALKNNGVQVYGDVVMNHKAGADGTEFVDAVEVDPSNRNQETSGTYQIQAWTKFDFPGRGNTYSSFKWRWYHFDGTDADESRKLNRIYKFTGKAWDWEVDTENGNYDYLMFADLDMDHPEVVNELRRWGEWYTNTLNLDGFRIDAVKHIKYSFTRDWLTHVRNATGKEMFAVAEFWKNDLGALENYLNKTNWNHSVFDVPLHYNLYNASNSGGNYDMAKLLNGTVVQKHPMHAVTFVDNHDSQPGESLESFVQEWFKPLAYALILTREQGYPSVFYGDYYGIPTHSVPAMKAKIDPILEARQNFAYGTQHDYFDHHNIIGWTREGNTTHPNSGLATIMSDGPGGEKWMYVGQNKAGQVWHDITGNKPGTVTINADGWANFSVNGGSVSIWVKR

SEQ ID NO: 19157 - protein, 482 aa, Bacillus sp.
HHNGTNGTMMQYFEWHLPNDGNHWNRLRDDASNLRNRGITAIWIPPAWKGTSQNDVGYGAYDLYDLGEFNQKGTVRTKYGTRSQLESAIHALKNNGVQVYGDVVMNHKAGADGTEFVDAVEVDPSNRNQETSGTYQIQAWTPFDFPGRGNTYSSFKWRWYHFDGTDWDESRKLNRIYKFTGKAWDWEVDTENGNYDYLMFADLDMDHPEVVNELRRWGEWYTNTLNLDGFRIDAVKHIKYSFTRDWLTHVRNATGKEMFAVAEFWKNDLGALENYLNKTNWNHSVFDVPLHYNLYNASNSGGNYDMAKLLNGTVVQKHPMHAVTFVDNHDSQPGESLESFVQEWFKPLAYALILTREQGYPSVFYGDYYGIPTHSVPAMKAKIDPILEARQNFAYGTQHDYFDHHNIIGWTREGNTTHPNSGLATIMSDGPGGEKWMYVGQNKAGQVWHDITGNKPGTVTINADGWANFSVNGGSVSIWVKR

SEQ ID NO: 19158 - protein, 484 aa, Bacillus sp. MK 716
AAPFNGTMMQYFEWYLPDDGTLWTKVANEANNLSSLGITALWLPPAYKGTSRSDVGYGVYDLYDLGEFNQKGAVRTKYGTKAQYLQAIQAAHAAGMQVYADVVFDHKGGADGTEWVDAVEVNPSDRNQEISGTYQIQAWTKFDFPGRGNTYSSFKWRWYHFDGVDWDESRKLSRIYKFRGIGKAWDWEVDTENGNYDYLMYADLDMDHPEVVTELKNWGKWYVNTTNIDGFRLDAVKHIKFSFFPDWLSYVRSQTGKPLFTVGEYWSYDINKLHNYITKTNGTMSLFDAPLHNKFYTASKSGGAFDMRTLMTNTLMKDQPTLAVTFVDNHDTEPGQALQSWVDPWFKPLAYAFILTRQEGYPCVFYGDYYGIPQYNIPSLKSKIDPLLIARRDYAYGTQHDYLDHSDIIGWTREGVTEKPGSGLAALITDGPGGSKWMYVGKQHAGKVFYDLTGNRSDTVTINSDGWGEFKVNGGSVSVWVPRR

SEQ ID NO: 19159 - protein, 534 aa, Geobacillus stearothermophilus
LAFLLTALLFCPTGQPAKAAAPFNGTMMQYFEWYLPDDGTLWTKVANEANNLSSLGITALWLPPAYKGTSRSDVGYGVYDLYDLGEFNQKGAVRTKYGRKAQYLQAIQAAHAAGMQVYADVVFDHKGGADGTEWVDAVEVNPSDRNQEISGTYQIQAWTKFDFPGRGNTYSSFKWRWYHFDGVDWDESRKLSRIYKFRGIGKAWDWEVDTENGNYDYLMYADLDMDHPEVVTELKSWGKWYVNTTNIDGFRLDAVKHIKFSFFPDWLSDVRSQTGKPLFTVGEYWSYDINKLHNYIMKTNGTMSLFDAPLHNKFYTASKSGGTFDMRTLMTNTLMKDQPTLAVTFVDNHDTEPGQALQSWVDPWFKPLAYAFILTRQEGYPCVFYGDYYGIPQYNIPSLKSKIDPLLIARRDYAYGTQHDYLDHSDIIGWTREGVTEKPGSGLAALITDGPGGSKWMYVGKQHAGKVFYDLTGNRSDTVTINSDGWGEFKVNGGSVSVWVPRKTTVSTIAWSITTRPWTDEFVRWTEPRLVAWP

SEQ ID NO: 19160 - protein, 481 aa, Bacillus sp.
HNGTNATMMQYFEWHLPNDGNHWNRLRDDASNLRNRGITAIWIPPAWKGTSQNDVGYGAYDLYDLGEFNQKGTVRTKYGTRSQLESAIHALKNNGVQVYGDVVMNHKAGADGTEFVDAVEVDPSNRNQETSGTYQIQAWTKFDFPGRGNTYSSFKWRWYHFDGTDWDESRKLNRIYKFTGKAWDWEVDTENGNYDYLMFADLDMDHPEVVNELRRWGEWYTNTLNLDGFRIDAVKHIKYSFTRDWLTHVRNATGKEMFAVAEFWKNDLGALENYLNKTNWNHSVFDVPLHYNLYNASNSGGNYDMAKLLNGTVVQKHPMHAVTFVDNHDSQPGESLESFVQEWFKPLAYALILTREQGYPSVFYGDYYGIPTHSVPAMKAKIDPILEARQNFAYGTQHDYFDHHNIIGWTREGNTTHPNSGLATIMSDGPGGEKWMYVGQNKAGQVWHDITGNKPGTVTINADGWANFSVNGGSVSIWVKR

SEQ ID NO: 19161 - protein, 481 aa, Synthetic construct
VNGTLMQYFEWYTPNDGQHWKRLQNDAEHLSDIGITAVWIPPAYKGLSQSDNGYGPYDLYDLGEFQQKGTVRTKYGTKSELQDAIGSLHSRNVQVYGDVVLNHKGGADATEDVTAVEVDPADRNRVISGEHLIKAWTHFHFPGRGSTYSDFKWHWYHFDGTDWDESRKLNRIYKFQGKAWDWEVSNEFGNYDYLMYADIDYDHPDVVAETKKWGIWYANELSLDGFRIDAAKHIKFSFLRDWVQAVRQATGKEMFTVAEYWQNNAGKLENYLNKTSFNQSVFDVPLHFNLQAASSQGGGYDMRRLLDGTVVSRHPEKAVTFVENHDTQPGQSLESTVQTWFKPLAYAFILTRESGYPQVFYGDMYGTKGTSPKEIPSLKDNIEPILKARKEYAYGPQHDYIDHPDVIGWTREGDSSAAKSGLAALITDGPGGSKRMYAGLKNAGETWYDITGNRSDTVKIGSDGWGEFHVNDGSVSIYVQK

SEQ ID NO: 19162 - protein, 481 aa, Bacillus acidicola
PFNGTMMQYFEWYLPDDGTLWTKVANEANNLSSLGITALWLPPAYKGTSRSDVGYGVYDLYDLGEFNQKGTVRTKYGTKAQYLQTIQAAHAAGMQVYADVVFDHKGGADGTEWVDAVEVNPSDRNQEISGTYQIQAWTKFDFPGRGNTYSSFKWRWYHFDGVDWDESRKLSRIYKFRGIGKAWDWEVDTENGNYDYLMYADLDMDHPEVVTELKNWGKWYVNTTNIDGFRLDAVKHIKFSSFPDWLSYVRSQTGKPLFTVGEYWSYDINKLHNYITKTDGTMSLFDAPLHSKFYTASKSGGAFDMRTLMTNTLMKDQPTLAVTFVDNHDTEPVQALQSWVDPWFKPLAYAFILTRQEGYPCVFYGDYYGIPQYNIPSLKSKIDPLLIARRDYAYGTQHDYLDHSDIIGWTREGVTEKPGSGLAALITDGPGGSKWMYVGKQHAGKVFYDLTGNRSDTVTINSDGWGEFKVNGGSVSVWVPR

SEQ ID NO: 19163 - protein, 481 aa, Bacillus acidicola
PFNGTMMQYFEWYLPDDGTLWTKVANEANNLSSLGITALWLPPAYKGTSRSDVGYGVYDLYDLGEFNQKGTVRTKYGTKAQYLQTIQAAHAAGMQVYADVVFDHKGGADGTEWVDAVEVNPSDRNQEISGTYQIQAWTKFDFPGRGNTYSSFKWRWYHFDGVDWDESRKLSRIYKFRGIGKAWDWEVDTEFGNYDYLMYADLDMDHPEVVTELKNWGKWYVNTTNIDGFRLDAVKHIKFSSFPDWLSYVRSQTGKPLFTVGEYWSYDINKLHNYITKTNGTMSLFDAPLHSKFYTASKSGGAFDMRTLMTNTLMKDQPTLAVTFVDNHDTEPVQALQSWVDPWFKPLAYAFILTRQEGYPCVFYGDYYGIPQYNIPSLKSKIDPLLIARRDYAYGTQHDYLDHSDIIGWTREGVTEKPGSGLAALITDGPGGSKWMYVGKQHAGKVFYDLTGNRSDTVTINSDGWGEFKVNGGSVSVWVPR

SEQ ID NO: 19164 - protein, 481 aa, Bacillus acidicola
PFNGTMMQYFEWYLPDDGTLWTKVANEANNLSSLGITALWLPPAYKGTSRSDVGYGVYDLYDLGEFNQKGTVRTKYGTKAQYLQAIQAAHAAGMQVYADVVFDHKGGADGTEWVDAVEVNPSDRNQEISGTYQIQAWTKFDFPGRGNTYSSFKWRWYHFDGVDWDESRKLSRIYKFRGIGKAWDWEVDTENGNYDYLMYADLDMDHPEVVTELKNWGKWYVNTTNIDGFRLDAVKHIKFSSFPDWLSYVRSQTGKPLFTVGEYWSYDINKLHNYITKTNGTMSLFDAPLHSKFYTASKSGGAFDMRTLMTNTLMKDQPTLAVTFVDNHDTEPVQALQSWVDPWFKPLAYAFILTRQEGYPCVFYGDYYGIPQYNIPSLKSKIDPLLIARRDYAYGTQHDYLDHSDIIGWTREGVTEKPGSGLAALITDGPGGSKWMYVGKQHAGKVFYDLTGNRSDTVTINSDGWGEFKVNGGSVSVWVPR

SEQ ID NO: 19165 - protein, 481 aa, Bacillus acidicola
PFNGTMMQYFEWYLPDDGTLWTKVANEANNLSSLGITALWLPPAYKGTSRSDVGYGVYDLYDLGEFNQKGTVRTKYGTKAQYLQTIQAAHAAGMQVYADVVFDHKGGADGTEWVDAVEVNPSDRNQEISGTYQIQAWTKFDFPGRGNTYSSFKWRWYHFDGVDWDESRKLSRIYKFRGIGKAWDWEVDTENGNYDYLMYADLDMDHPEVVTELKNWGKWYVNTTNIDGFRLDAVKHIKFSFFPDWLSYVRSQTGKPLFTVGEYWSYDINKLHNYITKTNGTMSLFDAPLHSKFYTASKSGGAFDMRTLMTNTLMKDQPTLAVTFVDNHDTEPVQALQSWVDPWFKPLAYAFILTRQEGYPCVFYGDYYGIPQYNIPSLKSKIDPLLIARRDYAYGTQHDYLDHSDIIGWTREGVTEKPGSGLAALITDGPGGSKWMYVGKQHAGKVFYDLTGNRSDTVTINSDGWGEFKVNGGSVSVWVPR

SEQ ID NO: 19166 - protein, 481 aa, Bacillus acidicola
PFNGTMMQYFEWYLPDDGTLWTKVANEANNLSSLGITALWLPPAYKGTSRSDVGYGVYDLYDLGEFNQKGTVRTKYGTKAQYLQTIQAAHAAGMQVYADVVFDHKGGADGTEWVDAVEVNPSDRNQEISGTYQIQAWTKFDFPGRGNTYSSFKWRWYHFDGVDWDESRKLSRIYKFRGIGKAWDWEVDTENGNYDYLMYADLDMDHPEVVTELKNWGKWYVNTTNIDGFRLDAVKHIKFSSFPDWLSYVRSQTGKPLFTVGEYWSYDINKLHNYITKTNGTMSLFDAPLHSKFYTASKSGGAFDMRTLMTNTLMKDQPTLAVTFVDNHDTEPGQALQSWVDPWFKPLAYAFILTRQEGYPCVFYGDYYGIPQYNIPSLKSKIDPLLIARRDYAYGTQHDYLDHSDIIGWTREGVTEKPGSGLAALITDGPGGSKWMYVGKQHAGKVFYDLTGNRSDTVTINSDGWGEFKVNGGSVSVWVPR

SEQ ID NO: 19167 - protein, 423 aa, Aspergillus oryzae
DWRSQSIYFLLTDRFARTDGSTTATGNTADQKYGGGTWQGIIDKLDYIQGMGFTAIWITPVIAQLPQTTAYGDAMHGYWQQDIYSLNENYGTADDLKALSSALHERGMYLMVDMVANHMGYDGAGSSVDYSVFKPESSQDYFHPECFIQNYEDQTCVEDCWLGDNTVSLPDLDTTKDVVKNEWYDWVGSLVSNYSIDGERIDTVKHVDKDFWRQYNKAAGVYQIGEVLDGDPAYTCPYQNVMDGVLNYPIYYPLLNAFKSTSGSMDDLYNMINTVKSDCPDSTLLGTFVENHDNPRRASYTNDIALAKNVAAFIILNDGMPKIYWGQEQHYAGGNDPANREATWLSGYPTDSELYKLIASANAIRNYAISKDTGEVTYKNWPIYKDDTTIAMRKGTDGSQIVTILSNKGASGDSYTLSLSGAG

SEQ ID NO: 19168 - protein, 493 aa, Geobacillus stearothermophilus
AAPFNGTMMQYFEWYLPDDGTLWTKVANEANNLSSLGITALWLPPAYKGTSRSDVGYGVYDLYDLGEFNQKGTVRTKYGTKAQYLQAIQAAHAAGMQVYADVVFDHKGGADGTEWVDAVEVNPSDRNQEISGTYQIQAWTKFDFPGRGNTYSSFKWRWYHFDGVDWDESRKLSRIYKFRGIGKAWDWEVDTENGNYDYLMYADLDMDHPEVVTELKNWGKWYVNTTNIDGFRLDAVKHIKFSFFPDWLSYVRSQTGKPLFTVGEYWSYDINKLHNYITKTNGTMSLFDAPLHNKFYTASKSGGAFDMRTLMTNTLMKDQPTLAVTFVDNHDTEPGQALQSWVDPWFKPLAYAFILTRQEGYPGVFYGDYYGIPQYNIPSLKSKIDPLLIARRDYAYGTQHDYLDHSDIIGWTREGVTEKPGSGLAALITDGPGGSKWMYVGKQHAGKVFYDLTGNRSDTVTITSDGWGEFKVNGGSVSVWVPRKTTVSTITRP

SEQ ID NO: 19169 - protein, 493 aa, Geobacillus stearothermophilus
AAPFNGTMMQYFEWYLPDDGTLWTKVANEANNLSSLGITALWLPPAYKGTSRSDVGYGVYDLYDLGEFNQKGTVRTKYGTKAQYLQAIQAAHAAGMEVYADVVFDHKGGADGTEWVDAVEVNPSDRNQEISGTYQIQAWTKFDFPGRGNTYSSFKWRWYHFDGVDWDESRKLSRIYKFRGIGKAWDWEVDTENGNYDYLMYADLDMDHPEVVTELKNWGKWYVNTTNIDGFRLDAVKHIKFQFFPDWLSYVRSQTGKPLFTVGEYWSYDINKLHNYITKTNGTMSLFDAPLHNKFYTASKSGGAFDMRTLMTNTLMKDQPTLAVTFVDNHDTEPGQALQSWVDPWFKPLAYAFILTREEGYPCVFYGDYYGIPQYNIPSLKSKIDPLLIARRDYAYGTQHDYLDHSDIIGWTREGVTEKPGSGLAALITDGPGGSKWMYVGKRHAGKVFYDLTGNRSDTVTINSDGWGEFKVNGGSVSVWVPRKTTVSTIARP

SEQ ID NO: 19170 - protein, 493 aa, Geobacillus stearothermophilus
AAPFNGTMMQYFEWYLPDDGTLWTKVANEANNLSSLGITALWLPPAYKGTSRSDVGYGVYDLYDLGEFNQKGTVRTKYGTKAQYLQAIQAAHAAGMEVYADVVFDHKGGADGTEWVDAVEVNPSDRNQEISGTYQIQAWTKFDFPGRGNTYSSFKWRWYHFDGVDWDESRKLSRIYKFRGIGKAWDWEVDTENGNYDYLMYADLDMDHPEVVTELKNWGKWYVNTTNIDGFRLDAVKHIKFSFFPDWLSYVRSQTGKPLFTVGEYWSYDINKLHNYITKTNGTMSLFDAPLHNKFYTASKSGGAFDMRTLMTNTLMKDRPTLAVTFVDNHDTEPGQALQSWVDPWFKPLAYAFILTRREGYPCVFYGDYYGIPQYNIPSLKSKIDPLLIARRDYAYGTQHDYLDHSDIIGWTREGVTEKPGSGLAALITDGPGGSKWMYVGKQHAGKVFYDLTGNRSDTVTINSDGWGEFKVNGGSVSVWVPRKTTVSTIARP

SEQ ID NO: 19171 - protein, 493 aa, Geobacillus stearothermophilus
AAPFNGTMMQYFEWYLPDDGTLWTKVANEANNLSSLGITALWLPPAYKGTSRSDVGYGVYDLYDLGEFNQKGTVRTKYGTKAQYLQAIQAAHAAGMEVYADVVFDHKGGADGTEWVDAVEVNPSDRNQEISGTYQIQAWTKFDFPGRGNTYSSFKWRWYHFDGVDWDESRKLSRIYKFRGIGKAWDWEVDTENGNYDYLMYADLDMDHPEVVTELKNWGKWYVNTTNIDGFRLDAVKHIKFQFFPDWLSYVRSQTGKPLFTVGEYWSYDINKLHNYITKTNGTMSLFDAPLHNKFYTASKSGGAFDMRTLMTNTLMKDRPTLAVTFVDNHDTEPGQALQSWVDPWFKPLAYAFILTRREGYPCVFYGDYYGIPQYNIPSLKSKIDPLLIARRDYAYGTQHDYLDHSDIIGWTREGVTEKPGSGLAALITDGPGGSKWMYVGKQHAGKVFYDLTGNRSDTVTINSDGWGEFKVNGGSVSVWVPRKTTVSTIARP

SEQ ID NO: 19172 - protein, 493 aa, Geobacillus stearothermophilus
AAPFNGTMMQYFEWYLPDDGTLWTKVANEANNLSSLGITALWLPPAYKGTSRSDVGYGVYDLYDLGEFNQKGTVRTKYGTKAQYLQAIQAAHAAGMEVYADVVFDHKGGADGTEWVDAVEVNPSDRNQEISGTYQIQAWTKFDFPGRGNTYSSFKWRWYHFDGVDWDESRKLSRIYKFRGIGKAWDWEVDTENGNYDYLMYADLDMDHPEVVTELKNWGKWYVNTTNIDGFRLDAVKHIKFSFFPDWLSYVRSQTGKPLFTVGEYWSYDINKLHNYITKTNGTMSLFDAPLHNKFYTASKSGGAFDMRTLMTNTLMKDQPTLAVTFVDNHDTEPGQALQSWVDPWFKPLAYAFILTREEGYPCVFYGDYYGIPQYNIPSLKSKIDPLLIARRDYAYGTQHDYLDHSDIIGWTREGVTEKPGSGLAALITDGPGGSKWMYVGKRHAGKVFYDLTGNRSDTVTINSDGWGEFKVNGGSVSVWVPRKTTVSTIARP

SEQ ID NO: 19173 - protein, 493 aa, Geobacillus stearothermophilus
AAPFNGTMMQYFEWYLPDDGTLWTKVANEANNLSSLGITALWLPPAYKGTSRSDVGYGVYDLYDLGEFNQKGTVRTKYGTKAQYLQAIQAAHAAGMRVYADVVFDHKGGADGTEWVDAVEVNPSDRNQEISGTYQIQAWTKFDFPGRGNTYSSFKWRWYHFDGVDWDESRKLSRIYKFRGIGKAWDWEVDTENGNYDYLMYADLDMDHPEVVTELKNWGKWYVNTTNIDGFRLDAVKHIKFSFFPDWLSYVRSQTGKPLFTVGEYWSYDINKLHNYITKTNGTMSLFDAPLHNKFYTASKSGGAFDMRTLMTNTLMKDEPTLAVTFVDNHDTEPGQALQSWVDPWFKPLAYAFILTREEGYPCVFYGDYYGIPQYNIPSLKSKIDPLLIARRDYAYGTQHDYLDHSDIIGWTREGVTEKPGSGLAALITDGPGGSKWMYVGKQHAGKVFYDLTGNRSDTVTINSDGWGEFKVNGGSVSVWVPRKTTVSTIARP

SEQ ID NO: 19174 - protein, 493 aa, Geobacillus stearothermophilus
AAPFNGTMMQYFEWYLPDDGTLWTKVANEANNLSSLGITALWLPPAYKGTSRSDVGYGVYDLYDLGEFNQKGTVRTKYGTKAQYLQAIQAAHAAGMRVYADVVFDHKGGADGTEWVDAVEVNPSDRNQEISGTYQIQAWTKFDFPGRGNTYSSFKWRWYHFDGVDWDESRKLSRIYKFRGIGKAWDWEVDTENGNYDYLMYADLDMDHPEVVTELKNWGKWYVNTTNIDGFRLDAVKHIKFSFFPDWLSYVRSQTGKPLFTVGEYWSYDINKLHNYITKTNGTMSLFDAPLHNKFYTASKSGGAFDMRTLMTNTLMKDQPTLAVTFVDNHDTEPGQALQSWVDPWFKPLAYAFILTREEGYPCVFYGDYYGIPQYNIPSLKSKIDPLLIARRDYAYGTQHDYLDHSDIIGWTREGVTEKPGSGLAALITDGPGGSKWMYVGKRHAGKVFYDLTGNRSDTVTINSDGWGEFKVNGGSVSVWVPRKTTVSTIARP

SEQ ID NO: 19175 - protein, 493 aa, Geobacillus stearothermophilus
AAPFNGTMMQYFEWYLPDDGTLWTKVANEANNLSSLGITALWLPPAYKGTSRSDVGYGVYDLYDLGEFNQKGTVRTKYGTKAQYLQAIQAAHAAGMQVYADVVFDHKGGADGTEWVDAVEVNPSDRNQEISGTYQIQAWTKFDFPGRGNTYSSFKWRWYHFDGVDWDESRKLSRIYKFRGIGKAWDWEVDTENGNYDYLMYADLDMDHPEVVTELKNWGKWYVNTTNIDGFRLDAVKHIKFQFFPDWLSYVRSQTGKPLFTVGEYWSYDINKLHNYITKTNGTMSLFDAPLHNKFYTASKSGGAFDMRTLMTNTLMKDRPTLAVTFVDNHDTEPGQALQSWVDPWFKPLAYAFILTRREGYPCVFYGDYYGIPQYNIPSLKSKIDPLLIARRDYAYGTQHDYLDHSDIIGWTREGVTEKPGSGLAALITDGPGGSKWMYVGKEHAGKVFYDLTGNRSDTVTINSDGWGEFKVNGGSVSVWVPRKTTVSTIARP

SEQ ID NO: 19176 - protein, 493 aa, Geobacillus stearothermophilus
AAPFNGTMMQYFEWYLPDDGTLWTKVANEANNLSSLGITALWLPPAYKGTSRSDVGYGVYDLYDLGEFNQKGTVRTKYGTKAQYLQAIQAAHAAGMRVYADVVFDHKGGADGTEWVDAVEVNPSDRNQEISGTYQIQAWTKFDFPGRGNTYSSFKWRWYHFDGVDWDESRKLSRIYKFRGIGKAWDWEVDTENGNYDYLMYADLDMDHPEVVTELKNWGKWYVNTTNIDGFRLDAVKHIKFQFFPDWLSYVRSQTGKPLFTVGEYWSYDINKLHNYITKTNGTMSLFDAPLHNKFYTASKSGGAFDMRTLMTNTLMKDQPTLAVTFVDNHDTEPGQALQSWVDPWFKPLAYAFILTRREGYPCVFYGDYYGIPQYNIPSLKSKIDPLLIARRDYAYGTQHDYLDHSDIIGWTREGVTEKPGSGLAALITDGPGGSKWMYVGKEHAGKVFYDLTGNRSDTVTINSDGWGEFKVNGGSVSVWVPRKTTVSTIARP

SEQ ID NO: 19177 - protein, 493 aa, Geobacillus stearothermophilus
AAPFNGTMMQYFEWYLPDDGTLWTKVANEANNLSSLGITALWLPPAYKGTSRSDVGYGVYDLYDLGEFNQKGTVRTKYGTKAQYLQAIQAAHAAGMQVYADVVFDHKGGADGTEWVDAVEVNPSDRNQEISGTYQIQAWTKFDFPGRGNTYSSFKWRWYHFDGVDWDESRKLSRIYKFRGIGKAWDWEVDTENGNYDYLMYADLDMDHPEVVTELKNWGKWYVNTTNIDGFRLDAVKHIKFQFFPDWLSYVRSQTGKPLFTVGEYWSYDINKLHNYITKTNGTMSLFDAPLHNKFYTASKSGGAFDMRTLMTNTLMKDEPTLAVTFVDNHDTEPGQALQSWVDPWFKPLAYAFILTREEGYPCVFYGDYYGIPQYNIPSLKSKIDPLLIARRDYAYGTQHDYLDHSDIIGWTREGVTEKPGSGLAALITDGPGGSKWMYVGKEHAGKVFYDLTGNRSDTVTINSDGWGEFKVNGGSVSVWVPRKTTVSTIARP

SEQ ID NO: 19178 - protein, 493 aa, Geobacillus stearothermophilus
AAPFNGTMMQYFEWYLPDDGTLWTKVANEANNLSSLGITALWLPPAYKGTSRSDVGYGVYDLYDLGEFNQKGTVRTKYGTKAQYLQAIQAAHAAGMEVYADVVFDHKGGADGTEWVDAVEVNPSDRNQEISGTYQIQAWTKFDFPGRGNTYSSFKWRWYHFDGVDWDESRKLSRIYKFRGIGKAWDWEVDTENGNYDYLMYADLDMDHPEVVTELKNWGKWYVNTTNIDGFRLDAVKHIKFSFFPDWLSYVRSQTGKPLFTVGEYWSYDINKLHNYITKTNGTMSLFDAPLHNKFYTASKSGGAFDMRTLMTNTLMKDQPTLAVTFVDNHDTEPGQALQSWVDPWFKPLAYAFILTRREGYPCVFYGDYYGIPQYNIPSLKSKIDPLLIARRDYAYGTQHDYLDHSDIIGWTREGVTEKPGSGLAALITDGPGGSKWMYVGKEHAGKVFYDLTGNRSDTVTINSDGWGEFKVNGGSVSVWVPRKTTVSTIARP

SEQ ID NO: 19179 - protein, 493 aa, Geobacillus stearothermophilus
AAPFNGTMMQYFEWYLPDDGTLWTKVANEANNLSSLGITALWLPPAYKGTSRSDVGYGVYDLYDLGEFNQKGTVRTKYGTKAQYLQAIQAAHAAGMQVYADVVFDHKGGADGTEWVDAVEVNPSDRNQEISGTYQIQAWTKFDFPGRGNTYSSFKWRWYHFDGVDWDESRKLSRIYKFRGIGKAWDWEVDTENGNYDYLMYADLDMDHPEVVTELKNWGKWYVNTTNIDGFRLDAVKHIKFQFFPDWLSYVRSQTGKPLFTVGEYWSYDINKLHNYITKTNGTMSLFDAPLHNKFYTASKSGGAFDMRTLMTNTLMKDRPTLAVTFVDNHDTEPGQALQSWVDPWFKPLAYAFILTREEGYPCVFYGDYYGIPQYNIPSLKSKIDPLLIARRDYAYGTQHDYLDHSDIIGWTREGVTEKPGSGLAALITDGPGGSKWMYVGKEHAGKVFYDLTGNRSDTVTINSDGWGEFKVNGGSVSVWVPRKTTVSTIARP

SEQ ID NO: 19180 - protein, 493 aa, Geobacillus stearothermophilus
AAPFNGTMMQYFEWYLPDDGTLWTKVANEANNLSSLGITALWLPPAYKGTSRSDVGYGVYDLYDLGEFNQKGTVRTKYGTKAQYLQAIQAAHAAGMEVYADVVFDHKGGADGTEWVDAVEVNPSDRNQEISGTYQIQAWTKFDFPGRGNTYSSFKWRWYHFDGVDWDESRKLSRIYKFRGIGKAWDWEVDTENGNYDYLMYADLDMDHPEVVTELKNWGKWYVNTTNIDGFRLDAVKHIKFSFFPDWLSYVRSQTGKPLFTVGEYWSYDINKLHNYITKTNGTMSLFDAPLHNKFYTASKSGGAFDMRTLMTNTLMKDEPTLAVTFVDNHDTEPGQALQSWVDPWFKPLAYAFILTREEGYPCVFYGDYYGIPQYNIPSLKSKIDPLLIARRDYAYGTQHDYLDHSDIIGWTREGVTEKPGSGLAALITDGPGGSKWMYVGKQHAGKVFYDLTGNRSDTVTINSDGWGEFKVNGGSVSVWVPRKTTVSTIARP

SEQ ID NO: 19181 - protein, 493 aa, Geobacillus stearothermophilus
AAPFNGTMMQYFEWYLPDDGTLWTKVANEANNLSSLGITALWLPPAYKGTSRSDVGYGVYDLYDLGEFNQKGTVRTKYGTKAQYLQAIQAAHAAGMEVYADVVFDHKGGADGTEWVDAVEVNPSDRNQEISGTYQIQAWTKFDFPGRGNTYSSFKWRWYHFDGVDWDESRKLSRIYKFRGIGKAWDWEVDTENGNYDYLMYADLDMDHPEVVTELKNWGKWYVNTTNIDGFRLDAVKHIKFQFFPDWLSYVRSQTGKPLFTVGEYWSYDINKLHNYITKTNGTMSLFDAPLHNKFYTASKSGGAFDMRTLMTNTLMKDEPTLAVTFVDNHDTEPGQALQSWVDPWFKPLAYAFILTREEGYPCVFYGDYYGIPQYNIPSLKSKIDPLLIARRDYAYGTQHDYLDHSDIIGWTREGVTEKPGSGLAALITDGPGGSKWMYVGKQHAGKVFYDLTGNRSDTVTINSDGWGEFKVNGGSVSVWVPRKTTVSTIARP

SEQ ID NO: 19182 - protein, 493 aa, Geobacillus stearothermophilus
AAPFNGTMMQYFEWYLPDDGTLWTKVANEANNLSSLGITALWLPPAYKGTSRSDVGYGVYDLYDLGEFNQKGTVRTKYGTKAQYLQAIQAAHAAGMQVYADVVFDHKGGADGTEWVDAVEVNPSDRNQEISGTYQIQAWTKFDFPGRGNTYSSFKWRWYHFNGVDWDESRKLSRIYKFRGIGKKWNEEVDTENGNYDYLMYANLDMNHPEVVTELKNWGKWYVNTTNIDGFRLDAVKHIKFSFFPDWLSYVRSQTGKPLFTVGEYWSYDINKLHNYITKTDGTMSLFDAPLHNKFYTASKSGGAFDMRTLMTNTLMKDQPTLAVTFVDNHDTEPGQALQSWVDPWFKPLAYAFILTRQEGYPCVFYGDYYGIPQYNIPSLKSKIDPLLIARRDYAYGTQHDYLDHSDIIGWTREGGTEKPGSGLAALITDGPGGSKWMYVGKQHAGKVFYDLTGNRSDTVTINSDGWGEFKVNGGSVSVWVPRKTTVSTIARP

SEQ ID NO: 19183 - protein, 493 aa, Geobacillus stearothermophilus
AAPFNGTMMQYFEWYLPDDGTLWTKVANEANNLSSLGITALWLPPAYKGTSRSDVGYGVYDLYDLGEFNQKGTVRTKYGTKAQYLQAIQAAHAAGMRVYADVVFDHKGGADGTEWVDAVEVNPSDRNQEISGTYQIQAWTKFDFPGRGNTYSSFKWRWYHFDGVDWDESRKLSRIYKFRGIGKAWDWEVDTENGNYDYLMYADLDMDHPEVVTELKNWGKWYVNTTNIDGFRLDAVKHIKFSFFPDWLSYVRSQTGKPLFTVGEYWSYDINKLHNYITKTNGTMSLFDAPLHNKFYTASKSGGAFDMRTLMTNTLMKDEPTLAVTFVDNHDTEPGQALQSWVDPWFKPLAYAFILTRQEGYPCVFYGDYYGIPQYNIPSLKSKIDPLLIARRDYAYGTQHDYLDHSDIIGWTREGVTEKPGSGLAALITDGPGGSKWMYVGKEHAGKVFYDLTGNRSDTVTINSDGWGEFKVNGGSVSVWVPRKTTVSTIARP

SEQ ID NO: 19184 - protein, 493 aa, Geobacillus stearothermophilus
AAPFNGTMMQYFEWYLPDDGTLWTKVANEANNLSSLGITALWLPPAYKGTSRSDVGYGVYDLYDLGEFNQKGTVRTKYGTKAQYLQAIQAAHAAGMRVYADVVFDHKGGADGTEWVDAVEVNPSDRNQEISGTYQIQAWTKFDFPGRGNTYSSFKWRWYHFDGVDWDESRKLSRIYKFRGIGKAWDWEVDTENGNYDYLMYADLDMDHPEVVTELKNWGKWYVNTTNIDGFRLDAVKHIKFQFFPDWLSYVRSQTGKPLFTVGEYWSYDINKLHNYITKTNGTMSLFDAPLHNKFYTASKSGGAFDMRTLMTNTLMKDQPTLAVTFVDNHDTEPGQALQSWVDPWFKPLAYAFILTRREGYPCVFYGDYYGIPQYNIPSLKSKIDPLLIARRDYAYGTQHDYLDHSDIIGWTREGVTEKPGSGLAALITDGPGGSKWMYVGKRHAGKVFYDLTGNRSDTVTINSDGWGEFKVNGGSVSVWVPRKTTVSTIARP

SEQ ID NO: 19185 - protein, 493 aa, Geobacillus stearothermophilus
AAPFNGTMMQYFEWYLPDDGTLWTKVANEANNLSSLGITALWLPPAYKGTSRSDVGYGVYDLYDLGEFNQKGTVRTKYGTKAQYLQAIQAAHAAGMEVYADVVFDHKGGADGTEWVDAVEVNPSDRNQEISGTYQIQAWTKFDFPGRGNTYSSFKWRWYHFDGVDWDESRKLSRIYKFRGIGKAWDWEVDTENGNYDYLMYADLDMDHPEVVTELKNWGKWYVNTTNIDGFRLDAVKHIKFQFFPDWLSYVRSQTGKPLFTVGEYWSYDINKLHNYITKTNGTMSLFDAPLHNKFYTASKSGGAFDMRTLMTNTLMKDRPTLAVTFVDNHDTEPGQALQSWVDPWFKPLAYAFILTREEGYPCVFYGDYYGIPQYNIPSLKSKIDPLLIARRDYAYGTQHDYLDHSDIIGWTREGVTEKPGSGLAALITDGPGGSKWMYVGKQHAGKVFYDLTGNRSDTVTINSDGWGEFKVNGGSVSVWVPRKTTVSTIARP

SEQ ID NO: 19186 - protein, 493 aa, Geobacillus stearothermophilus
AAPFNGTMMQYFEWYLPDDGTLWTKVANEANNLSSLGITALWLPPAYKGTSRSDVGYGVYDLYDLGEFNQKGTVRTKYGTKAQYLQAIQAAHAAGMQVYADVVFDHKGGADGTEWVDAVEVNPSDRNQEISGTYQIQAWTKFDFPGRGNTYSSFKWRWYHFDGVDWDESRKLSRIYKFRGIGKAWDWEVDTENGNYDYLMYADLDMDHPEVVTELKNWGKWYVNTTNIDGFRLDAVKHIKFSFFPDWLSYVRSQTGKPLFTVGEYWSYDINKLHNYITKTNGTMSLFDAPLHNKFYTASKSGGAFDMRTLMTNTLMKDRPTLAVTFVDNHDTEPGQALQSWVDPWFKPLAYAFILTRREGYPCVFYGDYYGIPQYNIPSLKSKIDPLLIARRDYAYGTQHDYLDHSDIIGWTREGVTEKPGSGLAALITDGPGGSKWMYVGKEHAGKVFYDLTGNRSDTVTINSDGWGEFKVNGGSVSVWVPRKTTVSTIARP

SEQ ID NO: 19187 - protein, 493 aa, Geobacillus stearothermophilus
AAPFNGTMMQYFEWYLPDDGTLWTKVANEANNLSSLGITALWLPPAYKGTSRSDVGYGVYDLYDLGEFNQKGTVRTKYGTKAQYLQAIQAAHAAGMEVYADVVFDHKGGADGTEWVDAVEVNPSDRNQEISGTYQIQAWTKFDFPGRGNTYSSFKWRWYHFDGVDWDESRKLSRIYKFRGIGKAWDWEVDTENGNYDYLMYADLDMDHPEVVTELKNWGKWYVNTTNIDGFRLDAVKHIKFSFFPDWLSYVRSQTGKPLFTVGEYWSYDINKLHNYITKTNGTMSLFDAPLHNKFYTASKSGGAFDMRTLMTNTLMKDRPTLAVTFVDNHDTEPGQALQSWVDPWFKPLAYAFILTREEGYPCVFYGDYYGIPQYNIPSLKSKIDPLLIARRDYAYGTQHDYLDHSDIIGWTREGVTEKPGSGLAALITDGPGGSKWMYVGKQHAGKVFYDLTGNRSDTVTINSDGWGEFKVNGGSVSVWVPRKTTVSTIARP

SEQ ID NO: 19188 - protein, 493 aa, Geobacillus stearothermophilus
AAPFNGTMMQYFEWYLPDDGTLWTKVANEANNLSSLGITALWLPPAYKGTSRSDVGYGVYDLYDLGEFNQKGTVRTKYGTKAQYLQAIQAAHAAGMRVYADVVFDHKGGADGTEWVDAVEVNPSDRNQEISGTYQIQAWTKFDFPGRGNTYSSFKWRWYHFDGVDWDESRKLSRIYKFRGIGKAWDWEVDTENGNYDYLMYADLDMDHPEVVTELKNWGKWYVNTTNIDGFRLDAVKHIKFQFFPDWLSYVRSQTGKPLFTVGEYWSYDINKLHNYITKTNGTMSLFDAPLHNKFYTASKSGGAFDMRTLMTNTLMKDQPTLAVTFVDNHDTEPGQALQSWVDPWFKPLAYAFILTREEGYPCVFYGDYYGIPQYNIPSLKSKIDPLLIARRDYAYGTQHDYLDHSDIIGWTREGVTEKPGSGLAALITDGPGGSKWMYVGKEHAGKVFYDLTGNRSDTVTINSDGWGEFKVNGGSVSVWVPRKTTVSTIARP

SEQ ID NO: 19189 - protein, 493 aa, Geobacillus stearothermophilus
AAPFNGTMMQYFEWYLPDDGTLWTKVANEANNLSSLGITALWLPPAYKGTSRSDVGYGVYDLYDLGEFNQKGTVRTKYGTKAQYLQAIQAAHAAGMRVYADVVFDHKGGADGTEWVDAVEVNPSDRNQEISGTYQIQAWTKFDFPGRGNTYSSFKWRWYHFDGVDWDESRKLSRIYKFRGIGKAWDWEVDTENGNYDYLMYADLDMDHPEVVTELKNWGKWYVNTTNIDGFRLDAVKHIKFSFFPDWLSYVRSQTGKPLFTVGEYWSYDINKLHNYITKTNGTMSLFDAPLHNKFYTASKSGGAFDMRTLMTNTLMKDEPTLAVTFVDNHDTEPGQALQSWVDPWFKPLAYAFILTRQEGYPCVFYGDYYGIPQYNIPSLKSKIDPLLIARRDYAYGTQHDYLDHSDIIGWTREGVTEKPGSGLAALITDGPGGSKWMYVGKRHAGKVFYDLTGNRSDTVTINSDGWGEFKVNGGSVSVWVPRKTTVSTIARP

SEQ ID NO: 19190 - protein, 493 aa, Geobacillus stearothermophilus
AAPFNGTMMQYFEWYLPDDGTLWTKVANEANNLSSLGITALWLPPAYKGTSRSDVGYGVYDLYDLGEFNQKGTVRTKYGTKAQYLQAIQAAHAAGMQVYADVVFDHKGGADGTEWVDAVEVNPSDRNQEISGTYQIQAWTKFDFPGRGNTYSSFKWRWYHFDGVDWDESRKLSRIYKFRGIGKAWDWEVDTENGNYDYLMYADLDMDHPEVVTELKNWGKWYVNTTNIDGFRLDAVKHIKFQFFPDWLSYVRSQTGKPLFTVGEYWSYDINKLHNYITKTNGTMSLFDAPLHNKFYTASKSGGAFDMRTLMTNTLMKDRPTLAVTFVDNHDTEPGQALQSWVDPWFKPLAYAFILTREEGYPCVFYGDYYGIPQYNIPSLKSKIDPLLIARRDYAYGTQHDYLDHSDIIGWTREGVTEKPGSGLAALITDGPGGSKWMYVGKRHAGKVFYDLTGNRSDTVTINSDGWGEFKVNGGSVSVWVPRKTTVSTIARP

SEQ ID NO: 19191 - protein, 493 aa, Geobacillus stearothermophilus
AAPFNGTMMQYFEWYLPDDGTLWTKVANEANNLSSLGITALWLPPAYKGTSRSDVGYGVYDLYDLGEFNQKGTVRTKYGTKAQYLQAIQAAHAAGMEVYADVVFDHKGGADGTEWVDAVEVNPSDRNQEISGTYQIQAWTKFDFPGRGNTYSSFKWRWYHFDGVDWDESRKLSRIYKFRGIGKAWDWEVDTENGNYDYLMYADLDMDHPEVVTELKNWGKWYVNTTNIDGFRLDAVKHIKFSFFPDWLSYVRSQTGKPLFTVGEYWSYDINKLHNYITKTNGTMSLFDAPLHNKFYTASKSGGAFDMRTLMTNTLMKDQPTLAVTFVDNHDTEPGQALQSWVDPWFKPLAYAFILTRREGYPCVFYGDYYGIPQYNIPSLKSKIDPLLIARRDYAYGTQHDYLDHSDIIGWTREGVTEKPGSGLAALITDGPGGSKWMYVGKRHAGKVFYDLTGNRSDTVTINSDGWGEFKVNGGSVSVWVPRKTTVSTIARP

SEQ ID NO: 19192 - protein, 493 aa, Geobacillus stearothermophilus
AAPFNGTMMQYFEWYLPDDGTLWTKVANEANNLSSLGITALWLPPAYKGTSRSDVGYGVYDLYDLGEFNQKGTVRTKYGTKAQYLQAIQAAHAAGMEVYADVVFDHKGGADGTEWVDAVEVNPSDRNQEISGTYQIQAWTKFDFPGRGNTYSSFKWRWYHFDGVDWDESRKLSRIYKFRGIGKAWDWEVDTENGNYDYLMYADLDMDHPEVVTELKNWGKWYVNTTNIDGFRLDAVKHIKFQFFPDWLSYVRSQTGKPLFTVGEYWSYDINKLHNYITKTNGTMSLFDAPLHNKFYTASKSGGAFDMRTLMTNTLMKDRPTLAVTFVDNHDTEPGQALQSWVDPWFKPLAYAFILTRQEGYPCVFYGDYYGIPQYNIPSLKSKIDPLLIARRDYAYGTQHDYLDHSDIIGWTREGVTEKPGSGLAALITDGPGGSKWMYVGKEHAGKVFYDLTGNRSDTVTINSDGWGEFKVNGGSVSVWVPRKTTVSTIARP

SEQ ID NO: 19193 - protein, 493 aa, Geobacillus stearothermophilus
AAPFNGTMMQYFEWYLPDDGTLWTKVANEANNLSSLGITALWLPPAYKGTSRSDVGYGVYDLYDLGEFNQKGTVRTKYGTKAQYLQAIQAAHAAGMRVYADVVFDHKGGADGTEWVDAVEVNPSDRNQEISGTYQIQAWTKFDFPGRGNTYSSFKWRWYHFDGVDWDESRKLSRIYKFRGIGKAWDWEVDTENGNYDYLMYADLDMDHPEVVTELKNWGKWYVNTTNIDGFRLDAVKHIKFQFFPDWLSYVRSQTGKPLFTVGEYWSYDINKLHNYITKTNGTMSLFDAPLHNKFYTASKSGGAFDMRTLMTNTLMKDRPTLAVTFVDNHDTEPGQALQSWVDPWFKPLAYAFILTREEGYPCVFYGDYYGIPQYNIPSLKSKIDPLLIARRDYAYGTQHDYLDHSDIIGWTREGVTEKPGSGLAALITDGPGGSKWMYVGKQHAGKVFYDLTGNRSDTVTINSDGWGEFKVNGGSVSVWVPRKTTVSTIARP

SEQ ID NO: 19194 - protein, 493 aa, Geobacillus stearothermophilus
AAPFNGTMMQYFEWYLPDDGTLWTKVANEANNLSSLGITALWLPPAYKGTSRSDVGYGVYDLYDLGEFNQKGTVRTKYGTKAQYLQAIQAAHAAGMQVYADVVFDHKGGADGTEWVDAVEVNPSDRNQEISGTYQIQAWTKFDFPGRGNTYSSFKWRWYHFDGVDWDESRKLSRIYKFRGIGKAWDWEVDTENGNYDYLMYADLDMDHPEVVTELKNWGKWYVNTTNIDGFRLDAVKHIKFQFFPDWLSYVRSQTGKPLFTVGEYWSYDINKLHNYITKTNGTMSLFDAPLHNKFYTASKSGGAFDMRTLMTNTLMKDEPTLAVTFVDNHDTEPGQALQSWVDPWFKPLAYAFILTRREGYPCVFYGDYYGIPQYNIPSLKSKIDPLLIARRDYAYGTQHDYLDHSDIIGWTREGVTEKPGSGLAALITDGPGGSKWMYVGKEHAGKVFYDLTGNRSDTVTINSDGWGEFKVNGGSVSVWVPRKTTVSTIARP

SEQ ID NO: 19195 - protein, 493 aa, Geobacillus stearothermophilus
AAPFNGTMMQYFEWYLPDDGTLWTKVANEANNLSSLGITALWLPPAYKGTSRSDVGYGVYDLYDLGEFNQKGTVRTKYGTKAQYLQAIQAAHAAGMQVYADVVFDHKGGADGTEWVDAVEVNPSDRNQEISGTYQIQAWTKFDFPGRGNTYSSFKWRWYHFDGVDWDESRKLSRIYKFRGIGKAWDWEVDTENGNYDYLMYADLDMDHPEVVTELKNWGKWYVNTTNIDGFRLDAVKHIKFSFFPDWLSYVRSQTGKPLFTVGEYWSYDINKLHNYITKTNGTMSLFDAPLHNKFYTASKSGGAFDMRTLMTNTLMKDRPTLAVTFVDNHDTEPGQALQSWVDPWFKPLAYAFILTRREGYPCVFYGDYYGIPQYNIPSLKSKIDPLLIARRDYAYGTQHDYLDHSDIIGWTREGVTEKPGSGLAALITDGPGGSKWMYVGKRHAGKVFYDLTGNRSDTVTINSDGWGEFKVNGGSVSVWVPRKTTVSTIARP

SEQ ID NO: 19196 - protein, 493 aa, Geobacillus stearothermophilus
AAPFNGTMMQYFEWYLPDDGTLWTKVANEANNLSSLGITALWLPPAYKGTSRSDVGYGVYDLYDLGEFNQKGTVRTKYGTKAQYLQAIQAAHAAGMEVYADVVFDHKGGADGTEWVDAVEVNPSDRNQEISGTYQIQAWTKFDFPGRGNTYSSFKWRWYHFDGVDWDESRKLSRIYKFRGIGKAWDWEVDTENGNYDYLMYADLDMDHPEVVTELKNWGKWYVNTTNIDGFRLDAVKHIKFSFFPDWLSYVRSQTGKPLFTVGEYWSYDINKLHNYITKTNGTMSLFDAPLHNKFYTASKSGGAFDMRTLMTNTLMKDEPTLAVTFVDNHDTEPGQALQSWVDPWFKPLAYAFILTRREGYPCVFYGDYYGIPQYNIPSLKSKIDPLLIARRDYAYGTQHDYLDHSDIIGWTREGVTEKPGSGLAALITDGPGGSKWMYVGKQHAGKVFYDLTGNRSDTVTINSDGWGEFKVNGGSVSVWVPRKTTVSTIARP

SEQ ID NO: 19197 - protein, 493 aa, Geobacillus stearothermophilus
AAPFNGTMMQYFEWYLPDDGTLWTKVANEANNLSSLGITALWLPPAYKGTSRSDVGYGVYDLYDLGEFNQKGTVRTKYGTKAQYLQAIQAAHAAGMQVYADVVFDHKGGADGTEWVDAVEVNPSDRNQEISGTYQIQAWTKFDFPGRGNTYSSFKWRWYHFDGVDWDESRKLSRIYKFRGIGKAWDWEVDTENGNYDYLMYADLDMDHPEVVTELKNWGKWYVNTTNIDGFRLDAVKHIKFSFFPDWLSYVRSQTGKPLFTVGEYWSYDINKLHNYITKTNGTMSLFDAPLHNKFYTASKSGGAFDMRTLMTNTLMKDEPTLAVTFVDNHDTEPGQALQSWVDPWFKPLAYAFILTREEGYPCVFYGDYYGIPQYNIPSLKSKIDPLLIARRDYAYGTQHDYLDHSDIIGWTREGVTEKPGSGLAALITDGPGGSKWMYVGKRHAGKVFYDLTGNRSDTVTINSDGWGEFKVNGGSVSVWVPRKTTVSTIARP

SEQ ID NO: 19198 - protein, 493 aa, Geobacillus stearothermophilus
AAPFNGTMMQYFEWYLPDDGTLWTKVANEANNLSSLGITALWLPPAYKGTSRSDVGYGVYDLYDLGEFNQKGTVRTKYGTKAQYLQAIQAAHAAGMQVYADVVFDHKGGADGTEWVDAVEVNPSDRNQEISGTYQIQAWTKFDFPGRGNTYSSFKWRWYHFDGVDWDESRKLSRIYKFRGIGKAWDWEVDTENGNYDYLMYADLDMDHPEVVTELKNWGKWYVNTTNIDGFRLDAVKHIKFSFFPDWLSYVRSQTGKPLFTVGEYWSYDINKLHNYITKTNGTMSLFDAPLHNKFYTASKSGGAFDMRTLMTNTLMKDEPTLAVTFVDNHDTEPGQALQSWVDPWFKPLAYAFILTREEGYPCVFYGDYYGIPQYNIPSLKSKIDPLLIARRDYAYGTQHDYLDHSDIIGWTREGVTEKPGSGLAALITDGPGGSKWMYVGKEHAGKVFYDLTGNRSDTVTINSDGWGEFKVNGGSVSVWVPRKTTVSTIARP

SEQ ID NO: 19199 - protein, 493 aa, Geobacillus stearothermophilus
AAPFNGTMMQYFEWYLPDDGTLWTKVANEANNLSSLGITALWLPPAYKGTSRSDVGYGVYDLYDLGEFNQKGTVRTKYGTKAQYLQAIQAAHAAGMEVYADVVFDHKGGADGTEWVDAVEVNPSDRNQEISGTYQIQAWTKFDFPGRGNTYSSFKWRWYHFDGVDWDESRKLSRIYKFRGIGKAWDWEVDTENGNYDYLMYADLDMDHPEVVTELKNWGKWYVNTTNIDGFRLDAVKHIKFSFFPDWLSYVRSQTGKPLFTVGEYWSYDINKLHNYITKTNGTMSLFDAPLHNKFYTASKSGGAFDMRTLMTNTLMKDRPTLAVTFVDNHDTEPGQALQSWVDPWFKPLAYAFILTRQEGYPCVFYGDYYGIPQYNIPSLKSKIDPLLIARRDYAYGTQHDYLDHSDIIGWTREGVTEKPGSGLAALITDGPGGSKWMYVGKEHAGKVFYDLTGNRSDTVTINSDGWGEFKVNGGSVSVWVPRKTTVSTIARP

SEQ ID NO: 19200 - protein, 493 aa, Geobacillus stearothermophilus
AAPFNGTMMQYFEWYLPDDGTLWTKVANEANNLSSLGITALWLPPAYKGTSRSDVGYGVYDLYDLGEFNQKGTVRTKYGTKAQYLQAIQAAHAAGMRVYADVVFDHKGGADGTEWVDAVEVNPSDRNQEISGTYQIQAWTKFDFPGRGNTYSSFKWRWYHFDGVDWDESRKLSRIYKFRGIGKAWDWEVDTENGNYDYLMYADLDMDHPEVVTELKNWGKWYVNTTNIDGFRLDAVKHIKFSFFPDWLSYVRSQTGKPLFTVGEYWSYDINKLHNYITKTNGTMSLFDAPLHNKFYTASKSGGAFDMRTLMTNTLMKDRPTLAVTFVDNHDTEPGQALQSWVDPWFKPLAYAFILTRQEGYPCVFYGDYYGIPQYNIPSLKSKIDPLLIARRDYAYGTQHDYLDHSDIIGWTREGVTEKPGSGLAALITDGPGGSKWMYVGKEHAGKVFYDLTGNRSDTVTINSDGWGEFKVNGGSVSVWVPRKTTVSTIARP

SEQ ID NO: 19201 - protein, 493 aa, Geobacillus stearothermophilus
AAPFNGTMMQYFEWYLPDDGTLWTKVANEANNLSSLGITALWLPPAYKGTSRSDVGYGVYDLYDLGEFNQKGTVRTKYGTKAQYLQAIQAAHAAGMEVYADVVFDHKGGADGTEWVDAVEVNPSDRNQEISGTYQIQAWTKFDFPGRGNTYSSFKWRWYHFDGVDWDESRKLSRIYKFRGIGKAWDWEVDTENGNYDYLMYADLDMDHPEVVTELKNWGKWYVNTTNIDGFRLDAVKHIKFQFFPDWLSYVRSQTGKPLFTVGEYWSYDINKLHNYITKTNGTMSLFDAPLHNKFYTASKSGGAFDMRTLMTNTLMKDEPTLAVTFVDNHDTEPGQALQSWVDPWFKPLAYAFILTRQEGYPCVFYGDYYGIPQYNIPSLKSKIDPLLIARRDYAYGTQHDYLDHSDIIGWTREGVTEKPGSGLAALITDGPGGSKWMYVGKRHAGKVFYDLTGNRSDTVTINSDGWGEFKVNGGSVSVWVPRKTTVSTIARP

SEQ ID NO: 19202 - protein, 493 aa, Geobacillus stearothermophilus
AAPFNGTMMQYFEWYLPDDGTLWTKVANEANNLSSLGITALWLPPAYKGTSRSDVGYGVYDLYDLGEFNQKGTVRTKYGTKAQYLQAIQAAHAAGMEVYADVVFDHKGGADGTEWVDAVEVNPSDRNQEISGTYQIQAWTKFDFPGRGNTYSSFKWRWYHFDGVDWDESRKLSRIYKFRGIGKAWDWEVDTENGNYDYLMYADLDMDHPEVVTELKNWGKWYVNTTNIDGFRLDAVKHIKFSFFPDWLSYVRSQTGKPLFTVGEYWSYDINKLHNYITKTNGTMSLFDAPLHNKFYTASKSGGAFDMRTLMTNTLMKDEPTLAVTFVDNHDTEPGQALQSWVDPWFKPLAYAFILTRQEGYPCVFYGDYYGIPQYNIPSLKSKIDPLLIARRDYAYGTQHDYLDHSDIIGWTREGVTEKPGSGLAALITDGPGGSKWMYVGKRHAGKVFYDLTGNRSDTVTINSDGWGEFKVNGGSVSVWVPRKTTVSTIARP

SEQ ID NO: 19203 - protein, 493 aa, Geobacillus stearothermophilus
AAPFNGTMMQYFEWYLPDDGTLWTKVANEANNLSSLGITALWLPPAYKGTSRSDVGYGVYDLYDLGEFNQKGTVRTKYGTKAQYLQAIQAAHAAGMRVYADVVFDHKGGADGTEWVDAVEVNPSDRNQEISGTYQIQAWTKFDFPGRGNTYSSFKWRWYHFDGVDWDESRKLSRIYKFRGIGKAWDWEVDTENGNYDYLMYADLDMDHPEVVTELKNWGKWYVNTTNIDGFRLDAVKHIKFQFFPDWLSYVRSQTGKPLFTVGEYWSYDINKLHNYITKTNGTMSLFDAPLHNKFYTASKSGGAFDMRTLMTNTLMKDEPTLAVTFVDNHDTEPGQALQSWVDPWFKPLAYAFILTRREGYPCVFYGDYYGIPQYNIPSLKSKIDPLLIARRDYAYGTQHDYLDHSDIIGWTREGVTEKPGSGLAALITDGPGGSKWMYVGKQHAGKVFYDLTGNRSDTVTINSDGWGEFKVNGGSVSVWVPRKTTVSTIARP

SEQ ID NO: 19204 - protein, 493 aa, Geobacillus stearothermophilus
AAPFNGTMMQYFEWYLPDDGTLWTKVANEANNLSSLGITALWLPPAYKGTSRSDVGYGVYDLYDLGEFNQKGTVRTKYGTKAQYLQAIQAAHAAGMQVYADVVFDHKGGADGTEWVDAVEVNPSDRNQEISGTYQIQAWTKFDFPGRGNTYSSFKWRWYHFNGVDWDESRKLSRIYKFRGIGKAWNWEVDTENGNYDYLMYANLDYNHPEVVTELKNWGKWYVNTTNIDGFRLDAVKHIKFSFFPDWLSYVRSQTGKPLFTVGEYWSYDINKLHNYITKTDGTMSLFDAPLHNKFYTASKSGGAFDMRTLMTNTLMKDQPTLAVTFVDNHDTEPGQALQSWVDPWFKPLAYAFILTRQEGYPCVFYGDYYGIPQYNIPSLKSKIDPLLIARRDYAYGTQHDYLDHSDIIGWTREGGTEKPGSGLAALITDGPGGSKWMYVGKQHAGKVFYDLTGNRSDTVTINSDGWGEFKVNGGSVSVWVPRKTTVSTIARP

SEQ ID NO: 19205 - protein, 493 aa, Geobacillus stearothermophilus
AAPFNGTMMQYFEWYLPDDGTLWTKVANEANNLSSLGITALWLPPAYKGTSRSDVGYGVYDLYDLGEFNQKGTVRTKYGTKAQYLQAIQAAHAAGMRVYADVVFDHKGGADGTEWVDAVEVNPSDRNQEISGTYQIQAWTKFDFPGRGNTYSSFKWRWYHFDGVDWDESRKLSRIYKFRGIGKAWDWEVDTENGNYDYLMYADLDMDHPEVVTELKNWGKWYVNTTNIDGFRLDAVKHIKFSFFPDWLSYVRSQTGKPLFTVGEYWSYDINKLHNYITKTNGTMSLFDAPLHNKFYTASKSGGAFDMRTLMTNTLMKDRPTLAVTFVDNHDTEPGQALQSWVDPWFKPLAYAFILTRREGYPCVFYGDYYGIPQYNIPSLKSKIDPLLIARRDYAYGTQHDYLDHSDIIGWTREGVTEKPGSGLAALITDGPGGSKWMYVGKQHAGKVFYDLTGNRSDTVTINSDGWGEFKVNGGSVSVWVPRKTTVSTIARP

SEQ ID NO: 19206 - protein, 493 aa, Geobacillus stearothermophilus
AAPFNGTMMQYFEWYLPDDGTLWTKVANEANNLSSLGITALWLPPAYKGTSRSDVGYGVYDLYDLGEFNQKGTVRTKYGTKAQYLQAIQAAHAAGMRVYADVVFDHKGGADGTEWVDAVEVNPSDRNQEISGTYQIQAWTKFDFPGRGNTYSSFKWRWYHFDGVDWDESRKLSRIYKFRGIGKAWDWEVDTENGNYDYLMYADLDMDHPEVVTELKNWGKWYVNTTNIDGFRLDAVKHIKFSFFPDWLSYVRSQTGKPLFTVGEYWSYDINKLHNYITKTNGTMSLFDAPLHNKFYTASKSGGAFDMRTLMTNTLMKDEPTLAVTFVDNHDTEPGQALQSWVDPWFKPLAYAFILTRREGYPCVFYGDYYGIPQYNIPSLKSKIDPLLIARRDYAYGTQHDYLDHSDIIGWTREGVTEKPGSGLAALITDGPGGSKWMYVGKQHAGKVFYDLTGNRSDTVTINSDGWGEFKVNGGSVSVWVPRKTTVSTIARP

SEQ ID NO: 19207 - protein, 493 aa, Geobacillus stearothermophilus
AAPFNGTMMQYFEWYLPDDGTLWTKVANEANNLSSLGITALWLPPAYKGTSRSDVGYGVYDLYDLGEFNQKGTVRTKYGTKAQYLQAIQAAHAAGMRVYADVVFDHKGGADGTEWVDAVEVNPSDRNQEISGTYQIQAWTKFDFPGRGNTYSSFKWRWYHFDGVDWDESRKLSRIYKFRGIGKAWDWEVDTENGNYDYLMYADLDMDHPEVVTELKNWGKWYVNTTNIDGFRLDAVKHIKFQFFPDWLSYVRSQTGKPLFTVGEYWSYDINKLHNYITKTNGTMSLFDAPLHNKFYTASKSGGAFDMRTLMTNTLMKDRPTLAVTFVDNHDTEPGQALQSWVDPWFKPLAYAFILTRQEGYPCVFYGDYYGIPQYNIPSLKSKIDPLLIARRDYAYGTQHDYLDHSDIIGWTREGVTEKPGSGLAALITDGPGGSKWMYVGKRHAGKVFYDLTGNRSDTVTINSDGWGEFKVNGGSVSVWVPRKTTVSTIARP

SEQ ID NO: 19208 - protein, 493 aa, Geobacillus stearothermophilus
AAPFNGTMMQYFEWYLPDDGTLWTKVANEANNLSSLGITALWLPPAYKGTSRSDVGYGVYDLYDLGEFNQKGTVRTKYGTKAQYLQAIQAAHAAGMEVYADVVFDHKGGADGTEWVDAVEVNPSDRNQEISGTYQIQAWTKFDFPGRGNTYSSFKWRWYHFDGVDWDESRKLSRIYKFRGIGKAWDWEVDTENGNYDYLMYADLDMDHPEVVTELKNWGKWYVNTTNIDGFRLDAVKHIKFSFFPDWLSYVRSQTGKPLFTVGEYWSYDINKLHNYITKTNGTMSLFDAPLHNKFYTASKSGGAFDMRTLMTNTLMKDQPTLAVTFVDNHDTEPGQALQSWVDPWFKPLAYAFILTREEGYPCVFYGDYYGIPQYNIPSLKSKIDPLLIARRDYAYGTQHDYLDHSDIIGWTREGVTEKPGSGLAALITDGPGGSKWMYVGKEHAGKVFYDLTGNRSDTVTINSDGWGEFKVNGGSVSVWVPRKTTVSTIARP

SEQ ID NO: 19209 - protein, 493 aa, Geobacillus stearothermophilus
AAPFNGTMMQYFEWYLPDDGTLWTKVANEANNLSSLGITALWLPPAYKGTSRSDVGYGVYDLYDLGEFNQKGTVRTKYGTKAQYLQAIQAAHAAGMRVYADVVFDHKGGADGTEWVDAVEVNPSDRNQEISGTYQIQAWTKFDFPGRGNTYSSFKWRWYHFDGVDWDESRKLSRIYKFRGIGKAWDWEVDTENGNYDYLMYADLDMDHPEVVTELKNWGKWYVNTTNIDGFRLDAVKHIKFSFFPDWLSYVRSQTGKPLFTVGEYWSYDINKLHNYITKTNGTMSLFDAPLHNKFYTASKSGGAFDMRTLMTNTLMKDRPTLAVTFVDNHDTEPGQALQSWVDPWFKPLAYAFILTRQEGYPCVFYGDYYGIPQYNIPSLKSKIDPLLIARRDYAYGTQHDYLDHSDIIGWTREGVTEKPGSGLAALITDGPGGSKWMYVGKRHAGKVFYDLTGNRSDTVTINSDGWGEFKVNGGSVSVWVPRKTTVSTIARP

SEQ ID NO: 19210 - protein, 493 aa, Geobacillus stearothermophilus
AAPFNGTMMQYFEWYLPDDGTLWTKVANEANNLSSLGITALWLPPAYKGTSRSDVGYGVYDLYDLGEFNQKGTVRTKYGTKAQYLQAIQAAHAAGMRVYADVVFDHKGGADGTEWVDAVEVNPSDRNQEISGTYQIQAWTKFDFPGRGNTYSSFKWRWYHFDGVDWDESRKLSRIYKFRGIGKAWDWEVDTENGNYDYLMYADLDMDHPEVVTELKNWGKWYVNTTNIDGFRLDAVKHIKFQFFPDWLSYVRSQTGKPLFTVGEYWSYDINKLHNYITKTNGTMSLFDAPLHNKFYTASKSGGAFDMRTLMTNTLMKDRPTLAVTFVDNHDTEPGQALQSWVDPWFKPLAYAFILTRREGYPCVFYGDYYGIPQYNIPSLKSKIDPLLIARRDYAYGTQHDYLDHSDIIGWTREGVTEKPGSGLAALITDGPGGSKWMYVGKQHAGKVFYDLTGNRSDTVTINSDGWGEFKVNGGSVSVWVPRKTTVSTIARP

SEQ ID NO: 19211 - protein, 493 aa, Geobacillus stearothermophilus
AAPFNGTMMQYFEWYLPDDGTLWTKVANEANNLSSLGITALWLPPAYKGTSRSDVGYGVYDLYDLGEFNQKGTVRTKYGTKAQYLQAIQAAHAAGMQVYADVVFDHKGGADGTEWVDAVEVNPSDRNQEISGTYQIQAWTKFDFPGRGNTYSSFKWRWYHFDGVDWDESRKLSRIYKFRGIGKAWDWEVDTENGNYDYLMYADLDMDHPEVVTELKNWGKWYVNTTNIDGFRLDAVKHIKFSFFPDWLSYVRSQTGKPLFTVGEYWSYDINKLHNYITKTNGTMSLFDAPLHNKFYTASKSGGAFDMRTLMTNTLMKDEPTLAVTFVDNHDTEPGQALQSWVDPWFKPLAYAFILTRREGYPCVFYGDYYGIPQYNIPSLKSKIDPLLIARRDYAYGTQHDYLDHSDIIGWTREGVTEKPGSGLAALITDGPGGSKWMYVGKEHAGKVFYDLTGNRSDTVTINSDGWGEFKVNGGSVSVWVPRKTTVSTIARP

SEQ ID NO: 19212 - protein, 493 aa, Geobacillus stearothermophilus
AAPFNGTMMQYFEWYLPDDGTLWTKVANEANNLSSLGITALWLPPAYKGTSRSDVGYGVYDLYDLGEFNQKGTVRTKYGTKAQYLQAIQAAHAAGMEVYADVVFDHKGGADGTEWVDAVEVNPSDRNQEISGTYQIQAWTKFDFPGRGNTYSSFKWRWYHFDGVDWDESRKLSRIYKFRGIGKAWDWEVDTENGNYDYLMYADLDMDHPEVVTELKNWGKWYVNTTNIDGFRLDAVKHIKFQFFPDWLSYVRSQTGKPLFTVGEYWSYDINKLHNYITKTNGTMSLFDAPLHNKFYTASKSGGAFDMRTLMTNTLMKDQPTLAVTFVDNHDTEPGQALQSWVDPWFKPLAYAFILTRREGYPCVFYGDYYGIPQYNIPSLKSKIDPLLIARRDYAYGTQHDYLDHSDIIGWTREGVTEKPGSGLAALITDGPGGSKWMYVGKRHAGKVFYDLTGNRSDTVTINSDGWGEFKVNGGSVSVWVPRKTTVSTIARP

SEQ ID NO: 19213 - protein, 493 aa, Geobacillus stearothermophilus
AAPFNGTMMQYFEWYLPDDGTLWTKVANEANNLSSLGITALWLPPAYKGTSRSDVGYGVYDLYDLGEFNQKGTVRTKYGTKAQYLQAIQAAHAAGMQVYADVVFDHKGGADGTEWVDAVEVNPSDRNQEISGTYQIQAWTKFDFPGRGNTYSSFKWRWYHFDGVDWDESRKLSRIYKFRGIGKAWDWEVDTENGNYDYLMYADLDMDHPEVVTELKNWGKWYVNTTNIDGFRLDAVKHIKFQFFPDWLSYVRSQTGKPLFTVGEYWSYDINKLHNYITKTNGTMSLFDAPLHNKFYTASKSGGAFDMRTLMTNTLMKDEPTLAVTFVDNHDTEPGQALQSWVDPWFKPLAYAFILTRREGYPCVFYGDYYGIPQYNIPSLKSKIDPLLIARRDYAYGTQHDYLDHSDIIGWTREGVTEKPGSGLAALITDGPGGSKWMYVGKRHAGKVFYDLTGNRSDTVTINSDGWGEFKVNGGSVSVWVPRKTTVSTIARP

SEQ ID NO: 19214 - protein, 493 aa, Geobacillus stearothermophilus
AAPFNGTMMQYFEWYLPDDGTLWTKVANEANNLSSLGITALWLPPAYKGTSRSDVGYGVYDLYDLGEFNQKGTVRTKYGTKAQYLQAIQAAHAAGMRVYADVVFDHKGGADGTEWVDAVEVNPSDRNQEISGTYQIQAWTKFDFPGRGNTYSSFKWRWYHFDGVDWDESRKLSRIYKFRGIGKAWDWEVDTENGNYDYLMYADLDMDHPEVVTELKNWGKWYVNTTNIDGFRLDAVKHIKFQFFPDWLSYVRSQTGKPLFTVGEYWSYDINKLHNYITKTNGTMSLFDAPLHNKFYTASKSGGAFDMRTLMTNTLMKDEPTLAVTFVDNHDTEPGQALQSWVDPWFKPLAYAFILTRQEGYPCVFYGDYYGIPQYNIPSLKSKIDPLLIARRDYAYGTQHDYLDHSDIIGWTREGVTEKPGSGLAALITDGPGGSKWMYVGKEHAGKVFYDLTGNRSDTVTINSDGWGEFKVNGGSVSVWVPRKTTVSTIARP

SEQ ID NO: 19215 - protein, 493 aa, Geobacillus stearothermophilus
AAPFNGTMMQYFEWYLPDDGTLWTKVANEANNLSSLGITALWLPPAYKGTSRSDVGYGVYDLYDLGEFNQKGTVRTKYGTKAQYLQAIQAAHAAGMRVYADVVFDHKGGADGTEWVDAVEVNPSDRNQEISGTYQIQAWTKFDFPGRGNTYSSFKWRWYHFDGVDWDESRKLSRIYKFRGIGKAWDWEVDTENGNYDYLMYADLDMDHPEVVTELKNWGKWYVNTTNIDGFRLDAVKHIKFQFFPDWLSYVRSQTGKPLFTVGEYWSYDINKLHNYITKTNGTMSLFDAPLHNKFYTASKSGGAFDMRTLMTNTLMKDQPTLAVTFVDNHDTEPGQALQSWVDPWFKPLAYAFILTREEGYPCVFYGDYYGIPQYNIPSLKSKIDPLLIARRDYAYGTQHDYLDHSDIIGWTREGVTEKPGSGLAALITDGPGGSKWMYVGKRHAGKVFYDLTGNRSDTVTINSDGWGEFKVNGGSVSVWVPRKTTVSTIARP

SEQ ID NO: 19216 - protein, 493 aa, Geobacillus stearothermophilus
AAPFNGTMMQYFEWYLPDDGTLWTKVANEANNLSSLGITALWLPPAYKGTSRSDVGYGVYDLYDLGEFNQKGTVRTKYGTKAQYLQAIQAAHAAGMQVYADVVFDHKGGADGTEWVDAVEVNPSDRNQEISGTYQIQAWTKFDFPGRGNTYSSFKWRWYHFDGVDWDESRKLSRIYKFRGIGKAWDWEVDTENGNYDYLMYADLDMDHPEVVTELKNWGKWYVNTTNIDGFRLDAVKHIKFQFFPDWLSYVRSQTGKPLFTVGEYWSYDINKLHNYITKTNGTMSLFDAPLHNKFYTASKSGGAFDMRTLMTNTLMKDEPTLAVTFVDNHDTEPGQALQSWVDPWFKPLAYAFILTREEGYPCVFYGDYYGIPQYNIPSLKSKIDPLLIARRDYAYGTQHDYLDHSDIIGWTREGVTEKPGSGLAALITDGPGGSKWMYVGKRHAGKVFYDLTGNRSDTVTINSDGWGEFKVNGGSVSVWVPRKTTVSTIARP

SEQ ID NO: 19217 - protein, 493 aa, Geobacillus stearothermophilus
AAPFNGTMMQYFEWYLPDDGTLWTKVANEANNLSSLGITALWLPPAYKGTSRSDVGYGVYDLYDLGEFNQKGTVRTKYGTKAQYLQAIQAAHAAGMRVYADVVFDHKGGADGTEWVDAVEVNPSDRNQEISGTYQIQAWTKFDFPGRGNTYSSFKWRWYHFDGVDWDESRKLSRIYKFRGIGKAWDWEVDTENGNYDYLMYADLDMDHPEVVTELKNWGKWYVNTTNIDGFRLDAVKHIKFQFFPDWLSYVRSQTGKPLFTVGEYWSYDINKLHNYITKTNGTMSLFDAPLHNKFYTASKSGGAFDMRTLMTNTLMKDEPTLAVTFVDNHDTEPGQALQSWVDPWFKPLAYAFILTREEGYPCVFYGDYYGIPQYNIPSLKSKIDPLLIARRDYAYGTQHDYLDHSDIIGWTREGVTEKPGSGLAALITDGPGGSKWMYVGKQHAGKVFYDLTGNRSDTVTINSDGWGEFKVNGGSVSVWVPRKTTVSTIARP

SEQ ID NO: 19218 - protein, 493 aa, Geobacillus stearothermophilus
AAPFNGTMMQYFEWYLPDDGTLWTKVANEANNLSSLGITALWLPPAYKGTSRSDVGYGVYDLYDLGEFNQKGTVRTKYGTKAQYLQAIQAAHAAGMEVYADVVFDHKGGADGTEWVDAVEVNPSDRNQEISGTYQIQAWTKFDFPGRGNTYSSFKWRWYHFDGVDWDESRKLSRIYKFRGIGKAWDWEVDTENGNYDYLMYADLDMDHPEVVTELKNWGKWYVNTTNIDGFRLDAVKHIKFQFFPDWLSYVRSQTGKPLFTVGEYWSYDINKLHNYITKTNGTMSLFDAPLHNKFYTASKSGGAFDMRTLMTNTLMKDQPTLAVTFVDNHDTEPGQALQSWVDPWFKPLAYAFILTREEGYPCVFYGDYYGIPQYNIPSLKSKIDPLLIARRDYAYGTQHDYLDHSDIIGWTREGVTEKPGSGLAALITDGPGGSKWMYVGKEHAGKVFYDLTGNRSDTVTINSDGWGEFKVNGGSVSVWVPRKTTVSTIARP

SEQ ID NO: 19219 - protein, 493 aa, Geobacillus stearothermophilus
AAPFNGTMMQYFEWYLPDDGTLWTKVANEANNLSSLGITALWLPPAYKGTSRSDVGYGVYDLYDLGEFNQKGTVRTKYGTKAQYLQAIQAAHAAGMRVYADVVFDHKGGADGTEWVDAVEVNPSDRNQEISGTYQIQAWTKFDFPGRGNTYSSFKWRWYHFDGVDWDESRKLSRIYKFRGIGKAWDWEVDTENGNYDYLMYADLDMDHPEVVTELKNWGKWYVNTTNIDGFRLDAVKHIKFSFFPDWLSYVRSQTGKPLFTVGEYWSYDINKLHNYITKTNGTMSLFDAPLHNKFYTASKSGGAFDMRTLMTNTLMKDQPTLAVTFVDNHDTEPGQALQSWVDPWFKPLAYAFILTRREGYPCVFYGDYYGIPQYNIPSLKSKIDPLLIARRDYAYGTQHDYLDHSDIIGWTREGVTEKPGSGLAALITDGPGGSKWMYVGKRHAGKVFYDLTGNRSDTVTINSDGWGEFKVNGGSVSVWVPRKTTVSTIARP

SEQ ID NO: 19220 - protein, 493 aa, Geobacillus stearothermophilus
AAPFNGTMMQYFEWYLPDDGTLWTKVANEANNLSSLGITALWLPPAYKGTSRSDVGYGVYDLYDLGEFNQKGTVRTKYGTKAQYLQAIQAAHAAGMRVYADVVFDHKGGADGTEWVDAVEVNPSDRNQEISGTYQIQAWTKFDFPGRGNTYSSFKWRWYHFDGVDWDESRKLSRIYKFRGIGKAWDWEVDTENGNYDYLMYADLDMDHPEVVTELKNWGKWYVNTTNIDGFRLDAVKHIKFQFFPDWLSYVRSQTGKPLFTVGEYWSYDINKLHNYITKTNGTMSLFDAPLHNKFYTASKSGGAFDMRTLMTNTLMKDEPTLAVTFVDNHDTEPGQALQSWVDPWFKPLAYAFILTRQEGYPCVFYGDYYGIPQYNIPSLKSKIDPLLIARRDYAYGTQHDYLDHSDIIGWTREGVTEKPGSGLAALITDGPGGSKWMYVGKRHAGKVFYDLTGNRSDTVTINSDGWGEFKVNGGSVSVWVPRKTTVSTIARP

SEQ ID NO: 19221 - protein, 493 aa, Geobacillus stearothermophilus
AAPFNGTMMQYFEWYLPDDGTLWTKVANEANNLSSLGITALWLPPAYKGTSRSDVGYGVYDLYDLGEFNQKGTVRTKYGTKAQYLQAIQAAHAAGMEVYADVVFDHKGGADGTEWVDAVEVNPSDRNQEISGTYQIQAWTKFDFPGRGNTYSSFKWRWYHFDGVDWDESRKLSRIYKFRGIGKAWDWEVDTENGNYDYLMYADLDMDHPEVVTELKNWGKWYVNTTNIDGFRLDAVKHIKFSFFPDWLSYVRSQTGKPLFTVGEYWSYDINKLHNYITKTNGTMSLFDAPLHNKFYTASKSGGAFDMRTLMTNTLMKDEPTLAVTFVDNHDTEPGQALQSWVDPWFKPLAYAFILTRQEGYPCVFYGDYYGIPQYNIPSLKSKIDPLLIARRDYAYGTQHDYLDHSDIIGWTREGVTEKPGSGLAALITDGPGGSKWMYVGKEHAGKVFYDLTGNRSDTVTINSDGWGEFKVNGGSVSVWVPRKTTVSTIARP

SEQ ID NO: 19222 - protein, 493 aa, Geobacillus stearothermophilus
AAPFNGTMMQYFEWYLPDDGTLWTKVANEANNLSSLGITALWLPPAYKGTSRSDVGYGVYDLYDLGEFNQKGTVRTKYGTKAQYLQAIQAAHAAGMEVYADVVFDHKGGADGTEWVDAVEVNPSDRNQEISGTYQIQAWTKFDFPGRGNTYSSFKWRWYHFDGVDWDESRKLSRIYKFRGIGKAWDWEVDTENGNYDYLMYADLDMDHPEVVTELKNWGKWYVNTTNIDGFRLDAVKHIKFQFFPDWLSYVRSQTGKPLFTVGEYWSYDINKLHNYITKTNGTMSLFDAPLHNKFYTASKSGGAFDMRTLMTNTLMKDEPTLAVTFVDNHDTEPGQALQSWVDPWFKPLAYAFILTRREGYPCVFYGDYYGIPQYNIPSLKSKIDPLLIARRDYAYGTQHDYLDHSDIIGWTREGVTEKPGSGLAALITDGPGGSKWMYVGKQHAGKVFYDLTGNRSDTVTINSDGWGEFKVNGGSVSVWVPRKTTVSTIARP

SEQ ID NO: 19223 - protein, 493 aa, Geobacillus stearothermophilus
AAPFNGTMMQYFEWYLPDDGTLWTKVANEANNLSSLGITALWLPPAYKGTSRSDVGYGVYDLYDLGEFNQKGTVRTKYGTKAQYLQAIQAAHAAGMEVYADVVFDHKGGADGTEWVDAVEVNPSDRNQEISGTYQIQAWTKFDFPGRGNTYSSFKWRWYHFDGVDWDESRKLSRIYKFRGIGKAWDWEVDTENGNYDYLMYADLDMDHPEVVTELKNWGKWYVNTTNIDGFRLDAVKHIKFQFFPDWLSYVRSQTGKPLFTVGEYWSYDINKLHNYITKTNGTMSLFDAPLHNKFYTASKSGGAFDMRTLMTNTLMKDEPTLAVTFVDNHDTEPGQALQSWVDPWFKPLAYAFILTRQEGYPCVFYGDYYGIPQYNIPSLKSKIDPLLIARRDYAYGTQHDYLDHSDIIGWTREGVTEKPGSGLAALITDGPGGSKWMYVGKEHAGKVFYDLTGNRSDTVTINSDGWGEFKVNGGSVSVWVPRKTTVSTIARP

SEQ ID NO: 19224 - protein, 493 aa, Geobacillus stearothermophilus
AAPFNGTMMQYFEWYLPDDGTLWTKVANEANNLSSLGITALWLPPAYKGTSRSDVGYGVYDLYDLGEFNQKGTVRTKYGTKAQYLQAIQAAHAAGMRVYADVVFDHKGGADGTEWVDAVEVNPSDRNQEISGTYQIQAWTKFDFPGRGNTYSSFKWRWYHFDGVDWDESRKLSRIYKFRGIGKAWDWEVDTENGNYDYLMYADLDMDHPEVVTELKNWGKWYVNTTNIDGFRLDAVKHIKFSFFPDWLSYVRSQTGKPLFTVGEYWSYDINKLHNYITKTNGTMSLFDAPLHNKFYTASKSGGAFDMRTLMTNTLMKDQPTLAVTFVDNHDTEPGQALQSWVDPWFKPLAYAFILTREEGYPCVFYGDYYGIPQYNIPSLKSKIDPLLIARRDYAYGTQHDYLDHSDIIGWTREGVTEKPGSGLAALITDGPGGSKWMYVGKEHAGKVFYDLTGNRSDTVTINSDGWGEFKVNGGSVSVWVPRKTTVSTIARP

SEQ ID NO: 19225 - protein, 493 aa, Geobacillus stearothermophilus
AAPFNGTMMQYFEWYLPDDGTLWTKVANEANNLSSLGITALWLPPAYKGTSRSDVGYGVYDLYDLGEFNQKGTVRTKYGTKAQYLQAIQAAHAAGMQVYADVVFDHKGGADGTEWVDAVEVNPSDRNQEISGTYQIQAWTKFDFPGRGNTYSSFKWRWYHFDGVDWDESRKLSRIYKFRGIGKAWDWEVDTENGNYDYLMYADLDMDHPEVVTELKNWGKWYVNTTNIDGFRLDAVKHIKFSFFPDWLSYVRSQTGKPLFTVGEYWSYDINKLHNYITKTNGTMSLFDAPLHNKFYTASKSGGAFDMRTLMTNTLMKDRPTLAVTFVDNHDTEPGQALQSWVDPWFKPLAYAFILTREEGYPCVFYGDYYGIPQYNIPSLKSKIDPLLIARRDYAYGTQHDYLDHSDIIGWTREGVTEKPGSGLAALITDGPGGSKWMYVGKRHAGKVFYDLTGNRSDTVTINSDGWGEFKVNGGSVSVWVPRKTTVSTIARP

SEQ ID NO: 19226 - protein, 493 aa, Geobacillus stearothermophilus
AAPFNGTMMQYFEWYLPDDGTLWTKVANEANNLSSLGITALWLPPAYKGTSRSDVGYGVYDLYDLGEFNQKGTVRTKYGTKAQYLQAIQAAHAAGMQVYADVVFDHKGGADGTEWVDAVEVNPSDRNQEISGTYQIQAWTKFDFPGRGNTYSSFKWRWYHFDGVDWDESRKLSRIYKFRGIGKAWDWEVDTENGNYDYLMYADLDMDHPEVVTELKNWGKWYVNTTNIDGFRLDAVKHIKFSFFPDWLSYVRSQTGKPLFTVGEYWSYDINKLHNYITKTNGTMSLFDAPLHNKFYTASKSGGAFDMRTLMTNTLMKDEPTLAVTFVDNHDTEPGQALQSWVDPWFKPLAYAFILTRREGYPCVFYGDYYGIPQYNIPSLKSKIDPLLIARRDYAYGTQHDYLDHSDIIGWTREGVTEKPGSGLAALITDGPGGSKWMYVGKRHAGKVFYDLTGNRSDTVTINSDGWGEFKVNGGSVSVWVPRKTTVSTIARP

SEQ ID NO: 19227 - protein, 493 aa, Geobacillus stearothermophilus
AAPFNGTMMQYFEWYLPDDGTLWTKVANEANNLSSLGITALWLPPAYKGTSRSDVGYGVYDLYDLGEFNQKGTVRTKYGTKAQYLQAIQAAHAAGMQVYADVVFDHKGGADGTEWVDAVEVNPSDRNQEISGTYQIQAWTKFDFPGRGNTYSSFKWRWYHFDGVDWDESRKLSRIYKFRGIGKAWDWEVDTENGNYDYLMYADLDMDHPEVVTELKNWGKWYVNTTNIDGFRLDAVKHIKFQFFPDWLSYVRSQTGKPLFTVGEYWSYDINKLHNYITKTNGTMSLFDAPLHNKFYTASKSGGAFDMRTLMTNTLMKDRPTLAVTFVDNHDTEPGQALQSWVDPWFKPLAYAFILTRREGYPCVFYGDYYGIPQYNIPSLKSKIDPLLIARRDYAYGTQHDYLDHSDIIGWTREGVTEKPGSGLAALITDGPGGSKWMYVGKRHAGKVFYDLTGNRSDTVTINSDGWGEFKVNGGSVSVWVPRKTTVSTIARP

SEQ ID NO: 19228 - protein, 493 aa, Geobacillus stearothermophilus
AAPFNGTMMQYFEWYLPDDGTLWTKVANEANNLSSLGITALWLPPAYKGTSRSDVGYGVYDLYDLGEFNQKGTVRTKYGTKAQYLQAIQAAHAAGMRVYADVVFDHKGGADGTEWVDAVEVNPSDRNQEISGTYQIQAWTKFDFPGRGNTYSSFKWRWYHFDGVDWDESRKLSRIYKFRGIGKAWDWEVDTENGNYDYLMYADLDMDHPEVVTELKNWGKWYVNTTNIDGFRLDAVKHIKFSFFPDWLSYVRSQTGKPLFTVGEYWSYDINKLHNYITKTNGTMSLFDAPLHNKFYTASKSGGAFDMRTLMTNTLMKDRPTLAVTFVDNHDTEPGQALQSWVDPWFKPLAYAFILTREEGYPCVFYGDYYGIPQYNIPSLKSKIDPLLIARRDYAYGTQHDYLDHSDIIGWTREGVTEKPGSGLAALITDGPGGSKWMYVGKQHAGKVFYDLTGNRSDTVTINSDGWGEFKVNGGSVSVWVPRKTTVSTIARP

SEQ ID NO: 19229 - protein, 493 aa, Geobacillus stearothermophilus
AAPFNGTMMQYFEWYLPDDGTLWTKVANEANNLSSLGITALWLPPAYKGTSRSDVGYGVYDLYDLGEFNQKGTVRTKYGTKAQYLQAIQAAHAAGMQVYADVVFDHKGGADGTEWVDAVEVNPSDRNQEISGTYQIQAWTKFDFPGRGNTYSSFKWRWYHFDGVDWDESRKLSRIYKFRGIGKAWDWEVDTENGNYDYLMYADLDMDHPEVVTELKNWGKWYVNTTNIDGFRLDAVKHIKFSFFPDWLSYVRSQTGKPLFTVGEYWSYDINKLHNYITKTNGTMSLFDAPLHNKFYTASKSGGAFDMRTLMTNTLMKDRPTLAVTFVDNHDTEPGQALQSWVDPWFKPLAYAFILTREEGYPCVFYGDYYGIPQYNIPSLKSKIDPLLIARRDYAYGTQHDYLDHSDIIGWTREGVTEKPGSGLAALITDGPGGSKWMYVGKEHAGKVFYDLTGNRSDTVTINSDGWGEFKVNGGSVSVWVPRKTTVSTIARP

SEQ ID NO: 19230 - protein, 493 aa, Geobacillus stearothermophilus
AAPFNGTMMQYFEWYLPDDGTLWTKVANEANNLSSLGITALWLPPAYKGTSRSDVGYGVYDLYDLGEFNQKGTVRTKYGTKAQYLQAIQAAHAAGMRVYADVVFDHKGGADGTEWVDAVEVNPSDRNQEISGTYQIQAWTKFDFPGRGNTYSSFKWRWYHFDGVDWDESRKLSRIYKFRGIGKAWDWEVDTENGNYDYLMYADLDMDHPEVVTELKNWGKWYVNTTNIDGFRLDAVKHIKFSFFPDWLSYVRSQTGKPLFTVGEYWSYDINKLHNYITKTNGTMSLFDAPLHNKFYTASKSGGAFDMRTLMTNTLMKDQPTLAVTFVDNHDTEPGQALQSWVDPWFKPLAYAFILTRREGYPCVFYGDYYGIPQYNIPSLKSKIDPLLIARRDYAYGTQHDYLDHSDIIGWTREGVTEKPGSGLAALITDGPGGSKWMYVGKEHAGKVFYDLTGNRSDTVTINSDGWGEFKVNGGSVSVWVPRKTTVSTIARP

SEQ ID NO: 19231 - protein, 493 aa, Geobacillus stearothermophilus
AAPFNGTMMQYFEWYLPDDGTLWTKVANEANNLSSLGITALWLPPAYKGTSRSDVGYGVYDLYDLGEFNQKGTVRTKYGTKAQYLQAIQAAHAAGMRVYADVVFDHKGGADGTEWVDAVEVNPSDRNQEISGTYQIQAWTKFDFPGRGNTYSSFKWRWYHFDGVDWDESRKLSRIYKFRGIGKAWDWEVDTENGNYDYLMYADLDMDHPEVVTELKNWGKWYVNTTNIDGFRLDAVKHIKFQFFPDWLSYVRSQTGKPLFTVGEYWSYDINKLHNYITKTNGTMSLFDAPLHNKFYTASKSGGAFDMRTLMTNTLMKDRPTLAVTFVDNHDTEPGQALQSWVDPWFKPLAYAFILTRQEGYPCVFYGDYYGIPQYNIPSLKSKIDPLLIARRDYAYGTQHDYLDHSDIIGWTREGVTEKPGSGLAALITDGPGGSKWMYVGKEHAGKVFYDLTGNRSDTVTINSDGWGEFKVNGGSVSVWVPRKTTVSTIARP

SEQ ID NO: 19232 - protein, 493 aa, Geobacillus stearothermophilus
AAPFNGTMMQYFEWYLPDDGTLWTKVANEANNLSSLGITALWLPPAYKGTSRSDVGYGVYDLYDLGEFNQKGTVRTKYGTKAQYLQAIQAAHAAGMEVYADVVFDHKGGADGTEWVDAVEVNPSDRNQEISGTYQIQAWTKFDFPGRGNTYSSFKWRWYHFDGVDWDESRKLSRIYKFRGIGKAWDWEVDTENGNYDYLMYADLDMDHPEVVTELKNWGKWYVNTTNIDGFRLDAVKHIKFQFFPDWLSYVRSQTGKPLFTVGEYWSYDINKLHNYITKTNGTMSLFDAPLHNKFYTASKSGGAFDMRTLMTNTLMKDRPTLAVTFVDNHDTEPGQALQSWVDPWFKPLAYAFILTRQEGYPCVFYGDYYGIPQYNIPSLKSKIDPLLIARRDYAYGTQHDYLDHSDIIGWTREGVTEKPGSGLAALITDGPGGSKWMYVGKRHAGKVFYDLTGNRSDTVTINSDGWGEFKVNGGSVSVWVPRKTTVSTIARP

SEQ ID NO: 19233 - protein, 493 aa, Geobacillus stearothermophilus
AAPFNGTMMQYFEWYLPDDGTLWTKVANEANNLSSLGITALWLPPAYKGTSRSDVGYGVYDLYDLGEFNQKGTVRTKYGTKAQYLQAIQAAHAAGMEVYADVVFDHKGGADGTEWVDAVEVNPSDRNQEISGTYQIQAWTKFDFPGRGNTYSSFKWRWYHFDGVDWDESRKLSRIYKFRGIGKAWDWEVDTENGNYDYLMYADLDMDHPEVVTELKNWGKWYVNTTNIDGFRLDAVKHIKFQFFPDWLSYVRSQTGKPLFTVGEYWSYDINKLHNYITKTNGTMSLFDAPLHNKFYTASKSGGAFDMRTLMTNTLMKDQPTLAVTFVDNHDTEPGQALQSWVDPWFKPLAYAFILTRREGYPCVFYGDYYGIPQYNIPSLKSKIDPLLIARRDYAYGTQHDYLDHSDIIGWTREGVTEKPGSGLAALITDGPGGSKWMYVGKEHAGKVFYDLTGNRSDTVTINSDGWGEFKVNGGSVSVWVPRKTTVSTIARP

SEQ ID NO: 19234 - protein, 493 aa, Geobacillus stearothermophilus
AAPFNGTMMQYFEWYLPDDGTLWTKVANEANNLSSLGITALWLPPAYKGTSRSDVGYGVYDLYDLGEFNQKGTVRTKYGTKAQYLQAIQAAHAAGMEVYADVVFDHKGGADGTEWVDAVEVNPSDRNQEISGTYQIQAWTKFDFPGRGNTYSSFKWRWYHFDGVDWDESRKLSRIYKFRGIGKAWDWEVDTENGNYDYLMYADLDMDHPEVVTELKNWGKWYVNTTNIDGFRLDAVKHIKFSFFPDWLSYVRSQTGKPLFTVGEYWSYDINKLHNYITKTNGTMSLFDAPLHNKFYTASKSGGAFDMRTLMTNTLMKDRPTLAVTFVDNHDTEPGQALQSWVDPWFKPLAYAFILTRQEGYPCVFYGDYYGIPQYNIPSLKSKIDPLLIARRDYAYGTQHDYLDHSDIIGWTREGVTEKPGSGLAALITDGPGGSKWMYVGKRHAGKVFYDLTGNRSDTVTINSDGWGEFKVNGGSVSVWVPRKTTVSTIARP

SEQ ID NO: 19235 - protein, 493 aa, Geobacillus stearothermophilus
AAPFNGTMMQYFEWYLPDDGTLWTKVANEANNLSSLGITALWLPPAYKGTSRSDVGYGVYDLYDLGEFNQKGTVRTKYGTKAQYLQAIQAAHAAGMRQVYADVVFDHKGGADGTEWVDAVEVNPSDRNQEISGTYQIQAWTKFDFPGRGNTYSSFKWRWYHFDGVDWDESRKLSRIYKFRGIGKAWDWEVDTENGNYDYLMYADLDMDHPEVVTELKNWGKWYVNTTNIDGFRLDAVKHIKFQFFPDWLSYVRSQTGKPLFTVGEYWSYDINKLHNYITKTNGTMSLFDAPLHNKFYTASKSGGAFDMRTLMTNTLMKRPTLAVTFVDNHDTEPGQALQSWVDPWFKPLAYAFILTRREGYPCVFYGDYYGIPQYNIPSLKSKIDPLLIARRDYAYGTQHDYLDHSDIIGWTREGVTEKPGSGLAALITDGPGGSKWMYVGKEHAGKVFYDLTGNRSDTVTINSDGWGEFKVNGGSVSVWVPRKTTVSTIARP

SEQ ID NO: 19236 - protein, 486 aa, Geobacillus stearothermophilus
AAPFNGTMMQYFEWYLPDDGTLWTKVANEANNLSSLGITALWLPPAYKGTSRSDVGYGVYDLYDLGEFNQKGTVRTKYGTKAQYLQAIQAAHAAGMEVYADVVFDHKGGADGTEWVDAVEVNPSDRNQEISGTYQIQAWTKFDFPGRGNTYSSFKWRWYHFDGVDWDESRKLSRIYKFRGIGKAWDWEVDTENGNYDYLMYADLDMDHPEVVTELKNWGKWYVNTTNIDGFRLDAVKHIKFQFFPDWLSYVRSQTGKPLFTVGEYWSYDINKLHNYITKTNGTMSLFDAPLHNKFYTASKSGGAFDMRTLMTNTLMKDRPTLAVTFVDNHDTEPGQALQSWVDPWFKPLAYAFILTRQEGYPCVFYGDYYGIPQYNIPSLKSKIDPLLIARRDYAYGTQHDYLDHSDIIGWTREGVTEKPGSGLAALITDGPGGSKWMYVGKEHAGKVFYDLTGNRSDTVTINSDGWGEFKVNGGSVSVWVPRKTT

SEQ ID NO: 19237 - protein, 486 aa, Geobacillus stearothermophilus
AAPFNGTMMQYFEWYLPDDGTLWTKVANEANNLSSLGITALWLPPAYKGTSRSDVGYGVYDLYDLGEFNQKGTVRTKYGTKAQYLQAIQAAHAAGMQVYADVVFDHKGGADGTEWVDAVEVNPSDRNQEISGTYQIQAWTKFDFPGRGNTYSSFKWRWYHFDGVDWDESRKLSRIYKFRGIGKAWDWEVDTENGNYDYLMYADLDMDHPEVVTELKNWGKWYVNTTNIDGFRLDAVKHIKFQFFPDWLSYVRSQTGKPLFTVGEYWSYDINKLHNYITKTNGTMSLFDAPLHNKFYTASKSGGAFDMRTLMTNTLMKDEPTLAVTFVDNHDTEPGQALQSWVDPWFKPLAYAFILTRREGYPCVFYGDYYGIPQYNIPSLKSKIDPLLIARRDYAYGTQHDYLDHSDIIGWTREGVTEKPGSGLAALITDGPGGSKWMYVGKEHAGKVFYDLTGNRSDTVTINSDGWGEFKVNGGSVSVWVPRKTT

SEQ ID NO: 19238 - protein, 486 aa, Geobacillus stearothermophilus
AAPFNGTMMQYFEWYLPDDGTLWTKVANEANNLSSLGITALWLPPAYKGTSRSDVGYGVYDLYDLGEFNQKGTVRTKYGTKAQYLQAIQAAHAAGMEVYADVVFDHKGGADGTEWVDAVEVNPSDRNQEISGTYQIQAWTKFDFPGRGNTYSSFKWRWYHFDGVDWDESRKLSRIYKFRGIGKAWDWEVDTENGNYDYLMYADLDMDHPEVVTELKNWGKWYVNTTNIDGFRLDAVKHIKFQFFPDWLSYVRSQTGKPLFTVGEYWSYDINKLHNYITKTNGTMSLFDAPLHNKFYTASKSGGAFDMRTLMTNTLMKDEPTLAVTFVDNHDTEPGQALQSWVDPWFKPLAYAFILTRREGYPCVFYGDYYGIPQYNIPSLKSKIDPLLIARRDYAYGTQHDYLDHSDIIGWTREGVTEKPGSGLAALITDGPGGSKWMYVGKQHAGKVFYDLTGNRSDTVTINSDGWGEFKVNGGSVSVWVPRKTT

SEQ ID NO: 19239 - protein, 486 aa, Geobacillus stearothermophilus
AAPFNGTMMQYFEWYLPDDGTLWTKVANEANNLSSLGITALWLPPAYKGTSRSDVGYGVYDLYDLGEFNQKGTVRTKYGTKAQYLQAIQAAHAAGMRVYADVVFDHKGGADGTEWVDAVEVNPSDRNQEISGTYQIQAWTKFDFPGRGNTYSSFKWRWYHFDGVDWDESRKLSRIYKFRGIGKAWDWEVDTENGNYDYLMYADLDMDHPEVVTELKNWGKWYVNTTNIDGFRLDAVKHIKFQFFPDWLSYVRSQTGKPLFTVGEYWSYDINKLHNYITKTNGTMSLFDAPLHNKFYTASKSGGAFDMRTLMTNTLMKDRPTLAVTFVDNHDTEPGQALQSWVDPWFKPLAYAFILTRREGYPCVFYGDYYGIPQYNIPSLKSKIDPLLIARRDYAYGTQHDYLDHSDIIGWTREGVTEKPGSGLAALITDGPGGSKWMYVGKQHAGKVFYDLTGNRSDTVTINSDGWGEFKVNGGSVSVWVPRKTT

SEQ ID NO: 19240 - protein, 486 aa, Geobacillus stearothermophilus
AAPFNGTMMQYFEWYLPDDGTLWTKVANEANNLSSLGITALWLPPAYKGTSRSDVGYGVYDLYDLGEFNQKGTVRTKYGTKAQYLQAIQAAHAAGMQVYADVVFDHKGGADGTEWVDAVEVNPSDRNQEISGTYQIQAWTKFDFPGRGNTYSSFKWRWYHFDGVDWDESRKLSRIYKFRGIGKAWDWEVDTENGNYDYLMYADLDMDHPEVVTELKNWGKWYVNTTNIDGFRLDAVKHIKFSFFPDWLSYVRSQTGKPLFTVGEYWSYDINKLHNYITKTNGTMSLFDAPLHNKFYTASKSGGAFDMRTLMTNTLMKDRPTLAVTFVDNHDTEPGQALQSWVDPWFKPLAYAFILTREEGYPCVFYGDYYGIPQYNIPSLKSKIDPLLIARRDYAYGTQHDYLDHSDIIGWTREGVTEKPGSGLAALITDGPGGSKWMYVGKEHAGKVFYDLTGNRSDTVTINSDGWGEFKVNGGSVSVWVPRKTT

SEQ ID NO: 19241 - protein, 486 aa, Geobacillus stearothermophilus
AAPFNGTMMQYFEWYLPDDGTLWTKVANEANNLSSLGITALWLPPAYKGTSRSDVGYGVYDLYDLGEFNQKGTVRTKYGTKAQYLQAIQAAHAAGMEVYADVVFDHKGGADGTEWVDAVEVNPSDRNQEISGTYQIQAWTKFDFPGRGNTYSSFKWRWYHFDGVDWDESRKLSRIYKFRGIGKAWDWEVDTENGNYDYLMYADLDMDHPEVVTELKNWGKWYVNTTNIDGFRLDAVKHIKFQFFPDWLSYVRSQTGKPLFTVGEYWSYDINKLHNYITKTNGTMSLFDAPLHNKFYTASKSGGAFDMRTLMTNTLMKDEPTLAVTFVDNHDTEPGQALQSWVDPWFKPLAYAFILTREEGYPCVFYGDYYGIPQYNIPSLKSKIDPLLIARRDYAYGTQHDYLDHSDIIGWTREGVTEKPGSGLAALITDGPGGSKWMYVGKQHAGKVFYDLTGNRSDTVTINSDGWGEFKVNGGSVSVWVPRKTT

SEQ ID NO: 19242 - protein, 486 aa, Geobacillus stearothermophilus
AAPFNGTMMQYFEWYLPDDGTLWTKVANEANNLSSLGITALWLPPAYKGTSRSDVGYGVYDLYDLGEFNQKGTVRTKYGTKAQYLQAIQAAHAAGMEVYADVVFDHKGGADGTEWVDAVEVNPSDRNQEISGTYQIQAWTKFDFPGRGNTYSSFKWRWYHFDGVDWDESRKLSRIYKFRGIGKAWDWEVDTENGNYDYLMYADLDMDHPEVVTELKNWGKWYVNTTNIDGFRLDAVKHIKFQFFPDWLSYVRSQTGKPLFTVGEYWSYDINKLHNYITKTNGTMSLFDAPLHNKFYTASKSGGAFDMRTLMTNTLMKDQPTLAVTFVDNHDTEPGQALQSWVDPWFKPLAYAFILTREEGYPCVFYGDYYGIPQYNIPSLKSKIDPLLIARRDYAYGTQHDYLDHSDIIGWTREGVTEKPGSGLAALITDGPGGSKWMYVGKRHAGKVFYDLTGNRSDTVTINSDGWGEFKVNGGSVSVWVPRKTT

SEQ ID NO: 19243 - protein, 486 aa, Geobacillus stearothermophilus
AAPFNGTMMQYFEWYLPDDGTLWTKVANEANNLSSLGITALWLPPAYKGTSRSDVGYGVYDLYDLGEFNQKGTVRTKYGTKAQYLQAIQAAHAAGMEVYADVVFDHKGGADGTEWVDAVEVNPSDRNQEISGTYQIQAWTKFDFPGRGNTYSSFKWRWYHFDGVDWDESRKLSRIYKFRGIGKAWDWEVDTENGNYDYLMYADLDMDHPEVVTELKNWGKWYVNTTNIDGFRLDAVKHIKFQFFPDWLSYVRSQTGKPLFTVGEYWSYDINKLHNYITKTNGTMSLFDAPLHNKFYTASKSGGAFDMRTLMTNTLMKDQPTLAVTFVDNHDTEPGQALQSWVDPWFKPLAYAFILTRREGYPCVFYGDYYGIPQYNIPSLKSKIDPLLIARRDYAYGTQHDYLDHSDIIGWTREGVTEKPGSGLAALITDGPGGSKWMYVGKRHAGKVFYDLTGNRSDTVTINSDGWGEFKVNGGSVSVWVPRKTT

SEQ ID NO: 19244 - protein, 486 aa, Geobacillus stearothermophilus
AAPFNGTMMQYFEWYLPDDGTLWTKVANEANNLSSLGITALWLPPAYKGTSRSDVGYGVYDLYDLGEFNQKGTVRTKYGTKAQYLQAIQAAHAAGMEVYADVVFDHKGGADGTEWVDAVEVNPSDRNQEISGTYQIQAWTKFDFPGRGNTYSSFKWRWYHFDGVDWDESRKLSRIYKFRGIGKAWDWEVDTENGNYDYLMYADLDMDHPEVVTELKNWGKWYVNTTNIDGFRLDAVKHIKFQFFPDWLSYVRSQTGKPLFTVGEYWSYDINKLHNYITKTNGTMSLFDAPLHNKFYTASKSGGAFDMRTLMTNTLMKDEPTLAVTFVDNHDTEPGQALQSWVDPWFKPLAYAFILTRQEGYPCVFYGDYYGIPQYNIPSLKSKIDPLLIARRDYAYGTQHDYLDHSDIIGWTREGVTEKPGSGLAALITDGPGGSKWMYVGKRHAGKVFYDLTGNRSDTVTINSDGWGEFKVNGGSVSVWVPRKTT

SEQ ID NO: 19245 - protein, 486 aa, Geobacillus stearothermophilus
AAPFNGTMMQYFEWYLPDDGTLWTKVANEANNLSSLGITALWLPPAYKGTSRSDVGYGVYDLYDLGEFNQKGTVRTKYGTKAQYLQAIQAAHAAGMQVYADVVFDHKGGADGTEWVDAVEVNPSDRNQEISGTYQIQAWTKFDFPGRGNTYSSFKWRWYHFDGVDWDESRKLSRIYKFRGIGKAWDWEVDTENGNYDYLMYADLDMDHPEVVTELKNWGKWYVNTTNIDGFRLDAVKHIKFQFFPDWLSYVRSQTGKPLFTVGEYWSYDINKLHNYITKTNGTMSLFDAPLHNKFYTASKSGGAFDMRTLMTNTLMKDRPTLAVTFVDNHDTEPGQALQSWVDPWFKPLAYAFILTREEGYPCVFYGDYYGIPQYNIPSLKSKIDPLLIARRDYAYGTQHDYLDHSDIIGWTREGVTEKPGSGLAALITDGPGGSKWMYVGKEHAGKVFYDLTGNRSDTVTINSDGWGEFKVNGGSVSVWVPRKTT

SEQ ID NO: 19246 - protein, 486 aa, Geobacillus stearothermophilus
AAPFNGTMMQYFEWYLPDDGTLWTKVANEANNLSSLGITALWLPPAYKGTSRSDVGYGVYDLYDLGEFNQKGTVRTKYGTKAQYLQAIQAAHAAGMEVYADVVFDHKGGADGTEWVDAVEVNPSDRNQEISGTYQIQAWTKFDFPGRGNTYSSFKWRWYHFDGVDWDESRKLSRIYKFRGIGKAWDWEVDTENGNYDYLMYADLDMDHPEVVTELKNWGKWYVNTTNIDGFRLDAVKHIKFQFFPDWLSYVRSQTGKPLFTVGEYWSYDINKLHNYITKTNGTMSLFDAPLHNKFYTASKSGGAFDMRTLMTNTLMKDEPTLAVTFVDNHDTEPGQALQSWVDPWFKPLAYAFILTRQEGYPCVFYGDYYGIPQYNIPSLKSKIDPLLIARRDYAYGTQHDYLDHSDIIGWTREGVTEKPGSGLAALITDGPGGSKWMYVGKEHAGKVFYDLTGNRSDTVTINSDGWGEFKVNGGSVSVWVPRKTT

SEQ ID NO: 19247 - protein, 486 aa, Geobacillus stearothermophilus
AAPFNGTMMQYFEWYLPDDGTLWTKVANEANNLSSLGITALWLPPAYKGTSRSDVGYGVYDLYDLGEFNQKGTVRTKYGTKAQYLQAIQAAHAAGMRVYADVVFDHKGGADGTEWVDAVEVNPSDRNQEISGTYQIQAWTKFDFPGRGNTYSSFKWRWYHFDGVDWDESRKLSRIYKFRGIGKAWDWEVDTENGNYDYLMYADLDMDHPEVVTELKNWGKWYVNTTNIDGFRLDAVKHIKFQFFPDWLSYVRSQTGKPLFTVGEYWSYDINKLHNYITKTNGTMSLFDAPLHNKFYTASKSGGAFDMRTLMTNTLMKDEPTLAVTFVDNHDTEPGQALQSWVDPWFKPLAYAFILTRREGYPCVFYGDYYGIPQYNIPSLKSKIDPLLIARRDYAYGTQHDYLDHSDIIGWTREGVTEKPGSGLAALITDGPGGSKWMYVGKQHAGKVFYDLTGNRSDTVTINSDGWGEFKVNGGSVSVWVPRKTT

SEQ ID NO: 19248 - protein, 486 aa, Geobacillus stearothermophilus
AAPFNGTMMQYFEWYLPDDGTLWTKVANEANNLSSLGITALWLPPAYKGTSRSDVGYGVYDLYDLGEFNQKGTVRTKYGTKAQYLQAIQAAHAAGMEVYADVVFDHKGGADGTEWVDAVEVNPSDRNQEISGTYQIQAWTKFDFPGRGNTYSSFKWRWYHFDGVDWDESRKLSRIYKFRGIGKAWDWEVDTENGNYDYLMYADLDMDHPEVVTELKNWGKWYVNTTNIDGFRLDAVKHIKFQFFPDWLSYVRSQTGKPLFTVGEYWSYDINKLHNYITKTNGTMSLFDAPLHNKFYTASKSGGAFDMRTLMTNTLMKDRPTLAVTFVDNHDTEPGQALQSWVDPWFKPLAYAFILTRREGYPCVFYGDYYGIPQYNIPSLKSKIDPLLIARRDYAYGTQHDYLDHSDIIGWTREGVTEKPGSGLAALITDGPGGSKWMYVGKQHAGKVFYDLTGNRSDTVTINSDGWGEFKVNGGSVSVWVPRKTT

SEQ ID NO: 19249 - protein, 486 aa, Geobacillus stearothermophilus
AAPFNGTMMQYFEWYLPDDGTLWTKVANEANNLSSLGITALWLPPAYKGTSRSDVGYGVYDLYDLGEFNQKGTVRTKYGTKAQYLQAIQAAHAAGMRVYADVVFDHKGGADGTEWVDAVEVNPSDRNQEISGTYQIQAWTKFDFPGRGNTYSSFKWRWYHFDGVDWDESRKLSRIYKFRGIGKAWDWEVDTENGNYDYLMYADLDMDHPEVVTELKNWGKWYVNTTNIDGFRLDAVKHIKFQFFPDWLSYVRSQTGKPLFTVGEYWSYDINKLHNYITKTNGTMSLFDAPLHNKFYTASKSGGAFDMRTLMTNTLMKDQPTLAVTFVDNHDTEPGQALQSWVDPWFKPLAYAFILTRREGYPCVFYGDYYGIPQYNIPSLKSKIDPLLIARRDYAYGTQHDYLDHSDIIGWTREGVTEKPGSGLAALITDGPGGSKWMYVGKEHAGKVFYDLTGNRSDTVTINSDGWGEFKVNGGSVSVWVPRKTT

SEQ ID NO: 19250 - protein, 486 aa, Geobacillus stearothermophilus
AAPFNGTMMQYFEWYLPDDGTLWTKVANEANNLSSLGITALWLPPAYKGTSRSDVGYGVYDLYDLGEFNQKGTVRTKYGTKAQYLQAIQAAHAAGMEVYADVVFDHKGGADGTEWVDAVEVNPSDRNQEISGTYQIQAWTKFDFPGRGNTYSSFKWRWYHFDGVDWDESRKLSRIYKFRGIGKAWDWEVDTENGNYDYLMYADLDMDHPEVVTELKNWGKWYVNTTNIDGFRLDAVKHIKFSFFPDWLSYVRSQTGKPLFTVGEYWSYDINKLHNYITKTNGTMSLFDAPLHNKFYTASKSGGAFDMRTLMTNTLMKDRPTLAVTFVDNHDTEPGQALQSWVDPWFKPLAYAFILTRQEGYPCVFYGDYYGIPQYNIPSLKSKIDPLLIARRDYAYGTQHDYLDHSDIIGWTREGVTEKPGSGLAALITDGPGGSKWMYVGKRHAGKVFYDLTGNRSDTVTINSDGWGEFKVNGGSVSVWVPRKTT

SEQ ID NO: 19251 - protein, 486 aa, Geobacillus stearothermophilus
AAPFNGTMMQYFEWYLPDDGTLWTKVANEANNLSSLGITALWLPPAYKGTSRSDVGYGVYDLYDLGEFNQKGTVRTKYGTKAQYLQAIQAAHAAGMEVYADVVFDHKGGADGTEWVDAVEVNPSDRNQEISGTYQIQAWTKFDFPGRGNTYSSFKWRWYHFDGVDWDESRKLSRIYKFRGIGKAWDWEVDTENGNYDYLMYADLDMDHPEVVTELKNWGKWYVNTTNIDGFRLDAVKHIKFQFFPDWLSYVRSQTGKPLFTVGEYWSYDINKLHNYITKINGTMSLFDAPLHNKFYTASKSGGAFDMRTLMTNTLMKDEPTLAVTFVDNHDTEPGQALQSWVDPWFKPLAYAFILTRQEGYPCVFYGDYYGIPQYNIPSLKSKIDPLLIARRDYAYGTQHDYLDHSDIIGWTREGVTEKPGSGLAALITDGPGGSKWMYVGKQHAGKVFYDLTGNRSDTVTINSDGWGEFKVNGGSVSVWVPRKTT

SEQ ID NO: 19252 - protein, 486 aa, Geobacillus stearothermophilus
AAPFNGTMMQYFEWYLPDDGTLWTKVANEANNLSSLGITALWLPPAYKGTSRSDVGYGVYDLYDLGEFNQKGTVRTKYGTKAQYLQAIQAAHAAGMQVYADVVFDHKGGADGTEWVDAVEVNPSDRNQEISGTYQIQAWTKFDFPGRGNTYSSFKWRWYHFDGVDWDESRKLSRIYKFRGIGKAWDWEVDTENGNYDYLMYADLDMDHPEVVTELKNWGKWYVNTTNIDGFRLDAVKHIKFSFFPDWLSYVRSQTGKPLFTVGEYWSYDINKLHNYITKTNGTMSLFDAPLHNKFYTASKSGGAFDMRTLMTNTLMKDRPTLAVTFVDNHDTEPGQALQSWVDPWFKPLAYAFILTRREGYPCVFYGDYYGIPQYNIPSLKSKIDPLLIARRDYAYGTQHDYLDHSDIIGWTREGVTEKPGSGLAALITDGPGGSKWMYVGKEHAGKVFYDLTGNRSDTVTINSDGWGEFKVNGGSVSVWVPRKTT

SEQ ID NO: 19253 - protein, 486 aa, Geobacillus stearothermophilus
AAPFNGTMMQYFEWYLPDDGTLWTKVANEANNLSSLGITALWLPPAYKGTSRSDVGYGVYDLYDLGEFNQKGTVRTKYGTKAQYLQAIQAAHAAGMEVYADVVFDHKGGADGTEWVDAVEVNPSDRNQEISGTYQIQAWTKFDFPGRGNTYSSFKWRWYHFDGVDWDESRKLSRIYKFRGIGKAWDWEVDTENGNYDYLMYADLDMDHPEVVTELKNWGKWYVNTTNIDGFRLDAVKHIKFQFFPDWLSYVRSQTGKPLFTVGEYWSYDINKLHNYITKTNGTMSLFDAPLHNKFYTASKSGGAFDMRTLMTNTLMKDRPTLAVTFVDNHDTEPGQALQSWVDPWFKPLAYAFILTRQEGYPCVFYGDYYGIPQYNIPSLKSKIDPLLIARRDYAYGTQHDYLDHSDIIGWTREGVTEKPGSGLAALITDGPGGSKWMYVGKRHAGKVFYDLTGNRSDTVTINSDGWGEFKVNGGSVSVWVPRKTT

SEQ ID NO: 19254 - protein, 486 aa, Geobacillus stearothermophilus
AAPFNGTMMQYFEWYLPDDGTLWTKVANEANNLSSLGITALWLPPAYKGTSRSDVGYGVYDLYDLGEFNQKGTVRTKYGTKAQYLQAIQAAHAAGMEVYADVVFDHKGGADGTEWVDAVEVNPSDRNQEISGTYQIQAWTKFDFPGRGNTYSSFKWRWYHFDGVDWDESRKLSRIYKFRGIGKAWDWEVDTENGNYDYLMYADLDMDHPEVVTELKNWGKWYVNTTNIDGFRLDAVKHIKFQFFPDWLSYVRSQTGKPLFTVGEYWSYDINKLHNYITKINGTMSLFDAPLHNKFYTASKSGGAFDMRTLMTNTLMKDQPTLAVTFVDNHDTEPGQALQSWVDPWFKPLAYAFILTRREGYPCVFYGDYYGIPQYNIPSLKSKIDPLLIARRDYAYGTQHDYLDHSDIIGWTREGVTEKPGSGLAALITDGPGGSKWMYVGKQHAGKVFYDLTGNRSDTVTINSDGWGEFKVNGGSVSVWVPRKTT

SEQ ID NO: 19255 - protein, 486 aa, Geobacillus stearothermophilus
AAPFNGTMMQYFEWYLPDDGTLWTKVANEANNLSSLGITALWLPPAYKGTSRSDVGYGVYDLYDLGEFNQKGTVRTKYGTKAQYLQAIQAAHAAGMRVYADVVFDHKGGADGTEWVDAVEVNPSDRNQEISGTYQIQAWTKFDFPGRGNTYSSFKWRWYHFDGVDWDESRKLSRIYKFRGIGKAWDWEVDTENGNYDYLMYADLDMDHPEVVTELKNWGKWYVNTTNIDGFRLDAVKHIKFQFFPDWLSYVRSQTGKPLFTVGEYWSYDINKLHNYITKTNGTMSLFDAPLHNKFYTASKSGGAFDMRTLMTNTLMKDRPTLAVTFVDNHDTEPGQALQSWVDPWFKPLAYAFILTREEGYPCVFYGDYYGIPQYNIPSLKSKIDPLLIARRDYAYGTQHDYLDHSDIIGWTREGVTEKPGSGLAALITDGPGGSKWMYVGKQHAGKVFYDLTGNRSDTVTINSDGWGEFKVNGGSVSVWVPRKTT

SEQ ID NO: 19256 - protein, 486 aa, Geobacillus stearothermophilus
AAPFNGTMMQYFEWYLPDDGTLWTKVANEANNLSSLGITALWLPPAYKGTSRSDVGYGVYDLYDLGEFNQKGTVRTKYGTKAQYLQAIQAAHAAGMQVYADVVFDHKGGADGTEWVDAVEVNPSDRNQEISGTYQIQAWTKFDFPGRGNTYSSFKWRWYHFDGVDWDESRKLSRIYKFRGIGKAWDWEVDTENGNYDYLMYADLDMDHPEVVTELKNWGKWYVNTTNIDGFRLDAVKHIKFQFFPDWLSYVRSQTGKPLFTVGEYWSYDINKLHNYITKTNGTMSLFDAPLHNKFYTASKSGGAFDMRTLMTNTLMKDRPTLAVTFVDNHDTEPGQALQSWVDPWFKPLAYAFILTREEGYPCVFYGDYYGIPQYNIPSLKSKIDPLLIARRDYAYGTQHDYLDHSDIIGWTREGVTEKPGSGLAALITDGPGGSKWMYVGKRHAGKVFYDLTGNRSDTVTINSDGWGEFKVNGGSVSVWVPRKTT

SEQ ID NO: 19257 - protein, 486 aa, Geobacillus stearothermophilus
AAPFNGTMMQYFEWYLPDDGTLWTKVANEANNLSSLGITALWLPPAYKGTSRSDVGYGVYDLYDLGEFNQKGTVRTKYGTKAQYLQAIQAAHAAGMRVYADVVFDHKGGADGTEWVDAVEVNPSDRNQEISGTYQIQAWTKFDFPGRGNTYSSFKWRWYHFDGVDWDESRKLSRIYKFRGIGKAWDWEVDTENGNYDYLMYADLDMDHPEVVTELKNWGKWYVNTTNIDGFRLDAVKHIKFQFFPDWLSYVRSQTGKPLFTVGEYWSYDINKLHNYITKTNGTMSLFDAPLHNKFYTASKSGGAFDMRTLMTNTLMKDRPTLAVTFVDNHDTEPGQALQSWVDPWFKPLAYAFILTRQEGYPCVFYGDYYGIPQYNIPSLKSKIDPLLIARRDYAYGTQHDYLDHSDIIGWTREGVTEKPGSGLAALITDGPGGSKWMYVGKEHAGKVFYDLTGNRSDTVTINSDGWGEFKVNGGSVSVWVPRKTT

SEQ ID NO: 19258 - protein, 486 aa, Geobacillus stearothermophilus
AAPFNGTMMQYFEWYLPDDGTLWTKVANEANNLSSLGITALWLPPAYKGTSRSDVGYGVYDLYDLGEFNQKGTVRTKYGTKAQYLQAIQAAHAAGMRVYADVVFDHKGGADGTEWVDAVEVNPSDRNQEISGTYQIQAWTKFDFPGRGNTYSSFKWRWYHFDGVDWDESRKLSRIYKFRGIGKAWDWEVDTENGNYDYLMYADLDMDHPEVVTELKNWGKWYVNTTNIDGFRLDAVKHIKFQFFPDWLSYVRSQTGKPLFTVGEYWSYDINKLHNYITKTNGTMSLFDAPLHNKFYTASKSGGAFDMRTLMTNTLMKDQPTLAVTFVDNHDTEPGQALQSWVDPWFKPLAYAFILTREEGYPCVFYGDYYGIPQYNIPSLKSKIDPLLIARRDYAYGTQHDYLDHSDIIGWTREGVTEKPGSGLAALITDGPGGSKWMYVGKRHAGKVFYDLTGNRSDTVTINSDGWGEFKVNGGSVSVWVPRKTT

SEQ ID NO: 19259 - protein, 486 aa, Geobacillus stearothermophilus
AAPFNGTMMQYFEWYLPDDGTLWTKVANEANNLSSLGITALWLPPAYKGTSRSDVGYGVYDLYDLGEFNQKGTVRTKYGTKAQYLQAIQAAHAAGMEVYADVVFDHKGGADGTEWVDAVEVNPSDRNQEISGTYQIQAWTKFDFPGRGNTYSSFKWRWYHFDGVDWDESRKLSRIYKFRGIGKAWDWEVDTENGNYDYLMYADLDMDHPEVVTELKNWGKWYVNTTNIDGFRLDAVKHIKFQFFPDWLSYVRSQTGKPLFTVGEYWSYDINKLHNYITKTNGTMSLFDAPLHNKFYTASKSGGAFDMRTLMTNTLMKDQPTLAVTFVDNHDTEPGQALQSWVDPWFKPLAYAFILTREEGYPCVFYGDYYGIPQYNIPSLKSKIDPLLIARRDYAYGTQHDYLDHSDIIGWTREGVTEKPGSGLAALITDGPGGSKWMYVGKEHAGKVFYDLTGNRSDTVTINSDGWGEFKVNGGSVSVWVPRKTT

SEQ ID NO: 19260 - protein, 486 aa, Geobacillus stearothermophilus
AAPFNGTMMQYFEWYLPDDGTLWTKVANEANNLSSLGITALWLPPAYKGTSRSDVGYGVYDLYDLGEFNQKGTVRTKYGTKAQYLQAIQAAHAAGMEVYADVVFDHKGGADGTEWVDAVEVNPSDRNQEISGTYQIQAWTKFDFPGRGNTYSSFKWRWYHFDGVDWDESRKLSRIYKFRGIGKAWDWEVDTENGNYDYLMYADLDMDHPEVVTELKNWGKWYVNTTNIDGFRLDAVKHIKFSFFPDWLSYVRSQTGKPLFTVGEYWSYDINKLHNYITKTNGTMSLFDAPLHNKFYTASKSGGAFDMRTLMTNTLMKDRPTLAVTFVDNHDTEPGQALQSWVDPWFKPLAYAFILTREEGYPCVFYGDYYGIPQYNIPSLKSKIDPLLIARRDYAYGTQHDYLDHSDIIGWTREGVTEKPGSGLAALITDGPGGSKWMYVGKQHAGKVFYDLTGNRSDTVTINSDGWGEFKVNGGSVSVWVPRKTT

SEQ ID NO: 19261 - protein, 486 aa, Geobacillus stearothermophilus
AAPFNGTMMQYFEWYLPDDGTLWTKVANEANNLSSLGITALWLPPAYKGTSRSDVGYGVYDLYDLGEFNQKGTVRTKYGTKAQYLQAIQAAHAAGMQVYADVVFDHKGGADGTEWVDAVEVNPSDRNQEISGTYQIQAWTKFDFPGRGNTYSSFKWRWYHFDGVDWDESRKLSRIYKFRGIGKAWDWEVDTENGNYDYLMYADLDMDHPEVVTELKNWGKWYVNTTNIDGFRLDAVKHIKFQFFPDWLSYVRSQTGKPLFTVGEYWSYDINKLHNYITKTNGTMSLFDAPLHNKFYTASKSGGAFDMRTLMTNTLMKDRPTLAVTFVDNHDTEPGQALQSWVDPWFKPLAYAFILTRREGYPCVFYGDYYGIPQYNIPSLKSKIDPLLIARRDYAYGTQHDYLDHSDIIGWTREGVTEKPGSGLAALITDGPGGSKWMYVGKRHAGKVFYDLTGNRSDTVTINSDGWGEFKVNGGSVSVWVPRKTT

SEQ ID NO: 19262 - protein, 486 aa, Geobacillus stearothermophilus
AAPFNGTMMQYFEWYLPDDGTLWTKVANEANNLSSLGITALWLPPAYKGTSRSDVGYGVYDLYDLGEFNQKGTVRTKYGTKAQYLQAIQAAHAAGMQVYADVVFDHKGGADGTEWVDAVEVNPSDRNQEISGTYQIQAWTKFDFPGRGNTYSSFKWRWYHFDGVDWDESRKLSRIYKFRGIGKAWDWEVDTENGNYDYLMYADLDMDHPEVVTELKNWGKWYVNTTNIDGFRLDAVKHIKFQFFPDWLSYVRSQTGKPLFTVGEYWSYDINKLHNYITKTNGTMSLFDAPLHNKFYTASKSGGAFDMRTLMTNTLMKDEPTLAVTFVDNHDTEPGQALQSWVDPWFKPLAYAFILTREEGYPCVFYGDYYGIPQYNIPSLKSKIDPLLIARRDYAYGTQHDYLDHSDIIGWTREGVTEKPGSGLAALITDGPGGSKWMYVGKRHAGKVFYDLTGNRSDTVTINSDGWGEFKVNGGSVSVWVPRKTT

SEQ ID NO: 19263 - protein, 486 aa, Geobacillus stearothermophilus
AAPFNGTMMQYFEWYLPDDGTLWTKVANEANNLSSLGITALWLPPAYKGTSRSDVGYGVYDLYDLGEFNQKGTVRTKYGTKAQYLQAIQAAHAAGMEVYADVVFDHKGGADGTEWVDAVEVNPSDRNQEISGTYQIQAWTKFDFPGRGNTYSSFKWRWYHFDGVDWDESRKLSRIYKFRGIGKAWDWEVDTENGNYDYLMYADLDMDHPEVVTELKNWGKWYVNTTNIDGFRLDAVKHIKFSFFPDWLSYVRSQTGKPLFTVGEYWSYDINKLHNYITKTNGTMSLFDAPLHNKFYTASKSGGAFDMRTLMTNTLMKDRPTLAVTFVDNHDTEPGQALQSWVDPWFKPLAYAFILTRQEGYPCVFYGDYYGIPQYNIPSLKSKIDPLLIARRDYAYGTQHDYLDHSDIIGWTREGVTEKPGSGLAALITDGPGGSKWMYVGKEHAGKVFYDLTGNRSDTVTINSDGWGEFKVNGGSVSVWVPRKTT

SEQ ID NO: 19264 - protein, 486 aa, Geobacillus stearothermophilus
AAPFNGTMMQYFEWYLPDDGTLWTKVANEANNLSSLGITALWLPPAYKGTSRSDVGYGVYDLYDLGEFNQKGTVRTKYGTKAQYLQAIQAAHAAGMRVYADVVFDHKGGADGTEWVDAVEVNPSDRNQEISGTYQIQAWTKFDFPGRGNTYSSFKWRWYHFDGVDWDESRKLSRIYKFRGIGKAWDWEVDTENGNYDYLMYADLDMDHPEVVTELKNWGKWYVNTTNIDGFRLDAVKHIKFQFFPDWLSYVRSQTGKPLFTVGEYWSYDINKLHNYITKTNGTMSLFDAPLHNKFYTASKSGGAFDMRTLMTNTLMKDQPTLAVTFVDNHDTEPGQALQSWVDPWFKPLAYAFILTREEGYPCVFYGDYYGIPQYNIPSLKSKIDPLLIARRDYAYGTQHDYLDHSDIIGWTREGVTEKPGSGLAALITDGPGGSKWMYVGKEHAGKVFYDLTGNRSDTVTINSDGWGEFKVNGGSVSVWVPRKTT

SEQ ID NO: 19265 - protein, 486 aa, Geobacillus stearothermophilus
AAPFNGTMMQYFEWYLPDDGTLWTKVANEANNLSSLGITALWLPPAYKGTSRSDVGYGVYDLYDLGEFNQKGTVRTKYGTKAQYLQAIQAAHAAGMQVYADVVFDHKGGADGTEWVDAVEVNPSDRNQEISGTYQIQAWTKFDFPGRGNTYSSFKWRWYHFDGVDWDESRKLSRIYKFRGIGKAWDWEVDTENGNYDYLMYADLDMDHPEVVTELKNWGKWYVNTTNIDGFRLDAVKHIKFQFFPDWLSYVRSQTGKPLFTVGEYWSYDINKLHNYITKTNGTMSLFDAPLHNKFYTASKSGGAFDMRTLMTNTLMKDEPTLAVTFVDNHDTEPGQALQSWVDPWFKPLAYAFILTRREGYPCVFYGDYYGIPQYNIPSLKSKIDPLLIARRDYAYGTQHDYLDHSDIIGWTREGVTEKPGSGLAALITDGPGGSKWMYVGKRHAGKVFYDLTGNRSDTVTINSDGWGEFKVNGGSVSVWVPRKTT

SEQ ID NO: 19266 - protein, 486 aa, Geobacillus stearothermophilus
AAPFNGTMMQYFEWYLPDDGTLWTKVANEANNLSSLGITALWLPPAYKGTSRSDVGYGVYDLYDLGEFNQKGTVRTKYGTKAQYLQAIQAAHAAGMEVYADVVFDHKGGADGTEWVDAVEVNPSDRNQEISGTYQIQAWTKFDFPGRGNTYSSFKWRWYHFDGVDWDESRKLSRIYKFRGIGKAWDWEVDTENGNYDYLMYADLDMDHPEVVTELKNWGKWYVNTTNIDGFRLDAVKHIKFQFFPDWLSYVRSQTGKPLFTVGEYWSYDINKLHNYITKINGTMSLFDAPLHNKFYTASKSGGAFDMRTLMTNTLMKDQPTLAVTFVDNHDTEPGQALQSWVDPWFKPLAYAFILTRQEGYPCVFYGDYYGIPQYNIPSLKSKIDPLLIARRDYAYGTQHDYLDHSDIIGWTREGVTEKPGSGLAALITDGPGGSKWMYVGKEHAGKVFYDLTGNRSDTVTINSDGWGEFKVNGGSVSVWVPRKTT

SEQ ID NO: 19267 - protein, 486 aa, Geobacillus stearothermophilus
AAPFNGTMMQYFEWYLPDDGTLWTKVANEANNLSSLGITALWLPPAYKGTSRSDVGYGVYDLYDLGEFNQKGTVRTKYGTKAQYLQAIQAAHAAGMRVYADVVFDHKGGADGTEWVDAVEVNPSDRNQEISGTYQIQAWTKFDFPGRGNTYSSFKWRWYHFDGVDWDESRKLSRIYKFRGIGKAWDWEVDTENGNYDYLMYADLDMDHPEVVTELKNWGKWYVNTTNIDGFRLDAVKHIKFQFFPDWLSYVRSQTGKPLFTVGEYWSYDINKLHNYITKTNGTMSLFDAPLHNKFYTASKSGGAFDMRTLMTNTLMKDEPTLAVTFVDNHDTEPGQALQSWVDPWFKPLAYAFILTRQEGYPCVFYGDYYGIPQYNIPSLKSKIDPLLIARRDYAYGTQHDYLDHSDIIGWTREGVTEKPGSGLAALITDGPGGSKWMYVGKRHAGKVFYDLTGNRSDTVTINSDGWGEFKVNGGSVSVWVPRKTT

SEQ ID NO: 19268 - protein, 486 aa, Geobacillus stearothermophilus
AAPFNGTMMQYFEWYLPDDGTLWTKVANEANNLSSLGITALWLPPAYKGTSRSDVGYGVYDLYDLGEFNQKGTVRTKYGTKAQYLQAIQAAHAAGMRVYADVVFDHKGGADGTEWVDAVEVNPSDRNQEISGTYQIQAWTKFDFPGRGNTYSSFKWRWYHFDGVDWDESRKLSRIYKFRGIGKAWDWEVDTENGNYDYLMYADLDMDHPEVVTELKNWGKWYVNTTNIDGFRLDAVKHIKFQFFPDWLSYVRSQTGKPLFTVGEYWSYDINKLHNYITKTNGTMSLFDAPLHNKFYTASKSGGAFDMRTLMTNTLMKDRPTLAVTFVDNHDTEPGQALQSWVDPWFKPLAYAFILTRQEGYPCVFYGDYYGIPQYNIPSLKSKIDPLLIARRDYAYGTQHDYLDHSDIIGWTREGVTEKPGSGLAALITDGPGGSKWMYVGKRHAGKVFYDLTGNRSDTVTINSDGWGEFKVNGGSVSVWVPRKTT

SEQ ID NO: 19269 - protein, 486 aa, Geobacillus stearothermophilus
AAPFNGTMMQYFEWYLPDDGTLWTKVANEANNLSSLGITALWLPPAYKGTSRSDVGYGVYDLYDLGEFNQKGTVRTKYGTKAQYLQAIQAAHAAGMEVYADVVFDHKGGADGTEWVDAVEVNPSDRNQEISGTYQIQAWTKFDFPGRGNTYSSFKWRWYHFDGVDWDESRKLSRIYKFRGIGKAWDWEVDTENGNYDYLMYADLDMDHPEVVTELKNWGKWYVNTTNIDGFRLDAVKHIKFQFFPDWLSYVRSQTGKPLFTVGEYWSYDINKLHNYITKTNGTMSLFDAPLHNKFYTASKSGGAFDMRTLMTNTLMKDRPTLAVTFVDNHDTEPGQALQSWVDPWFKPLAYAFILTREEGYPCVFYGDYYGIPQYNIPSLKSKIDPLLIARRDYAYGTQHDYLDHSDIIGWTREGVTEKPGSGLAALITDGPGGSKWMYVGKQHAGKVFYDLTGNRSDTVTINSDGWGEFKVNGGSVSVWVPRKTT

SEQ ID NO: 19270 - protein, 486 aa, Geobacillus stearothermophilus
AAPFNGTMMQYFEWYLPDDGTLWTKVANEANNLSSLGITALWLPPAYKGTSRSDVGYGVYDLYDLGEFNQKGTVRTKYGTKAQYLQAIQAAHAAGMEVYADVVFDHKGGADGTEWVDAVEVNPSDRNQEISGTYQIQAWTKFDFPGRGNTYSSFKWRWYHFDGVDWDESRKLSRIYKFRGIGKAWDWEVDTENGNYDYLMYADLDMDHPEVVTELKNWGKWYVNTTNIDGFRLDAVKHIKFQFFPDWLSYVRSQTGKPLFTVGEYWSYDINKLHNYITKTNGTMSLFDAPLHNKFYTASKSGGAFDMRTLMTNTLMKDQPTLAVTFVDNHDTEPGQALQSWVDPWFKPLAYAFILTRREGYPCVFYGDYYGIPQYNIPSLKSKIDPLLIARRDYAYGTQHDYLDHSDIIGWTREGVTEKPGSGLAALITDGPGGSKWMYVGKEHAGKVFYDLTGNRSDTVTINSDGWGEFKVNGGSVSVWVPRKTT

SEQ ID NO: 19271 - protein, 486 aa, Geobacillus stearothermophilus
AAPFNGTMMQYFEWYLPDDGTLWTKVANEANNLSSLGITALWLPPAYKGTSRSDVGYGVYDLYDLGEFNQKGTVRTKYGTKAQYLQAIQAAHAAGMQVYADVVFDHKGGADGTEWVDAVEVNPSDRNQEISGTYQIQAWTKFDFPGRGNTYSSFKWRWYHFDGVDWDESRKLSRIYKFRGIGKAWDWEVDTENGNYDYLMYADLDMDHPEVVTELKNWGKWYVNTTNIDGFRLDAVKHIKFQFFPDWLSYVRSQTGKPLFTVGEYWSYDINKLHNYITKTNGTMSLFDAPLHNKFYTASKSGGAFDMRTLMTNTLMKDEPTLAVTFVDNHDTEPGQALQSWVDPWFKPLAYAFILTREEGYPCVFYGDYYGIPQYNIPSLKSKIDPLLIARRDYAYGTQHDYLDHSDIIGWTREGVTEKPGSGLAALITDGPGGSKWMYVGKEHAGKVFYDLTGNRSDTVTINSDGWGEFKVNGGSVSVWVPRKTT

SEQ ID NO: 19272 - protein, 486 aa, Geobacillus stearothermophilus
AAPFNGTMMQYFEWYLPDDGTLWTKVANEANNLSSLGITALWLPPAYKGTSRSDVGYGVYDLYDLGEFNQKGTVRTKYGTKAQYLQAIQAAHAAGMRVYADVVFDHKGGADGTEWVDAVEVNPSDRNQEISGTYQIQAWTKFDFPGRGNTYSSFKWRWYHFDGVDWDESRKLSRIYKFRGIGKAWDWEVDTENGNYDYLMYADLDMDHPEVVTELKNWGKWYVNTTNIDGFRLDAVKHIKFQFFPDWLSYVRSQTGKPLFTVGEYWSYDINKLHNYITKTNGTMSLFDAPLHNKFYTASKSGGAFDMRTLMTNTLMKDQPTLAVTFVDNHDTEPGQALQSWVDPWFKPLAYAFILTRREGYPCVFYGDYYGIPQYNIPSLKSKIDPLLIARRDYAYGTQHDYLDHSDIIGWTREGVTEKPGSGLAALITDGPGGSKWMYVGKRHAGKVFYDLTGNRSDTVTINSDGWGEFKVNGGSVSVWVPRKTT

SEQ ID NO: 19273 - protein, 486 aa, Geobacillus stearothermophilus
AAPFNGTMMQYFEWYLPDDGTLWTKVANEANNLSSLGITALWLPPAYKGTSRSDVGYGVYDLYDLGEFNQKGTVRTKYGTKAQYLQAIQAAHAAGMRVYADVVFDHKGGADGTEWVDAVEVNPSDRNQEISGTYQIQAWTKFDFPGRGNTYSSFKWRWYHFDGVDWDESRKLSRIYKFRGIGKAWDWEVDTENGNYDYLMYADLDMDHPEVVTELKNWGKWYVNTTNIDGFRLDAVKHIKFQFFPDWLSYVRSQTGKPLFTVGEYWSYDINKLHNYITKTNGTMSLFDAPLHNKFYTASKSGGAFDMRTLMTNTLMKDEPTLAVTFVDNHDTEPGQALQSWVDPWFKPLAYAFILTRQEGYPCVFYGDYYGIPQYNIPSLKSKIDPLLIARRDYAYGTQHDYLDHSDIIGWTREGVTEKPGSGLAALITDGPGGSKWMYVGKEHAGKVFYDLTGNRSDTVTINSDGWGEFKVNGGSVSVWVPRKTT

SEQ ID NO: 19274 - protein, 486 aa, Geobacillus stearothermophilus
AAPFNGTMMQYFEWYLPDDGTLWTKVANEANNLSSLGITALWLPPAYKGTSRSDVGYGVYDLYDLGEFNQKGTVRTKYGTKAQYLQAIQAAHAAGMQVYADVVFDHKGGADGTEWVDAVEVNPSDRNQEISGTYQIQAWTKFDFPGRGNTYSSFKWRWYHFDGVDWDESRKLSRIYKFRGIGKAWDWEVDTENGNYDYLMYADLDMDHPEVVTELKNWGKWYVNTTNIDGFRLDAVKHIKFQFFPDWLSYVRSQTGKPLFTVGEYWSYDINKLHNYITKTNGTMSLFDAPLHNKFYTASKSGGAFDMRTLMTNTLMKDRPTLAVTFVDNHDTEPGQALQSWVDPWFKPLAYAFILTRREGYPCVFYGDYYGIPQYNIPSLKSKIDPLLIARRDYAYGTQHDYLDHSDIIGWTREGVTEKPGSGLAALITDGPGGSKWMYVGKEHAGKVFYDLTGNRSDTVTINSDGWGEFKVNGGSVSVWVPRKTT

SEQ ID NO: 19275 - protein, 486 aa, Geobacillus stearothermophilus
AAPFNGTMMQYFEWYLPDDGTLWTKVANEANNLSSLGITALWLPPAYKGTSRSDVGYGVYDLYDLGEFNQKGTVRTKYGTKAQYLQAIQAAHAAGMRVYADVVFDHKGGADGTEWVDAVEVNPSDRNQEISGTYQIQAWTKFDFPGRGNTYSSFKWRWYHFDGVDWDESRKLSRIYKFRGIGKAWDWEVDTENGNYDYLMYADLDMDHPEVVTELKNWGKWYVNTTNIDGFRLDAVKHIKFQFFPDWLSYVRSQTGKPLFTVGEYWSYDINKLHNYITKTNGTMSLFDAPLHNKFYTASKSGGAFDMRTLMTNTLMKDEPTLAVTFVDNHDTEPGQALQSWVDPWFKPLAYAFILTREEGYPCVFYGDYYGIPQYNIPSLKSKIDPLLIARRDYAYGTQHDYLDHSDIIGWTREGVTEKPGSGLAALITDGPGGSKWMYVGKQHAGKVFYDLTGNRSDTVTINSDGWGEFKVNGGSVSVWVPRKTT

SEQ ID NO: 19276 - protein, 484 aa, Aspergillus niger
AATALAATPADWRSQSIYFLLTDRFARTDGSTTATCNTADQIYCGGTWQGIIDHLDYIQGMGFTAIWITPVTAQLPQTTAYGDAYHGYWQQDIYSLNENYGTADDLRALSSALHERGMYLMVDVVANHMGYDGAGSSVDYSVFNPFSSQDYFHPFCFIQNYEDQTQVEDCWLGDNTVSLPDLDTTSDVVRNEWYDWVGSLVSNYSIDGLRIDTVRHVQPDFWPGYNSAAGVYCIGEVLDGDPAYTCPYQNVMDGVLNYPIYYPLLNAFQSTSGSMDDLYNMINTVASDCPDSTLLGTFVENHDNPRFASYTNDIALAQNVAAFIILNDGIPIIYAGQEQHYAGGNDPANREATWLSGYPTDSELYQLIASANAIRNYAISQDTGFVTYQNWPIYQDDTTIAMRRGTDGSQIVTILSNLGASGDSYTLSLSGAGYTAGQQLTEVIGCTTVTVGSDGNVPVPMAGGLPRVLYPTERLAGSGICSSS

SEQ ID NO: 19277 - protein, 483 aa, Synthetic construct
VNGTLMQYFEWYTPNDGQHWKRLQNDAEHLSDIGITAVWIPPAYKGLSQSDNGYGPYDLYDLGEFQQKGTVRTKYGTKSELQDAIGSLHSRNVQVYGDVVLNHKAGADGTELVDAVEVNPSDRNQEISGTYQIQAWTKFDFPGRGNTYSSFKWRWYHFDGTDWDESRKLNRIYKFRGTGKAWDWEVDTENGNYDYLMYADLDYDHPDVVAETKKWGIWYANELSLDGFRIDAAKHIKFSFLRDWVQAVRQATGKEMFTVAEYWQNNAGKLENYLNKTSFNQSVFDVPLHFNLQAASSQGGGYDMRRLLDGTVVSRHPEKAVTFVENHDTQPGQSLESTVQTWFKPLAYAFILTRESGYPQVFYGDMYGTKGTSPKEIPSLKDNIEPILKARKEYAYGPQHDYIDHPDVIGWTREGDSSAAKSGLAALITDGPGGSKRMYAGLKNAGETWYDITGNRSDTVKIGSDGWGEFHVNDGSVSIYVQK

SEQ ID NO: 19278 - protein, 483 aa, Synthetic construct
VNGTLMQYFEWYTPNDGQHWKRLQNDAEHLSDIGITAVWIPPAYKGLSQSDNGYGPYDLYDLGEFQQKGTVRTKYGTKSELQDAIGSLHSRNVQVYGDVVLNHKAGADGTEFVDAVEVNPSNRNQETSGTYQIQAWTKFDFPGRGNTYSSFKWRWYHFDGTDWDESRKLNRVYKFRGTGKAWDWEVDTENGNYDYLMFADLDYDHPDVVAETKKWGIWYANELSLDGFRIDAAKHIKFSFLRDWVQAVRQATGKEMFTVAEYWQNNAGKLENYLNKTSFNQSVFDVPLHFNLQAASSQGGGYDMRRLLDGTVVSRHPEKAVTFVENHDTQPGQSLESTVQTWFKPLAYAFILTRESGYPQVFYGDMYGTKGTSPKEIPSLKDNIEPILKARKEYAYGPQHDYIDHPDVIGWTREGDSSAAKSGLAALITDGPGGSKRMYAGLKNAGETWYDITGNRSDTVKIGSDGWGEFHVNDGSVSIYVQK

SEQ ID NO: 19279 - protein, 482 aa, Bacillus sp.
HHNGTNGTMMQYFEWHLPNDGNHWNRLRDDASNLRNRGITAIWIPPAWKGTSQNDVGYGAYDLYDLGEFNQKGTVRTKYGTRSQLESAIHALKNNGVQVYGDVVMNHKAGADGTEFVDAVEVDPSNRNQETSGTYQIQAWTKFDFPGRGNTYSSFKWRHYHFDGTDWDESRKLNRIYAFTGKAWDWEVDTENGNYDYLMFADLDMDHPEVVNELRRWGEWYTNTLNLDGFRIDAVKHIKYSFTRDWLTHVRNATGKEMFAVAEFWKNDLGALENYLNKTNWNHSVFDVPLHYNLYNASNSGGNYDMAKLLNGTVVQKHPMHAVTFVDNHDSQPGESLESFVQEWFKPLAYALILTREQGYPSVFYGDYYGIPTHSVPAMKAKIDPILEARQNFAYGTQHDYFDHHNIIGWTREGNTTHPNSGLATIMSDGPGGEKWMYVGQNKAGQVWHDITGNKPGTVTINADGWANFSVNGGSVSIWVKR

SEQ ID NO: 19280 - protein, 482 aa, Bacillus sp.
HHNGTNGTMMQYFEWHLPNDGNHWNRLRDDASNLRNRGITAIWIPPAWKGTSQNDVGYGAYDLYDLGEFNQKGTVRTKYGTRSQLESAIHALKNNGVQVYGDVVMNHKAKLDGTEFVDAVEVDPSNRNQETSGTYQIQAWTKFDFPGRGNTYSSFKWRWYHFDGTDWDESRKLNRIYKFTGKAWDWEVDTENGNYDYLMFADLDMDHPEVVNELRRWGEWYTNTLNLDGFRIDAVKHIKYSFTRDWLTHVRNATGKEMFAVAEFWKNDLGALENYLNKTNWNHSVFDVPLHYNLYNASNSGGNYDMAKLLNGTVVQKHPMHAVTFVDNHDSQPGESLESFVQEWFKPLAYALILTREQGYPSVFYGDYYGIPTHSVPAMKAKIDPILEARQNFAYGTQHDYFDHHNIIGWTREGNTTHPNSGLATIMSDGPGGEKWMYVGQNKAGQVWHDITGNKPGTVTINADGWANFSVNGGSVSIWVKR

SEQ ID NO: 19281 - protein, 482 aa, Bacillus sp.
HHNGTNGTMMQYFEWHLPNDGNHWNRLRDDASNLRNRGITAIWIPPAWKGTSQNDVGYGAYDLYDLGEFNQKGTVRTKYGTRSQLESAIHALKNNGVQVYGDVVMNHKAGADGTEFVDAVEVDPSNRNQETSGTYQIQAWTKFDFPGRGNTYSSFKWRLYHFDGTDWDESRKLNRIYKFTGKAWDWEVDTENGNYDYLMFFDLDMDHPEVVNELRRWGEWYTNTLNLDGFRIDAVKHIKYSFTRDWLTHVRNATGKEMFAVAEFWKNDLGALENYLNKTNWNHSVFDVPLHYNLYNASNSGGNYDMAKLLNGTVVQKHPMHAVTFVDNHDSQPGESLESFVQEWFKPLAYALILTREQGYPSVFYGDYYGIPTHSVPAMKAKIDPILEARQNFAYGTQHDYFDHHNIIGWTREGNTTHPNSGLATIMSDGPGGEKWMYVGQNKAGQVWHDITGNKPGTVTINADGWANFSVNGGSVSIWVKR

SEQ ID NO: 19282 - protein, 482 aa, Bacillus sp.
HHNGTNGTMMQYFEWHLPNDGNHWNRLRDDASNLRNRGITAIWIPPAWKGTSQNDVGYGAYDLYDLGEFNQKGTVRTKYGTRSQLESAIHALKNNGVQVYGDVVMNHKAGADGTEFVDAVEVDPSNRNQETSGTYQIQAWTKFDFPGRGNTYSSFKWRWYHFDGTDDDESRKLNRIYKFTGKAWDCEVDTENGNYDYLMFADLDMDHPEVVNELRRWGEWYTNTLNLDGFRIDAVKHIKYSFTRDWLTHVRNATGKEMFAVAEFWKNDLGALENYLNKTNWNHSVFDVPLHYNLYNASNSGGNYDMAKLLNGTVVQKHPMHAVTFVDNHDSQPGESLESFVQEWFKPLAYALILTREQGYPSVFYGDYYGIPTHSVPAMKAKIDPILEARQNFAYGTQHDYFDHHNIIGWTREGNTTHPNSGLATIMSDGPGGEKWMYVGQNKAGQVWHDITGNKPGTVTINADGWANFSVNGGSVSIWVKR

SEQ ID NO: 19283 - protein, 482 aa, Bacillus sp.
HHNGTNGTMMQYFEWHLPNDGNHWNRLRDDASNLRNRGITAIWIPPAWKGTSQNDVGYGAYDLYDLGEFNQKGTVRTKYGTRSQLESAIHALKNNGVQVYGDVVMNHKAGADGTEFVDAVEVDPSNRNQETSGTYQIQAWTKFDFPGRGNTYSSFKWRWYHFDGTDWDESRKLNRIYKFTGKAWDWEVDTINGNYDYLMFADLDMDHPEVVNELRRWGEWYTNTLNLDGFRIDAVKHIKYSFTRDWLTHVRNATGKEMFAVAEFWKNDLGALENYLNKTNWNHSVFDVPLHYNLYNASNSGGNYDMAKLLNGTVVQKHPMNAVTFVDNHDSQPGESLESFVQEWFKPLAYALILTREQGYPSVFYGDYYGIPTHSVPAMKAKIDPILEARQNFAYGTQHDYFDHHNIIGWTREGNTTHPNSGLATIMSDGPGGEKWMYVGQNKAGQVWHDITGNKPGTVTINADGWANFSVNGGSVSIWVKR

SEQ ID NO: 19284 - protein, 481 aa, Bacillus sp.
HNGTNATMMQYFEWHLPNDGNHWNRLRDDASNLRNRGITAIWIPPAWKGTSQNDVGYGAYDLYDLGEFNQKGTVRTKYGTRSQLESAIHALKNNGVQVYGDVVMNHKAGADGTEFVDAVEVDPSNRNQETSGTYQIQAWTKFDFPGRGNTYSSFKWRWYHFDGTDWDESRKLNRIYKFTGKAWDWEVDTENGNYDYLMFADLDMDHPEVVNELRRWGEWYTNTLNLDGFRIDAVKHIKFSFTRDWLTHVRNATGKEMFAVAEFWKNDLGALENYLNKTNWNHSVFDVPLHYNLYNASNSGGNYDMAKLLNGTVVQKHPMHAVTFVDNHDSQPGESLESFVQEWFKPLAYALILTREQGYPSVFYGDYYGIPTHSVPAMKAKIDPILEARQNFAYGTQHDYFDHHNIIGWTREGNTTHPNSGLATIMSDGPGGEKWMYVGQNKAGQVWHDITGNKPGTVTINADGWANFSVNGGSVSIWVKR

SEQ ID NO: 19285 - protein, 481 aa, Bacillus acidicola
PFNGTMMQYFEWYLPDDGTLWTKVANEANNLSSLGITALWLPPAYKGTSRSDVGYGVYDLYDLGEFNQKGTVRTKYGTKAQYLQTIQAAHAAGMQVYADVVFDHKGGADGTEWVDAVEVNPSDRNQEISGTYQIQAWTKFDFPGRGNTYSSFKWRWYHFDGVDWDESRKLSRIYKFRGIGKAWDWEVDTENGNYDYLMYADLDMDHPEVVTELKNWGKWYVNTTNIDGFRLDAVKHIKFSAFPDWLSYVRSQTGKPLFTVGEYWSYDINKLHNYITKTNGTMSLFDAPLHSKFYTASKSGGAFDMRTLMTNTLMKDQPTLAVTFVDNHDTEPVQALQSWVDPWFKPLAYAFILTRQEGYPCVFYGDYYGIPQYNIPSLKSKIDPLLIARRDYAYGTQHDYLDHSDIIGWTREGVTEKPGSGLAALITDGPGGSKWMYVGKQHAGKVFYDLTGNRSDTVTINSDGWGEFKVNGGSVSVWVPR

SEQ ID NO: 19286 - protein, 481 aa, Bacillus acidicola
PFNGTMMQYFEWYLPDDGTLWTKVANEANNLSSLGITALWLPPAYKGTSRSDVGYGVYDLYDLGEFNQKGTVRTKYGTKAQYLQTIQAAHAAGMQVYADVVFDHKGGADGTEWVDAVEVNPSDRNQEISGTYQIQAWTKFDFPGRGNTYSSFKWRWYHFDGVDWDESRKLSRIYKFRGIGKAWDWEVDTEVGNYDYLMYADLDMDHPEVVTELKNWGKWYVNTTNIDGFRLDAVKHIKFSSFPDWLSYVRSQTGKPLFTVGEYWSYDINKLHNYITKTNGTMSLFDAPLHSKFYTASKSGGAFDMRTLMTNTLMKDQPTLAVTFVDNHDTEPVQALQSWVDPWFKPLAYAFILTRQEGYPCVFYGDYYGIPQYNIPSLKSKIDPLLIARRDYAYGTQHDYLDHSDIIGWTREGVTEKPGSGLAALITDGPGGSKWMYVGKQHAGKVFYDLTGNRSDTVTINSDGWGEFKVNGGSVSVWVPR

SEQ ID NO: 19287 - protein, 481 aa, Bacillus acidicola
PFNGTMMQYFEWYLPDDGTLWTKVANEANNLSSLGITALWLPPAYKGTSRSDVGYGVYDLYDLGEFNQKGTVRTKYGTKAQYLQTIQAAHAAGMQVYADVVFDHKGGADGTEWVDAVEVNPSDRNQEISGTYQIQAWTKFDFPGRGNTYSSFKWRWYHFDGVDWDESRKLSRIYKFRGIGKAWDWEVDTENGNYDYLMYADLDMDHPEVVTELKNWGKWYVNTTNIDGFRLDAVKHIKFSSFPDWLSYVRSQTGKPLFTVGEYWSYDINKLHNYITKTNGTMSLFDAPLHSKFYTASKSGGAFDMRTLMTNTLMKDQPTLAVTFVDNHDTEPVQALQSWVDPWFKPLAYAFILTRQEGYPCVFYGDYYGIPQYNIPSLKSKIDPLLIARRDYAYGTQHDYLDHSDIIGWTREGVTEKPGSGLAALITDGPGGSKWMYVGKQHAGKVFYDLTGNRSDTVTINSDGWGEFKVNGGSVSVWVPR

SEQ ID NO: 19288 - protein, 481 aa, Bacillus acidicola
PFNGTMMQYFEWYLPDDGTLWTKVANEANNLSSLGILALWLPPAYKGTSRSDVGYGVYDLYDLGEFNQKGTVRTKYGTKAQYLQGIQAAHAAGMQVYADVVFDHKGGADGTEWVDAVEVNPSDRNQEISGTYQIQAWTKFDFPGRGNTYSSFKWRWYHFDGVDWDESRKLSRIYKFRGIGKAWDWEVDTEPGNYDYLMYADLDMDHPEVVTELKNWGKWYVNTTNIDGFRLDAVKHIKFSAFPDWLSYVRSQTGKPLFTVGEYWSYDINKLHNYITKTDGTMSLFDAPLHNKFYTASKSGGAFDMRTLMTNTLMKDQPHLAVTFVDNHDTEPGQALQSWVDPWFKPLAYAFILTRQEGYPCVFYGDYYGIPQYNIPSLKSKIDPLLIARRDYAYGTQHDYLDHSDIIGWTREGVTEKPGSGLAALITDGPGGSKWMYVGKQHAGKVFYDLTGNRSDTVTINSDGWGEFKVNGGSVSVWVPR

SEQ ID NO: 19289 - protein, 481 aa, Bacillus acidicola
PFNGTMMQYFEWYLPDDGTLWTKVANEANNLSSLGITALWLPPAYKGTSRSDVGYGVYDLYDLGEFNQKGTVRTKYGTKAQYLQTIQAAHAAGMQVYADVVFDHKGGADGTEWVDAVEVNPSDRNQEISGTYQIQAWTKFDFPGRGNTYSSFKWRWYHFDGVDWDESRKLSRIYKFRGIGKAWDWEVDTENGNYDYLMYADLDMDHPEVVTELKNWGKWYVNTTNIDGFRLDAVKHIKFSSFPDWLSYVRSQTGKPLFTVGEYWSYDINKLHNYITKTNGTMSLFDAPLHNKFYTASKSGGAFDMRTLMTNTLMKDQPTLAVTFVDNHDTEPVQALQSWVDPWFKPLAYAFILTRQEGYPCVFYGDYYGIPQYNIPSLKSKIDPLLIARRDYAYGTQHDYLDHSDIIGWTREGVTEKPGSGLAALITDGPGGSKWMYVGKQHAGKVFYDLTGNRSDTVTINSDGWGEFKVNGGSVSVWVPR

SEQ ID NO: 19290 - protein, 481 aa, Bacillus acidicola
PFNGTMMQYFEWYLPDDGTLWTKVANEANNLSSLGITALWLPPAYKGTSRSDVGYGVYDLYDLGEFNQKGTVRTKYGTKAQYLQTIQAAHAAGMQVYADVVFDHKGGADGTEWVDAVEVNPSDRNQEISGTYQIQAWTKFDFPGRGNTYSSFKWRWYHFDGVDWDESRKLSRIYKFRGIGKAWDWEVDTENGNYDYLMYADLDMDHPEVVTELKNWGKWYVNTTNIDGFRLDAVKHIKFSNFPDWLSYVRSQTGKPLFTVGEYWSYDINKLHNYITKTNGTMSLFDAPLHSKFYTASKSGGAFDMRTLMTNTLMKDQPTLAVTFVDNHDTEPVQALQSWVDPWFKPLAYAFILTRQEGYPCVFYGDYYGIPQYNIPSLKSKIDPLLIARRDYAYGTQHDYLDHSDIIGWTREGVTEKPGSGLAALITDGPGGSKWMYVGKQHAGKVFYDLTGNRSDTVTINSDGWGEFKVNGGSVSVWVPR

SEQ ID NO: 19291 - protein, 481 aa, Bacillus acidicola
PFNGTMMQYFEWYLPDDGTLWTKVANEANNLSSLGITALWLPPAYKGTSRSDVGYGVYDLYDLGEFNQKGTVRTKYGTKAQYLQTIQAAHAAGMQVYADVVFDHKGGADGTEWVDAVEVNPSDRNQEISGTYQIQAWTKFDFPGRGNTYSSFKWRWYHFDGVDWDESRKLSRIYKFRGIGKAWDWEVDTENGNYDYLMYADLDMDHPEVVTELKNWGKWYVNTTNIDGFRLDAVKHIKFSSFPDWLSYVRSQTGKPLFTVGEYWSYDINKLHNYITKTNGTMSLFDAPLHSKFYTASKSGGAFDMRTLMTNTLMKDQPTLAVTFVDNHDTEPDQALQSWVDPWFKPLAYAFILTRQEGYPCVFYGDYYGIPQYNIPSLKSKIDPLLIARRDYAYGTQHDYLDHSDIIGWTREGVTEKPGSGLAALITDGPGGSKWMYVGKQHAGKVFYDLTGNRSDTVTINSDGWGEFKVNGGSVSVWVPR

SEQ ID NO: 19292 - protein, 481 aa, Bacillus acidicola
PFNGTMMQYFEWYLPDDGTLWTKVANEANNLSSLGITALWLPPAYKGTSRSDVGYGVYDLYDLGEFNQKGTVRTKYGTKAQYLQTIQAAHAAGMQVYADVVFDHKGGADGTEWVDAVEVNPSDRNQEISGTYQIQAWTKFDFPGRGNTYSSFKWRWYHFDGVDWDESRKLSRIYKFRGIGKAWDWEVDTENGNYDYLMYADLDMDHPEVVTELKNWGKWYVNTTNIDGFRLDAVKHIKFSSFPDWLSYVRSQTGKPLFTVGEYWSYDINKLHNYITKTNGTMSLFDAPLHKKFYTASKSGGAFDMRTLMTNTLMKDQPTLAVTFVDNHDTEPVQALQSWVDPWFKPLAYAFILTRQEGYPCVFYGDYYGIPQYNIPSLKSKIDPLLIARRDYAYGTQHDYLDHSDIIGWTREGVTEKPGSGLAALITDGPGGSKWMYVGKQHAGKVFYDLTGNRSDTVTINSDGWGEFKVNGGSVSVWVPR

SEQ ID NO: 19293 - protein, 481 aa, Bacillus acidicola
PFNGTMMQYFEWYLPDDGTLWTKVANEANNLSSLGITALWLPPAYKGTSRSDVGYGVYDLYDLGEFNQKGTVRTKYGTKAQYLQRIQAAHAAGMQVYADVVFDHKGGADGTEWVDAVEVNPSDRNQEISGTYQIQAWTKFDFPGRGNTYSSFKWRWYHFDGVDWDESRKLSRIYKFRGIGKAWDWEVDTENGNYDYLMYADLDMDHPEVVTELKNWGKWYVNTTNIDGFRLDAVKHIKFSSFPDWLSYVRSQTGKPLFTVGEYWSYDINKLHNYITKTNGTMSLFDAPLHSKFYTASKSGGAFDMRTLMTNTLMKDQPTLAVTFVDNHDTEPVQALQSWVDPWFKPLAYAFILTRQEGYPCVFYGDYYGIPQYNIPSLKSKIDPLLIARRDYAYGTQHDYLDHSDIIGWTREGVTEKPGSGLAALITDGPGGSKWMYVGKQHAGKVFYDLTGNRSDTVTINSDGWGEFKVNGGSVSVWVPR

SEQ ID NO: 19294 - protein, 481 aa, Bacillus acidicola
PFNGTMMQYFEWYLPDDGTLWTKVANEANNLSSLGITALWLPPAYKGTSRSDVGYGVYDLYDLGEFNQKGTVRTKYGTKAQYLQTIQAAHAAGMQVYADVVFDHKGGADGTEWVDAVEVNPSDRNQEISGTYQIQAWTKFDFPGRGNTYSSFKWRWYHFDGVDWDESRKLSRIYKFRGIGKAWDWEVDTENGNYDYLMYADLDMDHPEVVTELKNWGKWYVNTTNIDGFRLDAVKHIKFSSFPDWLSYVRSQTGKPLFTVGEYWSYDINKLHNYITKTNGTMSLFDAPLHSKFYTASKSGGAFDMRTLMTNTLMKDQPTLAVTFVDNHDTEPNQALQSWVDPWFKPLAYAFILTRQEGYPCVFYGDYYGIPQYNIPSLKSKIDPLLIARRDYAYGTQHDYLDHSDIIGWTREGVTEKPGSGLAALITDGPGGSKWMYVGKQHAGKVFYDLTGNRSDTVTINSDGWGEFKVNGGSVSVWVPR

SEQ ID NO: 19295 - protein, 481 aa, Bacillus acidicola
PFNGTMMQYFEWYLPDDGTLWTKVANEANNLSSLGITALWLPPAYKGTSRSDVGYGVYDLYDLGEFNQKGTVRTKYGTKAQYLQTIQAAHAAGMQVYADVVFDHKGGADGTEWVDAVEVNPSDRNQEISGTYQIQAWTKFDFPGRGNTYSSFKWRWYHFDGVDWDESRKLSRIYKFRGIGKAWDWEVDTENGNYDYLMYADLDMDHPEVVTELKNWGKWYVNTTNIDGFRLDAVKHIKFSTFPDWLSYVRSQTGKPLFTVGEYWSYDINKLHNYITKTNGTMSLFDAPLHSKFYTASKSGGAFDMRTLMTNTLMKDQPTLAVTFVDNHDTEPVQALQSWVDPWFKPLAYAFILTRQEGYPCVFYGDYYGIPQYNIPSLKSKIDPLLIARRDYAYGTQHDYLDHSDIIGWTREGVTEKPGSGLAALITDGPGGSKWMYVGKQHAGKVFYDLTGNRSDTVTINSDGWGEFKVNGGSVSVWVPR

SEQ ID NO: 19296 - protein, 481 aa, Bacillus acidicola
PFNGTMMQYFEWYLPDDGTLWTKVANEANNLSSLGITALWLPPAYKGTSRSDVGYGVYDLYDLGEFNQKGTVRTKYGTKAQYLQTIQAAHAAGMQVYADVVFDHKGGADGTEWVDAVEVNPSDRNQEISGTYQIQAWTKFDFPGRGNTYSSFKWRWYHFDGVDWDESRKLSRIYKFRGIGKAWDWEVDTENGNYDYLMYADLDMDHPEVVTELKNWGKWYVNTTNIDGFRLDAVKHIKFSSFPDWLSYVRSQTGKPLFTVGEYWSYDINKLHNYITKTQGTMSLFDAPLHSKFYTASKSGGAFDMRTLMTNTLMKDQPTLAVTFVDNHDTEPVQALQSWVDPWFKPLAYAFILTRQEGYPCVFYGDYYGIPQYNIPSLKSKIDPLLIARRDYAYGTQHDYLDHSDIIGWTREGVTEKPGSGLAALITDGPGGSKWMYVGKQHAGKVFYDLTGNRSDTVTINSDGWGEFKVNGGSVSVWVPR

SEQ ID NO: 19297 - protein, 481 aa, Bacillus acidicola
PFNGTMMQYFEWYLPDDGTLWTKVANEANNLSSLGITALWLPPAYKGTSRSDVGYGVYDLYDLGEFNQKGTVRTKYGTKAQYLQTIQAAHAAGMQVYADVVFDHKGGADGTEWVDAVEVNPSDRNQEISGTYQIQAWTKFDFPGRGNTYSSFKWRWYHFDGVDWDESRKLSRIYKFRGIGKAWDWEVDTENGNYDYLMYADLDMDHPEVVTELKNWGKWYVNTTNIDGFRLDAVKHIKFSSFPDWLSYVRSQTGKPLFTVGEYWSYDINKLHNYITKTNGTMSLFDAPLHIKFYTASKSGGAFDMRTLMTNTLMKDQPTLAVTFVDNHDTEPVQALQSWVDPWFKPLAYAFILTRQEGYPCVFYGDYYGIPQYNIPSLKSKIDPLLIARRDYAYGTQHDYLDHSDIIGWTREGVTEKPGSGLAALITDGPGGSKWMYVGKQHAGKVFYDLTGNRSDTVTINSDGWGEFKVNGGSVSVWVPR

SEQ ID NO: 19298 - protein, 481 aa, Bacillus acidicola
PFNGTMMQYFEWYLPDDGTLWTKVANEANNLSSLGITALWLPPAYKGTSRSDVGYGVYDLYDLGEFNQKGTVRTKYGTKAQYLQTIQAAHAAGMQVYADVVFDHKGGADGTEWVDAVEVNPSDRNQEISGTYQIQAWTKFDFPGRGNTYSSFKWRWYHFDGVDWDESRKLSRIYKFRGIGKAWDWEVDTELGNYDYLMYADLDMDHPEVVTELKNWGKWYVNTTNIDGFRLDAVKHIKFSSFPDWLSYVRSQTGKPLFTVGEYWSYDINKLHNYITKTNGTMSLFDAPLHSKFYTASKSGGAFDMRTLMTNTLMKDQPTLAVTFVDNHDTEPVQALQSWVDPWFKPLAYAFILTRQEGYPCVFYGDYYGIPQYNIPSLKSKIDPLLIARRDYAYGTQHDYLDHSDIIGWTREGVTEKPGSGLAALITDGPGGSKWMYVGKQHAGKVFYDLTGNRSDTVTINSDGWGEFKVNGGSVSVWVPR

SEQ ID NO: 19299 - protein, 481 aa, Bacillus acidicola
PFNGTMMQYFEWYLPDDGTLWTKVANEANNLSSLGITALWLPPAYKGTSRSDVGYGVYDLYDLGEFNQKGTVRTKYGTKAQYLQEIQAAHAAGMQVYADVVFDHKGGADGTEWVDAVEVNPSDRNQEISGTYQIQAWTKFDFPGRGNTYSSFKWRWYHFDGVDWDESRKLSRIYKFRGIGKAWDWEVDTENGNYDYLMYADLDMDHPEVVTELKNWGKWYVNTTNIDGFRLDAVKHIKFSSFPDWLSYVRSQTGKPLFTVGEYWSYDINKLHNYITKTNGTMSLFDAPLHSKFYTASKSGGAFDMRTLMTNTLMKDQPTLAVTFVDNHDTEPVQALQSWVDPWFKPLAYAFILTRQEGYPCVFYGDYYGIPQYNIPSLKSKIDPLLIARRDYAYGTQHDYLDHSDIIGWTREGVTEKPGSGLAALITDGPGGSKWMYVGKQHAGKVFYDLTGNRSDTVTINSDGWGEFKVNGGSVSVWVPR

SEQ ID NO: 19300 - protein, 481 aa, Bacillus acidicola
PFNGTMMQYFEWYLPDDGTLWTKVANEANNLSSLGITALWLPPAYKGTSRSDVGYGVYDLYDLGEFNQKGTVRTKYGTKAQYLQTIQAAHAAGMQVYADVVFDHKGGADGTEWVDAVEVNPSDRNQEISGTYQIQAWTKFDFPGRGNTYSSFKWRWYHFDGVDWDESRKLSRIYKFRGIGKAWDWEVDTENGNYDYLMYADLDMDHPEVVTELKNWGKWYVNTTNIDGFRLDAVKHIKFSSFPDWLSYVRSQTGKPLFTVGEYWSYDINKLHNYITKTFGTMSLFDAPLHSKFYTASKSGGAFDMRTLMTNTLMKDQPTLAVTFVDNHDTEPVQALQSWVDPWFKPLAYAFILTRQEGYPCVFYGDYYGIPQYNIPSLKSKIDPLLIARRDYAYGTQHDYLDHSDIIGWTREGVTEKPGSGLAALITDGPGGSKWMYVGKQHAGKVFYDLTGNRSDTVTINSDGWGEFKVNGGSVSVWVPR

SEQ ID NO: 19301 - protein, 481 aa, Bacillus acidicola
PFNGTMMQYFEWYLPDDGTLWTKVANEANNLSSLGITALWLPPAYKGTSRSDVGYGVYDLYDLGEFNQKGTVRTKYGTKAQYLQTIQAAHAAGMQVYADVVFDHKGGADGTEWVDAVEVNPSDRNQEISGTYQIQAWTKFDFPGRGNTYSSFKWRWYHFDGVDWDESRKLSRIYKFRGIGKAWDWEVDTENGNYDYLMYADLDMDHPEVVTELKNWGKWYVNTTNIDGFRLDAVKHIKFSSFPDWLSYVRSQTGKPLFTVGEYWSYDINKLHNYITKTPGTMSLFDAPLHSKFYTASKSGGAFDMRTLMTNTLMKDQPTLAVTFVDNHDTEPVQALQSWVDPWFKPLAYAFILTRQEGYPCVFYGDYYGIPQYNIPSLKSKIDPLLIARRDYAYGTQHDYLDHSDIIGWTREGVTEKPGSGLAALITDGPGGSKWMYVGKQHAGKVFYDLTGNRSDTVTINSDGWGEFKVNGGSVSVWVPR

SEQ ID NO: 19302 - protein, 481 aa, Bacillus acidicola
PFNGTMMQYFEWYLPDDGTLWTKVANEANNLSSLGITALWLPPAYKGTSRSDVGYGVYDLYDLGEFNQKGTVRTKYGTKAQYLQTIQAAHAAGMQVYADVVFDHKGGADGTEWVDAVEVNPSDRNQEISGTYQIQAWTKFDFPGRGNTYSSFKWRWYHFDGVDWDESRKLSRIYKFRGIGKAWDWEVDTEIGNYDYLMYADLDMDHPEVVTELKNWGKWYVNTTNIDGFRLDAVKHIKFSSFPDWLSYVRSQTGKPLFTVGEYWSYDINKLHNYITKTNGTMSLFDAPLHSKFYTASKSGGAFDMRTLMTNTLMKDQPTLAVTFVDNHDTEPVQALQSWVDPWFKPLAYAFILTRQEGYPCVFYGDYYGIPQYNIPSLKSKIDPLLIARRDYAYGTQHDYLDHSDIIGWTREGVTEKPGSGLAALITDGPGGSKWMYVGKQHAGKVFYDLTGNRSDTVTINSDGWGEFKVNGGSVSVWVPR

SEQ ID NO: 19303 - protein, 481 aa, Bacillus acidicola
PFNGTMMQYFEWYLPDDGTLWTKVANEANNLSSLGITALWLPPAYKGTSRSDVGYGVYDLYDLGEFNQKGTVRTKYGTKAQYLQTIQAAHAAGMQVYADVVFDHKGGADGTEWVDAVEVNPSDRNQEISGTYQIQAWTKFDFPGRGNTYSSFKWRWYHFDGVDWDESRKLSRIYKFRGIGKAWDWEVDTENGNYDYLMYADLDMDHPEVVTELKNWGKWYVNTTNIDGFRLDAVKHIKFSSFPDWLSYVRSQTGKPLFTVGEYWSYDINKLHNYITKTNGTMSLFDAPLHSKFYTASKSGGAFDMRTLMTNTLMKDQPTLAVTFVDNHDTEPAQALQSWVDPWFKPLAYAFILTRQEGYPCVFYGDYYGIPQYNIPSLKSKIDPLLIARRDYAYGTQHDYLDHSDIIGWTREGVTEKPGSGLAALITDGPGGSKWMYVGKQHAGKVFYDLTGNRSDTVTINSDGWGEFKVNGGSVSVWVPR

SEQ ID NO: 19304 - protein, 481 aa, Bacillus acidicola
PFNGTMMQYFEWYLPDDGTLWTKVANEANNLSSLGITALWLPPAYKGTSRSDVGYGVYDLYDLGEFNQKGTVRTKYGTKAQYLQTIQAAHAAGMQVYADVVFDHKGGADGTEWVDAVEVNPSDRNQEISGTYQIQAWTKFDFPGRGNTYSSFKWRWYHFDGVDWDESRKLSRIYKFRGIGKAWDWEVDTENGNYDYLMYADLDMDHPEVVTELKNWGKWYVNTTNIDGFRLDAVKHIKFSSFPDWLSYVRSQTGKPLFTVGEYWSYDINKLHNYITKTVGTMSLFDAPLHSKFYTASKSGGAFDMRTLMTNTLMKDQPTLAVTFVDNHDTEPVQALQSWVDPWFKPLAYAFILTRQEGYPCVFYGDYYGIPQYNIPSLKSKIDPLLIARRDYAYGTQHDYLDHSDIIGWTREGVTEKPGSGLAALITDGPGGSKWMYVGKQHAGKVFYDLTGNRSDTVTINSDGWGEFKVNGGSVSVWVPR

SEQ ID NO: 19305 - protein, 481 aa, Bacillus acidicola
PFNGTMMQYFEWYLPDDGTLWTKVANEANNLSSLGITALWLPPAYKGTSRSDVGYGVYDLYDLGEFNQKGTVRTKYGTKAQYLQTIQAAHAAGMQVYADVVFDHKGGADGTEWVDAVEVNPSDRNQEISGTYQIQAWTKFDFPGRGNTYSSFKWRWYHFDGVDWDESRKLSRIYKFRGIGKAWDWEVDTENGNYDYLMYADLDMDHPEVVTELKNWGKWYVNTTNIDGFRLDAVKHIKFSSFPDWLSYVRSQTGKPLFTVGEYWSYDINKLHNYITKTNGTMSLFDAPLHRKFYTASKSGGAFDMRTLMTNTLMKDQPTLAVTFVDNHDTEPVQALQSWVDPWFKPLAYAFILTRQEGYPCVFYGDYYGIPQYNIPSLKSKIDPLLIARRDYAYGTQHDYLDHSDIIGWTREGVTEKPGSGLAALITDGPGGSKWMYVGKQHAGKVFYDLTGNRSDTVTINSDGWGEFKVNGGSVSVWVPR

SEQ ID NO: 19306 - protein, 481 aa, Bacillus acidicola
PFNGTMMQYFEWYLPDDGTLWTKVANEANNLSSLGITALWLPPAYKGTSRSDVGYGVYDLYDLGEFNQKGTVRTKYGTKAQYLQGIQAAHAAGMQVYADVVFDHKGGADGTEWVDAVEVNPSDRNQEISGTYQIQAWTKFDFPGRGNTYSSFKWRWYHFDGVDWDESRKLSRIYKFRGIGKAWDWEVDTENGNYDYLMYADLDMDHPEVVTELKNWGKWYVNTTNIDGFRLDAVKHIKFSSFPDWLSYVRSQTGKPLFTVGEYWSYDINKLHNYITKTNGTMSLFDAPLHSKFYTASKSGGAFDMRTLMTNTLMKDQPTLAVTFVDNHDTEPVQALQSWVDPWFKPLAYAFILTRQEGYPCVFYGDYYGIPQYNIPSLKSKIDPLLIARRDYAYGTQHDYLDHSDIIGWTREGVTEKPGSGLAALITDGPGGSKWMYVGKQHAGKVFYDLTGNRSDTVTINSDGWGEFKVNGGSVSVWVPR

SEQ ID NO: 19307 - protein, 481 aa, Bacillus acidicola
PFNGTMMQYFEWYLPDDGTLWTKVANEANNLSSLGITALWLPPAYKGTSRSDVGYGVYDLYDLGEFNQKGTVRTKYGTKAQYLQTIQAAHAAGMQVYADVVFDHKGGADGTEWVDAVEVNPSDRNQEISGTYQIQAWTKFDFPGRGNTYSSFKWRWYHFDGVDWDESRKLSRIYKFRGIGKAWDWEVDTENGNYDYLMYADLDMDHPEVVTELKNWGKWYVNTTNIDGFRLDAVKHIKFSVFPDWLSYVRSQTGKPLFTVGEYWSYDINKLHNYITKTNGTMSLFDAPLHSKFYTASKSGGAFDMRTLMTNTLMKDQPTLAVTFVDNHDTEPVQALQSWVDPWFKPLAYAFILTRQEGYPCVFYGDYYGIPQYNIPSLKSKIDPLLIARRDYAYGTQHDYLDHSDIIGWTREGVTEKPGSGLAALITDGPGGSKWMYVGKQHAGKVFYDLTGNRSDTVTINSDGWGEFKVNGGSVSVWVPR

SEQ ID NO: 19308 - protein, 481 aa, Bacillus acidicola
PFNGTMMQYFEWYLPDDGTLWTKVANEANNLSSLGITALWLPPAYKGTSRSDVGYGVYDLYDLGEFNQKGTVRTKYGTKAQYLQTIQAAHAAGMQVYADVVFDHKGGADGTEWVDAVEVNPSDRNQEISGTYQIQAWTKFDFPGRGNTYSSFKWRWYHFDGVDWDESRKLSRIYKFRGIGKAWDWEVDTENGNYDYLMYADLDMDHPEVVTELKNWGKWYVNTTNIDGFRLDAVKHIKFSSFPDWLSYVRSQTGKPLFTVGEYWSYDINKLHNYITKTNGTMSLFDAPLHSKFYTASKSGGAFDMRTLMTNTLMKDQPTLAVTFVDNHDTEPPQALQSWVDPWFKPLAYAFILTRQEGYPCVFYGDYYGIPQYNIPSLKSKIDPLLIARRDYAYGTQHDYLDHSDIIGWTREGVTEKPGSGLAALITDGPGGSKWMYVGKQHAGKVFYDLTGNRSDTVTINSDGWGEFKVNGGSVSVWVPR

SEQ ID NO: 19309 - protein, 481 aa, Bacillus acidicola
PFNGTMMQYFEWYLPDDGTLWTKVANEANNLSSLGITALWLPPAYKGTSRSDVGYGVYDLYDLGEFNQKGTVRTKYGTKAQYLQTIQAAHAAGMQVYADVVFDHKGGADGTEWVDAVEVNPSDRNQEISGTYQIQAWTKFDFPGRGNTYSSFKWRWYHFDGVDWDESRKLSRIYKFRGIGKAWDWEVDTENGNYDYLMYADLDMDHPEVVTELKNWGKWYVNTTNIDGFRLDAVKHIKFSSFPDWLSYVRSQTGKPLFTVGEYWSYDINKLHNYITKTNGTMSLFDAPLHWKFYTASKSGGAFDMRTLMTNTLMKDQPTLAVTFVDNHDTEPVQALQSWVDPWFKPLAYAFILTRQEGYPCVFYGDYYGIPQYNIPSLKSKIDPLLIARRDYAYGTQHDYLDHSDIIGWTREGVTEKPGSGLAALITDGPGGSKWMYVGKQHAGKVFYDLTGNRSDTVTINSDGWGEFKVNGGSVSVWVPR

SEQ ID NO: 19310 - protein, 481 aa, Bacillus acidicola
PFNGTMMQYFEWYLPDDGTLWTKVANEANNLSSLGITALWLPPAYKGTSRSDVGYGVYDLYDLGEFNQKGTVRTKYGTKAQYLQTIQAAHAAGMQVYADVVFDHKGGADGTEWVDAVEVNPSDRNQEISGTYQIQAWTKFDFPGRGNTYSSFKWRWYHFDGVDWDESRKLSRIYKFRGIGKAWDWEVDTEPGNYDYLMYADLDMDHPEVVTELKNWGKWYVNTTNIDGFRLDAVKHIKFSSFPDWLSYVRSQTGKPLFTVGEYWSYDINKLHNYITKTNGTMSLFDAPLHSKFYTASKSGGAFDMRTLMTNTLMKDQPTLAVTFVDNHDTEPVQALQSWVDPWFKPLAYAFILTRQEGYPCVFYGDYYGIPQYNIPSLKSKIDPLLIARRDYAYGTQHDYLDHSDIIGWTREGVTEKPGSGLAALITDGPGGSKWMYVGKQHAGKVFYDLTGNRSDTVTINSDGWGEFKVNGGSVSVWVPR

SEQ ID NO: 19311 - protein, 481 aa, Bacillus acidicola
PFNGTMMQYFEWYLPDDGTLWTKVANEANNLSSLGITALWLPPAYKGTSRSDVGYGVYDLYDLGEFNQKGTVRTKYGTKAQYLQQIQAAHAAGMQVYADVVFDHKGGADGTEWVDAVEVNPSDRNQEISGTYQIQAWTKFDFPGRGNTYSSFKWRWYHFDGVDWDESRKLSRIYKFRGIGKAWDWEVDTENGNYDYLMYADLDMDHPEVVTELKNWGKWYVNTTNIDGFRLDAVKHIKFSSFPDWLSYVRSQTGKPLFTVGEYWSYDINKLHNYITKTNGTMSLFDAPLHSKFYTASKSGGAFDMRTLMTNTLMKDQPTLAVTFVDNHDTEPVQALQSWVDPWFKPLAYAFILTRQEGYPCVFYGDYYGIPQYNIPSLKSKIDPLLIARRDYAYGTQHDYLDHSDIIGWTREGVTEKPGSGLAALITDGPGGSKWMYVGKQHAGKVFYDLTGNRSDTVTINSDGWGEFKVNGGSVSVWVPR

SEQ ID NO: 19312 - protein, 496 aa, Geobacillus stearothermophilus
AKAAAPFNGTMMQYFEWYLPDDGTLWTKVANEANNLSSLGITALWLPPAYKGTSRSDVGYGVYDLYDLGEFNQKGTVRTKYGTKAQYLQAIQAAHAAGMQVYADVVFDHKGGADGTEWVDAVEVNPSDRNQEISGTYQIQAWTKFDFPGRGNTYSSFKWRWYHFDGVDWDESRKLSRIYKFRGIGKAWDWEVDTENGNYDYLMYADLDMDHPEVVTELKNWGKWYVNTTNIDGFRLDAVKHIKFSFFPDWLSYVRSQTGKPLFTVGEYWSYDINKLHNYITKTNGTMSLFDAPLHNKFYTASKSGGAFDMRTLMTNTLMKDQPTLAVTFVDNHDTEPGQALQSWVDPWFKPLAYAFILTRQEGYPGVFYGDYYGIPQYNIPSLKSKIDPLLIARRDYAYGTQHDYLDHSDIIGWTREGVTEKPGSGLAALITDGPGGSKWMYVGKQHAGKVFYDLTGNRSDTVTITSDGWGEFKVNGGSVSVWVPRKTTVSTITRP

SEQ ID NO: 19313 - protein, 496 aa, Anoxybacillus flavithermus
FNGTMMQYFEWYLPDDGTLWTKVANEANNLSSLGITALWLPPAYKGTSRSDVGYGVYDLYDLGEFNQKGTVRTKYGTKAQYLQAIQAAHAAGMQVYADVVFDHKGGADGTEWVDAVEVNPSDRNQEISGTYQIQAWTKFDFPGRGNTYSSFKWRWYHFDGVDWDESRKLSRIYKFRGKAWDWEVDTEFGNYDYLMYADLDMDHPEVVTELKNWGKWYVNTTNIDGFRLDAVKHIKFSFFPDWLSYVRSQTGKPLFTVGEYWSYDINKLHNYITKTDGTMSLFDAPLHNKFYTASKSGGAFDMRTLMTNTLMKDQPTLAVTFVDNHDTEPGQALQSWVDPWFKPLAYAFILTRQEGYPCVFYGDYYGIPQYNIPSLKSKIDPLLIARRDYAYGTQHDYIDSADIIGWTREGVAEKANSGLAALITDGPGGSKWMYVGKQHAGKTFYDLTGNRSDTVTINADGWGEFKVNGGSVSIWVPKISTTSQITFTVNNATTVW

SEQ ID NO: 19314 - protein, 493 aa, Geobacillus stearothermophilus
AAPFNGTMMQYFEWYLPDDGTLWTKVANEANNLSSLGITALWLPPAYKGTSRSDVGYGVYDLYDLGEFNQKGTVRTKYGTKAQYLQAIQAAHAAGMRVYADVVFDHKGGADGTEWVDAVEVNPSDRNQEISGTYQIQAWTKFDFPGRGNTYSSFKWRWYHFDGVDWDESRKLSRIYKFRGIGKAWDWEVDTENGNYDYLMYADLDMDHPEVVTELKNWGKWYVNTTNIDGFRLDAVKHIKFQFFPDWLSYVRSQTGKPLFTVGEYWSYDINKLHNYITKTNGTMSLFDAPLHNKFYTASKSGGAFDMRTLMTNTLMKDEPTLAVTFVDNHDTEPGQALQSWVDPWFKPLAYAFILTRREGYPCVFYGDYYGIPQYNIPSLKSKIDPLLIARRDYAYGTQHDYLDHSDIIGWTREGVTEKPGSGLAALITDGPGGSKWMYVGKEHAGKVFYDLTGNRSDTVTINSDGWGEFKVNGGSVSVWVPRKTTVSTIARP

SEQ ID NO: 19315 - protein, 493 aa, Geobacillus stearothermophilus
AAPFNGTMMQYFEWYLPDDGTLWTKVANEANNLSSLGITALWLPPAYKGTSRSDVGYGVYDLYDLGEFNQKGTVRTKYGTKAQYLQAIQAAHAAGMEVYADVVFDHKGGADGTEWVDAVEVNPSDRNQEISGTYQIQAWTKFDFPGRGNTYSSFKWRWYHFDGVDWDESRKLSRIYKFRGIGKAWDWEVDTENGNYDYLMYADLDMDHPEVVTELKNWGKWYVNTTNIDGFRLDAVKHIKFQFFPDWLSYVRSQTGKPLFTVGEYWSYDINKLHNYITKTNGTMSLFDAPLHNKFYTASKSGGAFDMRTLMTNTLMKDRPTLAVTFVDNHDTEPGQALQSWVDPWFKPLAYAFILTRREGYPCVFYGDYYGIPQYNIPSLKSKIDPLLIARRDYAYGTQHDYLDHSDIIGWTREGVTEKPGSGLAALITDGPGGSKWMYVGKRHAGKVFYDLTGNRSDTVTINSDGWGEFKVNGGSVSVWVPRKTTVSTIARP

SEQ ID NO: 19316 - protein, 493 aa, Geobacillus stearothermophilus
AAPFNGTMMQYFEWYLPDDGTLWTKVANEANNLSSLGITALWLPPAYKGTSRSDVGYGVYDLYDLGEFNQKGTVRTKYGTKAQYLQAIQAAHAAGMEVYADVVFDHKGGADGTEWVDAVEVNPSDRNQEISGTYQIQAWTKFDFPGRGNTYSSFKWRWYHFDGVDWDESRKLSRIYKFRGIGKAWDWEVDTENGNYDYLMYADLDMDHPEVVTELKNWGKWYVNTTNIDGFRLDAVKHIKFSFFPDWLSYVRSQTGKPLFTVGEYWSYDINKLHNYITKTNGTMSLFDAPLHNKFYTASKSGGAFDMRTLMTNTLMKDEPTLAVTFVDNHDTEPGQALQSWVDPWFKPLAYAFILTREEGYPCVFYGDYYGIPQYNIPSLKSKIDPLLIARRDYAYGTQHDYLDHSDIIGWTREGVTEKPGSGLAALITDGPGGSKWMYVGKRHAGKVFYDLTGNRSDTVTINSDGWGEFKVNGGSVSVWVPRKTTVSTIARP

SEQ ID NO: 19317 - protein, 493 aa, Geobacillus stearothermophilus
AAPFNGTMMQYFEWYLPDDGTLWTKVANEANNLSSLGITALWLPPAYKGTSRSDVGYGVYDLYDLGEFNQKGTVRTKYGTKAQYLQAIQAAHAAGMEVYADVVFDHKGGADGTEWVDAVEVNPSDRNQEISGTYQIQAWTKFDFPGRGNTYSSFKWRWYHFDGVDWDESRKLSRIYKFRGIGKAWDWEVDTENGNYDYLMYADLDMDHPEVVTELKNWGKWYVNTTNIDGFRLDAVKHIKFQFFPDWLSYVRSQTGKPLFTVGEYWSYDINKLHNYITKTNGTMSLFDAPLHNKFYTASKSGGAFDMRTLMTNTLMKDEPTLAVTFVDNHDTEPGQALQSWVDPWFKPLAYAFILTREEGYPCVFYGDYYGIPQYNIPSLKSKIDPLLIARRDYAYGTQHDYLDHSDIIGWTREGVTEKPGSGLAALITDGPGGSKWMYVGKEHAGKVFYDLTGNRSDTVTINSDGWGEFKVNGGSVSVWVPRKTTVSTIARP

SEQ ID NO: 19318 - protein, 493 aa, Geobacillus stearothermophilus
AAPFNGTMMQYFEWYLPDDGTLWTKVADEANNLSSLGITALWLPPAYKGTSRSDVGYGVYDLYDLGEFNQKGTVRTKYGTKAQYLQAIQAAHAAGMQVYADVVFDHKGGADGTEWVDAVEVNPSDRNQEISGTYQIQAWTKFDFPGRGNTYSSFKWRWYHFDGVDWDESRKLSRIYKFRGIGKAWDWEVDTENGNYDYLMYADLDMDHPEVVTELKNWGKWYVDTTNIDGFRLDAVKHIKFSFFPDWLSYVRSQTGKPLFTVGEYWSYDINKLHNYITKTNGTMSLFDAPLHNKFYTASKSGGAFDMQTLMTNTLMKDQPTLAVTFVDNHDTEPGQALQSWVDPWFKPLAYAFILTRQEGYPCVFYGDYYGIPQYNIPSLKSKIDPLLIARRDYAYGTQHDYLDHSDIIGWTREGVTEKPGSGLAALITDGPGGSKWMYVGKQHAGKVFYDLTGNRSDTVTINSDGWGEFKVNGGSVSVWVPQKTTVSTIARP

SEQ ID NO: 19319 - protein, 493 aa, unidentified
AAPFNGTMMQYFEWYLPDDGTLWTKVANEANNLSSLGITALWLPPAYKGTSRSDVGYGVYDLYDLGEFNQKGTVRTKYGTKAQYLQAIQAAHAAGMQVYADVVFDHKGGADGTEWVDAVEVNPSDRNQEISGTYQIQAWTKFDFNGRGNTYSSFKWRWYHFDGVDWDESRKLSRIYKFRGIGKAWDWEVDTENGNYDYLMYADLDMDHPEVVTELKNWGKWYVNTTNIDGFRLDAVKHIKFSFFPDWLSYVRSQTGKPLFTVGEYWSYDINKLHNYITKTNGTMSLFDAPLHNKFYTASKSGGAFDMSTLMNNTLMKDQPTLAVTFVDNHDTEPGQALQSWVDPWFKPLAYAFILTRQEGYPCVFYGDYYGIPQYNIPSLKSKIDPLLIARRDYAYGTQHDYLDHSDIIGWTREGVTEKPGSGLAALITDGPGGSKWMYVGKQHAGKVFYDLTGNRSDTVTINSDGWGEFKVNGGSVSVWVPRKTTVSTIAWP

SEQ ID NO: 19320 - protein, 493 aa, Geobacillus stearothermophilus
AAPFNGTMMQYFEWYLPDDGTLWTKVANEANNLSSLGITALWLPPAYKGTSRSDVGYGVYDLYDLGEFNQKGTVRTKYGTKAQYLQAIQAAHAAGMQVYADVVFDHKGGADGTEWVDAVEVNPSDRNQEISGTYQIQAWTKFDFPGRGNTYSSFKWRWYHFNGVDWDESRKLSRIYKFRGIGKKWNEEVDTENGNYDYLMYANLDYNHPEVVTELKNWGKWYVNTTNIDGFRLDAVKHIKFSFFPDWLSYVRSQTGKPLFTVGEYWSYDINKLHNYITKTDGTMSLFDAPLHNKFYTASKSGGAFDMRTLMTNTLMKDQPTLAVTFVDNHDTEPGQALQSWVDPWFKPLAYAFILTRQEGYPCVFYGDYYGIPQYNIPSLKSKIDPLLIARRDYAYGTQHDYLDHSDIIGWTREGGTEKPGSGLAALITDGPGGSKWMYVGKQHAGKVFYDLTGNRSDTVTINSDGWGEFKVNGGSVSVWVPRKTTVSTIARP

SEQ ID NO: 19321 - protein, 493 aa, Geobacillus stearothermophilus
AAPFNGTMMQYFEWYLPDDGTLWTKVANEANNLSSLGITALWLPPAYKGTSRSDVGYGVYDLYDLGEFNQKGTVRTKYGTKAQYLQAIQAAHAAGMQVYADVVFDHKGNADGTEWVDAVEVNPSDRNQEISGTYQIQAWTKFDFPGRGNTYSSFKWRWYHFDGVDWDESRKLSRIYKFRGIGKAWDWEVDTENGNYDYLMYADLDMDHPEVVTELKNWGKWYVNTTNIDGFRLDAVKHIKFSFFPDWLSYVRSQTGKPLFTVGEYWSYDINKLHNYITKTNGTMSLFDAPLHNKFYTASKSGGAFDMRTLMTNTLMKDQPTLAVTFVDNHDTEPGQALQSWVDPWFKPLAYAFILTRQEGYPGVFYGDYYGIPQYNIPSLKSKIDPLLIARRDYAYGTQHDYLDHSDIIGWTREGVTEKPGSGLAALITDGPGGSKWMYVGKQHAGKVFYDLTGNRSDTVTITSDGWGEFKVNGGSVSVWVPRKTTVSTITRP

SEQ ID NO: 19322 - protein, 493 aa, Geobacillus stearothermophilus
AAPFNGTMMQYFEWYLPDDGTLWTKVANEANNLSSLGITALWLPPAYKGTSRSDVGYGVYDLYDLGEFNQKGTVRTKYGTKAQYLQAIQAAHAAGMRVYADVVFDHKGGADGTEWVDAVEVNPSDRNQEISGTYQIQAWTKFDFPGRGNTYSSFKWRWYHFDGVDWDESRKLSRIYKFRGIGKAWDWEVDTENGNYDYLMYADLDMDHPEVVTELKNWGKWYVNTTNIDGFRLDAVKHIKFSFFPDWLSYVRSQTGKPLFTVGEYWSYDINKLHNYITKTNGTMSLFDAPLHNKFYTASKSGGAFDMRTLMTNTLMKDEPTLAVTFVDNHDTEPGQALQSWVDPWFKPLAYAFILTRREGYPCVFYGDYYGIPQYNIPSLKSKIDPLLIARRDYAYGTQHDYLDHSDIIGWTREGVTEKPGSGLAALITDGPGGSKWMYVGKRHAGKVFYDLTGNRSDTVTINSDGWGEFKVNGGSVSVWVPRKTTVSTIARP

SEQ ID NO: 19323 - protein, 493 aa, Geobacillus stearothermophilus
AAPFNGTMMQYFEWYLPDDGTLWTKVANEANNLSSLGITALWLPPAYKGTSRSDVGYGVYDLYDLGEFNQKGTVRTKYGTKAQYLQAIQAAHAAGMRVYADVVFDHKGGADGTEWVDAVEVNPSDRNQEISGTYQIQAWTKFDFPGRGNTYSSFKWRWYHFDGVDWDESRKLSRIYKFRGIGKAWDWEVDTENGNYDYLMYADLDMDHPEVVTELKNWGKWYVNTTNIDGFRLDAVKHIKFSFFPDWLSYVRSQTGKPLFTVGEYWSYDINKLHNYITKTNGTMSLFDAPLHNKFYTASKSGGAFDMRTLMTNTLMKDEPTLAVTFVDNHDTEPGQALQSWVDPWFKPLAYAFILTRREGYPCVFYGDYYGIPQYNIPSLKSKIDPLLIARRDYAYGTQHDYLDHSDIIGWTREGVTEKPGSGLAALITDGPGGSKWMYVGKEHAGKVFYDLTGNRSDTVTINSDGWGEFKVNGGSVSVWVPRKTTVSTIARP

SEQ ID NO: 19324 - protein, 493 aa, Geobacillus stearothermophilus
AAPFNGTMMQYFEWYLPDDGTLWTKVANEANNLSSLGITALWLPPAYKGTSRSDVGYGVYDLYDLGEFNQKGTVRTKYGTKAQYLQAIQAAHAAGMRVYADVVFDHKGGADGTEWVDAVEVNPSDRNQEISGTYQIQAWTKFDFPGRGNTYSSFKWRWYHFDGVDWDESRKLSRIYKFRGIGKAWDWEVDTENGNYDYLMYADLDMDHPEVVTELKNWGKWYVNTTNIDGFRLDAVKHIKFSFFPDWLSYVRSQTGKPLFTVGEYWSYDINKLHNYITKTNGTMSLFDAPLHNKFYTASKSGGAFDMRTLMTNTLMKDRPTLAVTFVDNHDTEPGQALQSWVDPWFKPLAYAFILTRREGYPCVFYGDYYGIPQYNIPSLKSKIDPLLIARRDYAYGTQHDYLDHSDIIGWTREGVTEKPGSGLAALITDGPGGSKWMYVGKRHAGKVFYDLTGNRSDTVTINSDGWGEFKVNGGSVSVWVPRKTTVSTIARP

SEQ ID NO: 19325 - protein, 493 aa, Geobacillus stearothermophilus
AAPFNGTMMQYFEWYLPDDGTLWTKVANEANNLSSLGITALWLPPAYKGTSRSDVGYGVYDLYDLGEFNQKGTVRTKYGTKAQYLQAIQAAHAAGMRVYADVVFDHKGGADGTEWVDAVEVNPSDRNQEISGTYQIQAWTKFDFPGRGNTYSSFKWRWYHFDGVDWDESRKLSRIYKFRGIGKAWDWEVDTENGNYDYLMYADLDMDHPEVVTELKNWGKWYVNTTNIDGFRLDAVKHIKFSFFPDWLSYVRSQTGKPLFTVGEYWSYDINKLHNYITKTNGTMSLFDAPLHNKFYTASKSGGAFDMRTLMTNTLMKDEPTLAVTFVDNHDTEPGQALQSWVDPWFKPLAYAFILTREEGYPCVFYGDYYGIPQYNIPSLKSKIDPLLIARRDYAYGTQHDYLDHSDIIGWTREGVTEKPGSGLAALITDGPGGSKWMYVGKRHAGKVFYDLTGNRSDTVTINSDGWGEFKVNGGSVSVWVPRKTTVSTIARP

SEQ ID NO: 19326 - protein, 493 aa, Geobacillus stearothermophilus
AAPFNGTMMQYFEWYLPDDGTLWTKVANEANNLSSLGITALWLPPAYKGTSRSDVGYGVYDLYDLGEFNQKGTVRTKYGTKAQYLQAIQAAHAAGMEVYADVVFDHKGGADGTEWVDAVEVNPSDRNQEISGTYQIQAWTKFDFPGRGNTYSSFKWRWYHFDGVDWDESRKLSRIYKFRGIGKAWDWEVDTENGNYDYLMYADLDMDHPEVVTELKNWGKWYVNTTNIDGFRLDAVKHIKFSFFPDWLSYVRSQTGKPLFTVGEYWSYDINKLHNYITKTNGTMSLFDAPLHNKFYTASKSGGAFDMRTLMTNTLMKDRPTLAVTFVDNHDTEPGQALQSWVDPWFKPLAYAFILTRREGYPCVFYGDYYGIPQYNIPSLKSKIDPLLIARRDYAYGTQHDYLDHSDIIGWTREGVTEKPGSGLAALITDGPGGSKWMYVGKEHAGKVFYDLTGNRSDTVTINSDGWGEFKVNGGSVSVWVPRKTTVSTIARP

SEQ ID NO: 19327 - protein, 493 aa, Geobacillus stearothermophilus
AAPFNGTMMQYFEWYLPDDGTLWTKVANEANNLSSLGITALWLPPAYKGTSRSDVGYGVYDLYDLGEFNQKGTVRTKYGTKAQYLQAIQAAHAAGMRVYADVVFDHKGGADGTEWVDAVEVNPSDRNQEISGTYQIQAWTKFDFPGRGNTYSSFKWRWYHFDGVDWDESRKLSRIYKFRGIGKAWDWEVDTENGNYDYLMYADLDMDHPEVVTELKNWGKWYVNTTNIDGFRLDAVKHIKFSFFPDWLSYVRSQTGKPLFTVGEYWSYDINKLHNYITKTNGTMSLFDAPLHNKFYTASKSGGAFDMRTLMTNTLMKDRPTLAVTFVDNHDTEPGQALQSWVDPWFKPLAYAFILTREEGYPCVFYGDYYGIPQYNIPSLKSKIDPLLIARRDYAYGTQHDYLDHSDIIGWTREGVTEKPGSGLAALITDGPGGSKWMYVGKEHAGKVFYDLTGNRSDTVTINSDGWGEFKVNGGSVSVWVPRKTTVSTIARP

SEQ ID NO: 19328 - protein, 493 aa, Geobacillus stearothermophilus
AAPFNGTMMQYFEWYLPDDGTLWTKVANEANNLSSLGITALWLPPAYKGTSRSDVGYGVYDLYDLGEFNQKGTVRTKYGTKAQYLQAIQAAHAAGMRVYADVVFDHKGGADGTEWVDAVEVNPSDRNQEISGTYQIQAWTKFDFPGRGNTYSSFKWRWYHFDGVDWDESRKLSRIYKFRGIGKAWDWEVDTENGNYDYLMYADLDMDHPEVVTELKNWGKWYVNTTNIDGFRLDAVKHIKFQFFPDWLSYVRSQTGKPLFTVGEYWSYDINKLHNYITKTNGTMSLFDAPLHNKFYTASKSGGAFDMRTLMTNTLMKDRPTLAVTFVDNHDTEPGQALQSWVDPWFKPLAYAFILTREEGYPCVFYGDYYGIPQYNIPSLKSKIDPLLIARRDYAYGTQHDYLDHSDIIGWTREGVTEKPGSGLAALITDGPGGSKWMYVGKRHAGKVFYDLTGNRSDTVTINSDGWGEFKVNGGSVSVWVPRKTTVSTIARP

SEQ ID NO: 19329 - protein, 493 aa, Geobacillus stearothermophilus
AAPFNGTMMQYFEWYLPDDGTLWTKVANEANNLSSLGITALWLPPAYKGTSRSDVGYGVYDLYDLGEFNQKGTVRTKYGTKAQYLQAIQAAHAAGMEVYADVVFDHKGGADGTEWVDAVEVNPSDRNQEISGTYQIQAWTKFDFPGRGNTYSSFKWRWYHFDGVDWDESRKLSRIYKFRGIGKAWDWEVDTENGNYDYLMYADLDMDHPEVVTELKNWGKWYVNTTNIDGFRLDAVKHIKFQFFPDWLSYVRSQTGKPLFTVGEYWSYDINKLHNYITKTNGTMSLFDAPLHNKFYTASKSGGAFDMRTLMTNTLMKDEPTLAVTFVDNHDTEPGQALQSWVDPWFKPLAYAFILTRREGYPCVFYGDYYGIPQYNIPSLKSKIDPLLIARRDYAYGTQHDYLDHSDIIGWTREGVTEKPGSGLAALITDGPGGSKWMYVGKEHAGKVFYDLTGNRSDTVTINSDGWGEFKVNGGSVSVWVPRKTTVSTIARP

SEQ ID NO: 19330 - protein, 493 aa, Geobacillus stearothermophilus
AAPFNGTMMQYFEWYLPDDGTLWTKVANEANNLSSLGITALWLPPAYKGTSRSDVGYGVYDLYDLGEFNQKGTVRTKYGTKAQYLQAIQAAHAAGMRVYADVVFDHKGGADGTEWVDAVEVNPSDRNQEISGTYQIQAWTKFDFPGRGNTYSSFKWRWYHFDGVDWDESRKLSRIYKFRGIGKAWDWEVDTENGNYDYLMYADLDMDHPEVVTELKNWGKWYVNTTNIDGFRLDAVKHIKFQFFPDWLSYVRSQTGKPLFTVGEYWSYDINKLHNYITKTNGTMSLFDAPLHNKFYTASKSGGAFDMRTLMTNTLMKDRPTLAVTFVDNHDTEPGQALQSWVDPWFKPLAYAFILTREEGYPCVFYGDYYGIPQYNIPSLKSKIDPLLIARRDYAYGTQHDYLDHSDIIGWTREGVTEKPGSGLAALITDGPGGSKWMYVGKEHAGKVFYDLTGNRSDTVTINSDGWGEFKVNGGSVSVWVPRKTTVSTIARP

SEQ ID NO: 19331 - protein, 493 aa, Geobacillus stearothermophilus
AAPFNGTMMQYFEWYLPDDGTLWTKVANEANNLSSLGITALWLPPAYKGTSRSDVGYGVYDLYDLGEFNQKGTVRTKYGTKAQYLQAIQAAHAAGMEVYADVVFDHKGGADGTEWVDAVEVNPSDRNQEISGTYQIQAWTKFDFPGRGNTYSSFKWRWYHFDGVDWDESRKLSRIYKFRGIGKAWDWEVDTENGNYDYLMYADLDMDHPEVVTELKNWGKWYVNTTNIDGFRLDAVKHIKFSFFPDWLSYVRSQTGKPLFTVGEYWSYDINKLHNYITKTNGTMSLFDAPLHNKFYTASKSGGAFDMRTLMTNTLMKDEPTLAVTFVDNHDTEPGQALQSWVDPWFKPLAYAFILTRREGYPCVFYGDYYGIPQYNIPSLKSKIDPLLIARRDYAYGTQHDYLDHSDIIGWTREGVTEKPGSGLAALITDGPGGSKWMYVGKRHAGKVFYDLTGNRSDTVTINSDGWGEFKVNGGSVSVWVPRKTTVSTIARP

SEQ ID NO: 19332 - protein, 493 aa, Geobacillus stearothermophilus
AAPFNGTMMQYFEWYLPDDGTLWTKVANEANNLSSLGITALWLPPAYKGTSRSDVGYGVYDLYDLGEFNQKGTVRTKYGTKAQYLQAIQAAHAAGMEVYADVVFDHKGGADGTEWVDAVEVNPSDRNQEISGTYQIQAWTKFDFPGRGNTYSSFKWRWYHFDGVDWDESRKLSRIYKFRGIGKAWDWEVDTENGNYDYLMYADLDMDHPEVVTELKNWGKWYVNTTNIDGFRLDAVKHIKFQFFPDWLSYVRSQTGKPLFTVGEYWSYDINKLHNYITKTNGTMSLFDAPLHNKFYTASKSGGAFDMRTLMTNTLMKDRPTLAVTFVDNHDTEPGQALQSWVDPWFKPLAYAFILTREEGYPCVFYGDYYGIPQYNIPSLKSKIDPLLIARRDYAYGTQHDYLDHSDIIGWTREGVTEKPGSGLAALITDGPGGSKWMYVGKEHAGKVFYDLTGNRSDTVTINSDGWGEFKVNGGSVSVWVPRKTTVSTIARP

SEQ ID NO: 19333 - protein, 493 aa, Geobacillus stearothermophilus
AAPFNGTMMQYFEWYLPDDGTLWTKVAREANNLSSLGITALWLPPAYKGTSRSDVGYGVYDLYDLGEFNQKGTVRTKYGTKAQYLQAIQAAHAAGMQVYADVVFDHKGGADGTEWVDAVEVNPSDRNQEISGTYQIQAWTKFDFPGRGNTYSSFKWRWYHFDGVDWDESRKLSRIYKFRGIGKAWDWEVDTENGNYDYLMYADLDMDHPEVVTELKNWGKWYVRTTNIDGFRLDAVKHIKFSFFPDWLSYVRSQTGKPLFTVGEYWSYDINKLHNYITKTNGTMSLFDAPLHNKFYTASKSGGAFNMRTLMTNTLMKNQPTLAVTFVDNHDTEPGQALQSWVDPWFKPLAYAFILTRQEGYPCVFYGDYYGIPQYNIPSLKSKIDPLLIARRDYAYGTQHDYLDHSDIIGWTREGVTEKPGSGLAALITDGPGGSKWMYVGKQHAGKVFYDLTGNRSDTVTINSDGWGEFKVNGGSVSVWVPRKTTVSTIARP

SEQ ID NO: 19334 - protein, 493 aa, Geobacillus stearothermophilus
AAPFNGTMMQYFEWYLPDDGTLWTKVANEANNLSSLGITALWLPPAYKGTSRSDVGYGVYDLYDLGEFNQKGTVRTKYGTKAQYLQAIQAAHAAGMQVYADVVFNHKGGADGTEWVDAVEVNPSDRNQEISGTYQIQAWTKFDFPGRGNTYSSFKWRWYHFNGVDWDESRKLSRIYKFRGIGKAWNWEVDTENGNYDYLMYANLDYNHPEVVTELKNWGKWYVNTTNIDGFRLDAVKHIKFSFFPDWLSYVRSQTGKPLFTVGEYWSYDINKLHNYITKTDGTMSLFDAPLHNKFYTASKSGGAFDMRTLMTNTLMKDQPTLAVTFVDNHDTEPGQALQSWVDPWFKPLAYAFILTRQEGYPCVFYGDYYGIPQYNIPSLKSKIDPLLIARRDYAYGTQHDYLDHSDIIGWTREGGTEKPGSGLAALITDGPGGSKWMYVGKQHAGKVFYDLTGNRSDTVTINSDGWGEFKVNGGSVSVWVPRKTTVSTIARP

SEQ ID NO: 19335 - protein, 493 aa, Geobacillus stearothermophilus
AAPFNGTMMQYFEWYLPDDGTLWTKVANEANNLSSLGITALWLPPAYKGTSRSDVGYGVYDLYDLGEFNQKGTVRTKYGTKAQYLQAIQAAHAAGMRVYADVVFDHKGGADGTEWVDAVEVNPSDRNQEISGTYQIQAWTKFDFPGRGNTYSSFKWRWYHFDGVDWDESRKLSRIYKFRGIGKAWDWEVDTENGNYDYLMYADLDMDHPEVVTELKNWGKWYVNTTNIDGFRLDAVKHIKFSFFPDWLSYVRSQTGKPLFTVGEYWSYDINKLHNYITKTNGTMSLFDAPLHNKFYTASKSGGAFDMRTLMTNTLMKDRPTLAVTFVDNHDTEPGQALQSWVDPWFKPLAYAFILTRREGYPCVFYGDYYGIPQYNIPSLKSKIDPLLIARRDYAYGTQHDYLDHSDIIGWTREGVTEKPGSGLAALITDGPGGSKWMYVGKEHAGKVFYDLTGNRSDTVTINSDGWGEFKVNGGSVSVWVPRKTTVSTIARP

SEQ ID NO: 19336 - protein, 493 aa, Geobacillus stearothermophilus
AAPFNGTMMQYFEWYLPDDGTLWTKVANEANNLSSLGITALWLPPAYKGTSRSDVGYGVYDLYDLGEFNQKGTVRTKYGTKAQYLQAIQAAHAAGMQVYADVVFDHKGGADGTEWVDAVEVNPSDRNQEISGTYQIQAATKFDFPGRGNTYSSFKWRWYHFDGVDWDESRKLSRIYKFRGIGKAWDWEVDTENGNYDYLMYADLDMDHPEVVTELKNWGKWYVNTTNIDGFRLDAVKHIKFSFFPDWLSYVRSQTGKPLFTVGEYWSYDINKLHNYITKTNGTMSLFDAPLHNKFYTASKSGGAFDMRTLMTNTLMKDQPTLAVTFVDNHDTEPGQALQSWVDPWFKPLAYAFILTRQEGYPGVFYGDYYGIPQYNIPSLKSKIDPLLIARRDYAYGTQHDYLDHSDIIGWTREGVTEKPGSGLAALITDGPGGSKWMYVGKQHAGKVFYDLTGNRSDTVTITSDGWGEFKVNGGSVSVWVPRKTTVSTITRP

SEQ ID NO: 19337 - protein, 493 aa, Geobacillus stearothermophilus
AAPFNGTMMQYFEWYLPDDGTLWTKVANEANNLSSLGITALWLPPAYKGTSRSDVGYGVYDLYDLGEFNQKGTVRTKYGTKAQYLQAIQAAHAAGMQVYADVVFDHKGGADGTEWVDAVEVNPSDRNQEISGTYQIQALTKFDFPGRGNTYSSFKWRWYHFDGVDWDESRKLSRIYKFRGIGKAWDWEVDTENGNYDYLMYADLDMDHPEVVTELKNWGKWYVNTTNIDGFRLDAVKHIKFSFFPDWLSYVRSQTGKPLFTVGEYWSYDINKLHNYITKTNGTMSLFDAPLHNKFYTASKSGGAFDMRTLMTNTLMKDQPTLAVTFVDNHDTEPGQALQSWVDPWFKPLAYAFILTRQEGYPGVFYGDYYGIPQYNIPSLKSKIDPLLIARRDYAYGTQHDYLDHSDIIGWTREGVTEKPGSGLAALITDGPGGSKWMYVGKQHAGKVFYDLTGNRSDTVTITSDGWGEFKVNGGSVSVWVPRKTTVSTITRP

SEQ ID NO: 19338 - protein, 493 aa, Geobacillus stearothermophilus
AAPFNGTMMQYFEWYLPDDGTLWTKVANEANNLSSLGITALWLPPAYKGTSRSDVGYGVYDLYDLGEFNQKGTVRTKYGTKAQYLQAIQAAHAAGMEVYADVVFDHKGGADGTEWVDAVEVNPSDRNQEISGTYQIQAWTKFDFPGRGNTYSSFKWRWYHFDGVDWDESRKLSRIYKFRGIGKAWDWEVDTENGNYDYLMYADLDMDHPEVVTELKNWGKWYVNTTNIDGFRLDAVKHIKFSFFPDWLSYVRSQTGKPLFTVGEYWSYDINKLHNYITKTNGTMSLFDAPLHNKFYTASKSGGAFDMRTLMTNTLMKDRPTLAVTFVDNHDTEPGQALQSWVDPWFKPLAYAFILTREEGYPCVFYGDYYGIPQYNIPSLKSKIDPLLIARRDYAYGTQHDYLDHSDIIGWTREGVTEKPGSGLAALITDGPGGSKWMYVGKEHAGKVFYDLTGNRSDTVTINSDGWGEFKVNGGSVSVWVPRKTTVSTIARP

SEQ ID NO: 19339 - protein, 493 aa, Geobacillus stearothermophilus
AAPFNGTMMQYFEWYLPDDGTLWTKVANEANNLSSLGITALWLPPAYKGTSRSDVGYGVYDLYDLGEFNQKGTVRTKYGTKAQYLQAIQAAHAAGMEVYADVVFDHKGGADGTEWVDAVEVNPSDRNQEISGTYQIQAWTKFDFPGRGNTYSSFKWRWYHFDGVDWDESRKLSRIYKFRGIGKAWDWEVDTENGNYDYLMYADLDMDHPEVVTELKNWGKWYVNTTNIDGFRLDAVKHIKFQFFPDWLSYVRSQTGKPLFTVGEYWSYDINKLHNYITKTNGTMSLFDAPLHNKFYTASKSGGAFDMRTLMTNTLMKDRPTLAVTFVDNHDTEPGQALQSWVDPWFKPLAYAFILTRREGYPCVFYGDYYGIPQYNIPSLKSKIDPLLIARRDYAYGTQHDYLDHSDIIGWTREGVTEKPGSGLAALITDGPGGSKWMYVGKEHAGKVFYDLTGNRSDTVTINSDGWGEFKVNGGSVSVWVPRKTTVSTIARP

SEQ ID NO: 19340 - protein, 493 aa, Geobacillus stearothermophilus
AAPFNGTMMQYFEWYLPDDGTLWTKVANEANNLSSLGITALWLPPAYKGTSRSDVGYGVYDLYDLGEFNQKGTVRTKYGTKAQYLQAIQAAHAAGMQVYADVVFDHKGGADGTEWVDAVEVNPSDRNQEISGTYQIQAYTKFDFPGRGNTYSSFKWRWYHFDGVDWDESRKLSRIYKFRGIGKAWDWEVDTENGNYDYLMYADLDMDHPEVVTELKNWGKWYVNTTNIDGFRLDAVKHIKFSFFPDWLSYVRSQTGKPLFTVGEYWSYDINKLHNYITKTNGTMSLFDAPLHNKFYTASKSGGAFDMRTLMTNTLMKDQPTLAVTFVDNHDTEPGQALQSWVDPWFKPLAYAFILTRQEGYPGVFYGDYYGIPQYNIPSLKSKIDPLLIARRDYAYGTQHDYLDHSDIIGWTREGVTEKPGSGLAALITDGPGGSKWMYVGKQHAGKVFYDLTGNRSDTVTITSDGWGEFKVNGGSVSVWVPRKTTVSTITRP

SEQ ID NO: 19341 - protein, 493 aa, Geobacillus stearothermophilus
AAPFNGTMMQYFEWYLPDDGTLWTKVANEANNLSSLGITALWLPPAYKGTSRSDVGYGVYDLYDLGEFNQKGTVRTKYGTKAQYLQAIQAAHAAGMEVYADVVFDHKGGADGTEWVDAVEVNPSDRNQEISGTYQIQAWTKFDFPGRGNTYSSFKWRWYHFDGVDWDESRKLSRIYKFRGIGKAWDWEVDTENGNYDYLMYADLDMDHPEVVTELKNWGKWYVNTTNIDGFRLDAVKHIKFQFFPDWLSYVRSQTGKPLFTVGEYWSYDINKLHNYITKTNGTMSLFDAPLHNKFYTASKSGGAFDMRTLMTNTLMKDEPTLAVTFVDNHDTEPGQALQSWVDPWFKPLAYAFILTREEGYPCVFYGDYYGIPQYNIPSLKSKIDPLLIARRDYAYGTQHDYLDHSDIIGWTREGVTEKPGSGLAALITDGPGGSKWMYVGKRHAGKVFYDLTGNRSDTVTINSDGWGEFKVNGGSVSVWVPRKTTVSTIARP

SEQ ID NO: 19342 - protein, 493 aa, Geobacillus stearothermophilus
AAPFNGTMMQYFEWYLPDDGTLWTKVANEANNLSSLGITALWLPPAYKGTSRSDVGYGVYDLYDLGEFNQKGTVRTKYGTKAQYLQAIQAAHAAGMRVYADVVFDHKGGADGTEWVDAVEVNPSDRNQEISGTYQIQAWTKFDFPGRGNTYSSFKWRWYHFDGVDWDESRKLSRIYKFRGIGKAWDWEVDTENGNYDYLMYADLDMDHPEVVTELKNWGKWYVNTTNIDGFRLDAVKHIKFQFFPDWLSYVRSQTGKPLFTVGEYWSYDINKLHNYITKTNGTMSLFDAPLHNKFYTASKSGGAFDMRTLMTNTLMKDEPTLAVTFVDNHDTEPGQALQSWVDPWFKPLAYAFILTRREGYPCVFYGDYYGIPQYNIPSLKSKIDPLLIARRDYAYGTQHDYLDHSDIIGWTREGVTEKPGSGLAALITDGPGGSKWMYVGKRHAGKVFYDLTGNRSDTVTINSDGWGEFKVNGGSVSVWVPRKTTVSTIARP

SEQ ID NO: 19343 - protein, 493 aa, Geobacillus stearothermophilus
AAPFNGTMMQYFEWYLPDDGTLWTKVANEANNLSSLGITALWLPPAYKGTSRSDVGYGVYDLYDLGEFNQKGTVRTKYGTKAQYLQAIQAAHAAGMRVYADVVFDHKGGADGTEWVDAVEVNPSDRNQEISGTYQIQAWTKFDFPGRGNTYSSFKWRWYHFDGVDWDESRKLSRIYKFRGIGKAWDWEVDTENGNYDYLMYADLDMDHPEVVTELKNWGKWYVNTTNIDGFRLDAVKHIKFQFFPDWLSYVRSQTGKPLFTVGEYWSYDINKLHNYITKTNGTMSLFDAPLHNKFYTASKSGGAFDMRTLMTNTLMKDEPTLAVTFVDNHDTEPGQALQSWVDPWFKPLAYAFILTREEGYPCVFYGDYYGIPQYNIPSLKSKIDPLLIARRDYAYGTQHDYLDHSDIIGWTREGVTEKPGSGLAALITDGPGGSKWMYVGKRHAGKVFYDLTGNRSDTVTINSDGWGEFKVNGGSVSVWVPRKTTVSTIARP

SEQ ID NO: 19344 - protein, 493 aa, Geobacillus stearothermophilus
AAPFNGTMMQYFEWYLPDDGTLWTKVANEANNLSSLGITALWLPPAYKGTSRSDVGYGVYDLYDLGEFNQKGTVRTKYGTKAQYLQAIQAAHAAGMQVYADVVFDHKGFADGTEWVDAVEVNPSDRNQEISGTYQIQAWTKFDFPGRGNTYSSFKWRWYHFDGVDWDESRKLSRIYKFRGIGKAWDWEVDTENGNYDYLMYADLDMDHPEVVTELKNWGKWYVNTTNIDGFRLDAVKHIKFSFFPDWLSYVRSQTGKPLFTVGEYWSYDINKLHNYITKTNGTMSLFDAPLHNKFYTASKSGGAFDMRTLMTNTLMKDQPTLAVTFVDNHDTEPGQALQSWVDPWFKPLAYAFILTRQEGYPGVFYGDYYGIPQYNIPSLKSKIDPLLIARRDYAYGTQHDYLDHSDIIGWTREGVTEKPGSGLAALITDGPGGSKWMYVGKQHAGKVFYDLTGNRSDTVTITSDGWGEFKVNGGSVSVWVPRKTTVSTITRP

SEQ ID NO: 19345 - protein, 493 aa, Geobacillus stearothermophilus
AAPFNGTMMQYFEWYLPDDGTLWTKVANEANNLSSLGITALWLPPAYKGTSRSDVGYGVYDLYDLGEFNQKGTVRTKYGTKAQYLQAIQAAHAAGMEVYADVVFDHKGGADGTEWVDAVEVNPSDRNQEISGTYQIQAWTKFDFPGRGNTYSSFKWRWYHFDGVDWDESRKLSRIYKFRGIGKAWDWEVDTENGNYDYLMYADLDMDHPEVVTELKNWGKWYVNTTNIDGFRLDAVKHIKFQFFPDWLSYVRSQTGKPLFTVGEYWSYDINKLHNYITKTNGTMSLFDAPLHNKFYTASKSGGAFDMRTLMTNTLMKDRPTLAVTFVDNHDTEPGQALQSWVDPWFKPLAYAFILTREEGYPCVFYGDYYGIPQYNIPSLKSKIDPLLIARRDYAYGTQHDYLDHSDIIGWTREGVTEKPGSGLAALITDGPGGSKWMYVGKRHAGKVFYDLTGNRSDTVTINSDGWGEFKVNGGSVSVWVPRKTTVSTIARP

SEQ ID NO: 19346 - protein, 493 aa, Geobacillus stearothermophilus
AAPFNGTMMQYFEWYLPDDGTLWTKVANEANNLSSLGITALWLPPAYKGTSRSDVGYGVYDLYDLGEFNQKGTVRTKYGTKAQYLQAIQAAHAAGMQVYADVVFDHKGDADGTEWVDAVEVNPSDRNQEISGTYQIQAWTKFDFPGRGNTYSSFKWRWYHFDGVDWDESRKLSRIYKFRGIGKAWDWEVDTENGNYDYLMYADLDMDHPEVVTELKNWGKWYVNTTNIDGFRLDAVKHIKFSFFPDWLSYVRSQTGKPLFTVGEYWSYDINKLHNYITKTNGTMSLFDAPLHNKFYTASKSGGAFDMRTLMTNTLMKDQPTLAVTFVDNHDTEPGQALQSWVDPWFKPLAYAFILTRQEGYPGVFYGDYYGIPQYNIPSLKSKIDPLLIARRDYAYGTQHDYLDHSDIIGWTREGVTEKPGSGLAALITDGPGGSKWMYVGKQHAGKVFYDLTGNRSDTVTITSDGWGEFKVNGGSVSVWVPRKTTVSTITRP

SEQ ID NO: 19347 - protein, 493 aa, Geobacillus stearothermophilus
AAPFNGTMMQYFEWYLPDDGTLWTKVANEANNLSSLGITALWLPPAYKGTSRSDVGYGVYDLYDLGEFNQKGTVRTKYGTKAQYLQAIQAAHAAGMRVYADVVFDHKGGADGTEWVDAVEVNPSDRNQEISGTYQIQAWTKFDFPGRGNTYSSFKWRWYHFDGVDWDESRKLSRIYKFRGIGKAWDWEVDTENGNYDYLMYADLDMDHPEVVTELKNWGKWYVNTTNIDGFRLDAVKHIKFQFFPDWLSYVRSQTGKPLFTVGEYWSYDINKLHNYITKTNGTMSLFDAPLHNKFYTASKSGGAFDMRTLMTNTLMKDEPTLAVTFVDNHDTEPGQALQSWVDPWFKPLAYAFILTREEGYPCVFYGDYYGIPQYNIPSLKSKIDPLLIARRDYAYGTQHDYLDHSDIIGWTREGVTEKPGSGLAALITDGPGGSKWMYVGKEHAGKVFYDLTGNRSDTVTINSDGWGEFKVNGGSVSVWVPRKTTVSTIARP

SEQ ID NO: 19348 - protein, 493 aa, Geobacillus stearothermophilus
AAPFNGTMMQYFEWYLPDDGTLWTKVANEANNLSSLGITALWLPPAYKGTSRSDVGYGVYDLYDLGEFNQKGTVRTKYGTKAQYLQAIQAAHAAGMRVYADVVFDHKGGADGTEWVDAVEVNPSDRNQEISGTYQIQAWTKFDFPGRGNTYSSFKWRWYHFDGVDWDESRKLSRIYKFRGIGKAWDWEVDTENGNYDYLMYADLDMDHPEVVTELKNWGKWYVNTTNIDGFRLDAVKHIKFSFFPDWLSYVRSQTGKPLFTVGEYWSYDINKLHNYITKTNGTMSLFDAPLHNKFYTASKSGGAFDMRTLMTNTLMKDEPTLAVTFVDNHDTEPGQALQSWVDPWFKPLAYAFILTREEGYPCVFYGDYYGIPQYNIPSLKSKIDPLLIARRDYAYGTQHDYLDHSDIIGWTREGVTEKPGSGLAALITDGPGGSKWMYVGKEHAGKVFYDLTGNRSDTVTINSDGWGEFKVNGGSVSVWVPRKTTVSTIARP

SEQ ID NO: 19349 - protein, 493 aa, Geobacillus stearothermophilus
AAPFNGTMMQYFEWYLPDDGTLWTKVANEANNLSSLGITALWLPPAYKGTSRSDVGYGVYDLYDLGEFNQKGTVRTKYGTKAQYLQAIQAAHAAGMRVYADVVFDHKGGADGTEWVDAVEVNPSDRNQEISGTYQIQAWTKFDFPGRGNTYSSFKWRWYHFDGVDWDESRKLSRIYKFRGIGKAWDWEVDTENGNYDYLMYADLDMDHPEVVTELKNWGKWYVNTTNIDGFRLDAVKHIKFQFFPDWLSYVRSQTGKPLFTVGEYWSYDINKLHNYITKTNGTMSLFDAPLHNKFYTASKSGGAFDMRTLMTNTLMKDQPTLAVTFVDNHDTEPGQALRSWVDPWFKPLAYAFILTRREGYPCVFYGDYYGIPQYNIPSLKSKIDPLLIARRDYAYGTQHDYLDHSDIIGWTREGVTEKPGSGLAALITDGPGGSKWMYVGKRHAGKVFYDLTGNRSDTVTINSDGWGEFKVNGGSVSVWVPRKTTVSTIARP

SEQ ID NO: 19350 - protein, 493 aa, Geobacillus stearothermophilus
AAPFNGTMMQYFEWYLPDDGTLWTKVANEANNLSSLGITALWLPPAYKGTSRSDVGYGVYDLYDLGEFNQKGTVRTKYGTKAQYLQAIQAAHAAGMEVYADVVFDHKGGADGTEWVDAVEVNPSDRNQEISGTYQIQAWTKFDFPGRGNTYSSFKWRWYHFDGVDWDESRKLSRIYKFRGIGKAWDWEVDTENGNYDYLMYADLDMDHPEVVTELKNWGKWYVNTTNIDGFRLDAVKHIKFSFFPDWLSYVRSQTGKPLFTVGEYWSYDINKLHNYITKTNGTMSLFDAPLHNKFYTASKSGGAFDMRTLMTNTLMKDEPTLAVTFVDNHDTEPGQALQSWVDPWFKPLAYAFILTRREGYPCVFYGDYYGIPQYNIPSLKSKIDPLLIARRDYAYGTQHDYLDHSDIIGWTREGVTEKPGSGLAALITDGPGGSKWMYVGKEHAGKVFYDLTGNRSDTVTINSDGWGEFKVNGGSVSVWVPRKTTVSTIARP

SEQ ID NO: 19351 - protein, 493 aa, Geobacillus stearothermophilus
AAPFNGTMMQYFEWYLPDDGTLWTKVANEANNLSSLGITALWLPPAYKGTSRSDVGYGVYDLYDLGEFNQKGTVRTKYGTKAQYLQAIQAAHAAGMEVYADVVFDHKGGADGTEWVDAVEVNPSDRNQEISGTYQIQAWTKFDFPGRGNTYSSFKWRWYHFDGVDWDESRKLSRIYKFRGIGKAWDWEVDTENGNYDYLMYADLDMDHPEVVTELKNWGKWYVNTTNIDGFRLDAVKHIKFSFFPDWLSYVRSQTGKPLFTVGEYWSYDINKLHNYITKTNGTMSLFDAPLHNKFYTASKSGGAFDMRTLMTNTLMKDEPTLAVTFVDNHDTEPGQALQSWVDPWFKPLAYAFILTREEGYPCVFYGDYYGIPQYNIPSLKSKIDPLLIARRDYAYGTQHDYLDHSDIIGWTREGVTEKPGSGLAALITDGPGGSKWMYVGKEHAGKVFYDLTGNRSDTVTINSDGWGEFKVNGGSVSVWVPRKTTVSTIARP

SEQ ID NO: 19352 - protein, 493 aa, Geobacillus stearothermophilus
AAPFNGTMMQYFEWYLPDDGTLWTKVANEANNLSSLGITALWLPPAYKGTSRSDVGYGVYDLYDLGEFNQKGTVRTKYGTKAQYLQAIQAAHAAGMEVYADVVFDHKGGADGTEWVDAVEVNPSDRNQEISGTYQIQAWTKFDFPGRGNTYSSFKWRWYHFDGVDWDESRKLSRIYKFRGIGKAWDWEVDTENGNYDYLMYADLDMDHPEVVTELKNWGKWYVNTTNIDGFRLDAVKHIKFSFFPDWLSYVRSQTGKPLFTVGEYWSYDINKLHNYITKTNGTMSLFDAPLHNKFYTASKSGGAFDMRTLMTNTLMKDRPTLAVTFVDNHDTEPGQALQSWVDPWFKPLAYAFILTREEGYPCVFYGDYYGIPQYNIPSLKSKIDPLLIARRDYAYGTQHDYLDHSDIIGWTREGVTEKPGSGLAALITDGPGGSKWMYVGKRHAGKVFYDLTGNRSDTVTINSDGWGEFKVNGGSVSVWVPRKTTVSTIARP

SEQ ID NO: 19353 - protein, 493 aa, Geobacillus stearothermophilus
AAPFNGTMMQYFEWYLPDDGTLWTKVANEANNLSSLGITALWLPPAYKGTSRSDVGYGVYDLYDLGEFNQKGTVRTKYGTKAQYLQAIQAAHAAGMEVYADVVFDHKGGADGTEWVDAVEVNPSDRNQEISGTYQIQAWTKFDFPGRGNTYSSFKWRWYHFDGVDWDESRKLSRIYKFRGIGKAWDWEVDTENGNYDYLMYADLDMDHPEVVTELKNWGKWYVNTTNIDGFRLDAVKHIKFSFFPDWLSYVRSQTGKPLFTVGEYWSYDINKLHNYITKTNGTMSLFDAPLHNKFYTASKSGGAFDMRTLMTNTLMKDRPTLAVTFVDNHDTEPGQALQSWVDPWFKPLAYAFILTRREGYPCVFYGDYYGIPQYNIPSLKSKIDPLLIARRDYAYGTQHDYLDHSDIIGWTREGVTEKPGSGLAALITDGPGGSKWMYVGKRHAGKVFYDLTGNRSDTVTINSDGWGEFKVNGGSVSVWVPRKTTVSTIARP

SEQ ID NO: 19354 - protein, 493 aa, Geobacillus stearothermophilus
AAPFNGTMMQYFEWYLPDDGTLWTKVANEANNLSSLGITALWLPPAYKGTSRSDVGYGVYDLYDLGEFNQKGTVRTKYGTKAQYLQAIQAAHAAGMRVYADVVFDHKGGADGTEWVDAVEVNPSDRNQEISGTYQIQAWTKFDFPGRGNTYSSFKWRWYHFDGVDWDESRKLSRIYKFRGIGKAWDWEVDTENGNYDYLMYADLDMDHPEVVTELKNWGKWYVNTTNIDGFRLDAVKHIKFSFFPDWLSYVRSQTGKPLFTVGEYWSYDINKLHNYITKTNGTMSLFDAPLHNKFYTASKSGGAFDMRTLMTNTLMKDRPTLAVTFVDNHDTEPGQALQSWVDPWFKPLAYAFILTREEGYPCVFYGDYYGIPQYNIPSLKSKIDPLLIARRDYAYGTQHDYLDHSDIIGWTREGVTEKPGSGLAALITDGPGGSKWMYVGKRHAGKVFYDLTGNRSDTVTINSDGWGEFKVNGGSVSVWVPRKTTVSTIARP

SEQ ID NO: 19355 - protein, 489 aa, Bacillus sp.
AAPFNGTMMQYFEWYLPDDGTLWTKVANEANNLSSLGITALWLPPAYKGTSRSDVGYGVYDLYDLGEFNQKGAVRTKYGTKAQYLQAIQAAHAAGMQVYADVVFDHKGGADGTEWVDAVEVNPSDRNQEISGTYQIQAWTKFDFPGRGNTYSSFKWRWYHFDGVDWDESRKLSRIYKFRGKAWDWEVDTEFGNYDYLMYADLDMDHPEVVTELKSWGKWYVNTTNIDGFRLDAVKHIKFSFFPDWLSDVRSQTGKPLFTVGEYWSYDINKLHNYIMKTNGTMSLFDAPLHNKFYTASKSGGTFDMRTLMTNTLMKDQPTLAVTFVDNHDTEPGQALQSWVDPWFKPLAYAFILTRQEGYPCVFYGDYYGIPQYNIPSLKSKIDPLLIARRDYAYGTQHDYLDHSDIIGWTREGVTEKPGSGLAALITDGPGGSKWMYVGKQHAGKVFYDLTGNRSDTVTINSDGWGEFKVNGGSVSVWVPRKTTVSTIA

SEQ ID NO: 19356 - protein, 491 aa, Geobacillus stearothermophilus
AAPFNGTMMQYFEWYLPDDGTLWTKVANEANNLSSLGITALWLPPAYKGTSRSDVGYGVYDLYDLGEFNQKGAVRTKYGTKAQYLQAIQAAHAAGMQVYADVVFDHKGGADGTEWVDAVEVNPSDRNQEISGTYQIQAWTKFDFPGRGNTYSSFKWRWYHFDGVDWDESRKLSRIYKFRGIGKAWDWEVDTENGNYDYLMYADLDMDHPEVVTELKSWGKWYVNTTNIDGFRLDAVKHIKFSFFPDWLSYVRSQTGKPLFTVGEYWSYDINKLHNYIMKTNGTMSLFDAPLHNKFYTASKSGGTFDMRTLMTNTLMKDQPTLAVTFVDNHDTEPGQALQSWVDPWFKPLAYAFILTRQEGYPCVFYGDYYGIPQYNIPSLKSKIDPLLIARRDYAYGTQHDYLDHSDIIGWTREGVTEKPGSGLAALITDGPGGSKWMYVGKQHAGKVFYDLTGNRSDTVTINSDGWGEFKVNGGSVSVWVPRKTTVSTIA

SEQ ID NO: 19357 - protein, 486 aa, Geobacillus stearothermophilus
AAPFNGTMMQYFEWYLPDDGTLWTKVANEANNLSSLGITALWLPPAYKGTSRSDVGYGVYDLYDLGEFNQKGTVRTKYGTKAQYLQAIQAAHAAGMEVYADVVFDHKGGADGTEWVDAVEVNPSDRNQEISGTYQIQAWTKFDFPGRGNTYSSFKWRWYHFDGVDWDESRKLSRIYKFRGIGKAWDWEVDTENGNYDYLMYADLDMDHPEVVTELKNWGKWYVNTTNIDGFRLDAVKHIKFSFFPDWLSYVRSQTGKPLFTVGEYWSYDINKLHNYITKTNGTMSLFDAPLHNKFYTASKSGGAFDMRTLMTNTLMKDEPTLAVTFVDNHDTEPGQALQSWVDPWFKPLAYAFILTREEGYPCVFYGDYYGIPQYNIPSLKSKIDPLLIARRDYAYGTQHDYLDHSDIIGWTREGVTEKPGSGLAALITDGPGGSKWMYVGKEHAGKVFYDLTGNRSDTVTINSDGWGEFKVNGGSVSVWVPRKTT

SEQ ID NO: 19358 - protein, 486 aa, Geobacillus stearothermophilus
AAPFNGTMMQYFEWYLPDDGTLWTKVANEANNLSSLGITALWLPPAYKGTSRSDVGYGVYDLYDLGEFNQKGTVRTKYGTKAQYLQAIQAAHAAGMEVYADVVFDHKGGADGTEWVDAVEVNPSDRNQEISGTYQIQAWTKFDFPGRGNTYSSFKWRWYHFDGVDWDESRKLSRIYKFRGIGKAWDWEVDTENGNYDYLMYADLDMDHPEVVTELKNWGKWYVNTTNIDGFRLDAVKHIKFQFFPDWLSYVRSQTGKPLFTVGEYWSYDINKLHNYITKTNGTMSLFDAPLHNKFYTASKSGGAFDMRTLMTNTLMKDEPTLAVTFVDNHDTEPGQALQSWVDPWFKPLAYAFILTREEGYPCVFYGDYYGIPQYNIPSLKSKIDPLLIARRDYAYGTQHDYLDHSDIIGWTREGVTEKPGSGLAALITDGPGGSKWMYVGKRHAGKVFYDLTGNRSDTVTINSDGWGEFKVNGGSVSVWVPRKTT

SEQ ID NO: 19359 - protein, 486 aa, Geobacillus stearothermophilus
AAPFNGTMMQYFEWYLPDDGTLWTKVANEANNLSSLGITALWLPPAYKGTSRSDVGYGVYDLYDLGEFNQKGTVRTKYGTKAQYLQAIQAAHAAGMEVYADVVFDHKGGADGTEWVDAVEVNPSDRNQEISGTYQIQAWTKFDFPGRGNTYSSFKWRWYHFDGVDWDESRKLSRIYKFRGIGKAWDWEVDTENGNYDYLMYADLDMDHPEVVTELKNWGKWYVNTTNIDGFRLDAVKHIKFQFFPDWLSYVRSQTGKPLFTVGEYWSYDINKLHNYITKTNGTMSLFDAPLHNKFYTASKSGGAFDMRTLMTNTLMKDEPTLAVTFVDNHDTEPGQALQSWVDPWFKPLAYAFILTREEGYPCVFYGDYYGIPQYNIPSLKSKIDPLLIARRDYAYGTQHDYLDHSDIIGWTREGVTEKPGSGLAALITDGPGGSKWMYVGKEHAGKVFYDLTGNRSDTVTINSDGWGEFKVNGGSVSVWVPRKTT

SEQ ID NO: 19360 - protein, 486 aa, Geobacillus stearothermophilus
AAPFNGTMMQYFEWYLPDDGTLWTKVANEANNLSSLGITALWLPPAYKGTSRSDVGYGVYDLYDLGEFNQKGTVRTKYGTKAQYLQAIQAAHAAGMEVYADVVFDHKGGADGTEWVDAVEVNPSDRNQEISGTYQIQAWTKFDFPGRGNTYSSFKWRWYHFDGVDWDESRKLSRIYKFRGIGKAWDWEVDTENGNYDYLMYADLDMDHPEVVTELKNWGKWYVNTTNIDGFRLDAVKHIKFSFFPDWLSYVRSQTGKPLFTVGEYWSYDINKLHNYITKTNGTMSLFDAPLHNKFYTASKSGGAFDMRTLMTNTLMKDRPTLAVTFVDNHDTEPGQALQSWVDPWFKPLAYAFILTREEGYPCVFYGDYYGIPQYNIPSLKSKIDPLLIARRDYAYGTQHDYLDHSDIIGWTREGVTEKPGSGLAALITDGPGGSKWMYVGKRHAGKVFYDLTGNRSDTVTINSDGWGEFKVNGGSVSVWVPRKTT

SEQ ID NO: 19361 - protein, 486 aa, Geobacillus stearothermophilus
AAPFNGTMMQYFEWYLPDDGTLWTKVANEANNLSSLGITALWLPPAYKGTSRSDVGYGVYDLYDLGEFNQKGTVRTKYGTKAQYLQAIQAAHAAGMEVYADVVFDHKGGADGTEWVDAVEVNPSDRNQEISGTYQIQAWTKFDFPGRGNTYSSFKWRWYHFDGVDWDESRKLSRIYKFRGIGKAWDWEVDTENGNYDYLMYADLDMDHPEVVTELKNWGKWYVNTTNIDGFRLDAVKHIKFQFFPDWLSYVRSQTGKPLFTVGEYWSYDINKLHNYITKINGTMSLFDAPLHNKFYTASKSGGAFDMRTLMTNTLMKDRPTLAVTFVDNHDTEPGQALQSWVDPWFKPLAYAFILTRQEGYPCVFYGDYYGIPQYNIPSLKSKIDPLLIARRDYAYGTQHDYLDHSDIIGWTREGVTEKPGSGLAALITDGPGGSKWMYVGKRHAGKVFYDLTGNRSDTVTINSDGWGEFKVNGGSVSVWVPRKTT

SEQ ID NO: 19362 - protein, 486 aa, Geobacillus stearothermophilus
AAPFNGTMMQYFEWYLPDDGTLWTKVANEANNLSSLGITALWLPPAYKGTSRSDVGYGVYDLYDLGEFNQKGTVRTKYGTKAQYLQAIQAAHAAGMRVYADVVFDHKGGADGTEWVDAVEVNPSDRNQEISGTYQIQAWTKFDFPGRGNTYSSFKWRWYHFDGVDWDESRKLSRIYKFRGIGKAWDWEVDTENGNYDYLMYADLDMDHPEVVTELKNWGKWYVNTTNIDGFRLDAVKHIKFQFFPDWLSYVRSQTGKPLFTVGEYWSYDINKLHNYITKTNGTMSLFDAPLHNKFYTASKSGGAFDMRTLMTNTLMKDRPTLAVTFVDNHDTEPGQALQSWVDPWFKPLAYAFILTRREGYPCVFYGDYYGIPQYNIPSLKSKIDPLLIARRDYAYGTQHDYLDHSDIIGWTREGVTEKPGSGLAALITDGPGGSKWMYVGKEHAGKVFYDLTGNRSDTVTINSDGWGEFKVNGGSVSVWVPRKTT

SEQ ID NO: 19363 - protein, 486 aa, Geobacillus stearothermophilus
AAPFNGTMMQYFEWYLPDDGTLWTKVANEANNLSSLGITALWLPPAYKGTSRSDVGYGVYDLYDLGEFNQKGTVRTKYGTKAQYLQAIQAAHAAGMRVYADVVFDHKGGADGTEWVDAVEVNPSDRNQEISGTYQIQAWTKFDFPGRGNTYSSFKWRWYHFDGVDWDESRKLSRIYKFRGIGKAWDWEVDTENGNYDYLMYADLDMDHPEVVTELKNWGKWYVNTTNIDGFRLDAVKHIKFQFFPDWLSYVRSQTGKPLFTVGEYWSYDINKLHNYITKTNGTMSLFDAPLHNKFYTASKSGGAFDMRTLMTNTLMKDEPTLAVTFVDNHDTEPGQALQSWVDPWFKPLAYAFILTREEGYPCVFYGDYYGIPQYNIPSLKSKIDPLLIARRDYAYGTQHDYLDHSDIIGWTREGVTEKPGSGLAALITDGPGGSKWMYVGKEHAGKVFYDLTGNRSDTVTINSDGWGEFKVNGGSVSVWVPRKTT

SEQ ID NO: 19364 - protein, 486 aa, Geobacillus stearothermophilus
AAPFNGTMMQYFEWYLPDDGTLWTKVANEANNLSSLGITALWLPPAYKGTSRSDVGYGVYDLYDLGEFNQKGTVRTKYGTKAQYLQAIQAAHAAGMQVYADVVFDHKGGADGTEWVDAVEVNPSDRNQEISGTYQIQAWTKFDFPGRGNTYSSFKWRWYHFDGVDWDESRKLSRIYKFRGIGKAWDWEVDTENGNYDYLMYADLDMDHPEVVTELKNWGKWYVNTTNIDGFRLDAVKHIKFQFFPDWLSYVRSQTGKPLFTVGEYWSYDINKLHNYITKINGTMSLFDAPLHNKFYTASKSGGAFDMRTLMTNTLMKDRPTLAVTFVDNHDTEPGQALQSWVDPWFKPLAYAFILTRREGYPCVFYGDYYGIPQYNIPSLKSKIDPLLIARRDYAYGTQHDYLDHSDIIGWTREGVTEKPGSGLAALITDGPGGSKWMYVGKEHAGKVFYDLTGNRSDTVTINSDGWGEFKVNGGSVSVWVPRKTT

SEQ ID NO: 19365 - protein, 486 aa, Geobacillus stearothermophilus
AAPFNGTMMQYFEWYLPDDGTLWTKVANEANNLSSLGITALWLPPAYKGTSRSDVGYGVYDLYDLGEFNQKGTVRTKYGTKAQYLQAIQAAHAAGMEVYADVVFDHKGGADGTEWVDAVEVNPSDRNQEISGTYQIQAWTKFDFPGRGNTYSSFKWRWYHFDGVDWDESRKLSRIYKFRGIGKAWDWEVDTENGNYDYLMYADLDMDHPEVVTELKNWGKWYVNTTNIDGFRLDAVKHIKFQFFPDWLSYVRSQTGKPLFTVGEYWSYDINKLHNYITKINGTMSLFDAPLHNKFYTASKSGGAFDMRTLMTNTLMKDRPTLAVTFVDNHDTEPGQALQSWVDPWFKPLAYAFILTREEGYPCVFYGDYYGIPQYNIPSLKSKIDPLLIARRDYAYGTQHDYLDHSDIIGWTREGVTEKPGSGLAALITDGPGGSKWMYVGKQHAGKVFYDLTGNRSDTVTINSDGWGEFKVNGGSVSVWVPRKTT

SEQ ID NO: 19366 - protein, 486 aa, Geobacillus stearothermophilus
AAPFNGTMMQYFEWYLPDDGTLWTKVANEANNLSSLGITALWLPPAYKGTSRSDVGYGVYDLYDLGEFNQKGTVRTKYGTKAQYLQAIQAAHAAGMEVYADVVFDHKGGADGTEWVDAVEVNPSDRNQEISGTYQIQAWTKFDFPGRGNTYSSFKWRWYHFDGVDWDESRKLSRIYKFRGIGKAWDWEVDTENGNYDYLMYADLDMDHPEVVTELKNWGKWYVNTTNIDGFRLDAVKHIKFQFFPDWLSYVRSQTGKPLFTVGEYWSYDINKLHNYITKTNGTMSLFDAPLHNKFYTASKSGGAFDMRTLMTNTLMKDRPTLAVTFVDNHDTEPGQALQSWVDPWFKPLAYAFILTREEGYPCVFYGDYYGIPQYNIPSLKSKIDPLLIARRDYAYGTQHDYLDHSDIIGWTREGVTEKPGSGLAALITDGPGGSKWMYVGKEHAGKVFYDLTGNRSDTVTINSDGWGEFKVNGGSVSVWVPRKTT

SEQ ID NO: 19367 - protein, 486 aa, Geobacillus stearothermophilus
AAPFNGTMMQYFEWYLPDDGTLWTKVANEANNLSSLGITALWLPPAYKGTSRSDVGYGVYDLYDLGEFNQKGTVRTKYGTKAQYLQAIQAAHAAGMEVYADVVFDHKGGADGTEWVDAVEVNPSDRNQEISGTYQIQAWTKFDFPGRGNTYSSFKWRWYHFDGVDWDESRKLSRIYKFRGIGKAWDWEVDTENGNYDYLMYADLDMDHPEVVTELKNWGKWYVNTTNIDGFRLDAVKHIKFQFFPDWLSYVRSQTGKPLFTVGEYWSYDINKLHNYITKINGTMSLFDAPLHNKFYTASKSGGAFDMRTLMTNTLMKDEPTLAVTFVDNHDTEPGQALQSWVDPWFKPLAYAFILTREEGYPCVFYGDYYGIPQYNIPSLKSKIDPLLIARRDYAYGTQHDYLDHSDIIGWTREGVTEKPGSGLAALITDGPGGSKWMYVGKQHAGKVFYDLTGNRSDTVTINSDGWGEFKVNGGSVSVWVPRKTT

SEQ ID NO: 19368 - protein, 486 aa, Geobacillus stearothermophilus
AAPFNGTMMQYFEWYLPDDGTLWTKVANEANNLSSLGITALWLPPAYKGTSRSDVGYGVYDLYDLGEFNQKGTVRTKYGTKAQYLQAIQAAHAAGMEVYADVVFDHKGGADGTEWVDAVEVNPSDRNQEISGTYQIQAWTKFDFPGRGNTYSSFKWRWYHFDGVDWDESRKLSRIYKFRGIGKAWDWEVDTENGNYDYLMYADLDMDHPEVVTELKNWGKWYVNTTNIDGFRLDAVKHIKFQFFPDWLSYVRSQTGKPLFTVGEYWSYDINKLHNYITKINGTMSLFDAPLHNKFYTASKSGGAFDMRTLMTNTLMKDEPTLAVTFVDNHDTEPGQALQSWVDPWFKPLAYAFILTRQEGYPCVFYGDYYGIPQYNIPSLKSKIDPLLIARRDYAYGTQHDYLDHSDIIGWTREGVTEKPGSGLAALITDGPGGSKWMYVGKRHAGKVFYDLTGNRSDTVTINSDGWGEFKVNGGSVSVWVPRKTT

SEQ ID NO: 19369 - protein, 486 aa, Geobacillus stearothermophilus
AAPFNGTMMQYFEWYLPDDGTLWTKVANEANNLSSLGITALWLPPAYKGTSRSDVGYGVYDLYDLGEFNQKGTVRTKYGTKAQYLQAIQAAHAAGMRVYADVVFDHKGGADGTEWVDAVEVNPSDRNQEISGTYQIQAWTKFDFPGRGNTYSSFKWRWYHFDGVDWDESRKLSRIYKFRGIGKAWDWEVDTENGNYDYLMYADLDMDHPEVVTELKNWGKWYVNTTNIDGFRLDAVKHIKFQFFPDWLSYVRSQTGKPLFTVGEYWSYDINKLHNYITKTNGTMSLFDAPLHNKFYTASKSGGAFDMRTLMTNTLMKDEPTLAVTFVDNHDTEPGQALQSWVDPWFKPLAYAFILTRREGYPCVFYGDYYGIPQYNIPSLKSKIDPLLIARRDYAYGTQHDYLDHSDIIGWTREGVTEKPGSGLAALITDGPGGSKWMYVGKRHAGKVFYDLTGNRSDTVTINSDGWGEFKVNGGSVSVWVPRKTT

SEQ ID NO: 19370 - protein, 486 aa, Geobacillus stearothermophilus
AAPFNGTMMQYFEWYLPDDGTLWTKVANEANNLSSLGITALWLPPAYKGTSRSDVGYGVYDLYDLGEFNQKGTVRTKYGTKAQYLQAIQAAHAAGMEVYADVVFDHKGGADGTEWVDAVEVNPSDRNQEISGTYQIQAWTKFDFPGRGNTYSSFKWRWYHFDGVDWDESRKLSRIYKFRGIGKAWDWEVDTENGNYDYLMYADLDMDHPEVVTELKNWGKWYVNTTNIDGFRLDAVKHIKFQFFPDWLSYVRSQTGKPLFTVGEYWSYDINKLHNYITKINGTMSLFDAPLHNKFYTASKSGGAFDMRTLMTNTLMKDRPTLAVTFVDNHDTEPGQALQSWVDPWFKPLAYAFILTRQEGYPCVFYGDYYGIPQYNIPSLKSKIDPLLIARRDYAYGTQHDYLDHSDIIGWTREGVTEKPGSGLAALITDGPGGSKWMYVGKEHAGKVFYDLTGNRSDTVTINSDGWGEFKVNGGSVSVWVPRKTT

SEQ ID NO: 19371 - protein, 486 aa, Geobacillus stearothermophilus
AAPFNGTMMQYFEWYLPDDGTLWTKVANEANNLSSLGITALWLPPAYKGTSRSDVGYGVYDLYDLGEFNQKGTVRTKYGTKAQYLQAIQAAHAAGMQVYADVVFDHKGGADGTEWVDAVEVNPSDRNQEISGTYQIQAWTKFDFPGRGNTYSSFKWRWYHFDGVDWDESRKLSRIYKFRGIGKAWDWEVDTENGNYDYLMYADLDMDHPEVVTELKNWGKWYVNTTNIDGFRLDAVKHIKFQFFPDWLSYVRSQTGKPLFTVGEYWSYDINKLHNYITKINGTMSLFDAPLHNKFYTASKSGGAFDMRTLMTNTLMKDRPTLAVTFVDNHDTEPGQALQSWVDPWFKPLAYAFILTREEGYPCVFYGDYYGIPQYNIPSLKSKIDPLLIARRDYAYGTQHDYLDHSDIIGWTREGVTEKPGSGLAALITDGPGGSKWMYVGKEHAGKVFYDLTGNRSDTVTINSDGWGEFKVNGGSVSVWVPRKTT

SEQ ID NO: 19372 - protein, 486 aa, Geobacillus stearothermophilus
AAPFNGTMMQYFEWYLPDDGTLWTKVANEANNLSSLGITALWLPPAYKGTSRSDVGYGVYDLYDLGEFNQKGTVRTKYGTKAQYLQAIQAAHAAGMEVYADVVFDHKGGADGTEWVDAVEVNPSDRNQEISGTYQIQAWTKFDFPGRGNTYSSFKWRWYHFDGVDWDESRKLSRIYKFRGIGKAWDWEVDTENGNYDYLMYADLDMDHPEVVTELKNWGKWYVNTTNIDGFRLDAVKHIKFQFFPDWLSYVRSQTGKPLFTVGEYWSYDINKLHNYITKTNGTMSLFDAPLHNKFYTASKSGGAFDMRTLMTNTLMKDEPTLAVTFVDNHDTEPGQALQSWVDPWFKPLAYAFILTRREGYPCVFYGDYYGIPQYNIPSLKSKIDPLLIARRDYAYGTQHDYLDHSDIIGWTREGVTEKPGSGLAALITDGPGGSKWMYVGKEHAGKVFYDLTGNRSDTVTINSDGWGEFKVNGGSVSVWVPRKTT

SEQ ID NO: 19373 - protein, 486 aa, Geobacillus stearothermophilus
AAPFNGTMMQYFEWYLPDDGTLWTKVANEANNLSSLGITALWLPPAYKGTSRSDVGYGVYDLYDLGEFNQKGTVRTKYGTKAQYLQAIQAAHAAGMEVYADVVFDHKGGADGTEWVDAVEVNPSDRNQEISGTYQIQAWTKFDFPGRGNTYSSFKWRWYHFDGVDWDESRKLSRIYKFRGIGKAWDWEVDTENGNYDYLMYADLDMDHPEVVTELKNWGKWYVNTTNIDGFRLDAVKHIKFQFFPDWLSYVRSQTGKPLFTVGEYWSYDINKLHNYITKTNGTMSLFDAPLHNKFYTASKSGGAFDMRTLMTNTLMKDRPTLAVTFVDNHDTEPGQALQSWVDPWFKPLAYAFILTRREGYPCVFYGDYYGIPQYNIPSLKSKIDPLLIARRDYAYGTQHDYLDHSDIIGWTREGVTEKPGSGLAALITDGPGGSKWMYVGKEHAGKVFYDLTGNRSDTVTINSDGWGEFKVNGGSVSVWVPRKTT

SEQ ID NO: 19374 - protein, 486 aa, Geobacillus stearothermophilus
AAPFNGTMMQYFEWYLPDDGTLWTKVANEANNLSSLGITALWLPPAYKGTSRSDVGYGVYDLYDLGEFNQKGTVRTKYGTKAQYLQAIQAAHAAGMEVYADVVFDHKGGADGTEWVDAVEVNPSDRNQEISGTYQIQAWTKFDFPGRGNTYSSFKWRWYHFDGVDWDESRKLSRIYKFRGIGKAWDWEVDTENGNYDYLMYADLDMDHPEVVTELKNWGKWYVNTTNIDGFRLDAVKHIKFQFFPDWLSYVRSQTGKPLFTVGEYWSYDINKLHNYITKINGTMSLFDAPLHNKFYTASKSGGAFDMRTLMTNTLMKDEPTLAVTFVDNHDTEPGQALQSWVDPWFKPLAYAFILTRQEGYPCVFYGDYYGIPQYNIPSLKSKIDPLLIARRDYAYGTQHDYLDHSDIIGWTREGVTEKPGSGLAALITDGPGGSKWMYVGKEHAGKVFYDLTGNRSDTVTINSDGWGEFKVNGGSVSVWVPRKTT

SEQ ID NO: 19375 - protein, 486 aa, Geobacillus stearothermophilus
AAPFNGTMMQYFEWYLPDDGTLWTKVANEANNLSSLGITALWLPPAYKGTSRSDVGYGVYDLYDLGEFNQKGTVRTKYGTKAQYLQAIQAAHAAGMEVYADVVFDHKGGADGTEWVDAVEVNPSDRNQEISGTYQIQAWTKFDFPGRGNTYSSFKWRWYHFDGVDWDESRKLSRIYKFRGIGKAWDWEVDTENGNYDYLMYADLDMDHPEVVTELKNWGKWYVNTTNIDGFRLDAVKHIKFQFFPDWLSYVRSQTGKPLFTVGEYWSYDINKLHNYITKTNGTMSLFDAPLHNKFYTASKSGGAFDMRTLMTNTLMKDEPTLAVTFVDNHDTEPGQALQSWVDPWFKPLAYAFILTRREGYPCVFYGDYYGIPQYNIPSLKSKIDPLLIARRDYAYGTQHDYLDHSDIIGWTREGVTEKPGSGLAALITDGPGGSKWMYVGKRHAGKVFYDLTGNRSDTVTINSDGWGEFKVNGGSVSVWVPRKTT

SEQ ID NO: 19376 - protein, 486 aa, Geobacillus stearothermophilus
AAPFNGTMMQYFEWYLPDDGTLWTKVANEANNLSSLGITALWLPPAYKGTSRSDVGYGVYDLYDLGEFNQKGTVRTKYGTKAQYLQAIQAAHAAGMRVYADVVFDHKGGADGTEWVDAVEVNPSDRNQEISGTYQIQAWTKFDFPGRGNTYSSFKWRWYHFDGVDWDESRKLSRIYKFRGIGKAWDWEVDTENGNYDYLMYADLDMDHPEVVTELKNWGKWYVNTTNIDGFRLDAVKHIKFQFFPDWLSYVRSQTGKPLFTVGEYWSYDINKLHNYITKTNGTMSLFDAPLHNKFYTASKSGGAFDMRTLMTNTLMKDEPTLAVTFVDNHDTEPGQALQSWVDPWFKPLAYAFILTRREGYPCVFYGDYYGIPQYNIPSLKSKIDPLLIARRDYAYGTQHDYLDHSDIIGWTREGVTEKPGSGLAALITDGPGGSKWMYVGKEHAGKVFYDLTGNRSDTVTINSDGWGEFKVNGGSVSVWVPRKTT

SEQ ID NO: 19377 - protein, 486 aa, Geobacillus stearothermophilus
AAPFNGTMMQYFEWYLPDDGTLWTKVANEANNLSSLGITALWLPPAYKGTSRSDVGYGVYDLYDLGEFNQKGTVRTKYGTKAQYLQAIQAAHAAGMRVYADVVFDHKGGADGTEWVDAVEVNPSDRNQEISGTYQIQAWTKFDFPGRGNTYSSFKWRWYHFDGVDWDESRKLSRIYKFRGIGKAWDWEVDTENGNYDYLMYADLDMDHPEVVTELKNWGKWYVNTTNIDGFRLDAVKHIKFQFFPDWLSYVRSQTGKPLFTVGEYWSYDINKLHNYITKTNGTMSLFDAPLHNKFYTASKSGGAFDMRTLMTNTLMKDRPTLAVTFVDNHDTEPGQALQSWVDPWFKPLAYAFILTREEGYPCVFYGDYYGIPQYNIPSLKSKIDPLLIARRDYAYGTQHDYLDHSDIIGWTREGVTEKPGSGLAALITDGPGGSKWMYVGKEHAGKVFYDLTGNRSDTVTINSDGWGEFKVNGGSVSVWVPRKTT

SEQ ID NO: 19378 - protein, 486 aa, Geobacillus stearothermophilus
AAPFNGTMMQYFEWYLPDDGTLWTKVANEANNLSSLGITALWLPPAYKGTSRSDVGYGVYDLYDLGEFNQKGTVRTKYGTKAQYLQAIQAAHAAGMRVYADVVFDHKGGADGTEWVDAVEVNPSDRNQEISGTYQIQAWTKFDFPGRGNTYSSFKWRWYHFDGVDWDESRKLSRIYKFRGIGKAWDWEVDTENGNYDYLMYADLDMDHPEVVTELKNWGKWYVNTTNIDGFRLDAVKHIKFQFFPDWLSYVRSQTGKPLFTVGEYWSYDINKLHNYITKTNGTMSLFDAPLHNKFYTASKSGGAFDMRTLMTNTLMKDEPTLAVTFVDNHDTEPGQALQSWVDPWFKPLAYAFILTREEGYPCVFYGDYYGIPQYNIPSLKSKIDPLLIARRDYAYGTQHDYLDHSDIIGWTREGVTEKPGSGLAALITDGPGGSKWMYVGKRHAGKVFYDLTGNRSDTVTINSDGWGEFKVNGGSVSVWVPRKTT

SEQ ID NO: 19379 - protein, 486 aa, Geobacillus stearothermophilus
AAPFNGTMMQYFEWYLPDDGTLWTKVANEANNLSSLGITALWLPPAYKGTSRSDVGYGVYDLYDLGEFNQKGTVRTKYGTKAQYLQAIQAAHAAGMEVYADVVFDHKGGADGTEWVDAVEVNPSDRNQEISGTYQIQAWTKFDFPGRGNTYSSFKWRWYHFDGVDWDESRKLSRIYKFRGIGKAWDWEVDTENGNYDYLMYADLDMDHPEVVTELKNWGKWYVNTTNIDGFRLDAVKHIKFQFFPDWLSYVRSQTGKPLFTVGEYWSYDINKLHNYITKTNGTMSLFDAPLHNKFYTASKSGGAFDMRTLMTNTLMKDRPTLAVTFVDNHDTEPGQALQSWVDPWFKPLAYAFILTREEGYPCVFYGDYYGIPQYNIPSLKSKIDPLLIARRDYAYGTQHDYLDHSDIIGWTREGVTEKPGSGLAALITDGPGGSKWMYVGKRHAGKVFYDLTGNRSDTVTINSDGWGEFKVNGGSVSVWVPRKTT

SEQ ID NO: 19380 - protein, 486 aa, Geobacillus stearothermophilus
AAPFNGTMMQYFEWYLPDDGTLWTKVANEANNLSSLGITALWLPPAYKGTSRSDVGYGVYDLYDLGEFNQKGTVRTKYGTKAQYLQAIQAAHAAGMRVYADVVFDHKGGADGTEWVDAVEVNPSDRNQEISGTYQIQAWTKFDFPGRGNTYSSFKWRWYHFDGVDWDESRKLSRIYKFRGIGKAWDWEVDTENGNYDYLMYADLDMDHPEVVTELKNWGKWYVNTTNIDGFRLDAVKHIKFQFFPDWLSYVRSQTGKPLFTVGEYWSYDINKLHNYITKTNGTMSLFDAPLHNKFYTASKSGGAFDMRTLMTNTLMKDRPTLAVTFVDNHDTEPGQALQSWVDPWFKPLAYAFILTRREGYPCVFYGDYYGIPQYNIPSLKSKIDPLLIARRDYAYGTQHDYLDHSDIIGWTREGVTEKPGSGLAALITDGPGGSKWMYVGKRHAGKVFYDLTGNRSDTVTINSDGWGEFKVNGGSVSVWVPRKTT

SEQ ID NO: 19381 - protein, 486 aa, Geobacillus stearothermophilus
AAPFNGTMMQYFEWYLPDDGTLWTKVANEANNLSSLGITALWLPPAYKGTSRSDVGYGVYDLYDLGEFNQKGTVRTKYGTKAQYLQAIQAAHAAGMEVYADVVFDHKGGADGTEWVDAVEVNPSDRNQEISGTYQIQAWTKFDFPGRGNTYSSFKWRWYHFDGVDWDESRKLSRIYKFRGIGKAWDWEVDTENGNYDYLMYADLDMDHPEVVTELKNWGKWYVNTTNIDGFRLDAVKHIKFQFFPDWLSYVRSQTGKPLFTVGEYWSYDINKLHNYITKTNGTMSLFDAPLHNKFYTASKSGGAFDMRTLMTNTLMKDRPTLAVTFVDNHDTEPGQALQSWVDPWFKPLAYAFILTRREGYPCVFYGDYYGIPQYNIPSLKSKIDPLLIARRDYAYGTQHDYLDHSDIIGWTREGVTEKPGSGLAALITDGPGGSKWMYVGKRHAGKVFYDLTGNRSDTVTINSDGWGEFKVNGGSVSVWVPRKTT

SEQ ID NO: 19382 - protein, 486 aa, Geobacillus stearothermophilus
AAPFNGTMMQYFEWYLPDDGTLWTKVANEANNLSSLGITALWLPPAYKGTSRSDVGYGVYDLYDLGEFNQKGTVRTKYGTKAQYLQAIQAAHAAGMRVYADVVFDHKGGADGTEWVDAVEVNPSDRNQEISGTYQIQAWTKFDFPGRGNTYSSFKWRWYHFDGVDWDESRKLSRIYKFRGIGKAWDWEVDTENGNYDYLMYADLDMDHPEVVTELKNWGKWYVNTTNIDGFRLDAVKHIKFQFFPDWLSYVRSQTGKPLFTVGEYWSYDINKLHNYITKTNGTMSLFDAPLHNKFYTASKSGGAFDMRTLMTNTLMKDRPTLAVTFVDNHDTEPGQALQSWVDPWFKPLAYAFILTREEGYPCVFYGDYYGIPQYNIPSLKSKIDPLLIARRDYAYGTQHDYLDHSDIIGWTREGVTEKPGSGLAALITDGPGGSKWMYVGKRHAGKVFYDLTGNRSDTVTINSDGWGEFKVNGGSVSVWVPRKTT

SEQ ID NO: 19383 - protein, 483 aa, Synthetic construct
VNGTLMQYFEWYTPNDGQHWKRLQNDAEHLSDIGITAVWIPPAYKGLSQSDNGYGPYDLYDLGEFQQKGTVRTKYGTKSELQDAIGSLHSRNVQVYGDVVLDHKGGADGTEWVDAVEVNPSDRNQEISGTYQIQAWTKFDFPGRGNTYSSFKWRWYHFDGVDWDESRKLSRIYKFRGIGKAWDWEVDTENGNYDYLMYADLDYDHPDVVAETKKWGIWYANELSLDGFRIDAAKHIKFSFLRDWVQAVRQATGKEMFTVAEYWQNNAGKLENYLNKTSFNQSVFDVPLHFNLQAASSQGGGYDMRRLLDGTVVSRHPEKAVTFVENHDTQPGQSLESTVQTWFKPLAYAFILTRESGYPQVFYGDMYGTKGTSPKEIPSLKDNIEPILKARKEYAYGPQHDYIDHPDVIGWTREGDSSAAKSGLAALITDGPGGSKRMYAGLKNAGETWYDITGNRSDTVKIGSDGWGEFHVNDGSVSIYVQK

SEQ ID NO: 19384 - protein, 482 aa, Bacillus sp.
HHNGTNGTMMQYFEWHLPNDGNHWNRLRDDASNLRNRGITAIWIPPAWKGTSQNDVGYGAYDLYDLGEFNQKGTVRTKYGTRSQLESAIHALKNNGVQVYGDVVMNHKAGADGTEFVDAVEVDPSNRNQETSGTYQIQAWTKFDFPGRGNTYSSFKWRWYHFDGTDPDESRKLNRIYKFTGKAWDWEVDTINGNYDYLMFADLDMDHPEVVNELRRWGEWYTNTLNLDGFRIDAVKHIKYSFTRDWLTHVRNATGKEMFAVAEFWKNDLGALENYLNKTNWNHSVFDVPLHYNLYNASNSGGNYDMAKLLNGTVVQKHPMNAVTFVDNHDSQPGESLESFVQEWFKPLAYALILTREQGYPSVFYGDYYGIPTHSVPAMKAKIDPILEARQNFAYGTQHDYFDHHNIIGWTREGNTTHPNSGLATIMSDGPGGEKWMYVGQNKAGQVWHDITGNKPGTVTINADGWANFSVNGGSVSIWVKR

SEQ ID NO: 19385 - protein, 482 aa, Bacillus sp.
HHNGTNGTMMQYFEWHLPNDGNHWNRLRDDASNLRNRGITAIWIPPAWKGTSQNDVGYGAYDLYDLGEFNQKGTVRTKYGTRSQLESAIHALKNNGVLVYGDAVMNHKAKADGTEFVDAVEVDPSNRNQETSGTYQIQAWTKFDFPGRGNTYSSFKWRWYHFDGTDWDESRKLNRIYKFTGKAWDWEVDTENGNYDYLMFADLDMDHPEVVNELRRWGEWYTNTLNLDGFRIDAVKHIKYSFTRDWLTHVRNATGKEMFAVAEFWKNDLGALENYLNKTNWNHSVFDVPLHYNLYNASNSGGNYDMAKLLNGTVVQKHPMHAVTFVDNHDSQPGESLESFVQEWFKPLAYALILTREQGYPSVFYGDYYGIPTHSVPAMKAKIDPILEARQNFAYGTQHDYFDHHNIIGWTREGNTTHPNSGLATIMSDGPGGEKWMYVGQNKAGQVWHDITGNKPGTVTINADGWANFSVNGGSVSIWVKR

SEQ ID NO: 19386 - protein, 482 aa, Bacillus sp.
HHNGTNHTMMQYFEWHLPNDGNHWNRLRDDASNLRNRGITAIWIPPAWKGTSQNDVGYGAYDLYDLGEFNQKGTVRTKYGTRSQLESAIHALKNNGVQVYGDVVMNHKAGADGTEFVDAVEVDPSNRNQETSGTYQIQAWTKFDFPGRGNTYSSFKWRWYHFDGTDPDESRKLNRIYKFTGKAWDWEVDTENGNYDYLMFADLDMDHPEVVNELRRWGEWYTNTLNLDGFRIDAVKHIKYSFTRDWLTHVRNATGKEMFAVAEFWKNDLGALENYLNKTNWNHSVFDVPLHYNLYNASNSGGNYDMAKLLNGTVVQKHPMHAVTFVDNHDSQPGESLESFVQEWFKPLAYALILTREQGYPSVFYGDYYGIPTHSVPAMKAKIDPILEARQNFAYGTQHDYFDHHNIIGWTREGNTTHPNSGLATIMSDGPGGEKWMYVGQNKAGQVWHDITRNKPGTVTINADGWANFSVNGGSVSIWVKR

SEQ ID NO: 19387 - protein, 482 aa, Bacillus sp.
HHNGTNHTMMQYFEWHLPNDGNHWNRLRDDASNLRNRGITAIWIPPAWKGTSQNDVGYGAYDLYDLGEFNQKGTVRTKYGTRSQLESAIHALKNNGVLVYGDVVMNHKAKADGTEFVDAVEVDPSNRNQETSGTYQIQAWTKFDFPGRGNTYSSFKWRWYHFDGTDWDESRKLNRIYKFTGKAWDWEVDTENGNYDYLMFADLDMDHPEVVNELRRWGEWYTNTLNLDGFRIDAVKHIKYSFTRDWLTHVRNATGKEMFAVAEFWKNDLGALENYLNKTNWNHSVFDVPLHYNLYNASNSGGNYDMAKLLNGTVVQKHPMHAVTFVDNHDSQPGESLESFVQEWFKPLAYALILTREQGYPSVFYGDYYGIPTHSVPAMKAKIDPILEARQNFAYGTQHDYFDHHNIIGWTREGNTTHPNSGLATIMSDGPGGEKWMYVGQNKAGQVWHDITGNKPGTVTINADGWANFSVNGGSVSIWVKR

SEQ ID NO: 19388 - protein, 482 aa, Synthetic construct
VNGTLMQYFEWYTPNDGQHWKRLQNDAEHLSDIGITAVWIPPAYKGLSQSDNGYGPYDLYDLGEFQQKGTVRTKYGTKSELQDAIGSLHSRNVQVYGDVVLNHKAGADGTEFVDAVEVDPSNRNQETSGTYQIQAWTKFDFPGRGNTYSSFKWRWYHFDGTDWDESRKLNRIYKFSTGKAWDWEVDTENGNYDYLMFADLDYDHPDVVAETKKWGIWYANELSLDGFRIDAAKHIKFSFLRDWVQAVRQATGKEMFTVAEYWQNNAGKLENYLNKTSFNQSVFDVPLHFNLQAASSQGGGYDMRRLLDGTVVSRHPEKAVTFVENHDTQPGQSLESTVQTWFKPLAYAFILTRESGYPQVFYGDMYGTKGTSPKEIPSLKDNIEPILKARKEYAYGPQHDYIDHPDVIGWTREGDSSAAKSGLAALITDGPGGSKRMYAGLKNAGETWYDITGNRSDTVKIGSDGWGEFHVNDGSVSIYVQK

SEQ ID NO: 19389 - protein, 481 aa, Bacillus sp.
HNGTNATMMQYFEWHLPNDGNHWNRLRDDASNLRNRGITAIWIPPAWKGTSQNDVGYGAYDLYDLGEFNQKGTVRTKYGTRSQLESAIHALKNNGVQVYGDVVMNHKAGADATEWVDAVEVNPSNRNQEVSGTYKIQAWTKFDFPGRGNTYSSFKWRWYHFDGTDWDQSRQLNRIYKFTGKAWDWEVDTENGNYDYLMFADLDMDHPEVVNELRRWGEWYTNTLNLDGFRIDAVKHIKFSFTRDWLTHVRNATGKGMFAVAEFWKNDLGALENYLSKTNWNHSVFDVPLHYNLYNASNSRGNYDMAKLLNGTVVQKHPMHAVTFVDNHDSQPGESLESFVQEWFKPLAYALILTREQGYPSVFYGDYYGIPTHSVPAMKAKIDPILAARQNFAYGTQHDYFDHHNIIGWTREGNTTHPNSGLATIMSDGPGGEKWMYVGQNKAGQVWHDITGNKPGTVTINADGWANFSVNKGSVSIWVKR

SEQ ID NO: 19390 - protein, 481 aa, Bacillus sp.
HNGTNATMMQYFEWHLPNDGNHWNRLRDDASNLRNRGITAIWIPPAWKGTSQNDVGYGAYDLYDLGEFNQKGTVRTKYGTRSQLESAIHALKNNGVQVYGDVVMNHKAGADGTEFVDAVEVDPSNRNQETSGTYQIQAWTKFDFPGRGNTYSSFKWRWYHFDGTDWDESRKLNRIYKFTGKAWDWEVDTENGNYDYLMFADLDMDHPEVVNELRRWGEWYTNTLNLDGFRIDAVKHIKFSFTRDWLTHVRNATGKEMFAVAEFWKNDLGALENYLSKTNWNHSVFDVPLHYNLYNASNSGGNYDMAKLLNGTVVQKHPMHAVTFVDNHDSQPGESLESFVQEWFKPLAYALILTREQGYPSVFYGDYYGIPTHSVPAMKAKIDPILEARQNFAYGTQHDYFDHHNIIGWTREGNTTHPNSGLATIMSDGPGGEKWMYVGQNKAGQVWHDITGNKPGTVTINADGWANFSVNGGSVSIWVKR

SEQ ID NO: 19391 - protein, 484 aa, Synthetic construct
AAPFNGTMMQYFEWYLPDDGTLWTKVANEANNLSSLGITALWLPPAYKGTSRSDVGYGVYDLYDLGEFNQKGAVRTKYGTKAQYLQAIQAAHAAGMQVYADVVFNHKGGADATEMVRAVEVNPNNRNQEVSGEYTIEAWTKFDFPGRGNTHSNFKWRWYHFDGVDWDQSRKLNNRIYKFRGDGKGWDWEVDTENGNYDYLMYADIDMDHPEVVTELKNWGKWYVNTTNIDGFRLDAVKHIKFSFFPDWLSYVRSQTGKPLFTVGEYWSYDINKLHNYIMKTNGTMSLFDAPLHNKFYTASKSGGTFDMRTLMTNTLMKDQPTLAVTFVDNHDTEPGQALQSWVDPWFKPLAYAFILTRQEGYPCVFYGDYYGIPQYNIPSLKSKIDPLLIARRDYAYGTQHDYLDHSDIIGWTREGVTEKPGSGLAALITDGPGGSKWMYVGKQHAGKVFYDLTGNRSDTVTINSDGWGEFKVNGGSVSVWVPR

SEQ ID NO: 19392 - protein, 484 aa, Synthetic construct
AAPFNGTMMQYFEWYLPDDGTLWTKVANEANNLSSLGITALWLPPAYKGTSRSDVGYGVYDLYDLGEFNQKGAVRTKYGTKAQYLQAIQAAHAAGMQVYADVVFNHKGGADATENVLAVEVNPNNRNQEISGDYTIEAWTKFDFPGRGNTYSDFKWRWYHFDGVDWDQSRQFQNRIYKFRGDGKAWDWEVDSENGNYDYLMYADVDMDHPEVVTELKNWGKWYVNTTNIDGFRLDAVKHIKFSFFPDWLSYVRSQTGKPLFTVGEYWSYDINKLHNYIMKTNGTMSLFDAPLHNKFYTASKSGGTFDMRTLMTNTLMKDQPTLAVTFVDNHDTEPGQALQSWVDPWFKPLAYAFILTRQEGYPCVFYGDYYGIPQYNIPSLKSKIDPLLIARRDYAYGTQHDYLDHSDIIGWTREGVTEKPGSGLAALITDGPGGSKWMYVGKQHAGKVFYDLTGNRSDTVTINSDGWGEFKVNGGSVSVWVPR

SEQ ID NO: 19393 - protein, 481 aa, Bacillus acidicola
PFNGTMMQYFEWYLPDDGTLWTKVANEANNLSSLGIWALWLPPAYKGTSRSDVGYGVYDLYDLGEFNQKGTVRTKYGTKAQYLQTIQAAHAAGMQVYADVVFDHKGGADGTEWVDAVEVNPSDRNQEISGTYQIQAWTKFDFPGRGNTYSSFKWRWYHFDGVDWDESRKLSRIYKFRGIGKAWDWEVDTENGNYDYLMYADLDMDHPEVVTELKNWGKWYVNTTNIDGFRLDAVKHIKFSSFPDWLSYVRSQTGKPLFTVGEYWSYDINKLHNYITKTNGTMSLFDAPLHSKFYTASKSGGAFDMRTLMTNTLMKDQPTLAVTFVDNHDTEPVQALQSWVDPWFKPLAYAFILTRQEGYPCVFYGDYYGIPQYNIPSLKSKIDPLLIARRDYAYGTQHDYLDHSDIIGWTREGVTEKPGSGLAALITDGPGGSKWMYVGKQHAGKVFYDLTGNRSDTVTINSDGWGEFKVNGGSVSVWVPR

SEQ ID NO: 19394 - protein, 481 aa, Bacillus acidicola
PFNGTMMQYFEWYLPDDGTLWTKVANEANNLSSLGIWALWLPPAYKGTSRSDVGYGVYDLYDLGEFNQKGTVRTKYGTKAQYLQQIQAAHAAGMQVYADVVFDHKGGADGTEWVDAVEVNPSDRNQEISGTYQIQAWTKFDFPGRGNTYSSFKWRWYHFDGVDWDESRKLSRIYKFRGIGKAWDWEVDTEVGNYDYLMYADLDMDHPEVVTELKNWGKWYVNTTNIDGFRLDAVKHIKFSNFPDWLSYVRSQTGKPLFTVGEYWSYDINKLHNYITKTHGTMSLFDAPLHKKFYTASKSGGAFDMRTLMTNTLMKDQPYLAVTFVDNHDTEPGQALQSWVDPWFKPLAYAFILTRQEGYPCVFYGDYYGIPQYNIPSLKSKIDPLLIARRDYAYGTQHDYLDHSDIIGWTREGVTEKPGSGLAALITDGPGGSKWMYVGKQHAGKVFYDLTGNRSDTVTINSDGWGEFKVNGGSVSVWVPR

SEQ ID NO: 19395 - protein, 481 aa, Bacillus acidicola
PFNGTMMQYFEWYLPDDGTLWTKVANEANNLSSLGIKALWLPPAYKGTSRSDVGYGVYDLYDLGEFNQKGTVRTKYGTKAQYLQTIQAAHAAGMQVYADVVFDHKGGADGTEWVDAVEVNPSDRNQEISGTYQIQAWTKFDFPGRGNTYSSFKWRWYHFDGVDWDESRKLSRIYKFRGIGKAWDWEVDTENGNYDYLMYADLDMDHPEVVTELKNWGKWYVNTTNIDGFRLDAVKHIKFSSFPDWLSYVRSQTGKPLFTVGEYWSYDINKLHNYITKTNGTMSLFDAPLHSKFYTASKSGGAFDMRTLMTNTLMKDQPTLAVTFVDNHDTEPVQALQSWVDPWFKPLAYAFILTRQEGYPCVFYGDYYGIPQYNIPSLKSKIDPLLIARRDYAYGTQHDYLDHSDIIGWTREGVTEKPGSGLAALITDGPGGSKWMYVGKQHAGKVFYDLTGNRSDTVTINSDGWGEFKVNGGSVSVWVPR

SEQ ID NO: 19396 - protein, 481 aa, Bacillus acidicola
PFNGTMMQYFEWYLPDDGTLWTKVANEANNLSSLGITALWLPPAYKGTSRSDVGYGVYDLYDLGEFNQKGTVRTKYGTKAQYLQTIQAAHAAGMQVYADVVFDHKGGADGTEWVDAVEVNPSDRNQEISGTYQIQAWTKFDFPGRGNTYSSFKWRWYHFDGVDWDESRKLSRIYKFRGIGKAWDWEVDTENGNYDYLMYADLDMDHPEVVTELKNWGKWYVNTTNIDGFRLDAVKHIKFSSFPDWLSYVRSQTGKPLFTVGEYWSYDINKLHNYITKTNGTMSLFDAPLHSKFYTASKSGGAFDMRTLMTNTLMKDQPHLAVTFVDNHDTEPVQALQSWVDPWFKPLAYAFILTRQEGYPCVFYGDYYGIPQYNIPSLKSKIDPLLIARRDYAYGTQHDYLDHSDIIGWTREGVTEKPGSGLAALITDGPGGSKWMYVGKQHAGKVFYDLTGNRSDTVTINSDGWGEFKVNGGSVSVWVPR

SEQ ID NO: 19397 - protein, 481 aa, Bacillus acidicola
PFNGTMMQYFEWYLPDDGTLWTKVANEANNLSSLGITALWLPPAYKGTSRSDVGYGVYDLYDLGEFNQKGTVRTKYGTKAQYLQTIQAAHAAGMQVYADVVFDHKGGADGTEWVDAVEVNPSDRNQEISGTYQIQAWTKFDFPGRGNTYSSFKWRWYHFDGVDWDESRKLSRIYKFRGIGKAWDWEVDTENGNYDYLMYADLDMDHPEVVTELKNWGKWYVNTTNIDGFRLDAVKHIKFSSFPDWLSYVRSQTGKPLFTVGEYWSYDINKLHNYITKTNGTMSLFDAPLHSKFYTASKSGGAFDMRTLMTNTLMKDQPGLAVTFVDNHDTEPVQALQSWVDPWFKPLAYAFILTRQEGYPCVFYGDYYGIPQYNIPSLKSKIDPLLIARRDYAYGTQHDYLDHSDIIGWTREGVTEKPGSGLAALITDGPGGSKWMYVGKQHAGKVFYDLTGNRSDTVTINSDGWGEFKVNGGSVSVWVPR

SEQ ID NO: 19398 - protein, 481 aa, Bacillus acidicola
PFNGTMMQYFEWYLPDDGTLWTKVANEANNLSSLGINALWLPPAYKGTSRSDVGYGVYDLYDLGEFNQKGTVRTKYGTKAQYLQTIQAAHAAGMQVYADVVFDHKGGADGTEWVDAVEVNPSDRNQEISGTYQIQAWTKFDFPGRGNTYSSFKWRWYHFDGVDWDESRKLSRIYKFRGIGKAWDWEVDTENGNYDYLMYADLDMDHPEVVTELKNWGKWYVNTTNIDGFRLDAVKHIKFSSFPDWLSYVRSQTGKPLFTVGEYWSYDINKLHNYITKTNGTMSLFDAPLHSKFYTASKSGGAFDMRTLMTNTLMKDQPTLAVTFVDNHDTEPVQALQSWVDPWFKPLAYAFILTRQEGYPCVFYGDYYGIPQYNIPSLKSKIDPLLIARRDYAYGTQHDYLDHSDIIGWTREGVTEKPGSGLAALITDGPGGSKWMYVGKQHAGKVFYDLTGNRSDTVTINSDGWGEFKVNGGSVSVWVPR

SEQ ID NO: 19399 - protein, 481 aa, Bacillus acidicola
PFNGTMMQYFEWYLPDDGTLWTKVANEANNLSSLGITALWLPPAYKGTSRSDVGYGVYDLYDLGEFNQKGTVRTKYGTKAQYLQTIQAAHAAGMQVYADVVFDHKGGADGTEWVDAVEVNPSDRNQEISGTYQIQAWTKFDFPGRGNTYSSFKWRWYHFDGVDWDESRKLSRIYKFRGIGKAWDWEVDTENGNYDYLMYADLDMDHPEVVTELKNWGKWYVNTTNIDGFRLDAVKHIKFSSFPDWLSYVRSQTGKPLFTVGEYWSYDINKLHNYITKTNGTMSLFDAPLHSKFYTASKSGGAFDMRTLMTNTLMKDQPYLAVTFVDNHDTEPVQALQSWVDPWFKPLAYAFILTRQEGYPCVFYGDYYGIPQYNIPSLKSKIDPLLIARRDYAYGTQHDYLDHSDIIGWTREGVTEKPGSGLAALITDGPGGSKWMYVGKQHAGKVFYDLTGNRSDTVTINSDGWGEFKVNGGSVSVWVPR

SEQ ID NO: 19400 - protein, 481 aa, Bacillus acidicola
PFNGTMMQYFEWYLPDDGTLWTKVANEANNLSSLGILALWLPPAYKGTSRSDVGYGVYDLYDLGEFNQKGTVRTKYGTKAQYLQTIQAAHAAGMQVYADVVFDHKGGADGTEWVDAVEVNPSDRNQEISGTYQIQAWTKFDFPGRGNTYSSFKWRWYHFDGVDWDESRKLSRIYKFRGIGKAWDWEVDTENGNYDYLMYADLDMDHPEVVTELKNWGKWYVNTTNIDGFRLDAVKHIKFSSFPDWLSYVRSQTGKPLFTVGEYWSYDINKLHNYITKTNGTMSLFDAPLHSKFYTASKSGGAFDMRTLMTNTLMKDQPTLAVTFVDNHDTEPVQALQSWVDPWFKPLAYAFILTRQEGYPCVFYGDYYGIPQYNIPSLKSKIDPLLIARRDYAYGTQHDYLDHSDIIGWTREGVTEKPGSGLAALITDGPGGSKWMYVGKQHAGKVFYDLTGNRSDTVTINSDGWGEFKVNGGSVSVWVPR

SEQ ID NO: 19401 - protein, 481 aa, Bacillus acidicola
PFNGTMMQYFEWYLPDDGTLWTKVANEANNLSSLGIPALWLPPAYKGTSRSDVGYGVYDLYDLGEFNQKGTVRTKYGTKAQYLQTIQAAHAAGMQVYADVVFDHKGGADGTEWVDAVEVNPSDRNQEISGTYQIQAWTKFDFPGRGNTYSSFKWRWYHFDGVDWDESRKLSRIYKFRGIGKAWDWEVDTENGNYDYLMYADLDMDHPEVVTELKNWGKWYVNTTNIDGFRLDAVKHIKFSSFPDWLSYVRSQTGKPLFTVGEYWSYDINKLHNYITKTNGTMSLFDAPLHSKFYTASKSGGAFDMRTLMTNTLMKDQPTLAVTFVDNHDTEPVQALQSWVDPWFKPLAYAFILTRQEGYPCVFYGDYYGIPQYNIPSLKSKIDPLLIARRDYAYGTQHDYLDHSDIIGWTREGVTEKPGSGLAALITDGPGGSKWMYVGKQHAGKVFYDLTGNRSDTVTINSDGWGEFKVNGGSVSVWVPR

SEQ ID NO: 19402 - protein, 481 aa, Bacillus acidicola
PFNGTMMQYFEWYLPDDGTLWTKVANEANNLSSLGITALWLPPAYKGTSRSDVGYGVYDLYDLGEFNQKGTVRTKYGTKAQYLQTIQAAHAAGMQVYADVVFDHKGGADGTEWVDAVEVNPSDRNQEISGTYQIQAWTKFDFPGRGNTYSSFKWRWYHFDGVDWDESRKLSRIYKFRGIGKAWDWEVDTENGNYDYLMYADLDMDHPEVVTELKNWGKWYVNTTNIDGFRLDAVKHIKFSSFPDWLSYVRSQTGKPLFTVGEYWSYDINKLHNYITKTNGTMSLFDAPLHSKFYTASKSGGAFDMRTLMTNTLMKDQPELAVTFVDNHDTEPVQALQSWVDPWFKPLAYAFILTRQEGYPCVFYGDYYGIPQYNIPSLKSKIDPLLIARRDYAYGTQHDYLDHSDIIGWTREGVTEKPGSGLAALITDGPGGSKWMYVGKQHAGKVFYDLTGNRSDTVTINSDGWGEFKVNGGSVSVWVPR

SEQ ID NO: 19403 - protein, 481 aa, Bacillus acidicola
PFNGTMMQYFEWYLPDDGTLWTKVANEANNLSSLGITALWLPPAYKGTSRSDVGYGVYDLYDLGEFNQKGTVRTKYGTKAQYLQTIQAAHAAGMQVYADVVFDHKGGADGTEWVDAVEVNPSDRNQEISGTYQIQAWTKFDFPGRGNTYSSFKWRWYHFDGVDWDESRKLSRIYKFRGIGKAWDWEVDTENGNYDYLMYADLDMDHPEVVTELKNWGKWYVNTTNIDGFRLDAVKHIKFSSFPDWLSYVRSQTGKPLFTVGEYWSYDINKLHNYITKTNGTMSLFDAPLHSKFYTASKSGGAFDMRTLMTNTLMKDQPCLAVTFVDNHDTEPVQALQSWVDPWFKPLAYAFILTRQEGYPCVFYGDYYGIPQYNIPSLKSKIDPLLIARRDYAYGTQHDYLDHSDIIGWTREGVTEKPGSGLAALITDGPGGSKWMYVGKQHAGKVFYDLTGNRSDTVTINSDGWGEFKVNGGSVSVWVPR

SEQ ID NO: 19404 - protein, 496 aa, Synthetic construct
AKAAAPFNGTMMQYFEWYLPDDGTLWTKVANEANNLSSLGITALWLPPAYKGTSRSDVGYGVYDLYDLGEFNQKGTVRTKYGTKAQYLQAIQAAHAAGMQVYADVVFDHKGGADGTEWVDAVEVNPSDRNQEISGTYQIQAWTKFDFNGRGNTYSSFKWRWYHFDGVDWDESRKLSRIYKFRGIGKAWDWEVDTENGNYDYLMYADLDMDHPEVVTELKNWGKWYVNTTNIDGFRLDAVKHIKFSFFPDWLSYVRSQTGKPLFTVGEYWSYDINKLHNYITKTNGTMSLFDAPLHNKFYTASKSGGAFDMSTLMNNTLMKDQPTLAVTFVDNHDTEPGQALQSWVDPWFKPLAYAFILTRQEGYPCVFYGDYYGIPQYNIPSLKSKIDPLLIARRDYAYGTQHDYLDHSDIIGWTREGVTEKPGSGLAALITDGPGGSKWMYVGKQHAGKVFYDLTGNRSDTVTINSDGWGEFKVNGGSVSVWVPRKTTVSTIAWP

SEQ ID NO: 19405 - protein, 493 aa, Geobacillus stearothermophilus
AAPFNGTMMQYFEWYLPDDGTLWTKVANEANNLSSLGITALWLPPAYKGTSRSDVGYGVYDLYDLGEFNQKGTVRTKYGTKAQYLQAIQAAHAAGMQVYADVVFNHKGGADGTEWVDAVEVNPSDRNQEISGTYQIQAWTKFDFPGRGNTYSSFKWRWYHFNGVDWDESRKLSRIYKFRGIGKKWNEEVDTENGNYDYLMYANLDYNHPEVVTELKNWGKWYVNTTNIDGFRLDAVKHIKFSFFPDWLSYVRSQTGKPLFTVGEYWSYDINKLHNYITKTDGTMSLFDAPLHNKFYTASKSGGAFDMRTLMTNTLMKDQPTLAVTFVDNHDTEPGQALQSWVDPWFKPLAYAFILTRQEGYPCVFYGDYYGIPQYNIPSLKSKIDPLLIARRDYAYGTQHDYLDHSDIIGWTREGGTEKPGSGLAALITDGPGGSKWMYVGKQHAGKVFYDLTGNRSDTVTINSDGWGEFKVNGGSVSVWVPRKTTVSTIARP

SEQ ID NO: 19406 - protein, 493 aa, Geobacillus stearothermophilus
AAPFNGTMMQYFEWYLPDDGTLWTKVADEANNLSSLGITALWLPPAYKGTSRSDVGYGVYDLYDLGEFNQKGTVRTKYGTKAQYLQAIQAAHAAGMRVYADVVFDHKGGADGTEWVDAVEVNPSDRNQEISGTYQIQAWTKFDFPGRGNTYSSFKWRWYHFDGVDWDESRKLSRIYKFRGIGKAWDWEVDTENGNYDYLMYADLDMDHPEVVTELKNWGKWYVNTTNIDGFRLDAVKHIKFSFFPDWLSYVRSQTGKPLFTVGEYWSYDINKLHNYITKTNGTMSLFDAPLHNKFYTASKSGGAFDMRTLMTNTLMKDRPTLAVTFVDNHDTEPGQALQSWVDPWFKPLAYAFILTREEGYPCVFYGDYYGIPQYNIPSLKSKIDPLLIARRDYAYGTQHDYLDHSDIIGWTREGVTEKPGSGLAALITDGPGGSKWMYVGKEHAGKVFYDLTGNRSDTVTINSDGWGEFKVNGGSVSVWVPRKTTVSTIARP

SEQ ID NO: 19407 - protein, 489 aa, Geobacillus stearothermophilus
AAPFNGTMMQYFEWYLPDDGTLWTKVANEANNLSSLGITALWLPPAYKGTSRSDVGYGVYDLYDLGEFNQKGAVRTKYGTKAQYLQAIQAAHAAGMQVYADVVFDHKGGADGTEWVDAVEVNPSDRNQEISGTYQIQAWTKFDFPGRGNTYSSFKWRWYHFDGVDWDESRKLSRIYKFRGKAWDWEVDTENGNYDYLMYADLDMDHPEVVTELKSWGKWYVNTTNIDGFRLDAVKHIKFSFFPDWLSDVRSQTGKPLFTVGEYWSYDINKLHNYIMKTNGTMSLFDAPLHNKFYTASKSGGTFDMRTLMTNTLMKDQPTLAVTFVDNHDTEPGQALQSWVDPWFKPLAYAFILTRQEGYPCVFYGDYYGIPQYNIPSLKSKIDPLLIARRDYAYGTQHDYLDHSDIIGWTREGVTEKPGSGLAALITDGPGGSKWMYVGKQHAGKVFYDLTGNRSDTVTINSDGWGEFKVNGGSVSVWVPRKTTVSTIA

SEQ ID NO: 19408 - protein, 491 aa, Geobacillus stearothermophilus
AAPFNGTMMQYFEWYLPDDGTLWTKVANEANNLSSLGITALWLPPAYKGTSRSDVGYGVYDLYDLGEFNQKGAVRTKYGTKAQYLQAIQAAHAAGMQVYADVVFDHKGGADGTEWVDAVEVNPSDRNQEISGTYQIQAWTKFDFPGRGNTYSSFKWRWYHFDGVDWDESRKLSRIYKFRGIGKAWDWEVDTENGNYDYLMYADLDMDHPEVVTELKSWGKWYVNTTNIDGFRLDAVKHIKFSFFPDWLSDVRSQTGKPLFTVGEYWSYDINKLHNYIMKTNGTMSLFDAPLHNKFYTASKSGGTFDMRTLMTNTLMKDQPTLAVTFVDNHDTEPGQALQSWVDPWFKPLAYAFILTRQEGYPCVFYGDYYGIPQYNIPSLKSKIDPLLIARRDYAYGTQHDYLDHSDIIGWTREGVTEKPGSGLAALITDGPGGSKWMYVGKQHAGKVFYDLTGNRSDTVTINSDGWGEFKVNGGSVSVWVPRKTTVSTIA

SEQ ID NO: 19409 - protein, 341 aa, Archaea
WTDFSKVASGKYTANYLDFDGVDWDESRKLSRIYKFRGIGKAWDWEVDTENGNYDYLMYADLDMDHPEVVTELKNWGKWYVNTTNIDGFRLDAVKHIKFSFFPDWLSYVRSQTGKPLFTVGEYWSYDINKLHNYITKTNGTMSLFDAPLHNKFYTASKSGGAFDMRTLMTNTLMKDQPTLAVTFVDNHDTEPGQALQSWVDPWFKPLAYAFILTRQEGYPCVFYGDYYGIPQYNIPSLKSKIDPLLIARRDYAYGTQHDYLDHSDIIGWTREGVTEKPGSGLAALITDGPGGSKWMYVGKQHAGKVFYDLTGNRSDTVTINSDGWGEFKVNGGSVSVWVPR

SEQ ID NO: 19410 - protein, 486 aa, Geobacillus stearothermophilus
AAPFNGTMMQYFEWYLPDDGTLWTKVANEANNLSSLGITALWLPPAYKGTSRSDVGYGVYDLYDLGEFNQKGTVRTKYGTKAQYLQAIQAAHAAGMEVYADVVFDHKGGADGTEWVDAVEVNPSDRNQEISGTYQIQAWTKFDFPGRGNTYSSFKWRWYHFDGVDWDESRKLSRIYKFRGIGKAWDWEVDTENGNYDYLMYADLDMDHPEVVTELKNWGKWYVNTTNIDGFRLDAVKHIKFQFFPDWLSYVRSQTGKPLFTVGEYWSYDINKLHNYITKINGTMSLFDAPLHNKFYTASKSGGAFDMRTLMTNTLMKDRPTLAVTFVDNHDTEPGQALQSWVDPWFKPLAYAFILTREEGYPCVFYGDYYGIPQYNIPSLKSKIDPLLIARRDYAYGTQHDYLDHSDIIGWTREGVTEKPGSGLAALITDGPGGSKWMYVGKRHAGKVFYDLTGNRSDTVTINSDGWGEFKVNGGSVSVWVPRKTT

SEQ ID NO: 19411 - protein, 486 aa, Geobacillus stearothermophilus
AAPFNGTMMQYFEWYLPDDGTLWTKVANEANNLSSLGITALWLPPAYKGTSRSDVGYGVYDLYDLGEFNQKGTVRTKYGTKAQYLQAIQAAHAAGMEVYADVVFDHKGGADGTEWVDAVEVNPSDRNQEISGTYQIQAWTKFDFPGRGNTYSSFKWRWYHFDGVDWDESRKLSRIYKFRGIGKAWDWEVDTENGNYDYLMYADLDMDHPEVVTELKNWGKWYVNTTNIDGFRLDAVKHIKFQFFPDWLSYVRSQTGKPLFTVGEYWSYDINKLHNYITKINGTMSLFDAPLHNKFYTASKSGGAFDMRTLMTNTLMKDEPTLAVTFVDNHDTEPGQALQSWVDPWFKPLAYAFILTREEGYPCVFYGDYYGIPQYNIPSLKSKIDPLLIARRDYAYGTQHDYLDHSDIIGWTREGVTEKPGSGLAALITDGPGGSKWMYVGKRHAGKVFYDLTGNRSDTVTINSDGWGEFKVNGGSVSVWVPRKTT

SEQ ID NO: 19412 - protein, 486 aa, Geobacillus stearothermophilus
AAPFNGTMMQYFEWYLPDDGTLWTKVANEANNLSSLGITALWLPPAYKGTSRSDVGYGVYDLYDLGEFNQKGTVRTKYGTKAQYLQAIQAAHAAGMEVYADVVFDHKGGADGTEWVDAVEVNPSDRNQEISGTYQIQAWTKFDFPGRGNTYSSFKWRWYHFDGVDWDESRKLSRIYKFRGIGKAWDWEVDTENGNYDYLMYADLDMDHPEVVTELKNWGKWYVNTTNIDGFRLDAVKHIKFQFFPDWLSYVRSQTGKPLFTVGEYWSYDINKLHNYITKINGTMSLFDAPLHNKFYTASKSGGAFDMRTLMTNTLMKDRPTLAVTFVDNHDTEPGQALQSWVDPWFKPLAYAFILTREEGYPCVFYGDYYGIPQYNIPSLKSKIDPLLIARRDYAYGTQHDYLDHSDIIGWTREGVTEKPGSGLAALITDGPGGSKWMYVGKEHAGKVFYDLTGNRSDTVTINSDGWGEFKVNGGSVSVWVPRKTT

SEQ ID NO: 19413 - protein, 486 aa, Geobacillus stearothermophilus
AAPFNGTMMQYFEWYLPDDGTLWTKVANEANNLSSLGITALWLPPAYKGTSRSDVGYGVYDLYDLGEFNQKGTVRTKYGTKAQYLQAIQAAHAAGMEVYADVVFDHKGGADGTEWVDAVEVNPSDRNQEISGTYQIQAWTKFDFPGRGNTYSSFKWRWYHFDGVDWDESRKLSRIYKFRGIGKAWDWEVDTENGNYDYLMYADLDMDHPEVVTELKNWGKWYVNTTNIDGFRLDAVKHIKFQFFPDWLSYVRSQTGKPLFTVGEYWSYDINKLHNYITKINGTMSLFDAPLHNKFYTASKSGGAFDMRTLMTNTLMKDEPTLAVTFVDNHDTEPGQALQSWVDPWFKPLAYAFILTRREGYPCVFYGDYYGIPQYNIPSLKSKIDPLLIARRDYAYGTQHDYLDHSDIIGWTREGVTEKPGSGLAALITDGPGGSKWMYVGKEHAGKVFYDLTGNRSDTVTINSDGWGEFKVNGGSVSVWVPRKTT

SEQ ID NO: 19414 - protein, 486 aa, Geobacillus stearothermophilus
AAPFNGTMMQYFEWYLPDDGTLWTKVANEANNLSSLGITALWLPPAYKGTSRSDVGYGVYDLYDLGEFNQKGTVRTKYGTKAQYLQAIQAAHAAGMEVYADVVFDHKGGADGTEWVDAVEVNPSDRNQEISGTYQIQAWTKFDFPGRGNTYSSFKWRWYHFDGVDWDESRKLSRIYKFRGIGKAWDWEVDTENGNYDYLMYADLDMDHPEVVTELKNWGKWYVNTTNIDGFRLDAVKHIKFQFFPDWLSYVRSQTGKPLFTVGEYWSYDINKLHNYITKINGTMSLFDAPLHNKFYTASKSGGAFDMRTLMTNTLMKDEPTLAVTFVDNHDTEPGQALQSWVDPWFKPLAYAFILTREEGYPCVFYGDYYGIPQYNIPSLKSKIDPLLIARRDYAYGTQHDYLDHSDIIGWTREGVTEKPGSGLAALITDGPGGSKWMYVGKEHAGKVFYDLTGNRSDTVTINSDGWGEFKVNGGSVSVWVPRKTT

SEQ ID NO: 19415 - protein, 483 aa, Synthetic construct
VNGTLMQYFEWYTPNDGQHWKRLQNDAEHLSDIGITAVWIPPAYKGLSQSDNGYGPYDLYDLGEFQQKGTVRTKYGTKSELQDAIGSLHSRNVQVYGDVVLNHKAGADATEWVDAVEVNPSNRNQEVSGTYKIQAWTKFDFPGRGNTYSSFKWRWYHFDGTDWDQSRQLNRIYKFRGTGKAWDWEVDTENGNYDYLMFADLDYDHPDVVAETKKWGIWYANELSLDGFRIDAAKHIKFSFLRDWVQAVRQATGKEMFTVAEYWQNNAGKLENYLNKTSFNQSVFDVPLHFNLQAASSQGGGYDMRRLLDGTVVSRHPEKAVTFVENHDTQPGQSLESTVQTWFKPLAYAFILTRESGYPQVFYGDMYGTKGTSPKEIPSLKDNIEPILKARKEYAYGPQHDYIDHPDVIGWTREGDSSAAKSGLAALITDGPGGSKRMYAGLKNAGETWYDITGNRSDTVKIGSDGWGEFHVNDGSVSIYVQK

SEQ ID NO: 19416 - protein, 484 aa, Synthetic construct
VNGTLMQYFEWYTPNDGQHWKRLQNDAEHLSDIGITAVWIPPAYKGLSQSDNGYGPYDLYDLGEFQQKGTVRTKYGTKSELQDAIGSLHSRNVQVYGDVVLNHKGGADATEMVRAVEVNPNNRNQEVSGEYTIEAWTKFDFPGRGNTHSNFKWRWYHFDGVDWDQSRKLNNRIYKFRGDGKGWDWEVDTENGNYDYLMYADIDYDHPDVVAETKKWGIWYANELSLDGFRIDAAKHIKFSFLRDWVQAVRQATGKEMFTVAEYWQNNAGKLENYLNKTSFNQSVFDVPLHFNLQAASSQGGGYDMRRLLDGTVVSRHPEKAVTFVENHDTQPGQSLESTVQTWFKPLAYAFILTRESGYPQVFYGDMYGTKGTSPKEIPSLKDNIEPILKARKEYAYGPQHDYIDHPDVIGWTREGDSSAAKSGLAALITDGPGGSKRMYAGLKNAGETWYDITGNRSDTVKIGSDGWGEFHVNDGSVSIYVQK

SEQ ID NO: 19417 - protein, 482 aa, Bacillus sp.
HHNGTNGTMMQYFEWHLPNDGNHWNRLRDDASNLRNRGITAIWIPPAWKGTSQNDVGYGVYDLYDLGEFNQKGTVRTKYGTRSQLESAIHALKNNGVLVYGDVVMNHKAKADGTEFVDAVEVDPSNRNQETSGTYQIQAWTKFDFPGRGNTYSSFKWRWYHFDGTDWDESRKLNRIYKFTGKAWDWEVDTENGNYDYLMFADLDMDHPEVVNELRRWGEWYTNTLNLDGFRIDAVKHIKYSFTRDWLTHVRNATGKEMFAVAEFWKNDLGALENYLNKTNWNHSVFDVPLHYNLYNASNSGGNYDMAKLLNGTVVQKHPMHAVTFVDNHDSQPGESLESFVQEWFKPLAYALILTREQGYPSVFYGDYYGIPTHSVPAMKDKIDPILEARQNFAYGTQHDYFDHHNIIGWTREGNTTHPNSGLATIMSDGPGGEKWMYVGQNKAGQVWHDITGNKPGTVTINADGWANFSVNGGSVSIWVKR

SEQ ID NO: 19418 - protein, 481 aa, Bacillus sp.
HNGTNATMMQYFEWHLPNDGNHWNRLRDDASNLRNRGITAIWIPPAWKGTSQNDVGYGAYDLYDLGEFNQKGTVRTKYGTRSQLESAIHALKNNGVQVYGDVVMNHKAGADGTELVDAVEVNPSDRNQEISGTYQIQAWTKFDFPGRGNTYSSFKWRWYHFDGTDWDESRKLNRIYKFRGKAWDWEVDTENGNYDYLMYADLDMDHPEVVNELRRWGEWYTNTLNLDGFRIDAVKHIKFSFTRDWLTHVRNATGKGMFAVAEFWKNDLGALENYLSKTNWNHSVFDVPLHYNLYNASNSRGNYDMAKLLNGTVVQKHPMHAVTFVDNHDSQPGESLESFVQEWFKPLAYALILTREQGYPSVFYGDYYGIPTHSVPAMKAKIDPILAARQNFAYGTQHDYFDHHNIIGWTREGNTTHPNSGLATIMSDGPGGEKWMYVGQNKAGQVWHDITGNKPGTVTINADGWANFSVNKGSVSIWVKR

SEQ ID NO: 19419 - protein, 481 aa, Bacillus sp.
HNGTNATMMQYFEWHLPNDGNHWNRLRDDASNLRNRGITAIWIPPAWKGTSQNDVGYGAYDLYDLGEFNQKGTVRTKYGTRSQLESAIHALKNNGVQVYGDVVMNHKAGADGTEFVDAVEVDPSNRNQETSGTYQIQAWTKFDFPGRGNTYSSFKWRWYHFDGTDWDESRKLNRIYKFTGKAWDWEVDTENGNYDYLMFADLDMDHPEVVNELRRWGEWYTNTLNLDGFRIDAVKHIKFSFTRDWLTHVRNATGKEMFAVAEFWKNDLGALENYLSKTNWNHSVFDVPLHYNLYNASNSRGNYDMAKLLNGTVVQKHPMHAVTFVDNHDSQPGESLESFVQEWFKPLAYALILTREQGYPSVFYGDYYGIPTHSVPAMKAKIDPILEARQNFAYGTQHDYFDHHNIIGWTREGNTTHPNSGLATIMSDGPGGEKWMYVGQNKAGQVWHDITGNKPGTVTINADGWANFSVNGGSVSIWVKR

SEQ ID NO: 19420 - protein, 481 aa, Geobacillus stearothermophilus
AAPFNPTMMQYFEWYLPDDGTLWTKVANEANNLSSLGINALWLPPAYKGTSRSDVGYGVYDLYDLGEFNQKGTVRTKYGTKAQYLQAIQAAHAAGMQVYADVVFDHKGGADGTEWVDAVEVNPSDRNQEISGTYQIQAWTKFDFPGRGNTYSSFKWRWDHFDGVDWDESRKLSRIYKFRGKAWDWEVDTEFGNYDYLMYADLDMDHPEVVTELKNWGKWYVNTTNIDGFRLDAVKHIKFQFFPDWLSYVRSQTGKPLFTVGEYWSYDINKLHNYITKTDGTMSLFDAPLHNKFYTASKSGGAFDMRTLMTNTLMKDQPHLAVTFVDNHDTEPGQALQSWVDPWFKPLAYAFILTRQEGYPCVFYGDYYGIPQYNIPSLKSKIDPLLIARRDYAYGTQHDYLDHSDIIGWTREGVTEKPGSGLAALITDGPGGSKWMYVGKQHAGKVFYDLTGNRSDTVTINSDGWGEFKVNGGSVSIYVQR

SEQ ID NO: 19421 - protein, 484 aa, Synthetic construct
AAPFNGTMMQYFEWYLPDDGTLWTKVANEANNLSSLGITALWLPPAYKGTSRSDVGYGVYDLYDLGEFNQKGAVRTKYGTKAQYLQAIQAAHAAGMQVYADVVFNHKGGADFTERVQAVEVNPQNRNQEVSGTYQIEAWTGFNFPGRGNQHSSFKWRWYHFDGTDWDQSRQLANRIYKFRGDGKAWDWEVDTENGNYDYLMYADVDMDHPEVVTELKNWGKWYVNTTNIDGFRLDAVKHIKFSFFPDWLSYVRSQTGKPLFTVGEYWSYDINKLHNYIMKTNGTMSLFDAPLHNKFYTASKSGGTFDMRTLMTNTLMKDQPTLAVTFVDNHDTEPGQALQSWVDPWFKPLAYAFILTRQEGYPCVFYGDYYGIPQYNIPSLKSKIDPLLIARRDYAYGTQHDYLDHSDIIGWTREGVTEKPGSGLAALITDGPGGSKWMYVGKQHAGKVFYDLTGNRSDTVTINSDGWGEFKVNGGSVSVWVPR

SEQ ID NO: 19422 - protein, 484 aa, Synthetic construct
AAPFNGTMMQYFEWYLPDDGTLWTKVANEANNLSSLGITALWLPPAYKGTSRSDVGYGVYDLYDLGEFNQKGAVRTKYGTKAQYLQAIQAAHAAGMQVYADVVFNHKGGADATEMVRAVEVNPNNRNQEVTGEYTIEAWTRFDFPGRGNTHSSFKWRWYHFDGVDWDQSRRLNNRIYKFRGHGKAWDWEVDTENGNYDYLMYADIDMDHPEVVTELKNWGKWYVNTTNIDGFRLDAVKHIKFSFFPDWLSYVRSQTGKPLFTVGEYWSYDINKLHNYIMKTNGTMSLFDAPLHNKFYTASKSGGTFDMRTLMTNTLMKDQPTLAVTFVDNHDTEPGQALQSWVDPWFKPLAYAFILTRQEGYPCVFYGDYYGIPQYNIPSLKSKIDPLLIARRDYAYGTQHDYLDHSDIIGWTREGVTEKPGSGLAALITDGPGGSKWMYVGKQHAGKVFYDLTGNRSDTVTINSDGWGEFKVNGGSVSVWVPR

SEQ ID NO: 19423 - protein, 479 aa, Bacillus sp.
HNGTNATMMQYFEWHLPNDGNHWNRLRDDASNLRNRGITAIWIPPAWKGTSQNDVGYGAYDLYDLGEFNQKGTVRTKYGTRSQLESAIHALKNNGVQVYGDVVMDHKGGADGTEWVDAVEVNPSDRNQESGTYQIQAWTKFDFPGRGNTYSSFKWRWYHFDGVDWDESRKLSRIYKFGKAWDWEVDTENGNYDYLMYADLDMDHPEVVNELRRWGEWYTNTLNLDGFRIDAVKHIKFSFTRDWLTHVRNATGKGMFAVAEFWKNDLGALENYLSKTNWNHSVFDVPLHYNLYNASNSRGNYDMAKLLNGTVVQKHPMHAVTFVDNHDSQPGESLESFVQEWFKPLAYALILTREQGYPSVFYGDYYGIPTHSVPAMKAKIDPILAARQNFAYGTQHDYFDHHNIIGWTREGNTTHPNSGLATIMSDGPGGEKWMYVGQNKAGQVWHDITGNKPGTVTINADGWANFSVNKGSVSIWVKR

SEQ ID NO: 19424 - protein, 481 aa, Bacillus acidicola
PFNGTMMQYFEWYLPDDGTLWTKVANEANNLSSLGIKALWLPPAYKGTSRSDVGYGVYDLYDLGEFNQKGTVRTKYGTKAQYLQEIQAAHAAGMQVYADVVFDHKGGADGTEWVDAVEVNPSDRNQEISGTYQIQAWTKFDFPGRGNTYSSFKWRWYHFDGVDWDESRKLSRIYKFRGIGKAWDWEVDTEIGNYDYLMYADLDMDHPEVVTELKNWGKWYVNTTNIDGFRLDAVKHIKFSNFPDWLSYVRSQTGKPLFTVGEYWSYDINKLHNYITKTVGTMSLFDAPLHWKFYTASKSGGAFDMRTLMTNTLMKDQPYLAVTFVDNHDTEPPQALQSWVDPWFKPLAYAFILTRQEGYPCVFYGDYYGIPQYNIPSLKSKIDPLLIARRDYAYGTQHDYLDHSDIIGWTREGVTEKPGSGLAALITDGPGGSKWMYVGKQHAGKVFYDLTGNRSDTVTINSDGWGEFKVNGGSVSVWVPR

SEQ ID NO: 19425 - protein, 481 aa, Bacillus acidicola
PFNGTMMQYFEWYLPDDGTLWTKVANEANNLSSLGIPALWLPPAYKGTSRSDVGYGVYDLYDLGEFNQKGTVRTKYGTKAQYLQRIQAAHAAGMQVYADVVFDHKGGADGTEWVDAVEVNPSDRNQEISGTYQIQAWTKFDFPGRGNTYSSFKWRWYHFDGVDWDESRKLSRIYKFRGIGKAWDWEVDTELGNYDYLMYADLDMDHPEVVTELKNWGKWYVNTTNIDGFRLDAVKHIKFSVFPDWLSYVRSQTGKPLFTVGEYWSYDINKLHNYITKTVGTMSLFDAPLHKKFYTASKSGGAFDMRTLMTNTLMKDQPCLAVTFVDNHDTEPPQALQSWVDPWFKPLAYAFILTRQEGYPCVFYGDYYGIPQYNIPSLKSKIDPLLIARRDYAYGTQHDYLDHSDIIGWTREGVTEKPGSGLAALITDGPGGSKWMYVGKQHAGKVFYDLTGNRSDTVTINSDGWGEFKVNGGSVSVWVPR

SEQ ID NO: 19426 - protein, 481 aa, Bacillus acidicola
PFNGTMMQYFEWYLPDDGTLWTKVANEANNLSSLGIWALWLPPAYKGTSRSDVGYGVYDLYDLGEFNQKGTVRTKYGTKAQYLQQIQAAHAAGMQVYADVVFDHKGGADGTEWVDAVEVNPSDRNQEISGTYQIQAWTKFDFPGRGNTYSSFKWRWYHFDGVDWDESRKLSRIYKFRGIGKAWDWEVDTEVGNYDYLMYADLDMDHPEVVTELKNWGKWYVNTTNIDGFRLDAVKHIKFSTFPDWLSYVRSQTGKPLFTVGEYWSYDINKLHNYITKTPGTMSLFDAPLHKKFYTASKSGGAFDMRTLMTNTLMKDQPELAVTFVDNHDTEPAQALQSWVDPWFKPLAYAFILTRQEGYPCVFYGDYYGIPQYNIPSLKSKIDPLLIARRDYAYGTQHDYLDHSDIIGWTREGVTEKPGSGLAALITDGPGGSKWMYVGKQHAGKVFYDLTGNRSDTVTINSDGWGEFKVNGGSVSVWVPR

SEQ ID NO: 19427 - protein, 496 aa, Geobacillus stearothermophilus
AKAAAPFNGTMMQYFEWYLPDDGTLWTKVANEANNLSSLGITALWLPPAYKGTSRSDVGYGVYDLYDLGEFNQKGSVRTKYGTKAQYLQAIQAAHAAGMQVYADVVFDHKGGADGTEWVDAVEVNPSDRNQEISGTYQIQAWTKFDFNGRGNTYSSFKWRWYHFDGVDWDESRKLSRIYKFRGIGKAWDWEVDTENGNYDYLMYADLDMDHPEVVTELKNWGKWYVNTTNIDGFRLDAVKHIKFSFFPDWLSYVRSQTGKPLFTVGEYWSYDINKLHNYITKTNGTMSLFDAPLHNKFYTASKSGGAFDMSTLMNNTLMKDQPTLAVTFVDNHDTEPGQALQSWVDPWFKPLAYAFILTRQEGYPCVFYGDYYGIPQYNIPSLKSKIDPLLIARRDYAYGTQHDYLDHSDIIGWTREGVTEKPGSGLAALITDGPGGSKWMYVGKQHAGKVFYDLTGNRSDTVTINSDGWGEFKVNGGSVSVWVPRKTTVSTIAWP

SEQ ID NO: 19428 - protein, 518 aa, Geobacillus stearothermophilus
AAPFNGTLMQYFEWYLPDDGTLWTKLANDANNLSSIGITALWIPPAYKGTSRSDVGYGVYDLYDLGEFNQKGTVRTKYGTKAQYLQAIQAAHAAGMQVYADVVFDHKAGADATEWVDAVEVNPADRNQEISGTYQIQAWTKFDFPGRGNTYSSFKWRWYHFDGVDWDESRKISRIFKFRGIGKAWDWEVDSENGNYDYLMYADLDMDHPDVVTELKNWGKWYVNTTNIDGFRIDAVKHIKFSFFPDWLSYVRSQTGKPLFTVAEYWSYDINKLHNYITKTNGTMSLFDAPLHNKFYTASKSGGAFDMRTLLTNTLMKDQPTLAVTFVDNHDTEPGQALQSWVDPWFKPLAYAFILTRQEGYPCVFYGDYYGIPQYNPKEIPSLKSKIDPILIARKDYAYGTQHDYIDHSDIIGWTREGVSEKPGSGLAALITDGPGGSKWMYVGKQHAGKVFYDITGNRSDTVTINSDGWGEFKVNGGSVSIWVPKKTTVSTIARPITTRPWTGEFVRWTEPRLVAWP

SEQ ID NO: 19429 - protein, 493 aa, Geobacillus stearothermophilus
AAPFNGTMMQYFEWYLPDDGTLWTKVADEANNLSSLGITALWLPPAYKGTSRSDVGYGVYDLYDLGEFNQKGTVRTKYGTKAQYLQAIQAAHAAGMRVYADVVFDHKGGADGTEWVDAVEVNPSDRNQEISGTYQIQAWTKFDFPGRGNTYSSFKWRWYHFDGVDWDESRKLSRIYKFRGIGKAWDWEVDTENGNYDYLMYADLDMDHPEVVTELKNWGKWYVNTTNIDGFRLDAVKHIKFEFFPDWLSYVRSQTGKPLFTVGEYWSYDINKLHNYITKTNGTMSLFDAPLHNKFYTASKSGGAFDMQTLMTNTLMKDRPTLAVTFVDNHDTEPGQALQSWVDPWFKPLAYAFILTREEGYPCVFYGDYYGIPQYNIPSLKSKIDPLLIARRDYAYGTQHDYLDHSDIIGWTREGVTEKPGSGLAALITDGPGGSKWMYVGKEHAGKVFYDLTGNRSDTVTINSDGWGEFKVNGGSVSVWVPRKTTVSTIARP

SEQ ID NO: 19430 - protein, 493 aa, Geobacillus stearothermophilus
AAPFNGTMMQYFEWYLPDDGTLWTKVAKEANNLSSLGITALWLPPAYKGTSRSDVGYGVYDLYDLGEFNQKGTVRTKYGTKAQYLQAIQAAHAAGMRVYADVVFDHKGGADGTEWVDAVEVNPSDRNQEISGTYQIQAWTKFDFPGRGNTYSSFKWRWYHFDGVDWDESRKLSRIYKFRGIGKAWDWEVDTENGNYDYLMYADLDMDHPEVVTELKNWGKWYVNTTNIDGFRLDAVKHIKFSFFPDWLSYVRSQTGKPLFTVGEYWSYDINKLHNYITKTNGTMSLFDAPLHNKFYTASKSGGAFDMRTLMTNTLMKNRPTLAVTFVDNHDTEPGQALQSWVDPWFKPLAYAFILTREEGYPCVFYGDYYGIPQYNIPSLKSKIDPLLIARRDYAYGTQHDYLDHSDIIGWTREGVTEKPGSGLAALITDGPGGSKWMYVGKEHAGKVFYDLTGNRSDTVTINSDGWGEFKVNGGSVSVWVPRKTTVSTIARP

SEQ ID NO: 19431 - protein, 493 aa, Geobacillus stearothermophilus
AAPFNGTMMQYFEWYLPDNGTLWTKVAREANNLSSLGITALWLPPAYKGTSRSDVGYGVYDLYDLGEFNQKGTVRTKYGTKAQYLQAIQAAHAAGMQVYADVVFDHKGGADGTEWVDAVEVNPSDRNQEISGTYQIQAWTKFDFPGRGNTYSSFKWRWYHFDGVDWDESRKLSRIYKFRGIGKAWDWEVDTENGNYDYLMYADLDMDHPEVVTELKNWGKWYVRTTNIDGFRLDAVKHIKFSFFPDWLSYVRSQTGKPLFTVGEYWSYDIRKLHNYITKTNGTMSLFDAPLHNKFYTASKSGGAFNMRTLMTNTLMKNQPTLAVTFVDNHDTEPGQALQSWVDPWFKPLAYAFILTRQEGYPCVFYGDYYGIPQYNIPSLKSKIDPLLIARRDYAYGTQHDYLDHSDIIGWTREGVTEKPGSGLAALITDGPGGSKWMYVGKQHAGKVFYDLTGNRSDTVTINSDGWGEFKVNGGSVSVWVPRKTTVSTIARP

SEQ ID NO: 19432 - protein, 493 aa, Geobacillus stearothermophilus
AAPFNGTMMQYFEWYLPDDGTLWTKVADEANNLSSLGITALWLPPAYKGTSRSDVGYGVYDLYDLGEFNQKGTVRTKYGTKAQYLQAIQAAHAAGMQVYADVVFDHKGGADGTEWVDAVEVNPSDRNQEISGTYQIQAWTKFDFPGRGNTYSSFKWRWYHFDGVDWDESRQLSRIYKFRGIGKAWDWEVDTENGNYDYLMYADLDMDHPEVVTELKNWGKWYVDTTNIDGFRLDAVKHIKFSFFPDWLSYVRSQTGKPLFTVGEYWSYDIDKLHNYITKTDGTMSLFDAPLHNKFYTASKSGGAFDMQTLMTNTLMKDQPTLAVTFVDNHDTEPGQALQSWVDPWFKPLAYAFILTRQEGYPCVFYGDYYGIPQYNIPSLKSQIDPLLIARRDYAYGTQHDYLDHSDIIGWTREGVTEKPGSGLAALITDGPGGSKWMYVGKQHAGKVFYDLTGNRSDTVTINSDGWGEFKVNGGSVSVWVPQKTTVSTIARP

SEQ ID NO: 19433 - protein, 493 aa, Geobacillus stearothermophilus
AAPFNGTMMQYFEWYLPDDGTLWTKVADEANNLSSLGITALWLPPAYKGTSRSDVGYGVYDLYDLGEFNQKGTVRTKYGTKAQYLQAIQAAHAAGMQVYADVVFDHKGGADGTEWVDAVEVNPSDRNQEISGTYQIQAWTKFDFPGRGNTYSSFKWRWYHFDGVDWDESRQLSRIYKFRGIGKAWDWEVDTENGNYDYLMYADLDMDHPEVVTELKNWGKWYVDTTNIDGFRLDAVKHIKFSFFPDWLSYVRSQTGKPLFTVGEYWSYDIDKLHNYITKTNGTMSLFDAPLHNKFYTASKSGGAFDMQTLMTNTLMKDQPTLAVTFVDNHDTEPGQALQSWVDPWFKPLAYAFILTRQEGYPCVFYGDYYGIPQYNIPSLKSKIDPLLIARRDYAYGTQHDYLDHSDIIGWTREGVTEKPGSGLAALITDGPGGSKWMYVGKQHAGKVFYDLTGNRSDTVTINSDGWGEFKVNGGSVSVWVPQKTTVSTIARP

SEQ ID NO: 19434 - protein, 534 aa, unidentified
LAFLLTALLFCPTGQPAKAAAPFNGTMMQYFEWYLPDDGTLWTKVANEANNLSSLGITALWLPPAYKGTSRSDVGYGVYDLYDLGEFNQKGAVRTKYGTKAQYLQAIQAAHAAGMQVYADVVFDHKGGADGTEWVDAVEVNPSDRNQEISGIYQIQAWTKFDFPGRGNTYSSFKWRWYHFDGVDWDESRKLSRIYKFRGIGKAWDWEVDTENGNYDYLMYADLDMDHPEVVTELKAGAKWYVNTRTLDGFRLDAVKHIKFSFFPDWLSYVRSQTGKPLFTVGEYWSYDINKLHNYIMKTNGTMSLFDAPLHNKFYTASKSGGTFDMRTLMTNTLMKDQPTLAVTFVDNHDTEPGQALQSWVDPWFKPLAYAFILTRQEGYPCVFYGDYYGIPQYNIPSLKSKIDPLLIARRDYAYGTQHDYLDHSDIIGWTREGVTEKPGSGLAALITDGPGGSKWMYVGKQHAGKVFYDLTGNRSDTVTINSDGWGEFKVNGGSVSVWVPRKTTVSTIAWSITTRPWTDEFVRWTEPRLVAWP

SEQ ID NO: 19435 - protein, 491 aa, Geobacillus stearothermophilus
AAPFNGTMMQYFEWYLPDDGTLWTKVANEANNLSSLGITALWLPPAYKGTSRSDVGYGVYDLYDLGEFNQKGAVRTKYGTKAQYLQAIQAAHAAGMQVYADVVFDHKGGADGTEWVDAVEVNPSDRNQEISGTYQIQAWTKFDFPGRGNTYSSFKWRWYHFDGVDWDESRKLSRIYKFRGIGKAWDWEVDTENGNYDYLMYADLDMDHPEVVTELKSWGKWYVNTTNIDGFRLDAVKHIKFSFFPDWLSDVRSQTGKPLFTVGEYWSYDINKLHNYIMKTNGTMSLFDAPLHNKFYTASKSGGTFDMRTLMTNTLMKDQPTLAVTFVDNHDTEPGQALQSWVDPWFKPLAYAFILTRQEGYPCVFYGDYYGIPQYKIPSLKSKIDPLLIARRDYAYGTQHDYLDHSDIIGWTREGVTEKPGSGLAALITDGPGGSKWMYVGKQHAGKVFYDLTGNRSDTVTINSDGWGEFKVNGGSVSVWVPRKTTVSTIA

SEQ ID NO: 19436 - protein, 491 aa, Geobacillus stearothermophilus
AAPFNGTMMQYFEWYLPDDGTLWTKVANEANNLSSLGITALWLPPAYKGTSRSDVGYGVYDLYDLGEFNQKGAVRTKYGTKAQYLQAIQAAHAAGMQVYADVVFDHKGGADGTEWVDAVEVNPSDRNQEISGTYQIQAWTKFDFPGRGNTYSSFKWRWYHFDGVDWDESRKLSRIYKFRGIGKAWDWEVDTENGNYDYLMYADLDMDHPEVVTELKSWGKWYVNTTNIDGFRLDAVKHIKFSFFPDWLSDVRSQTGKPLFTVGEYWSYDINKLHNYIMKTNGTMSLFDAPLHNKFYTASKSGGTFDMRTLMTNTLMKDQPTLAVTFVDNHDTEPGQALQSWVDPWFKPLAYAFILTRFEGYPCVFYGDYYGIPQYNIPSLKSKIDPLLIARRDYAYGTQHDYLDHSDIIGWTREGVTEKPGSGLAALITDGPGGSKWMYVGKQHAGKVFYDLTGNRSDTVTINSDGWGEFKVNGGSVSVWVPRKTTVSTIA

SEQ ID NO: 19437 - protein, 491 aa, Bacillus sp.
AAPFNGTMMQYFEWYLPDDGTLWTKVANEANNLSSLGITALWLPPAYKGTSRSDVGYGVYDLYDLGEFNQKGAVRTKYGTKAQYLQAIQAAHAAGMQVYADVVFDHKGGADGTEWVDAVEVNPSDRNQEISGTYQIQAWTKFDFPGRGNTYSSFKWRWYHFDGVDWDESRKLSRIYKFRGIGKAWDWEVDTENGNYDYLMYADLDMDHPEVVTQLKSWGKWYVNTTNIDGFRLDAVKHIKFSFFPDWLSDVRSQTGKPLFTVGEYWSYDINKLHNYIMKTNGTMSLFDAPLHNKFYTASKSGGTFDMRTLMTNTLMKDQPTLAVTFVDNHDTEPGQALQSWVDPWFKPLAYAFILTRQEGYPCVFYGDYYGIPQYNIPSLKSKIDPLLIARRDYAYGTQHDYLDHSDIIGWTREGVTEKPGSGLAALITDGPGGSKWMYVGKQHAGKVFYDLTGNRSDTVTINSDGWGEFKVNGGSVSVWVPRKTTVSTIA

SEQ ID NO: 19438 - protein, 491 aa, Geobacillus stearothermophilus
AAPFNGTMMQYFEWYLPDDGTLWTKVANEANNLSSLGITALWLPPAYKGTSRSDVGYGVYDLYDLGEFNQKGAVRTKYGTKAQYLQAIQAAHAAGMQVYADVVFDHKGGADGTEWVDAVEVNPSDRNQEISGTYQIQAWTKFDFPGRGNTYSSFKWRWYHFDGVDWDESRKLSRIYKFRGIGKAWDWEVDTENGNYDYLMYADLDMDHPEVVTELKSWGKWYVNTTNIDGFRLDAVKHIKFSFFPDWLSDVRSQTGKPLFTVGEYWSYDINKLHNYIMKTNGTMSLFDAPLHNKFYTASKSGGTFDMRTLMTNTLMKDQPTLAVTFVDNHDTEPGQALQSWVDPWFKPLAYAFILARQEGYPCVFYGDYYGIPQYNIPSLKSKIDPLLIARRDYAYGTQHDYLDHSDIIGWTREGVTEKPGSGLAALITDGPGGSKWMYVGKQHAGKVFYDLTGNRSDTVTINSDGWGEFKVNGGSVSVWVPRKTTVSTIA

SEQ ID NO: 19439 - protein, 484 aa, Synthetic construct
VNGTLMQYFEWYTPNDGQHWKRLQNDAEHLSDIGITAVWIPPAYKGLSQSDNGYGPYDLYDLGEFQQKGTVRTKYGTKSELQDAIGSLHSRNVQVYGDVVLNHKGGADATEMVRAVEVNPNNRNQEVTGEYTIEAWTRFDFPGRGNTHSSFKWRWYHFDGVDWDQSRRLNNRIYKFRGHGKAWDWEVDTENGNYDYLMYADIDYDHPDVVAETKKWGIWYANELSLDGFRIDAAKHIKFSFLRDWVQAVRQATGKEMFTVAEYWQNNAGKLENYLNKTSFNQSVFDVPLHFNLQAASSQGGGYDMRRLLDGTVVSRHPEKAVTFVENHDTQPGQSLESTVQTWFKPLAYAFILTRESGYPQVFYGDMYGTKGTSPKEIPSLKDNIEPILKARKEYAYGPQHDYIDHPDVIGWTREGDSSAAKSGLAALITDGPGGSKRMYAGLKNAGETWYDITGNRSDTVKIGSDGWGEFHVNDGSVSIYVQK

SEQ ID NO: 19440 - protein, 484 aa, Synthetic construct
VNGTLMQYFEWYTPNDGQHWKRLQNDAEHLSDIGITAVWIPPAYKGLSQSDNGYGPYDLYDLGEFQQKGTVRTKYGTKSELQDAIGSLHSRNVQVYGDVVLNHKGGADFTERVQAVEVNPQNRNQEVSGTYQIEAWTGFNFPGRGNQHSSFKWRWYHFDGTDWDQSRQLANRIYKFRGDGKAWDWEVDTENGNYDYLMYADVDYDHPDVVAETKKWGIWYANELSLDGFRIDAAKHIKFSFLRDWVQAVRQATGKEMFTVAEYWQNNAGKLENYLNKTSFNQSVFDVPLHFNLQAASSQGGGYDMRRLLDGTVVSRHPEKAVTFVENHDTQPGQSLESTVQTWFKPLAYAFILTRESGYPQVFYGDMYGTKGTSPKEIPSLKDNIEPILKARKEYAYGPQHDYIDHPDVIGWTREGDSSAAKSGLAALITDGPGGSKRMYAGLKNAGETWYDITGNRSDTVKIGSDGWGEFHVNDGSVSIYVQK

SEQ ID NO: 19441 - protein, 482 aa, Bacillus sp.
HHNGTNGTMMQYFEWHLPNDGNHWNRLRDDASNLRNRGITAIWIPPAWKGTSQNDVGYGAYDLYDLGEFNQKGTVRTKYGTRSQLESAIHALKNNGVLVYGDVVMNHKAKADGTEFVDAVEVDPSNRNQETDGTEQIQAWTKFDFPGRGNTYSSFKWRWYHFDGTDWDESRKLNRIYKFTGKAWDWEVDTENGNYDYLMFADLDMDHPEVVNELRRWGEWYTNTLNLDGFRIDAVKHIKYSFTRDWLTHVRNATGKEMFAVAEFWKNDLGALENYLNKTNWNHSVFDVPLHYNLYNASNSGGNYDMAKLLNGAVVQKHPMHAVTFVDNHDSQPGESLESFVQEWFKPLAYALILTREQGYPSVFYGDYYGIPTHSVPAMKAKIDPILEARQNFAYGTQHDYFDHHNIIGWTREGNTTHPNSGLATIMSDGPGGEKWMYVGQNKAGQVWHDITGNKPGTVTINADGWANFSVNGGSVSIWVKR

SEQ ID NO: 19442 - protein, 481 aa, Bacillus sp.
HNGTNATMMQYFEWHLPNDGNHWNRLRDDASNLRNRGITAIWIPPAWKGTSQNDVGYGAYDLYDLGEFNQKGTVRTKYGTRSQLESAIHALKNNGVQVYGDVVMNHKAGADGTEFVDAVEVDPSNRNQETSGTYQIQAWTKFDFPGRGNTYSSFKWRWYHFDGTDWDESRKLNRIYKFTGKAWDWEVDTENGNYDYLMFADLDMDHPEVVNELRRWGEWYTNTLNLDGFRIDAVKHIKFSFTRDWLTHVRNATGKGMFAVAEFWKNDLGALENYLSKTNWNHSVFDVPLHYNLYNASNSRGNYDMAKLLNGTVVQKHPMHAVTFVDNHDSQPGESLESFVQEWFKPLAYALILTREQGYPSVFYGDYYGIPTHSVPAMKAKIDPILEARQNFAYGTQHDYFDHHNIIGWTREGNTTHPNSGLATIMSDGPGGEKWMYVGQNKAGQVWHDITGNKPGTVTINADGWANFSVNGGSVSIWVKR

SEQ ID NO: 19443 - protein, 481 aa, Bacillus sp.
HNGTNATMMQYFEWHLPNDGNHWNRLRDDASNLRNRGITAIWIPPAWKGTSQNDVGYGAYDLYDLGEFNQKGTVRTKYGTRSQLESAIHALKNNGVQVYGDVVMNHKAGADSTEWVDAVEVNPSNRNQETSGTYQIQAWTKFDFPGRGNTYSSFKWRWYHFDGTDWDESRKLNRIYKFRGKAWDWEVDTENGNYDYLMFADLDMDHPEVVNELRRWGEWYTNTLNLDGFRIDAVKHIKFSFTRDWLTHVRNATGKGMFAVAEFWKNDLGALENYLSKTNWNHSVFDVPLHYNLYNASNSRGNYDMAKLLNGTVVQKHPMHAVTFVDNHDSQPGESLESFVQEWFKPLAYALILTREQGYPSVFYGDYYGIPTHSVPAMKAKIDPILAARQNFAYGTQHDYFDHHNIIGWTREGNTTHPNSGLATIMSDGPGGEKWMYVGQNKAGQVWHDITGNKPGTVTINADGWANFSVNKGSVSIWVKR

SEQ ID NO: 19444 - protein, 481 aa, Geobacillus stearothermophilus
AAPFNPTMMQYFEWYLPDDGTLWTKVANEANNLSSLGINALWLPPAYKGTSRSDVGYGVYDLYDLGEFNQKGTVRTKYGTKAQYLQAIQAAHAAGMQVYADVVFDHKGGADGTEWVDAVEVNPSDRNQEISGTYQIQAWTKFDFPGRGNTYSSFKWRWDHFDGVDWDESRKLSRIYKFRGKAWDWEVDTEFGNYDYLMYADLDMDHPEVVTELKNWGKWYVNTTNIDGFRLDAVKHIKFQFFPDWLSYVRSQTGKPLFTVGEFWSYDINKLHNYITKTDGTMSLFDAPLHNKFYTASKSGGAFDMRTLMTNTLMKDQPHLAVTFVDNHDTEPGQALQSWVDPWFKPLAYAFILTRQEGYPCVFYGDYYGIPQYNIPSLKSKIDPLLIARRDYAYGTQHDYLDHSDIIGWTREGVTEKPGSGLAALITDGPGGSKWMYVGKQHAGKVFYDLTGNRSDTVTINSDGWGEFKVNGGSVSIYVQR

SEQ ID NO: 19445 - protein, 481 aa, Geobacillus stearothermophilus
AAPFNPTMMQYFEWYLPDDGTLWTKVANEANNLSSLGINALWLPPAYKGTSRSDVGYGVYDLYDLGEFNQKGTVRTKYGTKAQYLQAIQAAHAAGIQVYADVVFDHKGGADGTEWVDAVEVNPSDRNQEISGTYQIQAWTKFDFPGRGNTYSSFKWRWDHFDGVDWDESRKLSRIYKFRGKAWDWEVDTEFGNYDYLMYADLDMDHPEVVTELKNWGKWYVNTTNIDGFRLDAVKHIKFQFFPDWLSYVRSQTGKPLFTVGEYWSYDINKLHNYITKTDGTMSLFDAPLHNKFYTASKSGGAFDMRTLMTNTLMKDQPHLAVTFVDNHDTEPGQALQSWVDPWFKPLAYAFILTRQEGYPCVFYGDYYGIPQYNIPSLKSKIDPLLIARRDYAYGTQHDYLDHSDIIGWTREGVTEKPGSGLAALITDGPGGSKWMYVGKQHAGKVFYDLTGNRSDTVTINSDGWGEFKVNGGSVSIYVQR

SEQ ID NO: 19446 - protein, 480 aa, Bacillus sp.
HNGTNATMMQYFEWHLPNDGNHWNRLRDDASNLRNRGITAIWIPPAWKGTSQNDVGYGAYDLYDLGEFNQKGTVRTKYGTRSQLESAIHALKNNGVQVYGDVVMNHKAGADGTELVDAVEVNPSDRNQESGTYQIQAWTKFDFPGRGNTYSSFKWRWYHFDGTDWDESRKLNRIYKFTGKAWDWEVDTENGNYDYLMYADLDMDHPEVVNELRRWGEWYTNTLNLDGFRIDAVKHIKFSFTRDWLTHVRNATGKGMFAVAEFWKNDLGALENYLSKTNWNHSVFDVPLHYNLYNASNSRGNYDMAKLLNGTVVQKHPMHAVTFVDNHDSQPGESLESFVQEWFKPLAYALILTREQGYPSVFYGDYYGIPTHSVPAMKAKIDPILAARQNFAYGTQHDYFDHHNIIGWTREGNTTHPNSGLATIMSDGPGGEKWMYVGQNKAGQVWHDITGNKPGTVTINADGWANFSVNKGSVSIWVKR

SEQ ID NO: 19447 - protein, 493 aa, Geobacillus stearothermophilus
AAPFNGTMMQYFEWYLPDNGTLWTKVAREANNLSSLGITALWLPPAYKGTSRSDVGYGVYDLYDLGEFNQKGTVRTKYGTKAQYLQAIQAAHAAGMQVYADVVFDHKGGADGTEWVDAVEVNPSDRNQEISGTYQIQAWTKFDFPGRGNTYSSFKWRWYHFDGVDWDESRKLSRIYKFRGIGKAWDWEVDTENGNYDYLMYADLDMDHPEVVTELKNWGKWYVRTTNIDGFRLDAVKHIKFSFFPDWLSYVRSQTGKPLFTVGEYWSYDIRKLHNYITKTRGTMSLFDAPLHNKFYTASKSGGAFNMRTLMTNTLMKNQPTLAVTFVDNHDTEPGQALQSWVDPWFKPLAYAFILTRQEGYPCVFYGDYYGIPQYNIPSLKSKIDPLLIARRNYAYGTQHDYLDHSDIIGWTREGVTEKPGSGLAALITDGPGGSKWMYVGKQHAGKVFYDLTGNRSDTVTINSDGWGEFKVNGGSVSVWVPRKTTVSTIARP

SEQ ID NO: 19448 - protein, 493 aa, Geobacillus stearothermophilus
AAPFNGTMMQYFEWYLPDDGTLWTKVADEANNLSSLGITALWLPPAYKGTSRSDVGYGVYDLYDLGEFNQKGTVRTKYGTKAQYLQAIQAAHAAGMRVYADVVFDHKGGADGTEWVDAVEVNPSDRNQEISGTYQIQAWTKFDFPGRGNTYSSFKWRWYHFDGVDWDESRKLSRIYKFRGIGKAWDWEVDTENGNYDYLMYADLDMDHPEVVTELKNWGKWYVDTTNIDGFRLDAVKHIKFQFFPDWLSYVRSQTGKPLFTVGEYWSYDINKLHNYITKTNGTMSLFDAPLHNKFYTASKSGGAFDMQTLMTNTLMKDRPTLAVTFVDNHDTEPGQALQSWVDPWFKPLAYAFILTREEGYPCVFYGDYYGIPQYNIPSLKSKIDPLLIARRDYAYGTQHDYLDHSDIIGWTREGVTEKPGSGLAALITDGPGGSKWMYVGKEHAGKVFYDLTGNRSDTVTINSDGWGEFKVNGGSVSVWVPRKTTVSTIARP

SEQ ID NO: 19449 - protein, 493 aa, Geobacillus stearothermophilus
AAPFNGTMMQYFEWYLPDDGTLWTKVADEANNLSSLGITALWLPPAYKGTSRSDVGYGVYDLYDLGEFNQKGTVRTKYGTKAQYLQAIQAAHAAGMRVYADVVFDHKGGADGTEWVDAVEVNPSDRNQEISGTYQIQAWTKFDFPGRGNTYSSFKWRWYHFDGVDWDESRKLSRIYKFRGIGKAWDWEVDTENGNYDYLMYADLDMDHPEVVTELKNWGKWYVDTTNIDGFRLDAVKHIKFEFFPDWLSYVRSQTGKPLFTVGEYWSYDINKLHNYITKTNGTMSLFDAPLHNKFYTASKSGGAFDMQTLMTNTLMKDRPTLAVTFVDNHDTEPGQALQSWVDPWFKPLAYAFILTREEGYPCVFYGDYYGIPQYNIPSLKSKIDPLLIARRDYAYGTQHDYLDHSDIIGWTREGVTEKPGSGLAALITDGPGGSKWMYVGKEHAGKVFYDLTGNRSDTVTINSDGWGEFKVNGGSVSVWVPRKTTVSTIARP

SEQ ID NO: 19450 - protein, 493 aa, Geobacillus stearothermophilus
ACAAPFNGTMMQYFEWYLPDDGTLWTKVANEANNLSSLGITALWLPPAYKGTSRSDVGYGVYDLYDLGEFNQKGAVRTKYGTKAQYLQAIQAAHAAGMQVYADVVFDHKGGADGTEWVDAVEVNPSDRNQEISGTYQIQAWTKFDFPGRGNTYSSFKWRWYHFDGVDWDESRKLSRIYKFRGIGKAWDWEVDTENGNYDYLMYADLDMDHPEVVTELKSWGKWYVNTTNIDGFRLDAVKHIKFSFFPDWLSNVRSQTGKPLFTVGEYWSYDINKLHNYIMKTNGTMSLFDAPLHNKFYTASKSGGTFDMRTLMTNTLMKDQPTLAVTFVDNHDTEPGQALQSWVDPWFKPLAYAFILTRQEGYPCVFYGDYYGIPQYNIPSLKSKIDPLLIARRDYAYGTQHDYLDHSDIIGWTREGVTEKPGSGLAALITDGPGGRKWMYVGKQHAGKVFYDLTGNRSDTVTINSDGWGEFKVNGGSVSVWVPRKTTVSTIA

SEQ ID NO: 19451 - protein, 491 aa, Geobacillus stearothermophilus
AAPFNGTLMQYFEWYLPDDGTLWTKLANDANNLSSIGITALWIPPAYKGTSRSDVGYGVYDLYDLGEFNQKGTVRTKYGTKAQYLQAIQAAHAAGMQVYADVVFDHKAGADATEWVDAVEVNPADRNQEISGTYQIQAWTKFDFPGRGNTYSSFKWRWYHFDGVDWDESRKISRIFKFRGIGKAWDWEVDSENGNYDYLMYADLDMDHPDVVTELKNWGKWYVNTTNIDGFRIDAVKHIKFSFFPDWLSYVRSQTGKPLFTVAEYWSYDINKLHNYITKTNGTMSLFDAPLHNKFYTASKSGGAFDMRTLLTNTLMKDQPTLAVTFVDNHDTEPGQALQSWVDPWFKPLAYAFILTRQEGYPCVFYGDYYGIPQYNPKEIPSLKSKIDPILIARKDYAYGTQHDYIDHSDIIGWTREGVSEKPGSGLAALITDGPGGSKWMYVGKQHAGKVFYDITGNRSDTVTINSDGWGEFKVNGGSVSIWVPKKTTVS

SEQ ID NO: 19452 - protein, 482 aa, Bacillus sp.
HHNGTNGTMMQYFEWHLPNDGNHWNRLRDDASNLRNRGITAIWIPPAWKGTSQNDVGYGAYDFYDLGEFNQKGTVRTKYGTRSQLESAIHALKNNGVQVYGDVVMNHKAGADGTEFVDAVEVDPSNRNQETSGTYQIQAYTKFDFPGRGNTYSSFKWRWYHFDGTDWDESRKFNRIYKFTGKAWDWEVDTEFGNYDYLMFADYDMDHPEVVNELRRWGEWYTNTLNLDGFRIDAVKHIKFSFTRDWLTHVRNATGKGMFAVAEFWKNDLGALENYLSKTNWNHSVFDVPLHYNLYNASNSGGNYDMAKLLNGTVVQKHPMWAVTFVDNHDSQPGESLESFVQEWFKPLAYALILTREQGYPSVFYGDYYGIPTHSVPAMKAKIDPILEARQNFAYGTQHDYFDHHNIIGWTREGNTTHPNSGLATIMSDGPGGEKWMYVGQNKAGQVWHDITGNKPGTVTINADGWANFSVNGGSVSIWVKR

SEQ ID NO: 19453 - protein, 484 aa, Bacillus sp. 707
HHNGTNGTMMQYFEWYLPNDGNHWNRLNSDASNLKSKGITAVWIPPAWKGASQNDVGYGAYDLYDLGEFNQKGTVRTKYGTRSQLQAAVTSLKNNGIQVYGDVVMNHKGGADATEMVRAVEVNPNNRNQEVTGEYTIEAWTRFDFPGRGNTHSSFKWRWYHFDGVDWDQSRRLNNRIYKFRGHGKAWDWEVDTENGNYDYLMYADIDMDHPEVVNELRNWGVWYTNTLGLDGFRIDAVKHIKYSFTRDWINHVRSATGKNMFAVAEFWKNDLGAIENYLQKTNWNHSVFDVPLHYNLYNASKSGGNYDMRNIFNGTVVQRHPSHAVTFVDNHDSQPEEALESFVEEWFKPLAYALTLTREQGYPSVFYGDYYGIPTHGVPAMRSKIDPILEARQKYAYGKQNDYLDHHNIIGWTREGNTAHPNSGLATIMSDGAGGSKWMFVGRNKAGQVWSDITGNRTGTVTINADGWGNFSVNGGSVSIWVN

SEQ ID NO: 19454 - protein, 481 aa, Bacillus sp.
HNGTNATMMQYFEWHLPNDGNHWNRLRDDASNLRNRGITAIWIPPAWKGTSQNDVGYGAYDLYDLGEFNQKGTVRTKYGTRSQLESAIHALKNNGVQVYGDVVMNHKAGADGTEFVDAVEVDPSNRNQETSGTYQIQAWTKFDFPGRGNTYSSFKWRWYHFDGTDWDESRKLNRIYKFTGKAWDWEVDTENGNYDYLMFADLDMDHPEVVNELRRWGEWYTNTLNLDGFRIDAVKHIKFSFTRDWLTHVRNATGKGMFAVAEFWKNDLGALENYLSKTNWNHSVFDVPLHYNLYNASNSRGNYDMAKLLNGTVVQKHPMHAVTFVDNHDSQPGESLESFVQEWFKPLAYALILTREQGYPSVFYGDYYGIPTHSVPAMKAKIDPILAARQNFAYGTQHDYFDHHNIIGWTREGNTTHPNSGLATIMSDGPGGEKWMYVGQNKAGQVWHDITGNKPGTVTINADGWANFSVNGGSVSIWVKR

SEQ ID NO: 19455 - protein, 481 aa, Bacillus sp.
HNGTNATMMQYFEWHLPNDGNHWNRLRDDASNLRNRGITAIWIPPAWKGTSQNDVGYGAYDLYDLGEFNQKGTVRTKYGTRSQLESAIHALKNNGVQVYGDVVMNHKAGADGTELVDAVEVNPSDRNQEISGTYQIQAYTKFDFPGRGNTYSSFKWRWYHFDGTDWDESRKLNRIYKFTGKAWDWEVDTEFGNYDYLMYADVDMDHPEVVNELRRWGEWYTNTLNLDGFRIDAVKHIKFSFTRDWLTHVRNATGKGMFAVAEFWKNDLGALENYLSKTNWNHSVFDVPLHYNLYNASNSRGNYDMAKLLNGTVVQKHPMHAVTFVDNHDSQPGESLESFVQEWFKPLAYALILTREQGYPSVFYGDYYGIPTHSVPAMKAKIDPILAARQNFAYGTQHDYFDHHNIIGWTREGNTTHPNSGLATIMSDGPGGEKWMYVGQNKAGQVWHDITGNKPGTVTINADGWANFSVNKGSVSIWVKR

SEQ ID NO: 19456 - protein, 481 aa, Bacillus sp.
HNGTNATMMQYFEWHLPNDGNHWNRLRDDASNLRNRGITAIWIPPAWKGTSQNDVGYGAYDLYDLGEFNQKGTVRTKYGTRSQLESAIHALKNNGVQVYGDVVMNHKAGADGTEFVDAVEVDPSNRNQETSGTYQIQAWTKFDFPGRGNTYSSFKWRWYHFDGTDWDESRKLNRIYKFRGKAWDWEVDTENGNYDYLMFADLDMDHPEVVNELRRWGEWYTNTLNLDGFRIDAVKHIKFSFTRDWLTHVRNATGKGMFAVAEFWKNDLGALENYLSKTNWNHSVFDVPLHYNLYNASNSRGNYDMAKLLNGTVVQKHPMHAVTFVDNHDSQPGESLESFVQEWFKPLAYALILTREQGYPSVFYGDYYGIPTHSVPAMKAKIDPILAARQNFAYGTQHDYFDHHNIIGWTREGNTTHPNSGLATIMSDGPGGEKWMYVGQNKAGQVWHDITGNKPGTVTINADGWANFSVNKGSVSIWVKR

SEQ ID NO: 19457 - protein, 481 aa, Bacillus sp.
HNGTNATMMQYFEWHLPNDGNHWNRLRDDASNLRNRGITAIWIPPAWKGTSQNDVGYGAYDLYDLGEFNQKGTVRTKYGTRSQLESAIHALKNNGVQVYGDVVMNHKAGADSTEWVDAVEVNPSNRNQETSGTYQIQAWTKFDFPGRGNTYSSFKWRWYHFDGTDWDESRKLNRIYKFTGKAWDWEVDTENGNYDYLMFADLDMDHPEVVNELRRWGEWYTNTLNLDGFRIDAVKHIKFSFTRDWLTHVRNATGKGMFAVAEFWKNDLGALENYLSKTNWNHSVFDVPLHYNLYNASNSRGNYDMAKLLNGTVVQKHPMHAVTFVDNHDSQPGESLESFVQEWFKPLAYALILTREQGYPSVFYGDYYGIPTHSVPAMKAKIDPILAARQNFAYGTQHDYFDHHNIIGWTREGNTTHPNSGLATIMSDGPGGEKWMYVGQNKAGQVWHDITGNKPGTVTINADGWANFSVNKGSVSIWVKR

SEQ ID NO: 19458 - protein, 481 aa, Bacillus sp.
HHNGTNGTMMQYFEWHLPNDGNHWNRLRDDASNLRNRGINAIWIPPAWKGTSQNDVGYGAYDLYDLGEFNQKGTVRTKYGTRSQLESAIHALKNNGVQVYGDVVMNHKAGADGTELVDAVEVNPSDRYQESGTYQIQAWTKFDFPGRGNTYSSWKWRWYHFDGTDWDESRKLNRIYKFDGKAWDWPVDTENGNYDYLMYADLDMDHPEVVNELRRWGEWYTNTLNLDGFRIDAVKHIKYSFTRDWLTHVRNATGKEMFAVAEFWKNDLGALENYLNKTNWNHSVFDVPLHYNLYNASNSGGNYDMAKLLNGTVVQKHPMHAVTFVDNHDSQPGESLESFVQEWFKPLAYALILTREQGYPSVFYGDYYGIPTHSVPAMKAKIDPILEARQNFAYGTQHDYFDHHNIIGWTREGNTTHPNSGLATIMSDGPGGEKWMYVGQNKAGQVWHDITGNNSGTVTINADGWANFSVNKESVSIWVKR

SEQ ID NO: 19459 - protein, 481 aa, Bacillus sp.
HNGTNATMMQYFEWHLPNDGNHWNRLRDDASNLRNRGITAIWIPPAWKGTSQNDVGYGAYDLYDLGEFNQKGTVRTKYGTRSQLESAIHALKNNGVQVYGDVVMNHKAGADGTEFVDAVEVDPSNRNQETSGTYQIQAWTKFDFPGRGNTYSSFKWRWYHFDGTDWDESRKLNRIYKFTGKAWDWEVDTENGNYDYLMFADLDMDHPEVVNELRRWGEWYTNTLNLDGFRIDAVKHIKFSFTRDWLTHVRNATGKGMFAVAEFWKNDLGALENYLSKTNWNHSVFDVPLHYNLYNASNSGGNYDMAKLLNGTVVQKHPMHAVTFVDNHDSQPGESLESFVQEWFKPLAYALILTREQGYPSVFYGDYYGIPTHSVPAMKAKIDPILAARQNFAYGTQHDYFDHHNIIGWTREGNTTHPNSGLATIMSDGPGGEKWMYVGQNKAGQVWHDITGNKPGTVTINADGWANFSVNGASVSIWVKR

SEQ ID NO: 19460 - protein, 480 aa, Bacillus sp.
HNGTNATMMQYFEWHLPNDGNHWNRLRDDASNLRNRGITAIWIPPAWKGTSQNDVGYGAYDLYDLGEFNQKGTVRTKYGTRSQLESAIHALKNNGVQVYGDVVMNHKAGADGTELVDAVEVNPSDRNQESGTYQIQAYTKFDFPGRGNTYSSFKWRWYHFDGTDWDESRKLNRIYKFTGKAWDWEVDTEFGNYDYLMYADVDMDHPEVVNELRRWGEWYTNTLNLDGFRIDAVKHIKFSFTRDWLTHVRNATGKGMFAVAEFWKNDLGALENYLSKTNWNHSVFDVPLHYNLYNASNSRGNYDMAKLLNGTVVQKHPMHAVTFVDNHDSQPGESLESFVQEWFKPLAYALILTREQGYPSVFYGDYYGIPTHSVPAMKAKIDPILAARQNFAYGTQHDYFDHHNIIGWTREGNTTHPNSGLATIMSDGPGGEKWMYVGQNKAGQVWHDITGNKPGTVTINADGWANFSVNKGSVSIWVKR

SEQ ID NO: 19461 - protein, 480 aa, Bacillus sp.
HNGTNATMMQYFEWHLPNDGNHWNRLRDDASNLRNRGITAIWIPPAWKGTSQNDVGYGAYDLYDLGEFNQKGTVRTKYGTRSQLESAIHALKNNGVQVYGDVVMNHKAGADGTEFVDAVEVDPSNRNQETSGTYQIQAWTKFDFPGRGNTYSSFKWRWYHFDGTDWDESRKLNRIYKFGKAWDWEVDTENGNYDYLMFADLDMDHPEVVNELRRWGEWYTNTLNLDGFRIDAVKHIKFSFTRDWLTHVRNATGKGMFAVAEFWKNDLGALENYLSKTNWNHSVFDVPLHYNLYNASNSRGNYDMAKLLNGTVVQKHPMHAVTFVDNHDSQPGESLESFVQEWFKPLAYALILTREQGYPSVFYGDYYGIPTHSVPAMKAKIDPILAARQNFAYGTQHDYFDHHNIIGWTREGNTTHPNSGLATIMSDGPGGEKWMYVGQNKAGQVWHDITGNKPGTVTINADGWANFSVNKGSVSIWVKR

SEQ ID NO: 19462 - protein, 534 aa, Bacillus licheniformis
LLAFLLTASLFCPTGRHAKAAAPFNGTMMQYFEWYLPDDGTLWTKVANEANNLSSLGITALSLPPAYKGTSRSDVGYGVYDLYDLGEFNQKGTVRTKYGTKAQYLQAIQAAHAAGMQVYADVVFDHKGGADGTEWVDAVEVNPSDRNQEISGTYQIQAWTKFDFPGRGNTYSSFKWRWYHFDGVDWDESRKLSRIYKFRGIGKAWDWEVDTENGNYDYLMYADLDMDHPEVVTELKNWGKWYVNTTNIDGFRLDGLKHIKFSFFPDWLSYVRSQTGKPLFTVGEYWSYDINKLHNYITKTNGTMSLFDAPLHNKFYTASKSGGAFDMRTLMTNTLMKDQPTLAVTFVDNHDTNPAKRCSHGRPWFKPLAYAFILTRQEGYPCVFYGDYYGIPQYNIPSLKSKIDPLLIARRDYAYGTQHDYLDHSDIIGWTREGVTEKPGSGLAALITDGAGRSKWMYVGKQHAGKVFYDLTGNRSDTVTINSDGWGEFKVNGGSVSVWVPRKTTVSTIARPITTRPWTGEFVRWHEPRLVAWP

SEQ ID NO: 19463 - protein, 493 aa, Geobacillus stearothermophilus
AAPFNGTMMQYFEWYLPDDGTLWTKVADEANNLSSLGITALWLPPAYKGTSRSDVGYGVYDLYDLGEFNQKGTVRTKYGTKAQYLQAIQAAHAAGMRVYADVVFDHKGGADGTEWVDAVEVNPSDRNQEISGTYQIQAWTKFDFPGRGNTYSSFKWRWYHFDGVDWDESRKLSRIYKFRGIGKAWDWEVDTENGNYDYLMYADLDMDHPEVVTELKNWGKWYVDTTNIDGFRLDAVKHIKFSFFPDWLSYVRSQTGKPLFTVGEYWSYDINKLHNYITKTNGTMSLFDAPLHNKFYTASKSGGAFDMQTLMTNTLMKDRPTLAVTFVDNHDTEPGQALQSWVDPWFKPLAYAFILTREEGYPCVFYGDYYGIPQYNIPSLKSKIDPLLIARRDYAYGTQHDYLDHSDIIGWTREGVTEKPGSGLAALITDGPGGSKWMYVGKEHAGKVFYDLTGNRSDTVTINSDGWGEFKVNGGSVSVWVPQKTTVSTIARP

SEQ ID NO: 19464 - protein, 493 aa, Geobacillus stearothermophilus
AAPFNGTMMQYFEWYLPDDGTLWTKVADEANNLSSLGITALWLPPAYKGTSRSDVGYGVYDLYDLGEFNQKGTVRTKYGTKAQYLEAIQAAHAAGMQVYADVVFDHKGGADGTEWVDAVEVNPSDRNQEISGTYQIQAWTKFDFPGRGNTYSSFKWRWYHFDGVDWDESRQLSRIYKFRGIGKAWDWEVDTENGNYDYLMYADLDMDHPEVVTELKNWGKWYVDTTNIDGFRLDAVKHIKFSFFPDWLSYVRSQTGKPLFTVGEYWSYDIDKLHNYITKTDGTMSLFDAPLHNKFYTASKSGGAFDMQTLMTNTLMKDQPTLAVTFVDNHDTEPGQALQSWVDPWFKPLAYAFILTRQEGYPCVFYGDYYGIPQYNIPSLKSQIDPLLIARRDYAYGTQHDYLDHSDIIGWTREGVTEKPGSGLAALITDGPGGSKWMYVGKQHAGQVFYDLTGNRSDTVTINSDGWGEFKVNGGSVSVWVPQKTTVSTIARP

SEQ ID NO: 19465 - protein, 493 aa, Geobacillus stearothermophilus
AAPFNGTMMQYFEWYLPDDGTLWTKVAKEANNLSSLGITALWLPPAYKGTSRSDVGYGVYDLYDLGEFNQKGTVRTKYGTKAQYLQAIQAAHAAGMRVYADVVFDHKGGADGTEWVDAVEVNPSDRNQEISGTYQIQAWTKFDFPGRGNTYSSFKWRWYHFDGVDWDESRKLSRIYKFRGIGKAWDWEVDTENGNYDYLMYADLDMDHPEVVTELKNWGKWYVKTTNIDGFRLDAVKHIKFSFFPDWLSYVRSQTGKPLFTVGEYWSYDINKLHNYITKTNGTMSLFDAPLHNKFYTASKSGGAFNMRTLMTNTLMKNRPTLAVTFVDNHDTEPGQALQSWVDPWFKPLAYAFILTREEGYPCVFYGDYYGIPQYNIPSLKSKIDPLLIARRDYAYGTQHDYLDHSDIIGWTREGVTEKPGSGLAALITDGPGGSKWMYVGKEHAGKVFYDLTGNRSDTVTINSDGWGEFKVNGGSVSVWVPRKTTVSTIARP

SEQ ID NO: 19466 - protein, 511 aa, Bacillus licheniformis
LLAFLLTVSLFCPTGQPAKAAAPFNGTMMQYFEWYLPDDGTLWTKVANEANNLSSLGITALWLPPAYKGTSRSDVGYGAYDLYDLGEFNQKGTVRTKYGTKAQYLQAIRAAHAAGMQVYADVVFDHKGGADGTEWVDAVEVNPSDRNQVISGTYQIQAWTKFDFPGRGNTYSSFKWRWYHFDGVDWDESRKLSRIYLFEGKAWDWEVDTEFGNYDYLMYADLDMDYPEVVTELKNWGPWYVLTTNIDGFRLDAVKHIKFSFFPDWLSYVRSSTGKPLFTVGEYWSYDINKLHNYITKTDGTMSLFDAPLHNKFYTASKSGGAFDMRTLMTNTLMKDQPTLAVTFVDNHDTEPGQALQSWVDPWFKPLAYAFILTRQEGYPCVFYGDYYGIPQYNIPSLKSKIDPLLIARRDYAYGTQHDYLDHSDIIGWTREGGTEKPGSGLAALITDGPGGSKWMYVGKQHAGKVFYDLTGNRSDTVTINSDGWGEFKVNGGSVSVWVPRKTTVSTIARP

SEQ ID NO: 19467 - protein, 485 aa, Synthetic construct
HHNGTNGTMMQYFEWHLPNDGNHWNRLRDDASNLRNRGITAIWIPPAWKGTSQNDVGYGAYDLYDLGEFNQKGTVRTKYGTRSQLESAIHALKNNGVQVYGDVVMNHRMGADATETISAVEVNPSNRNQVTSGAYNISAWTDFEFPGRGNTYSSFKWHSYYFDGVDWDQSRQLSGKIYQIQGTGKAWDWEVDSENGNYDYLMGADIDMDHPEVVNELRRWGEWYTNTLNLDGFRIDAVKHIKYSFTRDWLTHVRNATGKEMFAVAEFWKNDLGALENYLNKTNWNHSVFDVPLHYNLYNASNSGGNYDMAKLLNGTVVQKHPMHAVTFVDNHDSQPGESLESFVQEWFKPLAYALILTREQGYPSVFYGDYYGIPTHSVPAMKAKIDPILEARQNFAYGTQHDYFDHHNIIGWTREGNTTHPNSGLATIMSDGPGGEKWMYVGQNKAGQVWHDITGNKPGTVTINADGWANFSVNGGSVSIWVKR

SEQ ID NO: 19468 - protein, 485 aa, Bacillus sp. 707
HHNGTNGTMMQYFEWYLPNDGNHWNRLNSDASNLKSKGITAVWIPPAWKGASQNDVGYGAYDLYDLGEFNQKGTVRTKYGTRSQLQAAVTSLKNNGIQVYGDVVMNHKGGADATEMVRAVEVNPNNRNQEVTGEYTIEAWTRFDFPGRGNTHSSFKWRWYHFDGVDWDQSRRLNNRIYKFRGHGKAWDWEVDTENGNYDYLMYADIDMDHPEVVNELRNWGVWYTNTLGLDGFRIDAVKHIKYSFTRDWINHVRSATGKNMFAVAEFWKNDLGAIENYLQKTNWNHSVFDVPLHYNLYNASKSGGNYDMRNIFNGTVVQRHPSHAVTFVDNHDSQPEEALESFVEEWFKPLAYALTLTREQGYPSVFYGDYYGIPTHGVPAMRSKIDPILEARQKYAYGKQNDYLDHHNIIGWTREGNTAHPNSGLATIMSDGAGGSKWMFVGRNKAGQVWSDITGNRTGTVTINADGWGNFSVNGGSVSIWHNK

SEQ ID NO: 19469 - protein, 485 aa, Bacillus sp. 707
HHNGTNGTMMQYFEWYLPNDGNHWNRLNSDASNLKSKGITAVWIPPAWKGASQNDVGYGAYDLYDLGEFNQKGTVRTKYGTRSQLQAAVTSLKNNGIQVYGDVVMNHKGGADATEMVRAVEVNPNNRNQEVTGEYTIEAWTRFDFPGRGNTHSSFKWRWYHFDGVDWDQSRRLNNRIYKFRGHGKAWDWEVDTENGNYDYLMYADIDMDHPEVVNELRNWGVWYTNTLGLDGFRIDAVKHIKYSFTRDWINHVRSATGKNMFAVAEFWKNDLGAIENYLQKTNWNHSVFDVPLHYNLYNASKSGGNYDMRNIFNGTVVQRHPSHAVTFVDNHDSQPEEALESFVEEWFKPLAYALTLTREQGYPSVFYGDYYGIPTHGVPAMRSKIDPILEARQKYAYGKQNDYLDHHNIIGWTREGNTAHPNSGLATIMSDGAGGSKWMFVGRNKAGQVWSDITGNRTGTVTINADGWGNFSVNGGSVSIWVGK

SEQ ID NO: 19470 - protein, 485 aa, Bacillus sp. 707
HHNGTNGTMMQYFEWYLPNDGNHWNRLNSDASNLKSKGITAVWIPPAWKGASQNDVGYGAYDLYDLGEFNQKGTVRTKYGTRSQLQAAVTSLKNNGIQVYGDVVMNHKGGADATEMVRAVEVNPNNRNQEVTGEYTIEAWTRFDFPGRGNTHSSFKWRWYHFDGVDWDQSRRLNNRIYKFRGHGKAWDWEVDTENGNYDYLMYADIDMDHPEVVNELRNWGVWYTNTLGLDGFRIDAVKHIKYSFTRDWINHVRSATGKNMFAVAEFWKNDLGAIENYLQKTNWNHSVFDVPLHYNLYNASKSGGNYDMRNIFNGTVVQRHPSHAVTFVDNHDSQPEEALESFVEEWFKPLAYALTLTREQGYPSVFYGDYYGIPTHGVPAMRSKIDPILEARQKYAYGKQNDYLDHHNIIGWTREGNTAHPNSGLATIMSDGAGGSKWMFVGRNKAGQVWSDITGNRTGTVTINADGWGNFSVNGGSVSIWSNK

SEQ ID NO: 19471 - protein, 485 aa, Bacillus sp. 707
HHNGTNGTMMQYFEWYLPNDGNHWNRLNSDASNLKSKGITAVWIPPAWKGASQNDVGYGAYDLYDLGEFNQKGTVRTKYGTRSQLQAAVTSLKNNGIQVYGDVVMNHKGGADATEMVRAVEVNPNNRNQEVTGEYTIEAWTRFDFPGRGNTHSSFKWRWYHFDGVDWDQSRRLNNRIYKFRGHGKAWDWEVDTENGNYDYLMYADIDMDHPEVVNELRNWGVWYTNTLGLDGFRIDAVKHIKYSFTRDWINHVRSATGKNMFAVAEFWKNDLGAIENYLQKTNWNHSVFDVPLHYNLYNASKSGGNYDMRNIFNGTVVQRHPSHAVTFVDNHDSQPEEALESFVEEWFKPLAYALTLTREQGYPSVFYGDYYGIPTHGVPAMRSKIDPILEARQKYAYGKQNDYLDHHNIIGWTREGNTAHPNSGLATIMSDGAGGSKWMFVGRNKAGQVWSDITGNRTGTVTINADGWGNFSVNGGSVSIWGNK

SEQ ID NO: 19472 - protein, 485 aa, Bacillus sp. 707
HHNGTNGTMMQYFEWYLPNDGNHWNRLNSDASNLKSKGITAVWIPPAWKGASQNDVGYGAYDLYDLGEFNQKGTVRTKYGTRSQLQAAVTSLKNNGIQVYGDVVMNHKGGADATEMVRAVEVNPNNRNQEVTGEYTIEAWTRFDFPGRGNTHSSFKWRWYHFDGVDWDQSRRLNNRIYKFRGHGKAWDWEVDTENGNYDYLMYADIDMDHPEVVNELRNWGVWYTNTLGLDGFRIDAVKHIKYSFTRDWINHVRSATGKNMFAVAEFWKNDLGAIENYLQKTNWNHSVFDVPLHYNLYNASKSGGNYDMRNIFNGTVVQRHPSHAVTFVDNHDSQPEEALESFVEEWFKPLAYALTLTREQGYPSVFYGDYYGIPTHGVPAMRSKIDPILEARQKYAYGKQNDYLDHHNIIGWTREGNTAHPNSGLATIMSDGAGGSKWMFVGRNKAGQVWSDITGNRTGTVTINADGWGNFSVNGGSVSIWRNK

SEQ ID NO: 19473 - protein, 482 aa, Bacillus sp.
HHNGTNGTMMQYFEWHLPNDGNHWNRLRDDASNLRNRGITAIWIPPAWKGTSQNDVGYGAYDLYDLGEFNQKGTVRTKYGTRSQLESAIHALKNNGVQVYGDVVMNHKAGADGTEFVDAVEVDPSNRNQETSGTYQIQAYTKFDFPGRGNTYSSFKWRWYHFDGTDWDESRKFNRIYKFTGKAWDWEVDTEFGNYDYLMFADYDMDHPEVVNELRRWGEWYTSTLNLDGFRIDAVKHIKFSFTRDWLTHVRNATGKGMFAVAEFWKNDLGALENYLSKTNWNHSVFDVPLHYNLYNASNSRGNYDMAKLLNGTVVQKHPMAAVTFVDNHDSQPGESLESFVQEWFKPLAYALILTREQGYPSVFYGDYYGIPTHSVPAMKAKIDPILEARQNFAYGTQHDYFDHHNIIGWTREGNTTHPNSGLATIMSDGPGGEKWMYVGQNKAGQVWHDITGNKPGTVTINADGWANFSVNGGSVSIWVKR

SEQ ID NO: 19474 - protein, 484 aa, Synthetic construct
HHNGTNGTMMQYFEWYLPNDGNHWNRLRSDASNLKDKGITAVWIPPAWKGASQNDVGYGAYDLYDLGEFNQKGTVRTKYGTRNQLQAAVTALKSNGIQVYGDVVMNHKGGADATEMVRAVEVNPSNRNQEVSGDYTIEAWTKFDFPGRGNTHSNFKWRWYHFDGVDWDQSRQLQNRIYKFRGDGKGWDWEVDTENGNYDYLMYADIDMDHPEVVNELRNWGVWYTNTLGLDGFRIDAVKHIKYSFTRDWLTHVRNTTGKNMFAVAEFWKNDIGAIENYLSKTNWNHSVFDVPLHYNLYNASRSGGNYDMRQIFNGTVVQRHPTHAVTFVDNHDSQPEEALESFVEEWFKPLAYALTLTRDQGYPSVFYGDYYGIPTHGVPAMKSKIDPILEARQKYAYGKQNDYLDHHNMIGWTREGNTAHPNSGLATIMSDGPGGNKWMYVGRNKAGQVWRDITGNRSGTVTINADGWGNFSVNGGSVSIWVN

SEQ ID NO: 19475 - protein, 484 aa, Synthetic construct
HHNGTNGTMMQYFEWYLPNDGNHWNRLRSDASNLKDKGITAVWIPPAWKGASQNDVGYGAYDLYDLGEFNQKGTVRTKYGTRNQLQAAVTALKSNGIQVYGDVVMNHKGGADATEWVRAVEVNPSNRNQEVSGDYTIEAWTKFDFPGRGNTHSNFKWRWYHFDGVDWDQSRQLNNRIYKFRGDGKGWDWEVDTENGNYDYLMYADIDMDHPEVVNELRNWGVWYTNTLGLDGFRIDAVKHIKYSFTRDWLTHVRNTTGKNMFAVAEFWKNDIGAIENYLSKTNWNHSVFDVPLHYNLYNASRSGGNYDMRQIFNGTVVQRHPTHAVTFVDNHDSQPEEALESFVEEWFKPLAYALTLTRDQGYPSVFYGDYYGIPTHGVPAMKSKIDPILEARQKYAYGKQNDYLDHHNMIGWTREGNTAHPNSGLATIMSDGPGGNKWMYVGRNKAGQVWRDITGNRSGTVTINADGWGNFSVNGGSVSIWVN

SEQ ID NO: 19476 - protein, 484 aa, Synthetic construct
AAAPFNGTMMQYFEWYLPDDGTLWTKVANEANNLSSLGITALWLPPAYKGTSRSDVGYGVYDLYDLGEFNQKGAVRTKYGTKAQYLQAIQAAHAAGMQVYADVVFNHKAGADGTELVDAVEVNPSDRNQEISGTYQIQAWTKFDFPGRGNTYSSFKWRWYHFDGTDWDESRKLNRIYKFRGTGKAWDWEVDTENGNYDYLMYADLDMDHPEVVTELKNWGKWYVNTTNIDGFRLDAVKHIKFSFFPDWLSYVRSQTGKPLFTVGEYWSYDINKLHNYIMKTNGTMSLFDAPLHNKFYTASKSGGTFDMRTLMTNTLMKDQPTLAVTFVDNHDTEPGQALQSWVDPWFKPLAYAFILTRQEGYPCVFYGDYYGIPQYNIPSLKSKIDPLLIARRDYAYGTQHDYLDHSDIIGWTREGVTEKPGSGLAALITDGPGGSKWMYVGKQHAGKVFYDLTGNRSDTVTINSDGWGEFKVNGGSVSVWVPR

SEQ ID NO: 19477 - protein, 481 aa, Bacillus sp.
HNGTNATMMQYFEWHLPNDGNHWNRLRDDASNLRNRGITAIWIPPAWKGTSQNDVGYGAYDLYDLGEFNQKGTVRTKYGTRSQLESAIHALKNNGVQVYGDVVMNHKAGADGTEFVDAVEVDPSNRNQETSGTYQIQAWTKFDFPGRGNTYSSFKWRWYHFDGTDWDESRKLNRIYKFDGKAWDWEVDTENGNYDYLMFADLDMDHPEVVNELRRWGEWYTNTLNLDGFRIDAVKHIKFSFTRDWLTHVRNATGKGMFAVAEFWKNDLGALENYLSKTNWNHSVFDVPLHYNLYNASNSRGNYDMAKLLNGTVVQKHPMHAVTFVDNHDSQPGESLESFVQEWFKPLAYALILTREQGYPSVFYGDYYGIPTHSVPAMKAKIDPILAARQNFAYGTQHDYFDHHNIIGWTREGNTTHPNSGLATIMSDGPGGEKWMYVGQNKAGQVWHDITGNKPGTVTINADGWANFSVNKGSVSIWVKR

SEQ ID NO: 19478 - protein, 481 aa, Bacillus sp.
HNGTNATMMQYFEWHLPNDGNHWNRLRDDASNLRNRGITAIWIPPAWKGTSQNDVGYGAYDLYDLGEFNQKGTVRTKYGTRSQLESAIHALKNNGVQVYGDVVMNHKAGADGTEFVDAVEVDPSNRNQETSGTYQIQAWTKFDFPGRGNTYSSFKWRWYHFDGTDWDESRKLNRIYKFEGKAWDWEVDTENGNYDYLMFADLDMDHPEVVNELRRWGEWYTNTLNLDGFRIDAVKHIKFSFTRDWLTHVRNATGKGMFAVAEFWKNDLGALENYLSKTNWNHSVFDVPLHYNLYNASNSRGNYDMAKLLNGTVVQKHPMHAVTFVDNHDSQPGESLESFVQEWFKPLAYALILTREQGYPSVFYGDYYGIPTHSVPAMKAKIDPILAARQNFAYGTQHDYFDHHNIIGWTREGNTTHPNSGLATIMSDGPGGEKWMYVGQNKAGQVWHDITGNKPGTVTINADGWANFSVNKGSVSIWVKR

SEQ ID NO: 19479 - protein, 481 aa, Bacillus sp.
HNGTNATMMQYFEWHLPNDGNHWNRLRDDASNLRNRGITAIWIPPAWKGTSQNDVGYGAYDLYDLGEFNQKGTVRTKYGTRSQLESAIHALKNNGVQVYGDVVMNHKAGADGTEFVDAVEVDPSNRNQETSGTYQIQAWTKFDFPGRGNTYSSFKWRWYHFDGTDWDESRKLNRIYKFMGKAWDWEVDTENGNYDYLMFADLDMDHPEVVNELRRWGEWYTNTLNLDGFRIDAVKHIKFSFTRDWLTHVRNATGKGMFAVAEFWKNDLGALENYLSKTNWNHSVFDVPLHYNLYNASNSRGNYDMAKLLNGTVVQKHPMHAVTFVDNHDSQPGESLESFVQEWFKPLAYALILTREQGYPSVFYGDYYGIPTHSVPAMKAKIDPILAARQNFAYGTQHDYFDHHNIIGWTREGNTTHPNSGLATIMSDGPGGEKWMYVGQNKAGQVWHDITGNKPGTVTINADGWANFSVNKGSVSIWVKR

SEQ ID NO: 19480 - protein, 481 aa, Bacillus sp.
HNGTNATMMQYFEWHLPNDGNHWNRLRDDASNLRNRGITAIWIPPAWKGTSQNDVGYGAYDLYDLGEFNQKGTVRTKYGTRSQLESAIHALKNNGVQVYGDVVMNHKAGADGTEFVTAVEVDPSNRNQETSGTYQIQAWTKFDFPGRGNTYSSFKWRWYHFDGTDWDESRKLNRIYKFTGKAWDWEVDTENGNYDYLMFADLDMDHPEVVNELRRWGEWYTNTLNLDGFRIDAVKHIKFSFTRDWLTHVRNATGKGMFAVAEFWKNDLGALENYLSKTNWNHSVFDVPLHYNLYNASNSRGNYDMAKLLNGTVVQKHPMHAVTFVDNHDSQPGESLESFVQEWFKPLAYALILTREQGYPSVFYGDYYGIPTHSVPAMKAKIDPILAARQNFAYGTQHDYFDHHNIIGWTREGNTTHPNSGLATIMSDGPGGEKWMYVGQNKAGQVWHDITGNKPGTVTINADGWANFSVNKGSVSIWVKR

SEQ ID NO: 19481 - protein, 481 aa, Bacillus sp.
HNGTNATMMQYFEWHLPNDGNHWNRLRDDASNLRNRGITAIWIPPAWKGTSQNDVGYGAYDLYDLGEFNQKGTVRTKYGTRSQLESAIHALKNNGVQVYGDVVMNHKAGADGTELVDAVEVNPSDRNQEISGTYQIQAYTKFDFPGRGNTYSSFKWRWYHFDGTDWDESRKLNRIYKFTGKAWDWEVDTEFGNYDYLMYADYDMDHPEVVNELRRWGEWYTNTLNLDGFRIDAVKHIKFSFTRDWLTHVRNATGKGMFAVAEFWKNDLGALENYLSKTNWNHSVFDVPLHYNLYNASNSRGNYDMAKLLNGTVVQKHPMHAVTFVDNHDSQPGESLESFVQEWFKPLAYALILTREQGYPSVFYGDYYGIPTHSVPAMKAKIDPILAARQNFAYGTQHDYFDHHNIIGWTREGNTTHPNSGLATIMSDGPGGEKWMYVGQNKAGQVWHDITGNKPGTVTINADGWANFSVNKGSVSIWVKR

SEQ ID NO: 19482 - protein, 481 aa, Bacillus sp.
HNGTNATMMQYFEWHLPNDGNHWNRLRDDASNLRNRGITAIWIPPAWKGTSQNDVGYGAYDLYDLGEFNQKGTVRTKYGTRSQLESAIHALKNNGVQVYGDVVMNHKAGADGTEFVDAVEVDPSNRNQETSGTYQIQAWTKFDFPGRGNTYSSFKWRWYHFDGTDWDESRKLNRIYKFTGKAWDWEVDTENGNYDYLMFADLDMDHPEVVNELRRWGEWYTNTLNLDGFRIDAVKHIKFSFTRDWLTHVRNATGKGMFAVAEFWKNDLGALENYLSKTNWNHSVFDVPLHYNLYNASNSRGNYDMAKLLNGTVVQKHPMHAVTFVDNHDSQPGESLESFVQEWFKPLAYALILTREQGYPSVFYGDYYGIPTHSVPAMKAKIDPILAARQNFAYGTQHDYFDHHNIIGWTREGNTTHPNSGLATIMSDGPGGEKWMYVGQNKAGQVWHDITGNKPGTVTINADGWANFSVNKGSVSIWVKR

SEQ ID NO: 19483 - protein, 481 aa, Bacillus sp.
HNGTNATMMQYFEWHLPNDGNHWNRLRDDASNLRNRGITAIWIPPAWKGTSQNDVGYGAYDLYDLGEFNQKGTVRTKYGTRSQLESAIHALKNNGVQVYGDVVMNHKAGADSTEWVDAVEVNPSNRNQETSGTYQIQAYTKFDFPGRGNTYSSFKWRWYHFDGTDWDESRKLNRIYKFTGKAWDWEVDTEFGNYDYLMFADVDMDHPEVVNELRRWGEWYTNTLNLDGFRIDAVKHIKFSFTRDWLTHVRNATGKGMFAVAEFWKNDLGALENYLSKTNWNHSVFDVPLHYNLYNASNSRGNYDMAKLLNGTVVQKHPMHAVTFVDNHDSQPGESLESFVQEWFKPLAYALILTREQGYPSVFYGDYYGIPTHSVPAMKAKIDPILAARQNFAYGTQHDYFDHHNIIGWTREGNTTHPNSGLATIMSDGPGGEKWMYVGQNKAGQVWHDITGNKPGTVTINADGWANFSVNKGSVSIWVKR

SEQ ID NO: 19484 - protein, 481 aa, Bacillus sp.
HNGTNATMMQYFEWHLPNDGNHWNRLRDDASNLRNRGITAIWIPPAWKGTSQNDVGYGAYDLYDLGEFNQKGTVRTKYGTRSQLESAIHALKNNGVQVYGDVVMNHKAGADGTEFVDAVEVDPSNRNQETSGTYQIQAWTKFDFPGRGNTYSSFKWRWYHFDGTDWDESRKLNRIYKFSGKAWDWEVDTENGNYDYLMFADLDMDHPEVVNELRRWGEWYTNTLNLDGFRIDAVKHIKFSFTRDWLTHVRNATGKGMFAVAEFWKNDLGALENYLSKTNWNHSVFDVPLHYNLYNASNSRGNYDMAKLLNGTVVQKHPMHAVTFVDNHDSQPGESLESFVQEWFKPLAYALILTREQGYPSVFYGDYYGIPTHSVPAMKAKIDPILAARQNFAYGTQHDYFDHHNIIGWTREGNTTHPNSGLATIMSDGPGGEKWMYVGQNKAGQVWHDITGNKPGTVTINADGWANFSVNKGSVSIWVKR

SEQ ID NO: 19485 - protein, 481 aa, Bacillus sp.
HNGTNATMMQYFEWHLPNDGNHWNRLRDDASNLRNRGITAIWIPPAWKGTSQNDVGYGAYDLYDLGEFNQKGTVRTKYGTRSQLESAIHALKNNGVQVYGDVVMNHKAGADGTEFVDAVEVDPSNRNQETSGTYQIQAWTKFDFPGRGNTYSSFKWRWYHFDGTDWDESRKLNRIYKFTGKAWDWEVDTENGNYDYLMFADYDMDHPEVVNELRRWGEWYTNTLNLDGFRIDAVKHIKFSFTRDWLTHVRNATGKGMFAVAEFWKNDLGALENYLSKTNWNHSVFDVPLHYNLYNASNSRGNYDMAKLLNGTVVQKHPMHAVTFVDNHDSQPGESLESFVQEWFKPLAYALILTREQGYPSVFYGDYYGIPTHSVPAMKAKIDPILAARQNFAYGTQHDYFDHHNIIGWTREGNTTHPNSGLATIMSDGPGGEKWMYVGQNKAGQVWHDITGNKPGTVTINADGWANFSVNKGSVSIWVKR

SEQ ID NO: 19486 - protein, 481 aa, Bacillus sp.
HNGTNSTMMQYFEWHLPNDGNHWNRLRDDASNLRNRGITAIWIPPAWKGTSQNDVGYGAYDLYDLGEFNQKGTVRTKYGTRSQLESAIHALKNNGVQVYGDVVMNHKAGADGTEFVDAVEVDPSNRNQETSGTYQIQAWTKFDFPGRGNTYSSFKWRWYHFDGTDWDESRKLNRIYKFTGKAWDWEVDTENGNYDYLMFADLDMDHPEVVNELRRWGEWYTNTLNLDGFRIDAVKHIKFSFTRDWLTHVRNATGKGMFAVAEFWKNDLGALENYLSKTNWNHSVFDVPLHYNLYNASNSRGNYDMAKLLNGTVVQKHPMHAVTFVDNHDSQPGESLESFVQEWFKPLAYALILTREQGYPSVFYGDYYGIPTHSVPAMKAKIDPILAARQNFAYGTQHDYFDHHNIIGWTREGNTTHPNSGLATIMSDGPGGEKWMYVGQNKAGQVWHDITGNKPGTVTINADGWANFSVNKGSVSIWVKR

SEQ ID NO: 19487 - protein, 481 aa, Bacillus sp.
HNGTNATMMQYFEWHLPNDGNHWNRLRDDASNLRNRGITAIWIPPAWKGTSQNDVGYGAYDLYDLGEFNQKGTVRTKYGTRSQLESAIHALKNNGVQVYGDVVMNHKAGADGTEFVTAVEVDPSNRNQETSGTYQIQAYTKFDFPGRGNTYSSFKWRWYHFDGTDWDESRKLNRIYKFTGKAWDWEVDTENGNYDYLMFADLDMDHPEVVNELRRWGEWYTNTLNLDGFRIDAVKHIKFSFTRDWLTHVRNATGKGMFAVAEFWKNDLGALENYLSKTNWNHSVFDVPLHYNLYNASNSGGNYDMAKLLNGTVVQKHPMHAVTFVDNHDSQPGESLESFVQEWFKPLAYALILTREQGYPSVFYGDYYGIPTHSVPAMKAKIDPILAARQNFAYGTQHDYFDHHNIIGWTREGNTTHPNSGLATIMSDGPGGEKWMYVGQNKAGQVWHDITGNKPGTVTINADGWANFSVNGASVSIWVKR

SEQ ID NO: 19488 - protein, 481 aa, Bacillus sp.
HNGTNATMMQYFEWHLPNDGNHWNRLRDDASNLRNRGITAIWIPPAWKGTSQNDVGYGAYDLYDLGEFNQKGTVRTKYGTRSQLESAIHALKNNGVQVYGDVVMNHKAGADGTEFVDAVEVDPSNRNQETSGTYQIQAWTKFDFPGRGNTYSSFKWRWYHFDGTDWDESRKLNRIYKFGGKAWDWEVDTENGNYDYLMFADLDMDHPEVVNELRRWGEWYTNTLNLDGFRIDAVKHIKFSFTRDWLTHVRNATGKGMFAVAEFWKNDLGALENYLSKTNWNHSVFDVPLHYNLYNASNSRGNYDMAKLLNGTVVQKHPMHAVTFVDNHDSQPGESLESFVQEWFKPLAYALILTREQGYPSVFYGDYYGIPTHSVPAMKAKIDPILAARQNFAYGTQHDYFDHHNIIGWTREGNTTHPNSGLATIMSDGPGGEKWMYVGQNKAGQVWHDITGNKPGTVTINADGWANFSVNKGSVSIWVKR

SEQ ID NO: 19489 - protein, 481 aa, Bacillus sp.
HNGTNATMMQYFEWHLPNDGNHWNRLRDDASNLRNRGITAIWIPPAWKGTSQNDVGYGAYDLYDLGEFNQKGTVRTKYGTRSQLESAIHALKNNGVQVYGDVVMNHKAGADGTEFVDAVEVNPSNRNQETSGTYQIQAYTKFDFPGRGNTYSSFKWRWYHFDGTDWDESRKLNRIYKFTGKAWDWEVDTEFGNYDYLMFADVDMDHPEVVNELRRWGEWYTNTLNLDGFRIDAVKHIKFSFTRDWLTHVRNATGKGMFAVAEFWKNDLGALENYLSKTNWNHSVFDVPLHYNLYNASNSRGNYDMAKLLNGTVVQKHPMHAVTFVDNHDSQPGESLESFVQEWFKPLAYALILTREQGYPSVFYGDYYGIPTHSVPAMKAKIDPILAARQNFAYGTQHDYFDHHNIIGWTREGNTTHPNSGLATIMSDGPGGEKWMYVGQNKAGQVWHDITGNKPGTVTINADGWANFSVNKGSVSIWVKR

SEQ ID NO: 19490 - protein, 481 aa, Bacillus sp.
HNGTNATMMQYFEWHLPNDGNHWNRLRDDASNLRNRGITAIWIPPAWKGTSQNDVGYGAYDLYDLGEFNQKGTVRTKYGTRSQLESAIHALKNNGVQVYGDVVMDHKGGADGTEFVDAVEVDPSNRNQETSGTYQIQAYTKFDFPGRGNTYSSFKWRWYHFDGTDWDESRKLNRIYKFTGKAWDWEVDTEFGNYDYLMYADVDMDHPEVVNELRRWGEWYTNTLNLDGFRIDAVKHIKFSFTRDWLTHVRNATGKGMFAVAEFWKNDLGALENYLSKTNWNHSVFDVPLHYNLYNASNSRGNYDMAKLLNGTVVQKHPMHAVTFVDNHDSQPGESLESFVQEWFKPLAYALILTREQGYPSVFYGDYYGIPTHSVPAMKAKIDPILAARQNFAYGTQHDYFDHHNIIGWTREGNTTHPNSGLATIMSDGPGGEKWMYVGQNKAGQVWHDITGNKPGTVTINADGWANFSVNKGSVSIWVKR

SEQ ID NO: 19491 - protein, 481 aa, Bacillus sp.
HNGTNATMMQYFEWHLPNDGNHWNRLRDDASNLRNRGITAIWIPPAWKGTSQNDVGYGAYDLYDLGEFNQKGTVRTKYGTRSQLESAIHALKNNGVQVYGDVVMNHKAGADGTEFVDAVEVDPSNRNQETSGTYQIQAWTKFDFPGRGNTYSSFKWRWYHFDGTDWDESRKLNRIYKFRLKAWDWEVDTENGNYDYLMFADLDMDHPEVVNELRRWGEWYTNTLNLDGFRIDAVKHIKFSFTRDWLTHVRNATGKGMFAVAEFWKNDLGALENYLSKTNWNHSVFDVPLHYNLYNASNSRGNYDMAKLLNGTVVQKHPMHAVTFVDNHDSQPGESLESFVQEWFKPLAYALILTREQGYPSVFYGDYYGIPTHSVPAMKAKIDPILAARQNFAYGTQHDYFDHHNIIGWTREGNTTHPNSGLATIMSDGPGGEKWMYVGQNKAGQVWHDITGNKPGTVTINADGWANFSVNKGSVSIWVKR

SEQ ID NO: 19492 - protein, 481 aa, Bacillus sp.
HNGTNATMMQYFEWHLPNDGNHWNRLRDDASNLRNRGITAIWIPPAWKGTSQNDVGYGAYDLYDLGEFNQKGTVRTKYGTRSQLESAIHALKNNGVQVYGDVVMNHKAGADGTEFVDAVEVDPSNRNQETSGTYQIQAWTKFDFPGRGNTYSSFKWRWYHFDGTDWDESRKLNRIYKFTGKAWDWEVDTENGNYDYLMFADLDMDHPEVVNELRRWGEWYTNTLNLDGFRIDAVKHIKFSFTRDWLTHVRNATGKGMFAVAEFWKNDLGALENYLSKTNWNHSVFDVPLHYNLYNASNSRGNYDMAKLLNGTVVQKHPMHAVTFVDNHDSQPGESLESFVQEWFKPLAYALILTREQGYPSVFYGDYYGIPTHSVPAMKAKIDPILAARQNFAYGTQHDYFDHHNIIGWTREGNTTHPNSGLATIMSDGPGGEKWMYVGQNKAGQVWHDITGNKPGTVTINADGWANFSVNGASVSIWVKR

SEQ ID NO: 19493 - protein, 481 aa, Bacillus sp.
HNGTNATMMQYFEWHLPNDGNHWNRLRDDASNLRNRGITAIWIPPAWKGTSQNDVGYGAYDLYDLGEFNQKGTVRTKYGTRSQLESAIHALKNNGVQVYGDVVMNHKAGADGTEFVDAVEVNPSNRNQETSGTYQIQAWTKFDFPGRGNTYSSFKWRWYHFDGTDWDESRKLNRVYKFTGKAWDWEVDTENGNYDYLMFADLDMDHPEVVNELRRWGEWYTNTLNLDGFRIDAVKHIKFSFTRDWLTHVRNATGKGMFAVAEFWKNDLGALENYLSKTNWNHSVFDVPLHYNLYNASNSRGNYDMAKLLNGTVVQKHPMHAVTFVDNHDSQPGESLESFVQEWFKPLAYALILTREQGYPSVFYGDYYGIPTHSVPAMKAKIDPILAARQNFAYGTQHDYFDHHNIIGWTREGNTTHPNSGLATIMSDGPGGEKWMYVGQNKAGQVWHDITGNKPGTVTINADGWANFSVNKGSVSIWVKR

SEQ ID NO: 19494 - protein, 481 aa, Bacillus sp.
HNGTNATMMQYFEWHLPNDGNHWNRLRDDASNLRNRGITAIWIPPAWKGTSQNDVGYGAYDLYDLGEFNQKGTVRTKYGTRSQLESAIHALKNNGVQVYGDVVMNHKAGADGTEFVDAVEVDPSNRNQETSGTYQIQAWTKFDFPGRGNTYSSFKWRWYHFDGTDWDESRKLNRIYKFTGKAWDWEVDTENGNYDYLMFADFDMDHPEVVNELRRWGEWYTNTLNLDGFRIDAVKHIKFSFTRDWLTHVRNATGKGMFAVAEFWKNDLGALENYLSKTNWNHSVFDVPLHYNLYNASNSRGNYDMAKLLNGTVVQKHPMHAVTFVDNHDSQPGESLESFVQEWFKPLAYALILTREQGYPSVFYGDYYGIPTHSVPAMKAKIDPILAARQNFAYGTQHDYFDHHNIIGWTREGNTTHPNSGLATIMSDGPGGEKWMYVGQNKAGQVWHDITGNKPGTVTINADGWANFSVNKGSVSIWVKR

SEQ ID NO: 19495 - protein, 483 aa, Synthetic construct
HHNGTNGTMMQYFEWYLPNDGNHWNRLRSDASNLKDKGITAVWIPPAWKGASQNDVGYGAYDLYDLGEFNQKGTVRTKYGTRNQLQAAVTALKSNGIQVYGDVVMNHKGGADATEVRAVEVNPSNRNQEVSGDYTIEAWTKFDFPGRGNTHSNFKWRWYHFDGVDWDQSRQLQNRIYKFRGDGKGWDWEVDTENGNYDYLMYADIDMDHPEVVNELRNWGVWYTNTLGLDGFRIDAVKHIKYSFTRDWLTHVRNTTGKNMFAVAEFWKNDIGAIENYLSKTNWNHSVFDVPLHYNLYNASRSGGNYDMRQIFNGTVVQRHPTHAVTFVDNHDSQPEEALESFVEEWFKPLAYALTLTRDQGYPSVFYGDYYGIPTHGVPAMKSKIDPILEARQKYAYGKQNDYLDHHNMIGWTREGNTAHPNSGLATIMSDGPGGNKWMYVGRNKAGQVWRDITGNRSGTVTINADGWGNFSVNGGSVSIWVN

SEQ ID NO: 19496 - protein, 483 aa, Synthetic construct
HHNGTNGTMMQYFEWYLPNDGNHWNRLRSDASNLKDKGITAVWIPPAWKGASQNDVGYGAYDLYDLGEFNQKGTRTKYGTRNQLQAAVTALKSNGIQVYGDVVMNHKGGADATEWVRAVEVNPSNRNQEVSGDYTIEAWTKFDFPGRGNTHSNFKWRWYHFDGVDWDQSRQLQNRIYKFRGDGKGWDWEVDTENGNYDYLMYADIDMDHPEVVNELRNWGVWYTNTLGLDGFRIDAVKHIKYSFTRDWLTHVRNTTGKNMFAVAEFWKNDIGAIENYLSKTNWNHSVFDVPLHYNLYNASRSGGNYDMRQIFNGTVVQRHPTHAVTFVDNHDSQPEEALESFVEEWFKPLAYALTLTRDQGYPSVFYGDYYGIPTHGVPAMKSKIDPILEARQKYAYGKQNDYLDHHNMIGWTREGNTAHPNSGLATIMSDGPGGNKWMYVGRNKAGQVWRDITGNRSGTVTINADGWGNFSVNGGSVSIWVN

SEQ ID NO: 19497 - protein, 478 aa, Aspergillus tamarii
ATPADWRSQSIYFLLTDRFARTDGSTTAACNTEDRKYCGGTWQGIIDKLDYIQGMGFTAIWITPVTGQLPQHTAYGDAYHGYWQQDIYSLNENYGTADDLKALSSALHERGMYLMVDVVANHMGYDGAGASVDYSVFKPFNSQEYFHSFCLIQNYEDQTQVENCWLGDNTVSLPDLDTTKDEVKNEWYDWVGTLVSNYSIDGLRVDTVKHVQKDFWPGYNKAAGVYCIGEVLDGDPAYTCPYQDVMDGVLNYPIYYPLLNAFKSTSGSMNDLYNMINTVKSDCPDSTLLGTFVENHDNPRFASYTNDIALAKNVAAFIILNDGIPIIYAGQEQHYAGGNDPANREATWLSGYATDSELYKLIASANAIRSHAISKDTGFVTYKNWPIYKDDTTIAMRKGTDGSQVVTILSNKGASGDSYTLSLGDTGYKAGQQLTEVIGCTTVTVGSDGKVPVPMAGGLPRVLYPTEKLADSKICSSS

SEQ ID NO: 19498 - protein, 515 aa, Bacillus sp.
AAPFNGTMMQYFEWHLPDDGTLWTKLANDANNLSSLGITAIWIPPAYKGTSRADVGYGVYDLYDLGEFNQKGTVRTKYGTKAQYLQAIQAAHAAGINVYADVVFDHKGGADGTEWVDAVEVNPSDRNQDISGTYQIQAWTKFDFPGRGNTYSSFKWRWFHFDGVDWDESRKLSRIFKFRGIGKAWDWEVDTENGNYDYLLYADIDMDHPEVVTELKNWGKWFVNTTNIDGFRLDAIKHIKFSFFPDWLSHVRSQTGKPLFTVGEYWSYDINKLHNYITKTNGTMSLFDAPLHNKFYTASKSGGAFDMRTILTNSLMKDQPTLAVTFVDNHDTEPGQALQSWVDPWFKPLAYAFILTRQEGYPCVFYGDYYGIPNYNIPALKSKIDPLLIARRDYAYGTQHDYLDHSDIIGWTREGVSEKPGSGLAAIISDGPGGSKWMYVGKQHAGKVFYDLTGNRSDSVTINSDGWGEFKVNGGSVSVWVPRKTTVSTIARPITTRPWTGEFVRWTEPRLVAWP

SEQ ID NO: 19499 - protein, 532 aa, Geobacillus stearothermophilus
LLAFLLTASLFCPTGRHAKAAAPFNGTMMQYFEWYLPDDGTLWTKVANEANNLSSLGITALSLPPAYKGTSRSDVGYGVYDLYDLGEFNQKGTVRTKYGTKAQYLQAIQAAHAAGMQVYADVVFDHKGGADGTEWVDAVEVNPSDRNQEISGTYQIQAWTKFDFPGRGNTYSSFKWRWYHFDGVDWDESRKLSRIYKFIGKAWDWEVDTENGNYDYLMYADLDMDHPEVVTELKNWGKWYVNTTNIDGFRLDGLKHIKFSFFPDWLSYVRSQTGKPLFTVGEYWSYDINKLHNYITKTNGTMSLFDAPLHNKFYTASKSGGAFDMRTLMTNTLMKDQPTLAVTFVDNHDTNPAKRCSHGRPWFKPLAYAFILTRQEGYPCVFYGDYYGIPQYNIPSLKSKIDPLLIARRDYAYGTQHDYLDHSDIIGWTREGVTEKPGSGLAALITDGAGRSKWMYVGKQHAGKVFYDLTGNRSDTVTINSDGWGEFKVNGGSVSVWVPRKTTVSTIARPITTRPWTGEFVRWHEPRLVAWP

SEQ ID NO: 19500 - protein, 493 aa, Geobacillus stearothermophilus
AAPFNGTMMQYFEWYLPDNGTLWTKVAREANNLSSLGITALWLPPAYKGTSRSDVGYGVYDLYDLGEFNQKGTVRTKYGTKAQYLRAIQAAHAAGMQVYADVVFDHKGGADGTEWVDAVEVNPSDRNQEISGTYQIQAWTKFDFPGRGNTYSSFKWRWYHFDGVDWDESRKLSRIYKFRGIGKAWDWEVDTENGNYDYLMYADLDMDHPEVVTELKNWGKWYVRTTNIDGFRLDAVKHIKFSFFPDWLSYVRSQTGKPLFTVGEYWSYDIRKLHNYITKTRGTMSLFDAPLHNKFYTASKSGGAFNMRTLMTNTLMKNQPTLAVTFVDNHDTEPGQALQSWVDPWFKPLAYAFILTRQEGYPCVFYGDYYGIPQYNIPSLKSKIDPLLIARRNYAYGTQHDYLDHSDIIGWTREGVTEKPGSGLAALITDGPGGSKWMYVGKQHAGKVFYDLTGNRSNTVTINSDGWGEFKVNGGSVSVWVPRKTTVSTIARP

SEQ ID NO: 19501 - protein, 484 aa, Synthetic construct
HHNGTNGTMMQYFEWYLPNDGNHWNRLRSDASNLKDKGITAVWIPPAWKGASQNDVGYGAYDLYDLGEFNQKGTVRTKYGTRNQLQAAVTALKSNGIQVYGDVVMNHKGGADATEWVRAVEVNPSNRNQEVSGDYTIEAWTKFDFPGRGNTHSNFKWRWYHFDGVDWDQSRQLENRIYKFRGDGKGWDWEVDTENGNYDYLMYADIDMDHPEVVNELRNWGVWYTNTLGLDGFRIDAVKHIKYSFTRDWLTHVRNTTGKNMFAVAEFWKNDIGAIENYLSKTNWNHSVFDVPLHYNLYNASRSGGNYDMRQIFNGTVVQRHPTHAVTFVDNHDSQPEEALESFVEEWFKPLAYALTLTRDQGYPSVFYGDYYGIPTHGVPAMKSKIDPILEARQKYAYGKQNDYLDHHNMIGWTREGNTAHPNSGLATIMSDGPGGNKWMYVGRNKAGQVWRDITGNRSGTVTINADGWGNFSVNGGSVSIWVN

SEQ ID NO: 19502 - protein, 484 aa, Synthetic construct
HHNGTNGTMMQYFEWYLPNDGNHWNRLRSDASNLKDKGITAVWIPPAWKGASQNDVGYGAYDLYDLGEFNQKGTVRTKYGTRNQLQAAVTALKSNGIQVYGDVVMNHKGGADATEWVRAVEVNPSNRNQEVSGDYTIEAWTKFDFPGRGNTHSNFKWRWYHFDGVDWDQSRQLQNRIYKFRGDGKGWDWEVDTENGNYDYLMYADIDMDHPEVVNELRNWGVWYTNTLGLDGFRIDAVKHIKYSFTRDWLTHVRNTTGKNMFAVAEFWKNDIGAIENYLSKTNWNHSVFDVPLHYNLYNASRSGGNYDMRQIFNGTVVQRHPTHAVTFVDNHDSQPEEALESFVEEWFKPLAYALTLTRDQGYPSVFYGDYYGIPTHGVPAMKSKIDPILEARQKYAYGKQNDYLDHHNMIGWTREGNTAHPNSGLATIMSDGPGGNKWMYVGRNKAGQVWRDITGNRNGTVTINADGWGNFSVNGGSVSIWVN

SEQ ID NO: 19503 - protein, 484 aa, Synthetic construct
HHNGTNGTMMQYFEWYLPNDGNHWNRLRSDASNLKDKGITAVWIPPAWKGASQNDVGYGAYDLYDLGEFNQKGTVRTKYGTRNQLQAAVTALKSNGIQVYGDVVMNHKGGADATEWVRAVEVNPSNRNQEVSGDYTIEAWTKFDFPGRGNTHSNFKWRWYHFDGVDWDQSRQLQNRIYKFRGDGKGWDWEVDTENGNYDYLMYADIDMDHPEVVNELRNWGVWYTNTLGLDGFRIDAVKHIKYSFTRDWLTHVRNTTGKNMFAVAEFWKNDIGAIENYLSKTNWNHSVFDVPLHYNLYNASRSGGNYDMRQIFNGTVVQRHPTHAVTFVDNHDSQPEEALESFVEEWFKPLAYALTLTRDQGYPSVFYGDYYGIPTHGVPAMKSKIDPILEARQKYAYGKQNDYLDHHNMIGWTREGNTAHPNSGLATIMSDGEGGNKWMYVGRNKAGQVWRDITGNRSGTVTINADGWGNFSVNGGSVSIWVN

SEQ ID NO: 19504 - protein, 484 aa, Synthetic construct
HHNGTNGTMMQYFEWYLPNDGNHWNRLRSDASNLKDKGITAVWIPPAWKGASQNDVGYGAYDLYDLGEFNQKGTVRTKYGTRNQLQAAVTALKSNGIQVYGDVVMNHKGGADATEWVRAVEVNPSNRNQEVSGDYTIEAWTKFDFPGRGNTHSNFKWRWYHFDGVDWDQSRQLQNRIYKFRGDGKGWDWEVDTENGNYDYLMYADIDMDHPEVVNELRNWGVWYTNTLGLDGFRIDAVKHIKYSFTRDWLTHVRNTTGKNMFAVAEFWKNDIGAIENYLSKTNWNHSVFDVPLHYNLYNASRSGGNYDMRQIFNGTVVQRHPGHAVTFVDNHDSQPEEALESFVEEWFKPLAYALTLTRDQGYPSVFYGDYYGIPTHGVPAMKSKIDPILEARQKYAYGKQNDYLDHHNMIGWTREGNTAHPNSGLATIMSDGPGGNKWMYVGRNKAGQVWRDITGNRSGTVTINADGWGNFSVNGGSVSIWVN

SEQ ID NO: 19505 - protein, 484 aa, Bacillus sp.
HHNGTNGTMMQYFEWYLPNDGNHWNRLRSDASNLKDKGITAVWIPPAWKGASQNDVGYGAYDLYDLGEFNQKGTVRTKYGTRNQLQAAVTALKSNGIQVYGDVVMNHKGGADATEWVRAVEVNPSNRNQEVSGDYTIEAWTKFDFPGRGNTHSNFKWRWYHFDGVDWDQSRQLQNRIYKFRGDGKGWDWEVDTENGNYDYLMYADIDMDHPEVVNELRNWGVWYTNTLGLDGFRIDAVKHIKYSFTRDWLTHVRNTTGKNMFAVAEFWKNDIGAIENYLSKTNWNHSVFDVPLHYNLYNASRSGGNYDMRQIFNGTVVQRHPTHAVTFVDNHDSQPEEALESFVEEWFKPLAYALTLTRDQGYPSVFYGDYYGIPTHGVPAMKSKIDPILEARQKYAYGKQNDYLDHHNMIGWTREGNTAHPNSGLATIMSDGPGGNKWMYVGRNKAGQVWRDITGNRSGTVTINADGWGNFSVNGGSVSIWVN

SEQ ID NO: 19506 - protein, 484 aa, Synthetic construct
HHNGTNGTMMQYFEWYLPNDGNHWNRLRSDASNLKDKGITAVWIPPAWKGASQNDVGYGAYDLYDLGEFNQKGTVRTKYGTRNQLQAAVTALKSNGIQVYGDVVMNHKGGADATEWVEAVEVNPSNRNQEVSGDYTIEAWTKFDFPGRGNTHSNFKWRWYHFDGVDWDQSRQLQNRIYKFRGDGKGWDWEVDTENGNYDYLMYADIDMDHPEVVNELRNWGVWYTNTLGLDGFRIDAVKHIKYSFTRDWLTHVRNTTGKNMFAVAEFWKNDIGAIENYLSKTNWNHSVFDVPLHYNLYNASRSGGNYDMRQIFNGTVVQRHPTHAVTFVDNHDSQPEEALESFVEEWFKPLAYALTLTRDQGYPSVFYGDYYGIPTHGVPAMKSKIDPILEARQKYAYGKQNDYLDHHNMIGWTREGNTAHPNSGLATIMSDGPGGNKWMYVGRNKAGQVWRDITGNRSGTVTINADGWGNFSVNGGSVSIWVN

SEQ ID NO: 19507 - protein, 482 aa, Bacillus sp.
HHNGTNGTMMQYFEWYLPNDGNHWNRLRSDASNLKDKGITAVWIPPAWKGASQNDVGYGAYDLYDLGEFNQKGTVRTKYGTRNQLQAAVTALKSNGIQVYGDVVMNHKGGADATEWVRAVEVNPSNRNQEVSGDYTIEAWTKFDFPGRGNTHSNFKWRWYHFDGVDWDQSRQLQNRIYKFRGKGWDWEVDTENGNYDYLMYADIDMDHPEVVNELRNWGVWYTNTLGLDGFRIDAVKHIKYSFTRDWLTHVRNTTGKNMFAVAEFWKNDIGAIENYLSKTNWNHSVFDVPLHYNLYNASRSGGNYDMRQIFNGTVVQRHPTHAVTFVDNHDSQPEEALESFVEEWFKPLAYALTLTRDQGYPSVFYGDYYGIPTHGVPAMKSKIDPILEARQKYAYGKQNDYLDHHNMIGWTREGNTAHPNSGLATIMSDGPGGNKWMYVGRNKAGQVWRDITGNRSGTVTINADGWGNFSVNGGSVSIWVN

SEQ ID NO: 19508 - protein, 484 aa, Synthetic construct
HHNGTEGTMMQYFEWYLPNDGNHWNRLRSDASNLKDKGITAVWIPPAWKGASQNDVGYGAYDLYDLGEFNQKGTVRTKYGTRNQLQAAVTALKSNGIQVYGDVVMNHKGGADATEWVRAVEVNPSNRNQEVSGDYTIEAWTKFDFPGRGNTHSNFKWRWYHFDGVDWDQSRQLQNRIYKFRGDGKGWDWEVDTENGNYDYLMYADIDMDHPEVVNELRNWGVWYTNTLGLDGFRIDAVKHIKYSFTRDWITHVRNTTGKNMFAVAEFWKNDIGAIENYLSKTNWNHSVFDVPLHYNLYNASRSGGNYDMRQIFNGTVVQRHPTHAVTFVDNHDSQPEEALESFVEEWFKPLAYALTLTRDQGYPSVFYGDYYGIPTHGVPAMKSKIDPILEARQKYAYGKQNDYLDHHNMIGWTREGNTAHPNSGLATIMSDGPGGNKWMYVGRNKAGQVWRDITGNRSGTVTINADGWGNFSVNGGSVSIWVN

SEQ ID NO: 19509 - protein, 484 aa, Synthetic construct
HHNGTNGTMMQYFEWYLPNDGNHWNRLRSDASNLKDKGITAVWIPPAWKGASQNDVGYGAYDLYDLGEFNQKGTVRTKYGTRNQLQAAVTALKSNGIQVYGDVVMNHKGGADATEWVRAVEVNPSNRNQEVSGDYTIEAWTKFDFPGRGNTHSNFKWRWYHFDGVDWDQSRQLMNRIYKFRGDGKGWDWEVDTENGNYDYLMYADIDMDHPEVVNELRNWGVWYTNTLGLDGFRIDAVKHIKYSFTRDWLTHVRNTTGKNMFAVAEFWKNDIGAIENYLSKTNWNHSVFDVPLHYNLYNASRSGGNYDMRQIFNGTVVQRHPTHAVTFVDNHDSQPEEALESFVEEWFKPLAYALTLTRDQGYPSVFYGDYYGIPTHGVPAMKSKIDPILEARQKYAYGKQNDYLDHHNMIGWTREGNTAHPNSGLATIMSDGPGGNKWMYVGRNKAGQVWRDITGNRSGTVTINADGWGNFSVNGGSVSIWVN

SEQ ID NO: 19510 - protein, 484 aa, Synthetic construct
HHNGTNGTMMQYFEWYLPNDGNHWNRLRSDASNLKDKGITAVWIPPAWKGASQNDVGYGAYDLYDLGEFNQKGTVRTKYGTRNQLQAAVTALKSNGIQVYGDVVMNHKGGADATEWVRAVEVNPSNRNQEVSGDYTIEAWTKFDFPGRGNTHSNFKWRWYHFDGVDWDQSRQLHNRIYKFRGDGKGWDWEVDTENGNYDYLMYADIDMDHPEVVNELRNWGVWYTNTLGLDGFRIDAVKHIKYSFTRDWLTHVRNTTGKNMFAVAEFWKNDIGAIENYLSKTNWNHSVFDVPLHYNLYNASRSGGNYDMRQIFNGTVVQRHPTHAVTFVDNHDSQPEEALESFVEEWFKPLAYALTLTRDQGYPSVFYGDYYGIPTHGVPAMKSKIDPILEARQKYAYGKQNDYLDHHNMIGWTREGNTAHPNSGLATIMSDGPGGNKWMYVGRNKAGQVWRDITGNRSGTVTINADGWGNFSVNGGSVSIWVN

SEQ ID NO: 19511 - protein, 484 aa, Synthetic construct
HHNGTNGTMMQYFEWYLPNDGNHWNRLRSDASNLKDKGITAVWIPPAWKGASQNDVGYGAYDLYDLGEFNQKGTVRTKYGTRNQLQAAVTALKSNGIQVYGDVVMNHKGGADATEWVRAVEVNPSNRNQEVSGDYTIEAWTKFDFPGRGNTHSNFKWRWYHFDGVDWDQSRQLQNRIYKFRGDGKGWDWEVDTENGNYDYLMYADIDMDHPEVVNELRNWGVWYTNTLGLDGFRIDAVKHIKYSFTRDWLTHVRNTTGKNMFAVAEFWKNDIGAIENYLSKTNWNHSVFDVPLHYNLYNASRSGGNYDMRQIFNGTVVQRHPTHAVTFVDNHDSQPEEALESFVEEWFKPLAYALTLTRDQGYPSVFYGDYYGIPTHGVPAMKSKIDPILEARQKYAYGKQNDYLDHHNMIGWTREGNTAHPNSGLATIMSDGSGGNKWMYVGRNKAGQVWRDITGNRSGTVTINADGWGNFSVNGGSVSIWVN

SEQ ID NO: 19512 - protein, 484 aa, Synthetic construct
HHNGTNGTMMQYFEWYLPNDGNHWNRLRSDASNLKDKGITAVWIPPAWKGASQNDVGYGAYDLYDLGEFNQKGTLRTKYGTRNQLQAAVTALKSNGIQVYGDVVMNHKGGADATEWVRAVEVNPSNRNQEVSGDYTIEAWTKFDFPGRGNTHSNFKWRWYHFDGVDWDQSRQLQNRIYKFRGDGKGWDWEVDTENGNYDYLMYADIDMDHPEVVNELRNWGVWYTNTLGLDGFRIDAVKHIKYSFTRDWLTHVRNTTGKNMFAVAEFWKNDIGAIENYLSKTNWNHSVFDVPLHYNLYNASRSGGNYDMRQIFNGTVVQRHPTHAVTFVDNHDSQPEEALESFVEEWFKPLAYALTLTRDQGYPSVFYGDYYGIPTHGVPAMKSKIDPILEARQKYAYGKQNDYLDHHNMIGWTREGNTAHPNSGLATIMSDGPGGNKWMYVGRNKAGQVWRDITGNRSGTVTINADGWGNFSVNGGSVSIWVN

SEQ ID NO: 19513 - protein, 484 aa, Synthetic construct
HHNGTNGTMMQYFEWYLPNDGNHWNRLRSDASNLKDKGITAVWIPPAWKGASQNDVGYGAYDLYDLGEFNQKGTVRTKYGTRNQLQAAVTALKSNGIQVYGDVVMNHKGGADATEWVRAVEVNPSNRNQEVSGDYTIEAWTKFDFPGRGNTHSNFKWRWYHFDGVDWDQSRQLQNRIYKFRSDGKGWDWEVDTENGNYDYLMYADIDMDHPEVVNELRNWGVWYTNTLGLDGFRIDAVKHIKYSFTRDWLTHVRNTTGKNMFAVAEFWKNDIGAIENYLSKTNWNHSVFDVPLHYNLYNASRSGGNYDMRQIFNGTVVQRHPTHAVTFVDNHDSQPEEALESFVEEWFKPLAYALTLTRDQGYPSVFYGDYYGIPTHGVPAMKSKIDPILEARQKYAYGKQNDYLDHHNMIGWTREGNTAHPNSGLATIMSDGPGGNKWMYVGRNKAGQVWRDITGNRSGTVTINADGWGNFSVNGGSVSIWVN

SEQ ID NO: 19514 - protein, 484 aa, Synthetic construct
HHNGTNGTMMQYFEWYLPNDGNHWNRLRSDASNLKDKGITAVWIPPAWKGASQNDVGYGAYDLYDLGEFNQKGTVRTKYGTRNQLQAAVTALKSNGIQVYGDVVMNHKGGADATEWVRAVEVNPSNRNQEVSGDYTIEAWTKFDFPGRGNTHSNFKWRWYHFDGVDWDQSRQLQNRIYKFRNDGKGWDWEVDTENGNYDYLMYADIDMDHPEVVNELRNWGVWYTNTLGLDGFRIDAVKHIKYSFTRDWLTHVRNTTGKNMFAVAEFWKNDIGAIENYLSKTNWNHSVFDVPLHYNLYNASRSGGNYDMRQIFNGTVVQRHPTHAVTFVDNHDSQPEEALESFVEEWFKPLAYALTLTRDQGYPSVFYGDYYGIPTHGVPAMKSKIDPILEARQKYAYGKQNDYLDHHNMIGWTREGNTAHPNSGLATIMSDGPGGNKWMYVGRNKAGQVWRDITGNRSGTVTINADGWGNFSVNGGSVSIWVN

SEQ ID NO: 19515 - protein, 484 aa, Synthetic construct
HHNGTNGTMMQYFEWYLPNDGNHWNRLRSDASNLKDKGITAVWIPPAWKGASQNDVGYGAYDLYDLGEFNQKGTVRTKYGTRNQLQAAVTALKSNGIQVYGDVVMNHKGGADATEWVRAVEVNPSNRNQEVSGDYTIEAWTKFDFPGRGNTHSNFKWRWYHFDGVDWDQSRQLQNRIYKFRGDGKGWDWEVDTENGNYDYLMYADIDMDHPEVVNELRNWGVWYTNTLGLDGFRIDAVKHIKYSFTRDWLTHVRNTTGKNMFAVAEFWKNDIGAIENYLDKTNWNHSVFDVPLHYNLYNASRSGGNYDMRQIFNGTVVQRHPTHAVTFVDNHDSQPEEALESFVEEWFKPLAYALTLTRDQGYPSVFYGDYYGIPTHGVPAMKSKIDPILEARQKYAYGKQNDYLDHHNMIGWTREGNTAHPNSGLATIMSDGPGGNKWMYVGRNKAGQVWRDITGNRSGTVTINADGWGNFSVNGGSVSIWVN

SEQ ID NO: 19516 - protein, 484 aa, Synthetic construct
HHNGTNGTMMQYFEWYLPNDGNHWNRLRSDASNLKDKGITAVWIPPAWKGASQNDVGYGAYDLYDLGEFNQKGTVRTKYGTRNQLQAAVTALKSNGIQVYGDVVMNHKGGADATEWVRAVEVNPSNRNQEVSGDYTIEAWTKFDFPGRGNTHSNFKWRWYHFDGVDWDQSRQLQNRIYKFRGDGKGWDWEVDTENGNYDYLMYADIDMDHPEVVNELRNWGVWYTNTLGLDGFRIDAVKHIKYSFTRDWLTHVRNTTGKNMFAVAEFWKNDIGAIENYLSKTNWNHSVFDVPLHYNLYNASRSGGNYDMRQIFNGTVVQRHPTHAVTFVDNHDSQPEEALESFVEEWFKPLAYALTLTRTQGYPSVFYGDYYGIPTHGVPAMKSKIDPILEARQKYAYGKQNDYLDHHNMIGWTREGNTAHPNSGLATIMSDGPGGNKWMYVGRNKAGQVWRDITGNRSGTVTINADGWGNFSVNGGSVSIWVN

SEQ ID NO: 19517 - protein, 484 aa, Synthetic construct
HHNGTNGTMMQYFEWYLPNDGNHWNRLRSDASNLKDKGITAVWIPPAWKGASQNDVGYGAYDLYDLGEFNQKGTVRTKYGTRNQLQAAVTALKSNGIQVYGDVVMNHKGGADATEWVRAVEVNPSNRNQEVSGDYTIEAWTKFDFPGRGNTHSNFKWRWYHFDGVDWDQSRQLQNRIYKFRGDGKGWDWEVDTENGNYDYLMYADIDMDHPEVVNELRNWGVWYTNTLGLDGFRIDAVKHIKYSFTRDWLTHVRNTTGKNMFAVAEFWKNDIGAIENYLSKTNWNHSVFDVPLHYNLYNASRSGGNYDMRQIFNGTVVQRHPTHAVTFVDNHDSQPEEALESFVEEWFKPLAYALTLTRDQGYPSVFYGDYYGIPTHGVPAMKSKIDPILEARQKYAYGAQNDYLDHHNMIGWTREGNTAHPNSGLATIMSDGPGGNKWMYVGRNKAGQVWRDITGNRSGTVTINADGWGNFSVNGGSVSIWVN

SEQ ID NO: 19518 - protein, 484 aa, Synthetic construct
HHNGTNGTMMQYFEWYLPNDGNHWNRLRSDASNLKDKGITAVWIPPAWKGASQNDVGYGAYDLYDLGEFNQKGTVRTKYGTRNQLQAAVTALKSNGIQVYGDVVMNHKGGADATEWVRAVEVNPSNRNQEVSGDYTIEAWTKFDFPGRGNTHSNFKWRWYHFDGVDWDQSRQLQNRIYKFRGDGKGWDWEVDTENGNYDYLMYADIDMDHPEVVNELRNWGVWYTNTLGLDGFRIDAVKHIKYSFTRDWLTHVRNTTGKNMFAVAEFWKNDIGAIENYLSKTNWNHSVFDVPLHYNLYNASRSGGNYDMRQIFNGTVVQRHPTHAVTFVDNHDSQPEEALESFVEEWFKPLAYALTLTRDQGYPSVFYGDYYGIPTHGVPAMKSKIDPILEARQKYAYGSQNDYLDHHNMIGWTREGNTAHPNSGLATIMSDGPGGNKWMYVGRNKAGQVWRDITGNRSGTVTINADGWGNFSVNGGSVSIWVN

SEQ ID NO: 19519 - protein, 484 aa, Synthetic construct
HHNGTNGTMMQYFEWYLPNDGNHWNRLRSDASNLKDKGITAVWIPPAWKGASQNDVGYGAYDLYDLGEFNQKGTVRTKYGTRNQLQAAVTALKSNGIQVYGDVVMNHKGGADATEWVRAVEVNPSNRNQEVSGDYTIEAWTKFDFPGRGNTHSNFKWRWYHFDGVDWDQSRQLQNRIYKFRGDGKGWDWEVDTENGNYDYLMYADIDMDHPEVVNELRNWGVWYTNTLGLDGFRIDAVKHIKYSFTRDWLTHVRNTTGKNMFAVAEFWKNDIGAIENYLSKTNWNHSVFDVPLHYNLYNASRSGGNYDMRQIFNGTVVQRHPTHAVTFVDNHDSQPEEALESFVEEWFKPLAYALTLTRDQGYPSVFYGDYYGIPTHGVPAMKSKIDPILEARQKYAYGKQNDYLDHHNMIGWTREGNTAHPNSGLATIMSDGHGGNKWMYVGRNKAGQVWRDITGNRSGTVTINADGWGNFSVNGGSVSIWVN

SEQ ID NO: 19520 - protein, 484 aa, Synthetic construct
HHNGTNGTMMQYFEWYLPNDGNHWNRLRSDASNLKDKGITAVWIPPAWKGASQNDVGYGAYDLYDLGEFNQKGTVRTKYGTRNQLQAAVTALKSNGIQVYGDVVMNHKGGADATEWVRAVEVNPSNRNQEVSGDYTIEAWTKFDFPGRGNTHSNFKWRWYHFDGVDWDQSRQLQNRIYKFRGDGKGWDWEVDTENGNYDYLMYADIDMDHPEVVNELRNWGVWYTNTLGLDGFRIDAVKHIKYSFTRDWLTHVRNTTGKNMFAVAEFWKNDSGAIENYLSKTNWNHSVFDVPLHYNLYNASRSGGNYDMRQIFNGTVVQRHPTHAVTFVDNHDSQPEEALESFVEEWFKPLAYALTLTRDQGYPSVFYGDYYGIPTHGVPAMKSKIDPILEARQKYAYGKQNDYLDHHNMIGWTREGNTAHPNSGLATIMSDGPGGNKWMYVGRNKAGQVWRDITGNRSGTVTINADGWGNFSVNGGSVSIWVN

SEQ ID NO: 19521 - protein, 484 aa, Synthetic construct
HHNGTNGTMMQYFEWYLPNDGNHWNRLRSDASNLKDKGITAVWIPPAWKGASQNDVGYGAYDLYDLGEFNQKGTVRTKYGTRNQLQAAVTALKSNGIQVYGDVVMNHKGGADATEWVRAVEVNPSNRNQEVSGDYTIEAWTKFDFPGRGNTHSNFKWRWYHFDGVDWDQSRQLQNRIYKFRGDGKGWDWEVDTENGNYDYLMYADIDMDHPEVVNELRNWGVWYTNTLGLDGFRIDAVKHIKYSFTRDWLTHVRNTTGKNMFAVAEFWKNDIGAIENYLRKTNWNHSVFDVPLHYNLYNASRSGGNYDMRQIFNGTVVQRHPTHAVTFVDNHDSQPEEALESFVEEWFKPLAYALTLTRDQGYPSVFYGDYYGIPTHGVPAMKSKIDPILEARQKYAYGKQNDYLDHHNMIGWTREGNTAHPNSGLATIMSDGPGGNKWMYVGRNKAGQVWRDITGNRSGTVTINADGWGNFSVNGGSVSIWVN

SEQ ID NO: 19522 - protein, 484 aa, Synthetic construct
HHNGTNGTMMQYFEWYLPNDGNHWNRLRSDASNLKDKGITAVWIPPAWKGASQNDVGYGAYDLYDLGEFNQKGTVRTKYGTRNQLQAAVTALKSNGIQVYGDVVMNHKGGADATEWVAAVEVNPSNRNQEVSGDYTIEAWTKFDFPGRGNTHSNFKWRWYHFDGVDWDQSRQLQNRIYKFRGDGKGWDWEVDTENGNYDYLMYADIDMDHPEVVNELRNWGVWYTNTLGLDGFRIDAVKHIKYSFTRDWLTHVRNTTGKNMFAVAEFWKNDIGAIENYLSKTNWNHSVFDVPLHYNLYNASRSGGNYDMRQIFNGTVVQRHPTHAVTFVDNHDSQPEEALESFVEEWFKPLAYALTLTRDQGYPSVFYGDYYGIPTHGVPAMKSKIDPILEARQKYAYGKQNDYLDHHNMIGWTREGNTAHPNSGLATIMSDGPGGNKWMYVGRNKAGQVWRDITGNRSGTVTINADGWGNFSVNGGSVSIWVN

SEQ ID NO: 19523 - protein, 484 aa, Synthetic construct
HHNGTNGTMMQYFEWYLPNDGNHWNRLRSDASNLKDKGITAVWIPPAWKGASQNDVGYGAYDLYDLGEFNQKGTVRTKYGTRNQLQAAVTALKSNGIQVYGDVVMNHKGGADATEWVDAVEVNPSNRNQEVSGDYTIEAWTKFDFPGRGNTHSNFKWRWYHFDGVDWDQSRQLQNRIYKFRGDGKGWDWEVDTENGNYDYLMYADIDMDHPEVVNELRNWGVWYTNTLGLDGFRIDAVKHIKYSFTRDWLTHVRNTTGKNMFAVAEFWKNDIGAIENYLSKTNWNHSVFDVPLHYNLYNASRSGGNYDMRQIFNGTVVQRHPTHAVTFVDNHDSQPEEALESFVEEWFKPLAYALTLTRDQGYPSVFYGDYYGIPTHGVPAMKSKIDPILEARQKYAYGKQNDYLDHHNMIGWTREGNTAHPNSGLATIMSDGPGGNKWMYVGRNKAGQVWRDITGNRSGTVTINADGWGNFSVNGGSVSIWVN

SEQ ID NO: 19524 - protein, 484 aa, Synthetic construct
HHNGTNGTMMQYFEWYLPNDGNHWNRLRSDASNLKDKGITAVWIPPAWKGASQNDVGYGAYDLYDLGEFNQKGTVRTKYGTRNQLQAAVTALKSNGIQVYGDVVMNHKGGADATEWVRAVEVNPSNRNQEVSGDYTIEAWTKFDFPGRGNTHSNFKWRWYHFDGVDWDQSRQLQNRIYKFRGDGKGWDWEVDTENGNYDYLMYADIDMDHPEVVNELRNWGVWYTNTLGLDGFRIDAVKHIKYSFTRDWLTHVRNTTGKNMFAVAEFWKNDFGAIENYLSKTNWNHSVFDVPLHYNLYNASRSGGNYDMRQIFNGTVVQRHPTHAVTFVDNHDSQPEEALESFVEEWFKPLAYALTLTRDQGYPSVFYGDYYGIPTHGVPAMKSKIDPILEARQKYAYGKQNDYLDHHNMIGWTREGNTAHPNSGLATIMSDGPGGNKWMYVGRNKAGQVWRDITGNRSGTVTINADGWGNFSVNGGSVSIWVN

SEQ ID NO: 19525 - protein, 484 aa, Synthetic construct
HHNGTNGTMMQYFEWYLPNDGNHWNRLRSDASNLKDKGITAVWIPPAWKGASQNDVGYGAYDLYDLGEFNQKGTVRTKYGTRNQLQAAVTALKSNGIQVYGDVVMNHKGGADATEWVRAVEVNPSNRNQEVSGDYTIEAWTKFDFPGRGNTHSNFKWRWYHFDGVDWDQSRQLQNRIYKFRGDGKGWDWEVDTENGNYDYLMYADIDMDHPEVVNELRNWGVWYTNTLGLDGFRIDAVKHIKYSFTRDWLTHVRNTTGKNMFAVAEFWKNDIGAIENYLSKTNWNHSVFDVPLHYNLYNASRSGGNYDMRQIFNGTVVQRHPTHAVTFVDNHDSQPEEALESFVEEWFKPLAYALTLTRDQGYPSVFYGDYYGIPTHGVPAMKSKIDPILEARQKYAYGKQNDYLDHHNMIGWTREGNTAHPNSGLATIMSDGRGGNKWMYVGRNKAGQVWRDITGNRSGTVTINADGWGNFSVNGGSVSIWVN

SEQ ID NO: 19526 - protein, 484 aa, Synthetic construct
HHNGTNGTMMQYFEWYLPNDGNHWNRLRSDASNLKDKGITAVWIPPAWKGASQNDVGYGAYDLYDLGEFNQKGTVRTKYGTRNQLQAAVTALKSNGIQVYGDVVMNHKGGADATEWVRAVEVNPSNRNQEVSGFYTIEAWTKFDFPGRGNTHSNFKWRWYHFDGVDWDQSRQLQNRIYKFRGDGKGWDWEVDTENGNYDYLMYADIDMDHPEVVNELRNWGVWYTNTLGLDGFRIDAVKHIKYSFTRDWLTHVRNTTGKNMFAVAEFWKNDIGAIENYLSKTNWNHSVFDVPLHYNLYNASRSGGNYDMRQIFNGTVVQRHPTHAVTFVDNHDSQPEEALESFVEEWFKPLAYALTLTRDQGYPSVFYGDYYGIPTHGVPAMKSKIDPILEARQKYAYGKQNDYLDHHNMIGWTREGNTAHPNSGLATIMSDGSGGNKWMYVGRNKAGQVWRDITGNRSGTVTINADGWGNFSVNGGSVSIWVN

SEQ ID NO: 19527 - protein, 484 aa, Synthetic construct
HHNGTNGTMMQYFEWYLPNDGNHWNRLRSDASNLKDKGITAVWIPPAWKGASQNDVGYGAYDLYDLGEFNQKGTVRTKYGTRNQLQAAVTALKSNGIQVYGDVVMNHKGGADATEWVRAVEVNPSNRNQEVSGDYTIEAWTKFDFPGRGNTHSNFKWRWYHFDGVDWDQSRQLQNRIYKFRGDGKGWDWEVDTENGNYDYLMYADIDMDHPEVVNELRNWGVWYTNTLGLDGFRIDAVKHIKYSFTRDWLTHVRNTTGKNMFAVAEFWKNDIGAIENYLSKTNWNHSVFDVPLHYNLYNASRSGGNYDMRQIFNGTVVQRHPTHAVTFVDNHDSQPEEALESFVEEWFKPLAYALTLTRDQGYPSVFYGDYYGIPTHGVPAMKSKIDPILEARQKYAYGLQNDYLDHHNMIGWTREGNTAHPNSGLATIMSDGPGGNKWMYVGRNKAGQVWRDITGNRSGTVTINADGWGNFSVNGGSVSIWVN

SEQ ID NO: 19528 - protein, 484 aa, Synthetic construct
HHNGTNGTMMQYFEWYLPNDGNHWNRLRSDASNLKDKGITAVWIPPAWKGASQNDVGYGAYDLYDLGEFNQKGTVRTKYGTRNQLQAAVTALKSNGIQVYGDVVMNHKGGADATEWVRAVEVNPSNRNQEVSGDYTIEAWTKFDFPGRGNTHSNFKWRWYHFDGVDWDQSRQLQNRIYKFRDDGKGWDWEVDTENGNYDYLMYADIDMDHPEVVNELRNWGVWYTNTLGLDGFRIDAVKHIKYSFTRDWLTHVRNTTGKNMFAVAEFWKNDIGAIENYLSKTNWNHSVFDVPLHYNLYNASRSGGNYDMRQIFNGTVVQRHPTHAVTFVDNHDSQPEEALESFVEEWFKPLAYALTLTRDQGYPSVFYGDYYGIPTHGVPAMKSKIDPILEARQKYAYGKQNDYLDHHNMIGWTREGNTAHPNSGLATIMSDGPGGNKWMYVGRNKAGQVWRDITGNRSGTVTINADGWGNFSVNGGSVSIWVN

SEQ ID NO: 19529 - protein, 484 aa, Synthetic construct
HHNGTNGTMMQYFEWYLPNDGNHWNRLRSDASNLKDKGITAVWIPPAWKGASQNDVGYGAYDLYDLGEFNQKGTVRTKYGTRNQLQAAVTALKSNGIQVYGDVVMNHKGGADATEWVRAVEVNPSNRNQEVSGDYTIEAWTKFDFPGRGNTHSNFKWRWYHFDGVDWDQSRQLQNRIYKFRGDGKGWDWEVDTENGNYDYLMYADIDMDHPEVVNELRNWGVWYTNTLGLDGFRIDAVKHIKYSFTRDWLTHVRNTTGKNMFAVAEFWKNDIGAIENYLKKTNWNHSVFDVPLHYNLYNASRSGGNYDMRQIFNGTVVQRHPTHAVTFVDNHDSQPEEALESFVEEWFKPLAYALTLTRDQGYPSVFYGDYYGIPTHGVPAMKSKIDPILEARQKYAYGKQNDYLDHHNMIGWTREGNTAHPNSGLATIMSDGPGGNKWMYVGRNKAGQVWRDITGNRSGTVTINADGWGNFSVNGGSVSIWVN

SEQ ID NO: 19530 - protein, 484 aa, Synthetic construct
HHNGTNGTMMQYFEWYLPNDGNHWNRLRSDASNLKDKGITAVWIPPAWKGASQNDVGYGAYDLYDLGEFNQKGTHRTKYGTRNQLQAAVTALKSNGIQVYGDVVMNHKGGADATEWVRAVEVNPSNRNQEVSGDYTIEAWTKFDFPGRGNTHSNFKWRWYHFDGVDWDQSRQLQNRIYKFRGDGKGWDWEVDTENGNYDYLMYADIDMDHPEVVNELRNWGVWYTNTLGLDGFRIDAVKHIKYSFTRDWLTHVRNTTGKNMFAVAEFWKNDIGAIENYLSKTNWNHSVFDVPLHYNLYNASRSGGNYDMRQIFNGTVVQRHPTHAVTFVDNHDSQPEEALESFVEEWFKPLAYALTLTRDQGYPSVFYGDYYGIPTHGVPAMKSKIDPILEARQKYAYGKQNDYLDHHNMIGWTREGNTAHPNSGLATIMSDGPGGNKWMYVGRNKAGQVWRDITGNRSGTVTINADGWGNFSVNGGSVSIWVN

SEQ ID NO: 19531 - protein, 484 aa, Synthetic construct
HHNGTNGTMMQYFEWYLPNDGNHWNRLRSDASNLKDKGITAVWIPPAWKGASQNDVGYGAYDLYDLGEFNQKGTVRTKYGTRNQLQAAVTALKSNGIQVYGDVVMNHKGGADATEWVRAVEVNPSNRNQEVSGDYTIEAWTKFDFPGRGNTHSNFKWRWYHFDGVDWDQSRQLQNRIYKFRQDGKGWDWEVDTENGNYDYLMYADIDMDHPEVVNELRNWGVWYTNTLGLDGFRIDAVKHIKYSFTRDWLTHVRNTTGKNMFAVAEFWKNDIGAIENYLSKTNWNHSVFDVPLHYNLYNASRSGGNYDMRQIFNGTVVQRHPTHAVTFVDNHDSQPEEALESFVEEWFKPLAYALTLTRDQGYPSVFYGDYYGIPTHGVPAMKSKIDPILEARQKYAYGKQNDYLDHHNMIGWTREGNTAHPNSGLATIMSDGPGGNKWMYVGRNKAGQVWRDITGNRSGTVTINADGWGNFSVNGGSVSIWVN

SEQ ID NO: 19532 - protein, 484 aa, Synthetic construct
HHNGTNGTMMQYFEWYLPNDGNHWNRLRSDASNLKDKGITAVWIPPAWKGASQNDVGYGAYDLYDLGEFNQKGTVRTKYGTRNQLQAAVTALKSNGIQVYGDVVMNHKGGADATEWVRAVEVNPSNRNQEVSGDYTIEAWTKFDFPGRGNTHSNFKWRWYHFDGVDWDQSRQLQNRIYKFRGDGKGWDWEVDTENGNYDYLMYADIDMDHPEVVNELRNWGVWYTNTLGLDGFRIDAVKHIKYSFTRDWLTHVRNTTGKNMFAVAEFWKNDIGAIENYLGKTNWNHSVFDVPLHYNLYNASRSGGNYDMRQIFNGTVVQRHPTHAVTFVDNHDSQPEEALESFVEEWFKPLAYALTLTRDQGYPSVFYGDYYGIPTHGVPAMKSKIDPILEARQKYAYGKQNDYLDHHNMIGWTREGNTAHPNSGLATIMSDGPGGNKWMYVGRNKAGQVWRDITGNRSGTVTINADGWGNFSVNGGSVSIWVN

SEQ ID NO: 19533 - protein, 484 aa, Synthetic construct
HHNGTNGTMMQYFEWYLPNDGNHWNRLRSDASNLKDKGITAVWIPPAWKGASQNDVGYGAYDLYDLGEFNQKGTVRTKYGTRNQLQAAVTALKSNGIQVYGDVVMNHKGGADATEWVRAVEVNPSNRNQEVSGDYTIEAWTKFDFPGRGNTHSNFKWRWYHFDGVDWDQSRQLQNRIYKFRGDGKGWDWEVDTENGNYDYLMYADIDMDHPEVVNELRNWGVWYTNTLGLDGFRIDAVKHIKYSFTRDWLEHVRNTTGKNMFAVAEFWKNDIGAIENYLSKTNWNHSVFDVPLHYNLYNASRSGGNYDMRQIFNGTVVQRHPTHAVTFVDNHDSQPEEALESFVEEWFKPLAYALTLTRDQGYPSVFYGDYYGIPTHGVPAMKSKIDPILEARQKYAYGKQNDYLDHHNMIGWTREGNTAHPNSGLATIMSDGRGGNKWMYVGRNKAGQVWRDITGNRSGTVTINADGWGNFSVNGGSVSIWVN

SEQ ID NO: 19534 - protein, 484 aa, Synthetic construct
HHNGTNGTMMQYFEWYLPNDGNHWNRLRSDASNLKDKGITAVWIPPAWKGASQNDVGYGAYDLYDLGEFNQKGTVRTKYGTRNQLQAAVTALKSNGIQVYGDVVMNHKGGADATEWVRAVEVNPSNRNQEVSGDYTIEAWTKFDFPGRGNTHSNFKWRWYHFDGVDWDQSRQLQNRIYKFRGDGKGWDWEVDTENGNYDYLMYADIDMDHPEVVNELRNWGVWYTNTLGLDGFRIDAVKHIKYSFTRDWLTHVRNTTGKNMFAVAEFWKNDIGAIENYLFKTNWNHSVFDVPLHYNLYNASRSGGNYDMRQIFNGTVVQRHPTHAVTFVDNHDSQPEEALESFVEEWFKPLAYALTLTRDQGYPSVFYGDYYGIPTHGVPAMKSKIDPILEARQKYAYGKQNDYLDHHNMIGWTREGNTAHPNSGLATIMSDGPGGNKWMYVGRNKAGQVWRDITGNRSGTVTINADGWGNFSVNGGSVSIWVN

SEQ ID NO: 19535 - protein, 484 aa, Synthetic construct
HHNGTNGTMMQYFEWYLPNDGNHWNRLRSDASNLKDKGITAVWIPPAWKGASQNDVGYGAYDLYDLGEFNQKGTVRTKYGTRNQLQAAVTALKSNGIQVYGDVVMNHKGGADATEWVRAVEVNPSNRNQEVSGDYTIEAWTKFDFPGRGNTHSNFKWRWYHFDGVDWDQSRQLGNRIYKFRGDGKGWDWEVDTENGNYDYLMYADIDMDHPEVVNELRNWGVWYTNTLGLDGFRIDAVKHIKYSFTRDWLTHVRNTTGKNMFAVAEFWKNDIGAIENYLSKTNWNHSVFDVPLHYNLYNASRSGGNYDMRQIFNGTVVQRHPTHAVTFVDNHDSQPEEALESFVEEWFKPLAYALTLTRDQGYPSVFYGDYYGIPTHGVPAMKSKIDPILEARQKYAYGKQNDYLDHHNMIGWTREGNTAHPNSGLATIMSDGPGGNKWMYVGRNKAGQVWRDITGNRSGTVTINADGWGNFSVNGGSVSIWVN

SEQ ID NO: 19536 - protein, 484 aa, Synthetic construct
HHNGTNGTMMQYFEWYLPNDGNHWNRLRSDASNLKDKGITAVWIPPAWKGASQNDVGYGAYDLYDLGEFNQKGTVRTKYGTRNQLQAAVTALKSNGIQVYGDVVMNHKGGADATEWVRAVEVNPSNRNQEVSGDYTIEAWTKFDFPGRGNTHSNFKWRWYHFDGVDWDQSRQLQNRIYKFREDGKGWDWEVDTENGNYDYLMYADIDMDHPEVVNELRNWGVWYTNTLGLDGFRIDAVKHIKYSFTRDWLTHVRNTTGKNMFAVAEFWKNDIGAIENYLSKTNWNHSVFDVPLHYNLYNASRSGGNYDMRQIFNGTVVQRHPTHAVTFVDNHDSQPEEALESFVEEWFKPLAYALTLTRDQGYPSVFYGDYYGIPTHGVPAMKSKIDPILEARQKYAYGKQNDYLDHHNMIGWTREGNTAHPNSGLATIMSDGPGGNKWMYVGRNKAGQVWRDITGNRSGTVTINADGWGNFSVNGGSVSIWVN

SEQ ID NO: 19537 - protein, 484 aa, Synthetic construct
HHNGTNGTMMQYFEWYLPNDGNHWNRLRSDASNLKDKGITAVWIPPAWKGASQNDVGYGAYDLYDLGEFNQKGTVRTKYGTRNQLQAAVTALKSNGIQVYGDVVMNHKGGADATEWVRAVEVNPSNRNQEVSGDYTIEAWTKFDFPGRGNTHSNFKWRWYHFDGVDWDQSRQLQNRIYKFRGDGKGWDWEVDTENGNYDYLMYADIDMDHPEVVNELRNWGVWYTNTLGLDGFRIDAVKHIKYSFTRDWLTHVRNTTGKNMFAVAEFWKNDIGAIENYLSKTNWNHSVFDVPLHYNLYNASRSGGNYDMRQIFNGTVVQAHPTHAVTFVDNHDSQPEEALESFVEEWFKPLAYALTLTRDQGYPSVFYGDYYGIPTHGVPAMKSKIDPILEARQKYAYGKQNDYLDHHNMIGWTREGNTAHPNSGLATIMSDGPGGNKWMYVGRNKAGQVWRDITGNRSGTVTINADGWGNFSVNGGSVSIWVN

SEQ ID NO: 19538 - protein, 484 aa, Synthetic construct
HHNGTNGTMMQYFEWYLPNDGNHWNRLRSDASNLKDKGITAVWIPPAWKGASQNDVGYGAYDLYDLGEFNQKGTTRTKYGTRNQLQAAVTALKSNGIQVYGDVVMNHKGGADATEWVRAVEVNPSNRNQEVSGDYTIEAWTKFDFPGRGNTHSNFKWRWYHFDGVDWDQSRQLQNRIYKFRGDGKGWDWEVDTENGNYDYLMYADIDMDHPEVVNELRNWGVWYTNTLGLDGFRIDAVKHIKYSFTRDWLTHVRNTTGKNMFAVAEFWKNDIGAIENYLSKTNWNHSVFDVPLHYNLYNASRSGGNYDMRQIFNGTVVQRHPTHAVTFVDNHDSQPEEALESFVEEWFKPLAYALTLTRDQGYPSVFYGDYYGIPTHGVPAMKSKIDPILEARQKYAYGKQNDYLDHHNMIGWTREGNTAHPNSGLATIMSDGPGGNKWMYVGRNKAGQVWRDITGNRSGTVTINADGWGNFSVNGGSVSIWVN

SEQ ID NO: 19539 - protein, 481 aa, Bacillus sp.
HNGTNATMMQYFEWHLPNDGNHWNRLRDDASNLRNRGITAIWIPPAWKGTSQNDVGYGAYDLYDLGEFNQKGTVRTKYGTRSQLESAIHALKNNGVQVYGDVVMNHKAGADGTEFVDAVEVDPSNRNQETSGTYQIQASTKFDFPGRGNTYSSFKWRWYHFDGTDWDESRKLNRIYKFTGKAWDWEVDTENGNYDYLMFADLDMDHPEVVNELRRWGEWYTNTLNLDGFRIDAVKHIKFSFTRDWLTHVRNATGKGMFAVAEFWKNDLGALENYLSKTNWNHSVFDVPLHYNLYNASNSRGNYDMAKLLNGTVVQKHPMHAVTFVDNHDSQPGESLESFVQEWFKPLAYALILTREQGYPSVFYGDYYGIPTHSVPAMKAKIDPILAARQNFAYGTQHDYFDHHNIIGWTREGNTTHPNSGLATIMSDGPGGEKWMYVGQNKAGQVWHDITGNKPGTVTINADGWANFSVNKGSVSIWVKR

SEQ ID NO: 19540 - protein, 481 aa, Bacillus sp.
HNGTNATMMQYFEWHLPNDGNHWNRLRDDASNLRNRGITAIWIPPAWKGTSQNDVGYGAYDLYDLGEFNQKGTVRTKYGTRSQLESAIHALKNNGVQVYGDVVMNHKAGADGTEFVDAVEVDPSNRNQETSGDYQIQAYTKFDFPGRGNTYSSFKWRWYHFDGTDWDESRKLNRIYKFTGKAWDWPVDTEFGNYDYLMFADVDMDHPEVVNELRRWGEWYTNTLNLDGFRIDAVKHIKFSFTRDWLTHVRNATGKGMFAVAEFWKNDLGALENYLSKTNWNHSVFDVPLHYNLYNASNSRGNYDMAKLLNGTVVQKHPMHAVTFVDNHDSQPGESLESFVQEWFKPLAYALILTREQGYPSVFYGDYYGIPTHSVPAMKAKIDPILAARQNFAYGTQHDYFDHHNIIGWTREGNTTHPNSGLATIMSDGPGGEKWMYVGQNKAGQVWHDITGNKPGTVTINADGWANFSVNKGSVSIWVKR

SEQ ID NO: 19541 - protein, 481 aa, Bacillus sp.
HNGTNATMMQYFEWHLPNDGNHWNRLRDDASNLRNRGITAIWIPPAWKGTSQNDVGYGAYDLYDLGEFNQKGTVRTKYGTRSQLESAIHALKNNGVQVYGDVVMNHKAGADGTEFVTAVEVDPSNRNQETSGTYQIQAYTKFDFPGRGNTYSSFKWRWYHFDGTDWDESRKLNRIYKFTGKAWDWEVDTEFGNYDYLMFADLDMDHPEVVNELRRWGEWYTNTLNLDGFRIDAVKHIKFSFTRDWLTHVRNATGKGMFAVAEFWKNDLGALENYLSKTNWNHSVFDVPLHYNLYNASNSGGNYDMAKLLNGTVVQKHPMHAVTFVDNHDSQPGESLESFVQEWFKPLAYALILTREQGYPSVFYGDYYGIPTHSVPAMKAKIDPILAARQNFAYGTQHDYFDHHNIIGWTREGNTTHPNSGLATIMSDGPGGEKWMYVGQNKAGQVWHDITGNKPGTVTINADGWANFSVNGASVSIWVKR

SEQ ID NO: 19542 - protein, 481 aa, Bacillus sp.
HNGTNATMMQYFEWHLPNDGNHWNRLRDDASNLRNRGITAIWIPPAWKGTSQNDVGYGAYDLYDLGEFNQKGTVRTKYGTRSQLESAIHALKNNGVQVYGDVVMNHKAGADGTEFVDAVEVDPSNRNQETSGTYQIQAWTKFDFPGRGNTYSSFKWRWYHFDGTDWDESRKLNRIYKFSSKAWDWEVDTENGNYDYLMFADLDMDHPEVVNELRRWGEWYTNTLNLDGFRIDAVKHIKFSFTRDWLTHVRNATGKGMFAVAEFWKNDLGALENYLSKTNWNHSVFDVPLHYNLYNASNSRGNYDMAKLLNGTVVQKHPMHAVTFVDNHDSQPGESLESFVQEWFKPLAYALILTREQGYPSVFYGDYYGIPTHSVPAMKAKIDPILAARQNFAYGTQHDYFDHHNIIGWTREGNTTHPNSGLATIMSDGPGGEKWMYVGQNKAGQVWHDITGNKPGTVTINADGWANFSVNKGSVSIWVKR

SEQ ID NO: 19543 - protein, 481 aa, Bacillus sp.
HNGTNATMMQYFEWHLPNDGNHWNRLRDDASNLRNRGITAIWIPPAWKGTSQNDVGYGAYDLYDLGEFNQKGTVRTKYGTRSQLESAIHALKNNGVQVYGDVVMNHKAGADGTEFVDAVEVDPSNRNQETSGTYQIQAWTKFDFPGRGNTYSSFKWRWYHFDGTDWDESRKLNRIYKFSLKAWDWEVDTENGNYDYLMFADLDMDHPEVVNELRRWGEWYTNTLNLDGFRIDAVKHIKFSFTRDWLTHVRNATGKGMFAVAEFWKNDLGALENYLSKTNWNHSVFDVPLHYNLYNASNSRGNYDMAKLLNGTVVQKHPMHAVTFVDNHDSQPGESLESFVQEWFKPLAYALILTREQGYPSVFYGDYYGIPTHSVPAMKAKIDPILAARQNFAYGTQHDYFDHHNIIGWTREGNTTHPNSGLATIMSDGPGGEKWMYVGQNKAGQVWHDITGNKPGTVTINADGWANFSVNKGSVSIWVKR

SEQ ID NO: 19544 - protein, 481 aa, Bacillus sp.
HNGTNATMMQYFEWHLPNDGNHWNRLRDDASNLRNRGITAIWIPPAWKGTSQNDVGYGAYDLYDLGEFNQKGTVRTKYGTRSQLESAIHALKNNGVQVYGDVVMNHKAGADGTEFVTAVEVDPSNRNQETSGTYQIQAYTKFDFPGRGNTYSSFKWRWYHFDGTDWDESRKLNRIYKFTGKAWDWEVDTENGNYDYLMFADLDMDHPEVVNELRRWGEWYTNTLNLDGFRIDAVKHIKFSFTRDWLTHVRNATGKGMFAVAEFWKNDLGALENYLSKTNWNHSVFDVPLHYNLYNASNSRGNYDMAKLLNGTVVQKHPMHAVTFVDNHDSQPGESLESFVQEWFKPLAYALILTREQGYPSVFYGDYYGIPTHSVPAMKAKIDPILAARQNFAYGTQHDYFDHHNIIGWTREGNTTHPNSGLATIMSDGPGGEKWMYVGQNKAGQVWHDITGNKPGTVTINADGWANFSVNGASVSIWVKR

SEQ ID NO: 19545 - protein, 481 aa, Bacillus sp.
HNGTNATMMQYFEWHLPNDGNHWNRLRDDASNLRNRGITAIWIPPAWKGTSQNDVGYGAYDLYDLGEFNQKGTVRTKYGTRSQLESAIHALKNNGVQVYGDVVMNHKAGADGTEFVDAVEVDPSNRNQETSGTYQIQAWTKFDFPGRGNTYSSFKWRWYHFDGTDWDESRKLNRIYKFTGKAWDWEVDTENGNYDYLMFADLDMDHPEVVNELRRWGEWYTNTLNLDGFRIDAVKHIKFSFTRDWLTHVRNATGKGMFAVAEYWKNDLGALENYLSKTNWNHSVFDVPLHYNLYNASNSRGNYDMAKLLNGTVVQKHPMHAVTFVDNHDSQPGESLESFVQEWFKPLAYALILTREQGYPSVFYGDYYGIPTHSVPAMKAKIDPILAARQNFAYGTQHDYFDHHNIIGWTREGNTTHPNSGLATIMSDGPGGEKWMYVGQNKAGQVWHDITGNKPGTVTINADGWANFSVNKGSVSIWVKR

SEQ ID NO: 19546 - protein, 481 aa, Bacillus sp.
HNGTNATMMQYFEWHLPNDGNHWNRLRDDASNLRNRGITAIWIPPAWKGTSQNDVGYGAYDLYDLGEFNQKGTVRTKYGTRSQLESAIHALKNNGVQVYGDVVMNHKAGADGTENVDAVEVDPSNRNQETSGTYQIQAYTKFDFPGRGNTYSSFKWRWYHFDGTDWDESRKLNRIYKFSGKAWDWEVDTEFGNYDYLMFADYDMDHPEVVNELRRWGEWYTNTLNLDGFRIDAVKHIKFSFTRDWLTHVRNATGKGMFAVAEFWKNDLGALENYLSKTNWNHSVFDVPLHYNLYNASNSRGNYDMAKLLNGTVVQKHPMHAVTFVDNHDSQPGESLESFVQEWFKPLAYALILTREQGYPSVFYGDYYGIPTHSVPAMKAKIDPILAARQNFAYGTQHDYFDHHNIIGWTREGNTTHPNSGLATIMSDGPGGEKWMYVGQNKAGQVWHDITGNKPGTVTINADGWANFSVNKGSVSIWVKR

SEQ ID NO: 19547 - protein, 481 aa, Bacillus sp.
HNGTNATMMQYFEWHLPNDGNHWNRLRDDASNLRNRGITAIWIPPAWKGTSQNDVGYGAYDLYDLGEFNQKGTVRTKYGTRSQLESAIHALKNNGVLVYGDVVMNHKAGADGTEFVDAVEVDPSNRNQETSGTYQIQAWTKFDFPGRGNTYSSFKWRWYHFDGTDWDESRKLNRIYKFTGKAWDWEVDTENGNYDYLMFADLDMDHPEVVNELRRWGEWYTNTLNLDGFRIDAVKHIKFSFTRDWLTHVRNATGKGMFAVAEFWKNDLGALENYLSKTNWNHSVFDVPLHYNLYNASNSRGNYDMAKLLNGTVVQKHPMHAVTFVDNHDSQPGESLESFVQEWFKPLAYALILTREQGYPSVFYGDYYGIPTHSVPAMKAKIDPILAARQNFAYGTQHDYFDHHNIIGWTREGNTTHPNSGLATIMSDGPGGEKWMYVGQNKAGQVWHDITGNKPGTVTINADGWANFSVNKGSVSIWVKR

SEQ ID NO: 19548 - protein, 481 aa, Bacillus sp.
HNGTNATMMQYFEWHLPNDGNHWNRLRDDASNLRNRGITAIWIPPAWKGTSQNDVGYGAYDLYDLGEFNQKGTVRTKYGTRSQLESAIHALKNNGVQVYGDVVMNHKAGADGTENVDAVEVDPSNRNQETSGTYQIQAYTKFDFPGRGNTYSSFKWRWYHFDGTDWDESRKLNRIYKFDGKAWDWEVDTEFGNYDYLMFADYDMDHPEVVNELRRWGEWYTNTLNLDGFRIDAVKHIKFSFTRDWLTHVRNATGKGMFAVAEFWKNDLGALENYLSKTNWNHSVFDVPLHYNLYNASNSRGNYDMAKLLNGTVVQKHPMHAVTFVDNHDSQPGESLESFVQEWFKPLAYALILTREQGYPSVFYGDYYGIPTHSVPAMKAKIDPILAARQNFAYGTQHDYFDHHNIIGWTREGNTTHPNSGLATIMSDGPGGEKWMYVGQNKAGQVWHDITGNKPGTVTINADGWANFSVNKGSVSIWVKR

SEQ ID NO: 19549 - protein, 481 aa, Bacillus sp.
HNGTNATMMQYFEWHLPNDGNHWNRLRDDASNLRNRGITAIWIPPAWKGTSQNDVGYGAYDLYDLGEFNQKGTVRTKYGTRSQLESAIHALKNNGVQVYGDVVMNHKAGADGTEFVDAVEVDPSNRNQETSGTYQIQAWTKFDFPGRGNTYSSFKWRWYHFDGTDWDESRKLNRIYKFTGKDWDWEVDTENGNYDYLMFADLDMDHPEVVNELRRWGEWYTNTLNLDGFRIDAVKHIKFSFTRDWLTHVRNATGKGMFAVAEFWKNDLGALENYLSKTNWNHSVFDVPLHYNLYNASNSRGNYDMAKLLNGTVVQKHPMHAVTFVDNHDSQPGESLESFVQEWFKPLAYALILTREQGYPSVFYGDYYGIPTHSVPAMKAKIDPILAARQNFAYGTQHDYFDHHNIIGWTREGNTTHPNSGLATIMSDGPGGEKWMYVGQNKAGQVWHDITGNKPGTVTINADGWANFSVNKGSVSIWVKR

SEQ ID NO: 19550 - protein, 481 aa, Bacillus sp.
HNGTNATMMQYFEWHLPNDGNHWNRLRDDASNLRNRGITAIWIPPAWKGTSQNDVGYGPYDLYDLGEFNQKGTVRTKYGTRSQLESAIHALKNNGVQVYGDVVMNHKAGADGTEFVDAVEVDPSNRNQETSGTYQIQAWTKFDFPGRGNTYSSFKWRWYHFDGTDWDESRKLNRIYKFTGKAWDWEVDTENGNYDYLMFADLDMDHPEVVNELRRWGEWYTNTLNLDGFRIDAVKHIKFSFTRDWLTHVRNATGKGMFAVAEFWKNDLGALENYLSKTNWNHSVFDVPLHYNLYNASNSRGNYDMAKLLNGTVVQKHPMHAVTFVDNHDSQPGESLESFVQEWFKPLAYALILTREQGYPSVFYGDYYGIPTHSVPAMKAKIDPILAARQNFAYGTQHDYFDHHNIIGWTREGNTTHPNSGLATIMSDGPGGEKWMYVGQNKAGQVWHDITGNKPGTVTINADGWANFSVNKGSVSIWVKR

SEQ ID NO: 19551 - protein, 481 aa, Bacillus sp.
HNGTNATMMQYFEWHLPNDGNHWNRLRDDASNLRNRGITAIWIPPAWKGTSQNDVGYGAYDLYDLGEFNQKGTVRTKYGTRSQLESAIHALKNNGVQVYGDVVMNHKAGADGTEFVDAVEVDPSNRNQETSGTYQIQAWTKFDFPGRGNTYSSFKWRWYHFDGTDWDESRKLNRIYKFTGKAWDWEVDTENGNYDYLMFADLDMDHPEVVNELRRWGEWYTNTLNLDGFRIDAVKHIKFSFTRDWLTHVRNATGKGMFAVAEFWKNDLGALENYLSKTNWNHSVFDVPLHYNLYNASNSRGNYDMAKLLNGTVVQKHPMHAVTFVDNHDSQPGESLESFVQEWFKPLAYALILTREYGYPSVFYGDYYGIPTHSVPAMKAKIDPILAARQNFAYGTQHDYFDHHNIIGWTREGNTTHPNSGLATIMSDGPGGEKWMYVGQNKAGQVWHDITGNKPGTVTINADGWANFSVNKGSVSIWVKR

SEQ ID NO: 19552 - protein, 481 aa, Bacillus sp.
HNGTNATMMQYFEWHLPNDGNHWNRLRDDASNLRNRGITAIWIPPAWKGTSQNDVGYGAYDLYDLGEFNQKGTVRTKYGTRSQLESAIHALKNNGVQVYGDVVMNHKAGADGTEFVDAVEVDPSNRNQETSGTYQIQAWTKFDFPGRGNTYSSFKWRWYHFDGTDWDESRKLNRIYKFTGKRWDWEVDTENGNYDYLMFADLDMDHPEVVNELRRWGEWYTNTLNLDGFRIDAVKHIKFSFTRDWLTHVRNATGKGMFAVAEFWKNDLGALENYLSKTNWNHSVFDVPLHYNLYNASNSRGNYDMAKLLNGTVVQKHPMHAVTFVDNHDSQPGESLESFVQEWFKPLAYALILTREQGYPSVFYGDYYGIPTHSVPAMKAKIDPILAARQNFAYGTQHDYFDHHNIIGWTREGNTTHPNSGLATIMSDGPGGEKWMYVGQNKAGQVWHDITGNKPGTVTINADGWANFSVNKGSVSIWVKR

SEQ ID NO: 19553 - protein, 481 aa, Bacillus sp.
HNGTNATMMQYFEWHLPNDGNHWNRLRDDASNLRNRGITAIWIPPAWKGTSQNDVGYGAYDLYDLGEFNQKGTVRTKYGTRSQLESAIHALKNNGVQVYGDVVMNHKAGADGTEFVDAVEVDPSNRNQETSGTYQIQAYTKFDFPGRGNTYSSFKWRWYHFDGTDWDESRKLNRIYKFSGKAWDWEVDTEFGNYDYLMFADVDMDHPEVVNELRRWGEWYTNTLNLDGFRIDAVKHIKFSFTRDWLTHVRNATGKGMFAVAEFWKNDLGALENYLSKTNWNHSVFDVPLHYNLYNASNSRGNYDMAKLLNGTVVQKHPMHAVTFVDNHDSQPGESLESFVQEWFKPLAYALILTREQGYPSVFYGDYYGIPTHSVPAMKAKIDPILAARQNFAYGTQHDYFDHHNIIGWTREGNTTHPNSGLATIMSDGPGGEKWMYVGQNKAGQVWHDITGNKPGTVTINADGWANFSVNKGSVSIWVKR

SEQ ID NO: 19554 - protein, 481 aa, Bacillus sp.
HNGTNATMMQYFEWHLPNDGNHWNRLRDDASNLRNRGITAIWIPPAWKGTSQNDVGYGAYDLYDLGEFNQKGTVRTKYGTRSQLESAIHALKNNGVQVYGDVVMNHKAGADGTEFVDAVEVDPSNRNQETSGTYQIQAWTKFDFPGRGNTYSSFKWRWYHFDGTDWDESRKLNRIYKFTGKAWDWEVDTENGNYDYLMFADLDMDHPEVVNELRRWGEWYTNTLNLDGFRIDAVKHIKFSFTRDWLTHVRNATGKGMFAVAEFWKNDLGALENYLSKTNWNHSVFDVPLHYNLYNASNSRGNYDMAKLLNGTVVQKHPMAAVTFVDNHDSQPGESLESFVQEWFKPLAYALILTREQGYPSVFYGDYYGIPTHSVPAMKAKIDPILAARQNFAYGTQHDYFDHHNIIGWTREGNTTHPNSGLATIMSDGPGGEKWMYVGQNKAGQVWHDITGNKPGTVTINADGWANFSVNKGSVSIWVKR

SEQ ID NO: 19555 - protein, 481 aa, Bacillus sp.
HNGTNATMMQYFEWHLPNDGNHWNRLRDDASNLRNRGITAIWIPPAWKGTSQNDVGYGAYDLYDLGEFNQKGTVRTKYGTRSQLESAIHALKNNGVQVYGDVVMNHKAGADGTEFVDAVEVDPSNRNQETSGTYQIQAWTKFDFPGRGNTYSSFKWRWYHFDGTDWDESRKLNRIYKFTGKAWDWEVDTENGNYDYLMFADLDMDHPEVVNELRRWGEWYTNTLNLDGFRIDAVKHIKFSFTRDWLTHVRNATGKGMFAVAEFWKNDLGALENYLSKTNWNHSVFDVPLHYNLYNASNSRGNYDMAKLLNGTVVQKHPMHAVTFVDNHDSQPGESLESFVQEWFKPLAYALILTREQGVPSVFYGDYYGIPTHSVPAMKAKIDPILAARQNFAYGTQHDYFDHHNIIGWTREGNTTHPNSGLATIMSDGPGGEKWMYVGQNKAGQVWHDITGNKPGTVTINADGWANFSVNKGSVSIWVKR

SEQ ID NO: 19556 - protein, 481 aa, Bacillus sp.
HNGTNATMMQYFEWHLPNDGNHWNRLRDDASNLRNRGITAIWIPPAWKGTSQNDVGYGAYDLYDLGEFNQKGTVRTKYGTRSQLESAIHALKNNGVQVYGDVVMNHKAGADGTEFVDAVEVDPSNRNQETSGTYQIQAWTKFDFPGRGNTYSSFKWRWYHFDGTDWDESRKLNRIYKFTGKAWDWEVDTENGNYDYLMFADLDMDHPEVVNELRRWGEWYTNTLNLDGFRIDAVKHIKFSFTRDWLTHVRNATGKGMFAVAEFWKNDLGALENYLSKTNWNHSVFDVPLHYNLYNASNSRGNYDMAKLLNGTVVQKHPYHAVTFVDNHDSQPGESLESFVQEWFKPLAYALILTREQGYPSVFYGDYYGIPTHSVPAMKAKIDPILAARQNFAYGTQHDYFDHHNIIGWTREGNTTHPNSGLATIMSDGPGGEKWMYVGQNKAGQVWHDITGNKPGTVTINADGWANFSVNKGSVSIWVKR

SEQ ID NO: 19557 - protein, 481 aa, Bacillus sp.
HNGTNATMMQYFEWHLPNDGNHWNRLRDDASNLRNRGITAIWIPPAWKGTSQNDVGYGAYDLYDLGEFNQKGTVRTKYGTRSQLESAIHALKNNGVQVYGDVVMNHKAGADGTEFVDAVEVDPSNRNQETSGTYQIQAWTKFDFPGRGNTYSSFKWRWYHFDGTDWDESRKLNRIYKFTGKAWDWEVDTENGNYDYLMFADLDMDHPEVVNELRRWGEWYTNTLNLDGFRIDAVKHIKFQFTRDWLTHVRNATGKGMFAVAEFWKNDLGALENYLSKTNWNHSVFDVPLHYNLYNASNSRGNYDMAKLLNGTVVQKHPMHAVTFVDNHDSQPGESLESFVQEWFKPLAYALILTREQGYPSVFYGDYYGIPTHSVPAMKAKIDPILAARQNFAYGTQHDYFDHHNIIGWTREGNTTHPNSGLATIMSDGPGGEKWMYVGQNKAGQVWHDITGNKPGTVTINADGWANFSVNKGSVSIWVKR

SEQ ID NO: 19558 - protein, 481 aa, Bacillus sp.
HNGTNATMMQYFEWHLPNDGNHWNRLRDDASNLRNRGITAIWIPPAWKGTSQNDVGYGAYDLYDLGEFNQKGTVRTKYGTRSQLESAIHALKNNGVQVYGDVVMNHKAGADGTEFVDAVEVDPSNRNQETSGTYQIQAWTKFDFPGRGNTYSSFKWRWYHFDGTDWDESRKLNRIYKFTGKAWDWEVDTENGNYDYLMFADLDMDHPEVVNELRRWGEWYTNTLNLDGFRIDAVKHIKFSFTRDWLTHVRNATGKGMFAVAEFWKNDLGALENYLSKTNWNHSVFDVPLHYNLYNASNSRGNYDMAKLLNGTVVQKTPMHAVTFVDNHDSQPGESLESFVQEWFKPLAYALILTREQGYPSVFYGDYYGIPTHSVPAMKAKIDPILAARQNFAYGTQHDYFDHHNIIGWTREGNTTHPNSGLATIMSDGPGGEKWMYVGQNKAGQVWHDITGNKPGTVTINADGWANFSVNKGSVSIWVKR

SEQ ID NO: 19559 - protein, 481 aa, Bacillus sp.
HNGTNATMMQYFEWHLPNDGNHWNRLRDDASNLRNRGITAIWIPPAWKGTSQNDVGYGAYDLYDLGEFNQKGTVRTKYGTRSQLESAIHALKNNGVQVYGDVVMNHKAGADGTEFVDAVEVDPSNRNQETSGTYQIQAWTKFDFPGRGNTYSSFKWRWYHFDGTDWDESRKLNRIYKFTGKAWDWEVDTENGNYDYLMFADLDMDHPEVVNELRRWGEWYTNTLNLDGFRIDAVKHIKFSLTRDWLTHVRNATGKGMFAVAEFWKNDLGALENYLSKTNWNHSVFDVPLHYNLYNASNSRGNYDMAKLLNGTVVQKHPMHAVTFVDNHDSQPGESLESFVQEWFKPLAYALILTREQGYPSVFYGDYYGIPTHSVPAMKAKIDPILAARQNFAYGTQHDYFDHHNIIGWTREGNTTHPNSGLATIMSDGPGGEKWMYVGQNKAGQVWHDITGNKPGTVTINADGWANFSVNKGSVSIWVKR

SEQ ID NO: 19560 - protein, 481 aa, Bacillus sp.
HNGTNATMMQYFEWHLPNDGNHWNRLRDDASNLRNRGITAIWIPPAWKGTSQNDVGYGAYDLYDLGEFNQKGTVRTKYGTRSQLESAIHALKNNGVQVYGDVVMNHKAGADGTEFVDAVEVNPSNRNQETSGTYQIQAYTKFDFPGRGNTYSSFKWRWYHFDGTDWDESRKLNRIYKFTGKAWDWEVDTEFGNYDYLMFADYDMDHPEVVNELRRWGEWYTNTLNLDGFRIDAVKHIKFSFTRDWLTHVRNATGKGMFAVAEFWKNDLGALENYLSKTNWNHSVFDVPLHYNLYNASNSRGNYDMAKLLNGTVVQKHPMHAVTFVDNHDSQPGESLESFVQEWFKPLAYALILTREQGYPSVFYGDYYGIPTHSVPAMKAKIDPILAARQNFAYGTQHDYFDHHNIIGWTREGNTTHPNSGLATIMSDGPGGEKWMYVGQNKAGQVWHDITGNKPGTVTINADGWANFSVNKGSVSIWVKR

SEQ ID NO: 19561 - protein, 481 aa, Bacillus sp.
HNGTNATMMQYFEWHLPNDGNHWNRLRDDASNLRNRGITAIWIPPAWKGTSQNDVGYGAYDLYDLGEFNQKGTVRTKYGTRSQLESAIHALKNNGVQVYGDVVMNHKAGADSTEWVDAVEVNPSNRNQETSGTYQIQAYTKFDFPGRGNTYSSFKWRWYHFDGTDWDESRKLNRIYKFTGKAWDWEVDTEFGNYDYLMFADYDMDHPEVVNELRRWGEWYTNTLNLDGFRIDAVKHIKFSFTRDWLTHVRNATGKGMFAVAEFWKNDLGALENYLSKTNWNHSVFDVPLHYNLYNASNSRGNYDMAKLLNGTVVQKHPMHAVTFVDNHDSQPGESLESFVQEWFKPLAYALILTREQGYPSVFYGDYYGIPTHSVPAMKAKIDPILAARQNFAYGTQHDYFDHHNIIGWTREGNTTHPNSGLATIMSDGPGGEKWMYVGQNKAGQVWHDITGNKPGTVTINADGWANFSVNKGSVSIWVKR

SEQ ID NO: 19562 - protein, 481 aa, Bacillus sp.
HNGTNATMMQYFEWHLPNDGNHWNRLRDDASNLRNRGITAIWIPPAWKGTSQNDVGYGAYDLYDLGEFNQKGTVRTKYGTRSQLESAIHALKNNGVQVYGDVVMNHKAGADGTEFVDAVEVDPSNRNQETSGTYQIQAWTKFDFPGRGNTYSSFKWRWYHFDGTDPDESRKLNRIYKFTGKAWDWEVDTENGNYDYLMFADLDMDHPEVVNELRRWGEWYTNTLNLDGFRIDAVKHIKFSFTRDWLTHVRNATGKGMFAVAEFWKNDLGALENYLSKTNWNHSVFDVPLHYNLYNASNSRGNYDMAKLLNGTVVQKHPMHAVTFVDNHDSQPGESLESFVQEWFKPLAYALILTREQGYPSVFYGDYYGIPTHSVPAMKAKIDPILAARQNFAYGTQHDYFDHHNIIGWTREGNTTHPNSGLATIMSDGPGGEKWMYVGQNKAGQVWHDITGNKPGTVTINADGWANFSVNKGSVSIWVKR

SEQ ID NO: 19563 - protein, 481 aa, Bacillus sp.
HNGTNATMMQYFEWHLPNDGNHWNRLRDDASNLRNRGITAIWIPPAWKGTSQNDVGYGAYDLYDLGEFNQKGTVRTKYGTRSQLESAIHALKNNGVQVYGDVVMNHKAKADGTEFVDAVEVDPSNRNQETSGTYQIQAWTKFDFPGRGNTYSSFKWRWYHFDGTDWDESRKLNRIYKFTGKAWDWEVDTENGNYDYLMFADLDMDHPEVVNELRRWGEWYTNTLNLDGFRIDAVKHIKFSFTRDWLTHVRNATGKGMFAVAEFWKNDLGALENYLSKTNWNHSVFDVPLHYNLYNASNSRGNYDMAKLLNGTVVQKHPMHAVTFVDNHDSQPGESLESFVQEWFKPLAYALILTREQGYPSVFYGDYYGIPTHSVPAMKAKIDPILAARQNFAYGTQHDYFDHHNIIGWTREGNTTHPNSGLATIMSDGPGGEKWMYVGQNKAGQVWHDITGNKPGTVTINADGWANFSVNKGSVSIWVKR

SEQ ID NO: 19564 - protein, 481 aa, Bacillus sp.
HNGTNSTMMQYFEWHLPNDGNHWNRLRDDASNLRNRGITAIWIPPAWKGTSQNDVGYGAYDLYDLGEFNQKGTVRTKYGTRSQLESAIHALKNNGVLVYGDVVMNHKAGADGTEFVDAVEVDPSNRNQETSGTYQIQAWTKFDFPGRGNTYSSFKWRWYHFDGTDWDESRKLNRIYKFTGKAWDWEVDTENGNYDYLMFADLDMDHPEVVNELRRWGEWYTNTLNLDGFRIDAVKHIKFSFTRDWLTHVRNATGKGMFAVAEFWKNDLGALENYLSKTNWNHSVFDVPLHYNLYNASNSRGNYDMAKLLNGTVVQKHPMHAVTFVDNHDSQPGESLESFVQEWFKPLAYALILTREQGYPSVFYGDYYGIPTHSVPAMKAKIDPILAARQNFAYGTQHDYFDHHNIIGWTREGNTTHPNSGLATIMSDGPGGEKWMYVGQNKAGQVWHDITGNKPGTVTINADGWANFSVNKGSVSIWVKR

SEQ ID NO: 19565 - protein, 481 aa, Bacillus sp.
HNGTNATMMQYFEWHLPNDGNHWNRLRDDASNLRNRGITAIWIPPAWKGTSQNDVGYGAYDLYDLGEFNQKGTVRTKYGTRSQLESAIHALKNNGVQVYGDVVMNHKAGADGTEFVDAVEVDPSNRNQETSGTYQIQAWTKFDFPGRGNTYSSFKWRWYHFDGTDWDESRKLNRIYKFTGKAWDWEVDTEFGNYDYLMFADFDMDHPEVVNELRRWGEWYTNTLNLDGFRIDAVKHIKFSFTRDWLTHVRNATGKGMFAVAEFWKNDLGALENYLSKTNWNHSVFDVPLHYNLYNASNSRGNYDMAKLLNGTVVQKHPMHAVTFVDNHDSQPGESLESFVQEWFKPLAYALILTREQGYPSVFYGDYYGIPTHSVPAMKAKIDPILAARQNFAYGTQHDYFDHHNIIGWTREGNTTHPNSGLATIMSDGPGGEKWMYVGQNKAGQVWHDITGNKPGTVTINADGWANFSVNKGSVSIWVKR

SEQ ID NO: 19566 - protein, 481 aa, Bacillus sp.
HNGTNATMMQYFEWHLPNDGNHWNRLRDDASNLRNRGITAIWIPPAWKGTSQNDVGYGAYDLYDLGEFNQKGTVRTKYGTRSQLESAIHALKNNGVQVYGDVVMNHKAGADGTEFVDAVEVNPSNRNQETSGTYQIQAYTKFDFPGRGNTYSSFKWRWYHFDGTDWDESRKLNRVYKFTGKAWDWEVDTEFGNYDYLMFADVDMDHPEVVNELRRWGEWYTNTLNLDGFRIDAVKHIKFSFTRDWLTHVRNATGKGMFAVAEFWKNDLGALENYLSKTNWNHSVFDVPLHYNLYNASNSRGNYDMAKLLNGTVVQKHPMHAVTFVDNHDSQPGESLESFVQEWFKPLAYALILTREQGYPSVFYGDYYGIPTHSVPAMKAKIDPILAARQNFAYGTQHDYFDHHNIIGWTREGNTTHPNSGLATIMSDGPGGEKWMYVGQNKAGQVWHDITGNKPGTVTINADGWANFSVNKGSVSIWVKR

SEQ ID NO: 19567 - protein, 481 aa, Bacillus sp.
HNGTNATMMQYFEWHLPNDGNHWNRLRDDASNLRNRGITAIWIPPAWKGTSQNDVGYGAYDLYDLGEFNQKGTVRTKYGTRSQLESAIHALKNNGVQVYGDVVMNHKAGADGTEFVTAVEVDPSNRNQETSGTYQIQAYTKFDFPGRGNTYSSFKWRWYHFDGTDWDESRKLNRIYKFTGKAWDWEVDTENGNYDYLMFADLDMDHPEVVNELRRWGEWYTNTLNLDGFRIDAVKHIKFSFTRDWLTHVRNATGKGMFAVAEFWKNDLGALENYLSKTNWNHSVFDVPLHYNLYNASNSRGNYDMAKLLNGTVVQKHPMHAVTFVDNHDSQPGESLESFVQEWFKPLAYALILTREQGYPSVFYGDYYGIPTHSVPAMKAKIDPILAARQNFAYGTQHDYFDHHNIIGWTREGNTTHPNSGLATIMSDGPGGEKWMYVGQNKAGQVWHDITGNKPGTVTINADGWANFSVNKGSVSIWVKR

SEQ ID NO: 19568 - protein, 481 aa, Bacillus sp.
HNGTNSTMMQYFEWHLPNDGNHWNRLRDDASNLRNRGITAIWIPPAWKGTSQNDVGYGAYDLYDLGEFNQKGTVRTKYGTRSQLESAIHALKNNGVQVYGDVVMNHKAGADGTEFVDAVEVDPSNRNQETSGTYQIQAWTKFDFPGRGNTYSSFKWRWYHFDGTDWDESRKLNRIYKFTGKAWDWEVDTENGNYDYLMFADLDMDHPEVVNELRRWGEWYTNTLNLDGFRIDAVKHIKFSFTRDWLTHVRNATGKGMSAVAEFWKNDLGALENYLSKTNWNHSVFDVPLHYNLYNASNSRGNYDMAKLLNGTVVQKHPMHAVTFVDNHDSQPGESLESFVQEWFKPLAYALILTREQGYPSVFYGDYYGIPTHSVPAMKAKIDPILAARQNFAYGTQHDYFDHHNIIGWTREGNTTHPNSGLATIMSDGPGGEKWMYVGQNKAGQVWHDITGNKPGTVTINADGWANFSVNKGSVSIWVKR

SEQ ID NO: 19569 - protein, 481 aa, Bacillus sp.
HNGTNATMMQYFEWHLPNDGNHWNRLRDDASNLRNRGITAIWIPPAWKGTSQNDVGYGAYDLYDLGEFNQKGTVRTKYGTRSQLESAIHALKNNGVQVYGDVVMNHKAGADGTEFVDAVEVDPSNRNQETSGTYQIQAWTKFDFPGRGNTYSSFKWRWYHFDGTDWDESRKLNRIYKFTGKEWDWEVDTENGNYDYLMFADLDMDHPEVVNELRRWGEWYTNTLNLDGFRIDAVKHIKFSFTRDWLTHVRNATGKGMFAVAEFWKNDLGALENYLSKTNWNHSVFDVPLHYNLYNASNSRGNYDMAKLLNGTVVQKHPMHAVTFVDNHDSQPGESLESFVQEWFKPLAYALILTREQGYPSVFYGDYYGIPTHSVPAMKAKIDPILAARQNFAYGTQHDYFDHHNIIGWTREGNTTHPNSGLATIMSDGPGGEKWMYVGQNKAGQVWHDITGNKPGTVTINADGWANFSVNKGSVSIWVKR

SEQ ID NO: 19570 - protein, 481 aa, Bacillus sp.
HNGTNHTMMQYFEWHLPNDGNHWNRLRDDASNLRNRGITAIWIPPAWKGTSQNDVGYGAYDLYDLGEFNQKGTVRTKYGTRSQLESAIHALKNNGVQVYGDVVMNHKAKADGTEFVDAVEVDPSNRNQETSGTYQIQAWTKFDFPGRGNTYSSFKWRWYHFDGTDWDESRKLNRIYKFTGKAWDWEVDTENGNYDYLMFADLDMDHPEVVNELRRWGEWYTNTLNLDGFRIDAVKHIKFSFTRDWLTHVRNATGKGMFAVAEFWKNDLGALENYLSKTNWNHSVFDVPLHYNLYNASNSRGNYDMAKLLNGTVVQKHPMHAVTFVDNHDSQPGESLESFVQEWFKPLAYALILTREQGYPSVFYGDYYGIPTHSVPAMKAKIDPILAARQNFAYGTQHDYFDHHNIIGWTREGNTTHPNSGLATIMSDGPGGEKWMYVGQNKAGQVWHDITGNKPGTVTINADGWANFSVNKGSVSIWVKR

SEQ ID NO: 19571 - protein, 481 aa, Bacillus sp.
HNGTNATMMQYFEWHLPNDGNHWNRLRDDASNLRNRGITAIWIPPAWKGTSQNDVGYGAYDLYDLGEFNQKGTVRTKYGTRSQLESAIHALKNNGVQVYGDVVMNHKAGADGTEFVDAVEVDPSNRNQETSGTYQIQAWTKFDFPGRGNTYSSFKWRWYHFDGTDWDESRKLNRIYKFTGKAWDWPVDTENGNYDYLMFADLDMDHPEVVNELRRWGEWYTNTLNLDGFRIDAVKHIKFSFTRDWLTHVRNATGKGMFAVAEFWKNDLGALENYLSKTNWNHSVFDVPLHYNLYNASNSRGNYDMAKLLNGTVVQKHPMHAVTFVDNHDSQPGESLESFVQEWFKPLAYALILTREQGYPSVFYGDYYGIPTHSVPAMKAKIDPILAARQNFAYGTQHDYFDHHNIIGWTREGNTTHPNSGLATIMSDGPGGEKWMYVGQNKAGQVWHDITGNKPGTVTINADGWANFSVNKGSVSIWVKR

SEQ ID NO: 19572 - protein, 481 aa, Bacillus sp.
HNGTNATMMQYFEWHLPNDGNHWNRLRDDASNLRNRGITAIWIPPAWKGTSQNDVGYGAYDLYDLGEFNQKGTVRTKYGTRSQLESAIHALKNNGVQVYGDVVMNHKAGADGTEFVDAVEVDPSNRNQETSGTYQIQAWTKFDFPGRGNTYSSFKWRWYHFDGTDWDESRKLNRIYKFTGKQWDWEVDTENGNYDYLMFADLDMDHPEVVNELRRWGEWYTNTLNLDGFRIDAVKHIKFSFTRDWLTHVRNATGKGMFAVAEFWKNDLGALENYLSKTNWNHSVFDVPLHYNLYNASNSRGNYDMAKLLNGTVVQKHPMHAVTFVDNHDSQPGESLESFVQEWFKPLAYALILTREQGYPSVFYGDYYGIPTHSVPAMKAKIDPILAARQNFAYGTQHDYFDHHNIIGWTREGNTTHPNSGLATIMSDGPGGEKWMYVGQNKAGQVWHDITGNKPGTVTINADGWANFSVNKGSVSIWVKR

SEQ ID NO: 19573 - protein, 481 aa, Bacillus sp.
HNGTNATMMQYFEWHLPNDGNHWNRLRDDASNLRNRGITAIWIPPAWKGTSQNDVGYGAYDLYDLGEFNQKGTVRTKYGTRSQLESAIHALKNNGVQVYGDVVMNHKAGADGTEFVDAVEVDPSNRNQETSGTYQIQAWTKFDFPGRGNTYSSFKWRWYHFDGTDWDESRKLNRIYKFTGKAWDWEVDTEFGNYDYLMFADLDMDHPEVVNELRRWGEWYTNTLNLDGFRIDAVKHIKFSFTRDWLTHVRNATGKGMFAVAEFWKNDLGALENYLSKTNWNHSVFDVPLHYNLYNASNSRGNYDMAKLLNGTVVQKHPMHAVTFVDNHDSQPGESLESFVQEWFKPLAYALILTREQGYPSVFYGDYYGIPTHSVPAMKAKIDPILAARQNFAYGTQHDYFDHHNIIGWTREGNTTHPNSGLATIMSDGPGGEKWMYVGQNKAGQVWHDITGNKPGTVTINADGWANFSVNKGSVSIWVKR

SEQ ID NO: 19574 - protein, 481 aa, Bacillus sp.
HNGTNATMMQYFEWHLPNDGNHWNRLRDDASNLRNRGITAIWIPPAWKGTSQNDVGYGAYDLYDLGEFNQKGTVRTKYGTRSQLESAIHALKNNGVQVYGDVVMNHKAGADGTEFVDAVEVDPSNRNQETSGTYQIQAWTKFDFPGRGNTYSSFKWRWYHFDGTDWDESRKLNRIYKFTGKKWDWEVDTENGNYDYLMFADLDMDHPEVVNELRRWGEWYTNTLNLDGFRIDAVKHIKFSFTRDWLTHVRNATGKGMFAVAEFWKNDLGALENYLSKTNWNHSVFDVPLHYNLYNASNSRGNYDMAKLLNGTVVQKHPMHAVTFVDNHDSQPGESLESFVQEWFKPLAYALILTREQGYPSVFYGDYYGIPTHSVPAMKAKIDPILAARQNFAYGTQHDYFDHHNIIGWTREGNTTHPNSGLATIMSDGPGGEKWMYVGQNKAGQVWHDITGNKPGTVTINADGWANFSVNKGSVSIWVKR

SEQ ID NO: 19575 - protein, 481 aa, Bacillus sp.
HNGTNSTMMQYFEWHLPNDGNHWNRLRDDASNLRNRGITAIWIPPAWKGTSQNDVGYGAYDLYDLGEFNQKGTVRTKYGTRSQLESAIHALKNNGVQVYGDVVMNHKAGADGTEFVDAVEVDPSNRNQETSGTYQIQAWTKFDFPGRGNTYSSFKWRWYHFDGTDWDESRKLNRIYKFTGKAWDWEVDTENGNYDYLMFADLDMDHPEVVNELRRWGEWYTNTLNLDGFRIDAVKHIKFSFTRDWLTHVRNATGKGMFAVAEFWKNDLGALENYLSKTNWNHSVFDVPLHYNLYNASNSRGNYDMAKLLNGTVVQKHPMHAVTFVDNHDSQPGESLESFVQEWFKPLAYALILTREQGVPSVFYGDYYGIPTHSVPAMKAKIDPILAARQNFAYGTQHDYFDHHNIIGWTREGNTTHPNSGLATIMSDGPGGEKWMYVGQNKAGQVWHDITGNKPGTVTINADGWANFSVNKGSVSIWVKR

SEQ ID NO: 19576 - protein, 481 aa, Bacillus sp.
HNGTNATMMQYFEWHLPNDGNHWNRLRDDASNLRNRGITAIWIPPAWKGTSQNDVGYGAYDLYDLGEFNQKGTVRTKYGTRSQLESAIHALKNNGVQVYGDVVMNHKAGADGTEFVDAVEVDPSNRNQETSGTYQIQAWTKFDFPGRGNTYSSFKWRWYHFDGTDWDESRKLNRIYKFTGKAWDWEVDTENGFYDYLMFADYDMDHPEVVNELRRWGEWYTNTLNLDGFRIDAVKHIKFSFTRDWLTHVRNATGKGMFAVAEFWKNDLGALENYLSKTNWNHSVFDVPLHYNLYNASNSRGNYDMAKLLNGTVVQKHPMHAVTFVDNHDSQPGESLESFVQEWFKPLAYALILTREQGYPSVFYGDYYGIPTHSVPAMKAKIDPILAARQNFAYGTQHDYFDHHNIIGWTREGNTTHPNSGLATIMSDGPGGEKWMYVGQNKAGQVWHDITGNKPGTVTINADGWANFSVNKGSVSIWVKR

SEQ ID NO: 19577 - protein, 481 aa, Bacillus sp.
HNGTNATMMQYFEWHLPNDGNHWNRLRDDASNLRNRGITAIWIPPAWKGTSQNDVGYGAYDLYDLGEFNQKGTVRTKYGTRSQLESAIHALKNNGVQVYGDVVMNHKAGADGTEFVDAVEVDPSNRNQETSGTYQIQAWTKFDFPGRGNTYSSFKWRWYHFDGTDWDESRKLNRIYKFTGKAWDWEVDTENGFYDYLMFADLDMDHPEVVNELRRWGEWYTNTLNLDGFRIDAVKHIKFSFTRDWLTHVRNATGKGMFAVAEFWKNDLGALENYLSKTNWNHSVFDVPLHYNLYNASNSRGNYDMAKLLNGTVVQKHPMHAVTFVDNHDSQPGESLESFVQEWFKPLAYALILTREQGYPSVFYGDYYGIPTHSVPAMKAKIDPILAARQNFAYGTQHDYFDHHNIIGWTREGNTTHPNSGLATIMSDGPGGEKWMYVGQNKAGQVWHDITGNKPGTVTINADGWANFSVNKGSVSIWVKR

SEQ ID NO: 19578 - protein, 481 aa, Bacillus sp.
HNGTNATMMQYFEWHLPNDGNHWNRLRDDASNLRNRGITAIWIPPAWKGTSQNDVGYGAYDLYDLGEFNQKGTVRTKYGTRSQLESAIHALKNNGVQVYGDVVINHKAGADGTEFVDAVEVDPSNRNQETSGTYQIQAWTKFDFPGRGNTYSSFKWRWYHFDGTDWDESRKLNRIYKFTGKAWDWEVDTENGNYDYLMFADLDMDHPEVVNELRRWGEWYTNTLNLDGFRIDAVKHIKFSFTRDWLTHVRNATGKGMFAVAEFWKNDLGALENYLSKTNWNHSVFDVPLHYNLYNASNSRGNYDMAKLLNGTVVQKHPMHAVTFVDNHDSQPGESLESFVQEWFKPLAYALILTREQGYPSVFYGDYYGIPTHSVPAMKAKIDPILAARQNFAYGTQHDYFDHHNIIGWTREGNTTHPNSGLATIMSDGPGGEKWMYVGQNKAGQVWHDITGNKPGTVTINADGWANFSVNKGSVSIWVKR

SEQ ID NO: 19579 - protein, 481 aa, Bacillus sp.
HNGTNATMMQYFEWHLPNDGNHWNRLRDDASNLRNRGITAIWIPPAWKGTSQNDVGYGAYDLYDLGEFNQKGTVRTKYGTRSQLESAIHALKNNGVQVYGDVVMNHKAGADGTEFVDAVEVDPSNRNQETSGTYQIQAWTKFDFPGRGNTYSSFKWRWYHFDGTDWDESRKLNRIYKFTGKAWDWEVDTENGNYDYLMFADLDMDHPEVVNELRRWGEWYTNTLNLDGFRIDAVKHIKFSITRDWLTHVRNATGKGMFAVAEFWKNDLGALENYLSKTNWNHSVFDVPLHYNLYNASNSRGNYDMAKLLNGTVVQKHPMHAVTFVDNHDSQPGESLESFVQEWFKPLAYALILTREQGYPSVFYGDYYGIPTHSVPAMKAKIDPILAARQNFAYGTQHDYFDHHNIIGWTREGNTTHPNSGLATIMSDGPGGEKWMYVGQNKAGQVWHDITGNKPGTVTINADGWANFSVNKGSVSIWVKR

SEQ ID NO: 19580 - protein, 481 aa, Bacillus sp.
HNGTNATMMQYFEWHLPNDGNHWNRLRDDASNLRNRGITAIWIPPAWKGTSQNDVGYGAYDLYDLGEFNQKGTVRTKYGTRSQLESAIHALKNNGVQVYGDVVLNHKAGADGTEFVDAVEVDPSNRNQETSGTYQIQAWTKFDFPGRGNTYSSFKWRWYHFDGTDWDESRKLNRIYKFTGKAWDWEVDTENGNYDYLMFADLDMDHPEVVNELRRWGEWYTNTLNLDGFRIDAVKHIKFSFTRDWLTHVRNATGKGMFAVAEFWKNDLGALENYLSKTNWNHSVFDVPLHYNLYNASNSRGNYDMAKLLNGTVVQKHPMHAVTFVDNHDSQPGESLESFVQEWFKPLAYALILTREQGYPSVFYGDYYGIPTHSVPAMKAKIDPILAARQNFAYGTQHDYFDHHNIIGWTREGNTTHPNSGLATIMSDGPGGEKWMYVGQNKAGQVWHDITGNKPGTVTINADGWANFSVNKGSVSIWVKR

SEQ ID NO: 19581 - protein, 481 aa, Bacillus sp.
HNGTNATMMQYFEWHLPNDGNHWNRLRDDASNLRNRGITAIWIPPAWKGTSQNDVGYGAYDLYDLGEFNQKGTVRTKYGTRSQLESAIHALKNNGVQVYGDVVMNHKAGADGTEFVDAVEVDPSNRNQETSGTYQIQAWTKFDFPGRGNTYSSFKWRWYHFDGTDWDESRKLNRIYKFTGKAWDWEVDTEFGNYDYLMFADYDMDHPEVVNELRRWGEWYTNTLNLDGFRIDAVKHIKFSFTRDWLTHVRNATGKGMFAVAEFWKNDLGALENYLSKTNWNHSVFDVPLHYNLYNASNSRGNYDMAKLLNGTVVQKHPMHAVTFVDNHDSQPGESLESFVQEWFKPLAYALILTREQGYPSVFYGDYYGIPTHSVPAMKAKIDPILAARQNFAYGTQHDYFDHHNIIGWTREGNTTHPNSGLATIMSDGPGGEKWMYVGQNKAGQVWHDITGNKPGTVTINADGWANFSVNKGSVSIWVKR

SEQ ID NO: 19582 - protein, 481 aa, Bacillus sp.
HNGTNATMMQYFEWHLPNDGNHWNRLRDDASNLRNRGITAIWIPPAWKGTSQNDVGYGAYDLYDLGEFNQKGTVRTKYGTRSQLESAIHALKNNGVQVYGDVVMNHKAGADGTEFVDAVEVDPSNRNQETSGTYQIQAWTKFDFPGRGNTYSSFKWRWYHFDGTDWDESRKLNRIYKFTGKAWDWEVDTENGNYDYLMFADLDMDHPEVVNELRRWGEWYTNTLNLDGFRIDAVKHIKFSFTRDWLTHVRNATGKGMFAVAEFWKNDLGALENYLSKTNWNHLVFDVPLHYNLYNASNSRGNYDMAKLLNGTVVQKHPMHAVTFVDNHDSQPGESLESFVQEWFKPLAYALILTREQGYPSVFYGDYYGIPTHSVPAMKAKIDPILAARQNFAYGTQHDYFDHHNIIGWTREGNTTHPNSGLATIMSDGPGGEKWMYVGQNKAGQVWHDITGNKPGTVTINADGWANFSVNKGSVSIWVKR

SEQ ID NO: 19583 - protein, 481 aa, Bacillus sp.
HNGTNATMMQYFEWHLPNDGNHWNRLRDDASNLRNRGITAIWIPPAWKGTSQNDVGYGAYDLYDLGEFNQKGTVRTKYGTRSQLESAIHALKNNGVQVYGDVVMNHKAGADGTEFVDAVEVDPSNRNQETSGTYQIQAWTKFDFPGRGNTYSSFKWRWYHFDGTDWDESRKLNRIYKFTGKAWDWEVDTENGNYDYLMFADLDMDHPEVVNELRRWGEWYTNTLNLDGFRIDAVKHIKFSFTRDWLTHVRNATGKGMFAVAEFWKNDLGALENYLSKTNWNHSVFDVPLHYNLYNASNSRGNYDMAKLLNGTVVQKHHMHAVTFVDNHDSQPGESLESFVQEWFKPLAYALILTREQGYPSVFYGDYYGIPTHSVPAMKAKIDPILAARQNFAYGTQHDYFDHHNIIGWTREGNTTHPNSGLATIMSDGPGGEKWMYVGQNKAGQVWHDITGNKPGTVTINADGWANFSVNKGSVSIWVKR

SEQ ID NO: 19584 - protein, 481 aa, Bacillus sp.
HNGTNATMMQYFEWHLPNDGNHWNRLRDDASNLRNRGINAIWIPPAWKGTSQNDVGYGAYDLYDLGEFNQKGTVRTKYGTRSQLESAIHALKNNGVQVYGDVVMNHKAGADGTEFVDAVEVDPSNRNQETSGTYQIQAWTKFDFPGRGNTYSSFKWRWYHFDGTDWDESRKLNRIYKFTGKAWDWEVDTENGNYDYLMFADLDMDHPEVVNELRRWGEWYTNTLNLDGFRIDAVKHIKFSFTRDWLTHVRNATGKGMFAVAEFWKNDLGALENYLSKTNWNHSVFDVPLHYNLYNASNSRGNYDMAKLLNGTVVQKHPMHAVTFVDNHDSQPGESLESFVQEWFKPLAYALILTREQGYPSVFYGDYYGIPTHSVPAMKAKIDPILAARQNFAYGTQHDYFDHHNIIGWTREGNTTHPNSGLATIMSDGPGGEKWMYVGQNKAGQVWHDITGNKPGTVTINADGWANFSVNKGSVSIWVKR

SEQ ID NO: 19585 - protein, 481 aa, Bacillus sp.
HNGTNATMMQYFEWHLPNDGNHWNRLRDDASNLRNRGITAIWIPPAWKGTSQNDVGYGAYDLYDLGEFNQKGTVRTKYGTRSQLESAIHALKNNGVQVYGDVVMNHKAGADGTEFVDAVEVDPSNRNQETSGTYQIQAWTKFDFPGRGNTYSSFKWRWYHFDGTDWDESRKLNRIYKFTGKNWDWEVDTENGNYDYLMFADLDMDHPEVVNELRRWGEWYTNTLNLDGFRIDAVKHIKFSFTRDWLTHVRNATGKGMFAVAEFWKNDLGALENYLSKTNWNHSVFDVPLHYNLYNASNSRGNYDMAKLLNGTVVQKHPMHAVTFVDNHDSQPGESLESFVQEWFKPLAYALILTREQGYPSVFYGDYYGIPTHSVPAMKAKIDPILAARQNFAYGTQHDYFDHHNIIGWTREGNTTHPNSGLATIMSDGPGGEKWMYVGQNKAGQVWHDITGNKPGTVTINADGWANFSVNKGSVSIWVKR

SEQ ID NO: 19586 - protein, 481 aa, Bacillus sp.
HNGTNATMMQYFEWHLPNDGNHWNRLRDDASNLRNRGITAIWIPPAWKGTSQNDVGYGAYDLYDLGEFNQKGTVRTKYGTRSQLESAIHALKNNGVQVYGDVVMNHKAGADGTEFVDAVEVDPSNRNQETSGTYQIQAWTKFDFPGRGNTYSSFKWRWYHFDGTDWDESRKLNRIYKFTGKAWDWEVDTENGNYDYLMFADLDMDHPEVVNELRRWGEWYTNTLNLDGFRIDAVKHIKFSFTRDWLTHVRNATGKGMKAVAEFWKNDLGALENYLSKTNWNHSVFDVPLHYNLYNASNSRGNYDMAKLLNGTVVQKHPMHAVTFVDNHDSQPGESLESFVQEWFKPLAYALILTREQGYPSVFYGDYYGIPTHSVPAMKAKIDPILAARQNFAYGTQHDYFDHHNIIGWTREGNTTHPNSGLATIMSDGPGGEKWMYVGQNKAGQVWHDITGNKPGTVTINADGWANFSVNKGSVSIWVKR

SEQ ID NO: 19587 - protein, 481 aa, Bacillus sp.
HNGTNATMMQYFEWHLPNDGNHWNRLRDDASNLRNRGITAIWIPPAWKGTSQNDVGYGAYDLYDLGEFNQKGTVRTKYGTRSQLESAIHALKNNGVQVYGDVVMNHKAGADGTEFVDAVEVDPSNRNQETSGTYQIQAWTKFDFPGRGNTYSSFKWRWYHFDGTDWDESRKLNRIYKFTGKAWDWEVDTENGNYDYLMFADLDMDHPEVVNELRRWGEWYTNTLNLDGFRIDAVKHIKFSFTRDWLTHVRNATGKGMFAVAEFWKNDLGALENYLSKTNWNHSVFDVPLHYNLYNASNSRGNYDMAKLLNGTVVQKHPGHAVTFVDNHDSQPGESLESFVQEWFKPLAYALILTREQGYPSVFYGDYYGIPTHSVPAMKAKIDPILAARQNFAYGTQHDYFDHHNIIGWTREGNTTHPNSGLATIMSDGPGGEKWMYVGQNKAGQVWHDITGNKPGTVTINADGWANFSVNKGSVSIWVKR

SEQ ID NO: 19588 - protein, 481 aa, Bacillus sp.
HNGTNATMMQYFEWHLPNDGNHWNRLRDDASNLRNRGITAIWIPPAWKGTSQNDVGYGAYDLYDLGEFNQKGTVRTKYGTRSQLESAIHALKNNGVQVYGDVVMNHKAGADGTEFVDAVEVDPSNRNQETSGTYQIQAYTKFDFPGRGNTYSSFKWRWYHFDGTDWDESRKLNRIYKFDGKAWDWEVDTEFGNYDYLMFADVDMDHPEVVNELRRWGEWYTNTLNLDGFRIDAVKHIKFSFTRDWLTHVRNATGKGMFAVAEFWKNDLGALENYLSKTNWNHSVFDVPLHYNLYNASNSRGNYDMAKLLNGTVVQKHPMHAVTFVDNHDSQPGESLESFVQEWFKPLAYALILTREQGYPSVFYGDYYGIPTHSVPAMKAKIDPILAARQNFAYGTQHDYFDHHNIIGWTREGNTTHPNSGLATIMSDGPGGEKWMYVGQNKAGQVWHDITGNKPGTVTINADGWANFSVNKGSVSIWVKR

SEQ ID NO: 19589 - protein, 481 aa, Bacillus sp.
HNGTNSTMMQYFEWHLPNDGNHWNRLRDDASNLRNRGITAIWIPPAWKGTSQNDVGYGAYDLYDLGEFNQKGTVRTKYGTRSQLESAIHALKNNGVQVYGDVVMNHKAGADGTEFVDAVEVDPSNRNQETSGTYQIQAWTKFDFPGRGNTYSSFKWRWYHFDGTDWDESRKLNRIYKFTGKAWDWEVDTENGNYDYLMFADLDMDHPEVVNELRRWGEWYTNTLNLDGFRIDAVKHIKFSFTRDWLTHVRNATGKGMKAVAEFWKNDLGALENYLSKTNWNHSVFDVPLHYNLYNASNSRGNYDMAKLLNGTVVQKHPMHAVTFVDNHDSQPGESLESFVQEWFKPLAYALILTREQGYPSVFYGDYYGIPTHSVPAMKAKIDPILAARQNFAYGTQHDYFDHHNIIGWTREGNTTHPNSGLATIMSDGPGGEKWMYVGQNKAGQVWHDITGNKPGTVTINADGWANFSVNKGSVSIWVKR

SEQ ID NO: 19590 - protein, 481 aa, Bacillus sp.
HNGTNATMMQYFEWHLPNDGNHWNRLRDDASNLRNRGITAIWIPPAWKGTSQNDVGYGAYDLYDLGEFNQKGTVRTKYGTRSQLESAIHALKNNGVQVYGDVVMNHKAGADGTEFVDAVEVDPSNRNQETSGTYQIQAWTKFDFPGRGNTYSSFKWRWYHFDGTDWDESRKLNRIYKFTGKAWDWEVDTENGNYDYLMFADLDMDHPEVVNELRRWGEWYTNTLNLDGFRIDAVKHIKFSFTRDWLTHVRNATGKGMSAVAEFWKNDLGALENYLSKTNWNHSVFDVPLHYNLYNASNSRGNYDMAKLLNGTVVQKHPMHAVTFVDNHDSQPGESLESFVQEWFKPLAYALILTREQGYPSVFYGDYYGIPTHSVPAMKAKIDPILAARQNFAYGTQHDYFDHHNIIGWTREGNTTHPNSGLATIMSDGPGGEKWMYVGQNKAGQVWHDITGNKPGTVTINADGWANFSVNKGSVSIWVKR

SEQ ID NO: 19591 - protein, 483 aa, Synthetic construct
HHNGTNGTMMQYFEWYLPNDGNHWNRLRSDASNLKDKGITAVWIPPAWKGASQNDVGYGAYDLYDLGEFNQKGTVRTKYGTRNQLQAAVTALKSNGIQVYGDVVMNHKGGADATEWVRAVEVNPSNRNQEVSGDYTIEAWTKFDFPGRGNTHSNFKWRWYHFDGVDWDQSRQLQNRIYKFRGDGKGWDEVDTENGNYDYLMYADIDMDHPEVVNELRNWGVWYTNTLGLDGFRIDAVKHIKYSFTRDWLTHVRNTTGKNMFAVAEFWKNDIGAIENYLSKTNWNHSVFDVPLHYNLYNASRSGGNYDMRQIFNGTVVQRHPTHAVTFVDNHDSQPEEALESFVEEWFKPLAYALTLTRDQGYPSVFYGDYYGIPTHGVPAMKSKIDPILEARQKYAYGKQNDYLDHHNMIGWTREGNTAHPNSGLATIMSDGPGGNKWMYVGRNKAGQVWRDITGNRSGTVTINADGWGNFSVNGGSVSIWVN

SEQ ID NO: 19592 - protein, 483 aa, Synthetic construct
HHNGTNGTMMQYFEWYLPNDGNHWNRLRSDASNLKDKGITAVWIPPAWKGASQNDVGYGAYDLYDLGEFNQKGTVRTKYGTRNQLQAAVTALKSNGIQVYGDVVMNHKGGADATEWVRAVEVNPSNRNQEVSGDYTIEAWTKFDFPGRGNTHSNFKWRWYHFDGVDWDQSRQLQNRIYKFRGDGKGWDWEVDTENGNYDYLMYADIDMDHPEVVNELRNWGVWYTNTLGLDGFRIDAVKHIKYSFTRDWLTHVRNTTGKNMFAVAEFWKNIGAIENYLSKTNWNHSVFDVPLHYNLYNASRSGGNYDMRQIFNGTVVQRHPTHAVTFVDNHDSQPEEALESFVEEWFKPLAYALTLTRDQGYPSVFYGDYYGIPTHGVPAMKSKIDPILEARQKYAYGKQNDYLDHHNMIGWTREGNTAHPNSGLATIMSDGPGGNKWMYVGRNKAGQVWRDITGNRSGTVTINADGWGNFSVNGGSVSIWVN

SEQ ID NO: 19593 - protein, 483 aa, Synthetic construct
AAPFNGTMMQYFEWYLPDDGTLWTKVANEANNLSSLGITALWLPPAYKGTSRSDVGYGVYDLYDLGEFNQKGAVRTKYGTKAQYLQAIQAAHAAGMQVYADVVFNHKAGADATEDVTAVEVNPANRNQETSEEYQIKAWTDFRFPGRGNTYSDFKWHWYHFDGADWDESRKISRIFKFRGEGKAWDWEVSSENGNYDYLMYADVDMDHPEVVTELKNWGKWYVNTTNIDGFRLDAVKHIKFSFFPDWLSYVRSQTGKPLFTVGEYWSYDINKLHNYIMKTNGTMSLFDAPLHNKFYTASKSGGTFDMRTLMTNTLMKDQPTLAVTFVDNHDTEPGQALQSWVDPWFKPLAYAFILTRQEGYPCVFYGDYYGIPQYNIPSLKSKIDPLLIARRDYAYGTQHDYLDHSDIIGWTREGVTEKPGSGLAALITDGPGGSKWMYVGKQHAGKVFYDLTGNRSDTVTINSDGWGEFKVNGGSVSVWVPR

SEQ ID NO: 19594 - protein, 480 aa, Bacillus sp.
HNGTNGTMMQYFEWHLPNDGNHWNRLRDDASNLRNRGITAIWIPPAWKGTSQNDVGYGAYDLYDLGEFNQKGTVRTKYGTRSQLESAIHALKNNGVQVYGDVVMNHKAGADGTEFVDAVEVDPSNRNQETSGTYQIQAYTKFDFPGRGNTYSSFKWRWYHFDGTDWDESRKLNRIYKFTGKAWDWEVDTEFGNYDYLMFADYDMDHPEVVNELRRWGEWYTNTLNLDGFRIDAVKHIKFSFTRDWLTHVRNATGKMPAVAEFWKNDLGALENYLSKTNWNHSVFDVPLHYNLYNASNSRGNYDMAKLLNGTVVQKHPMHAVTFVDNHDSQPGESLESFVQEWFKPLAYALILTREQGYPSVFYGDYYGIPTHSVPAMKAKIDPILAARQNFAYGTQHDYFDHHNIIGWTREGNTTHPNSGLATIMSDGPGGEKWMYVGQNKAGQVWHDITGNKPGTVTINADGWANFSVNKGSVSIWVKR

SEQ ID NO: 19595 - protein, 480 aa, Bacillus sp.
HNGTNGTMMQYFEWHLPNDGNHWNRLRDDASNLRNRGITAIWIPPAWKGTSQNDVGYGAYDLYDLGEFNQKGTVRTKYGTRSQLESAIHALKNNGVQVYGDVVMNHKAGADGTEFVDAVEVDPSNRNQETSGTYQIQAYTKFDFPGRGNTYSSFKWRWYHFDGTDWDESRKLNRIYKFTGKAWDWEVDTEFGNYDYLMFADYDMDHPEVVNELRRWGEWYTNTLNLDGFRIDAVKHIKFSFTRDWLTHVRNATGKMFAVAEFWKNDLGALENYLSKTNWNHSVFDVPLHYNLYNASNSRGNYDMAKLLNGTVVQKHPMWAVTFVDNHDSQPGESLESFVQEWFKPLAYALILTREQGYPSVFYGDYYGIPTHSVPAMKAKIDPILAARQNFAYGTQHDYFDHHNIIGWTREGNTTHPNSGLATIMSDGPGGEKWMYVGQNKAGQVWHDITGNKPGTVTINADGWANFSVNKGSVSIWVKR

SEQ ID NO: 19596 - protein, 480 aa, Bacillus sp.
HNGTNGTMMQYFEWHLPNDGNHWNRLRDDASNLRNRGITAIWIPPAWKGTSQNDVGYGAYDLYDLGEFNQKGTVRTKYGTRSQLESAIHALKNNGVQVYGDVVMNHKAGADGTEFVDAVEVDPSNRNQETSGTYQIQAYTKFDFPGRGNTYSSFKWRWYHFDGTDWDESRKLNRIYKFTGKAWDWEVDTEFGNYDYLMFADYDMDHPEVVNELRRWGEWYTNTLNLDGFRIDAVKHIKFSFTRDWLTHVRNATGKMFAVAEFWKNDLGALENYLSKTNWNHSVFDVPLHYNLYNASNSRGNYDMAKLLNGTVVQKHPMHAVTFVDNHDSQPGESLESFVQEWFKPLAYALILTREQGYPSVFYGDYYGIPTHSVPAMKAKIDPILAARQNFAYGTQHDYFDHHNIIGWTMEGNTTHPNSGLATIMSDGPGGEKWMYVGQNKAGQVWHDITGNKPGTVTINADGWANFSVNKGSVSIWVKR

SEQ ID NO: 19597 - protein, 515 aa, Bacillus sp.
AAPFNGTMMQYFEWHLPDDGTLWTKLANDANNLSSLGITAIWIPPAYKGTSRADVGYGVYDLYDLGEFNQKGTVRTKYGTKAQYLQAIQAAHAAGINVYADVVFDHKGGADGTEWVDAVEVNPSDRNQDISGTYQIQAWTKFDFPGRGNTYSSFKWRWFHFDGVDWDESRKLSRIFKFRGIGKAWDWEVDTENGNYDYLLYADIDMDHPEVVTELKNWGKWFVNTTNIDGFRLDAIKHIKFSFFPDWLSHVRSQTGKPLFTVGEYWSYDINKLHNYITKTNGTMSLFDAPLHNKFYTASKSGGAFDMRTILTNSLMKDQPTLAVTFVDNHDTEPGQALQSWVDPWFKPLAYAFILTRQEGYPCVFYGDYYGIPNYNIPALKSKIDPLLIARRDYAYGTQHDYLDHSDIIGWTREGVSEKPGSGLAAIISDGPGGSKWMYVGKQHAGKVFYDLTGNRADSVTINSDGWGEFKVNGGSVSVWVPRKTTVSTIARPITTRPWTGEFVRWTEPRLVAWP

SEQ ID NO: 19598 - protein, 518 aa, Geobacillus stearothermophilus
AAPFNGTLMQYFEWYLPDDGTLWTKLANDANNLASLGITALWIPPAYKGTSRADVGYGVYDLYDLGEFNQKGTVRTKYGTKAQYLQAIQAAHAAGINVYADVVFDHKGGADATEWVDAVEVNPADRNQEISGTHQIQAWTKFDFPGRGNTYSSFKWRWYHFDGVDWDESRKLSRIYKFRGIGKAWDWEVDTENGNYDYLMYADIDMDHPDVVTEIKNWGKWYVNTTNIDGFRLDAVKHIKFSFFPDWLSHVRSQTGKPLFTVAEYWSYDINKLHNYITKTNGTMSLFDAPLHNKFHTASKSGGAFDMRTLLTNTLMKDQPTLAVTFVDNHDTEPGQALQSWVDPWFKPLAYAFILTRQEGYPCVFYGDYYGIPGDSQYNIPALKSKIDPILIARKDYAYGTQHDYLDHSDIIGWTREGVSEKPGSGLAALITDGPGGAKWMYVGKQHAGKVFHDITGNRSDTVTINSDGWGEFKVNGGSVSIWVPRKTTVSTIARPITTRPWTGEFVRWTEPRLVAWP

SEQ ID NO: 19599 - protein, 512 aa, unidentified
LAFLLTASLFCPTGQHAKAAAPFNGTMMQYFEWYLPDDGTLWTKVANEANNLSSLGITALWLPPAYKGTSRSDVGYGVYDLYDLGEFNQKGTVRTKYGTKAQYLQAIQAAHAAGMQVYADVVFDHKGGADGTEWVDAVEVNPSDRNQEISGTYQIQAWTKFDFPGRGNTYSSFKWRWYHFDGVDWDESRKLSRIYKFRGIGKAWDWEVDTENGNYDYLMYADLDMDHPEVVTELKNWGKWYVNTTNIDGFRLDAVKHIKFSFFPDWLSYVRSQTGKPLFTVGEYWSYDINKLHNYITKTNGTMSLFDAPLHNKFYTASKSGGAFDMRTLMTNTLMKDQPTLAVTFVDNHDTEPGQALQSWVDPWFKPLAYAFILTRQEGYPCVFYGDYYGIPQYNIPSLKSKIDPLLIARRDYAYGTQHDYLDHSDIIGWTREGVTEKPGSGLAALITDGPGGSKWMYVGKQHAGKVFYDLTGNRSDTVTINSDGWGEFKVNGGSVSVWVPRKTTVSTIARP

SEQ ID NO: 19600 - protein, 493 aa, Geobacillus stearothermophilus
AAPFNGTMMQYFEWYLPDDGTLWTKVADEANNLSSLGITALWLPPAYKGTSRSDVGYGVYDLYDLGEFNQKGTVRTKYGTKAQYLQAIQAAHAAGMRVYADVVFDHKGGADGTEWVDAVEVNPSDRNQEISGTYQIQAWTKFDFPGRGNTYSSFKWRWYHFDGVDWDESRQLSRIYKFRGIGKAWDWEVDTENGNYDYLMYADLDMDHPEVVTELKNWGKWYVDTTNIDGFRLDAVKHIKFSFFPDWLSYVRSQTGKPLFTVGEYWSYDIDKLHNYITKTNGTMSLFDAPLHNKFYTASKSGGAFDMQTLMTNTLMKDRPTLAVTFVDNHDTEPGQALQSWVDPWFKPLAYAFILTREEGYPCVFYGDYYGIPQYNIPSLKSKIDPLLIARRDYAYGTQHDYLDHSDIIGWTREGVTEKPGSGLAALITDGPGGSKWMYVGKEHAGKVFYDLTGNRSDTVTINSDGWGEFKVNGGSVSVWVPQKTTVSTIARP

SEQ ID NO: 19601 - protein, 493 aa, Geobacillus stearothermophilus
AAPFNGTMMQYFEWYLPDDGTLWTKVADEANNLSSLGITALWLPPAYKGTSRSDVGYGVYDLYDLGEFNQKGTVRTKYGTKAQYLEAIEAAHAAGMQVYADVVFDHKGGADGTEWVDAVEVNPSDRNQEISGTYQIQAWTKFDFPGRGNTYSSFKWRWYHFDGVDWDESRQLSRIYKFRGIGKAWDWEVDTENGNYDYLMYADLDMDHPEVVTELKNWGKWYVDTTNIDGFRLDAVKHIKFSFFPDWLSYVRSQTGKPLFTVGEYWSYDIDKLHNYITKTDGTMSLFDAPLHNKFYTASKSGGAFDMQTLMTNTLMKDQPTLAVTFVDNHDTEPGQALQSWVDPWFKPLAYAFILTRQEGYPCVFYGDYYGIPQYNIPSLKSQIDPLLIARRDYAYGTQHDYLDHSDIIGWTREGVTEKPGSGLAALITDGPGGSKWMYVGKQHAGQVFYDLTGNRSDTVTINSDGWGEFQVNGGSVSVWVPQKTTVSTIARP

SEQ ID NO: 19602 - protein, 493 aa, Geobacillus stearothermophilus
AAPFNGTMMQYFEWYLPDDGTLWTKVADEANNLSSLGITALWLPPAYKGTSRSDVGYGVYDLYDLGEFNQKGTVRTKYGTKAQYLQAIQAAHAAGMRVYADVVFDHKGGADGTEWVDAVEVNPSDRNQEISGTYQIQAWTKFDFPGRGNTYSSFKWRWYHFDGVDWDESRQLSRIYKFRGIGKAWDWEVDTENGNYDYLMYADLDMDHPEVVTELKNWGKWYVDTTNIDGFRLDAVKHIKFSFFPDWLSYVRSQTGKPLFTVGEYWSYDIDKLHNYITKTDGTMSLFDAPLHNKFYTASKSGGAFDMQTLMTNTLMKDRPTLAVTFVDNHDTEPGQALQSWVDPWFKPLAYAFILTREEGYPCVFYGDYYGIPQYNIPSLKSQIDPLLIARRDYAYGTQHDYLDHSDIIGWTREGVTEKPGSGLAALITDGPGGSKWMYVGKEHAGKVFYDLTGNRSDTVTINSDGWGEFKVNGGSVSVWVPQKTTVSTIARP

SEQ ID NO: 19603 - protein, 493 aa, Geobacillus stearothermophilus
AAPFNGTMMQYFEWYLPDNGTLWTKVAKEANNLSSLGITALWLPPAYKGTSRSDVGYGVYDLYDLGEFNQKGTVRTKYGTKAQYLQAIQAAHAAGMRVYADVVFDHKGGADGTEWVDAVEVNPSDRNQEISGTYQIQAWTKFDFPGRGNTYSSFKWRWYHFDGVDWDESRKLSRIYKFRGIGKAWDWEVDTENGNYDYLMYADLDMDHPEVVTELKNWGKWYVKTTNIDGFRLDAVKHIKFSFFPDWLSYVRSQTGKPLFTVGEYWSYDIKKLHNYITKTNGTMSLFDAPLHNKFYTASKSGGAFNMRTLMTNTLMKNRPTLAVTFVDNHDTEPGQALQSWVDPWFKPLAYAFILTREEGYPCVFYGDYYGIPQYNIPSLKSKIDPLLIARRDYAYGTQHDYLDHSDIIGWTREGVTEKPGSGLAALITDGPGGSKWMYVGKEHAGKVFYDLTGNRSDTVTINSDGWGEFKVNGGSVSVWVPRKTTVSTIARP

SEQ ID NO: 19604 - protein, 488 aa, Bacillus sp.
AAPFNGTMMQYFEWHLPDDGTLWTKLANDANNLSSLGITAIWIPPAYKGTSRADVGYGVYDLYDLGEFNQKGTVRTKYGTKAQYLQAIQAAHAAGINVYADVVFDHKGGADGTEWVDAVEVNPSDRNQDISGTYQIQAWTKFDFPGRGNTYSSFKWRWFHFDGVDWDESRKLSRIFKFRGIGKAWDWEVDTENGNYDYLLYADIDMDHPEVVTELKNWGKWFVNTTNIDGFRLDAIKHIKFSFFPDWLSHVRSQTGKPLFTVGEYWSYDINKLHNYITKTNGTMSLFDAPLHNKFYTASKSGGAFDMRTILTNSLMKDQPTLAVTFVDNHDTEPGQALQSWVDPWFKPLAYAFILTRQEGYPCVFYGDYYGIPNYNIPALKSKIDPLLIARRDYAYGTQHDYLDHSDIIGWTREGVSEKPGSGLAAIISDGPGGSKWMYVGKQHAGKVFYDLTGNRSDSVTINSDGWGEFKVNGGSVSVWVPRKTTVS

SEQ ID NO: 19605 - protein, 503 aa, Geobacillus stearothermophilus
LAFLLTASLFCPTGQHAKAAAPFNGTMMQYFEWYLPDDGTLWTKVANEANNLSSLGITALWLPPAYKGTSRSDVGYGVYDLYDLGEFNQKGTVRTKYGTKAQYLQAIQAAHAAGMQVYADVVFDHKGGADGTEWVDAVEVNPSDRNQEISGTYQIQAWTKFDFPGRGNTYSSFKWRWYHFDGVDWDESRKLSRIYKFIGKAWDWEVDTENGNYDYLMYADLDMDHPEVVTELKNWGKWYVNTTNIDGFRLDAVKHIKFSFFPDWLSYVRSQTGKPLFTVGEYWSYDINKLHNYITKTNGTMSLFDAPLHNKFYTASKSGGAFDMRTLMTNTLMKDQPTLAVTFVDNHDTEPGQALQSWVDPWFKPLAYAFILTRQEGYPCVFYGDYYGIPQYNIPSLKSKIDPLLIARRDYAYGTQHDYLDHSDIIGWTREGVTEKPGSGLAALITDGPGGSKWMYVGKQHAGKVFYDLTGNRSDTVTINSDGWGEFKVNGGSVSVWVPRKTT

SEQ ID NO: 19606 - protein, 503 aa, Geobacillus stearothermophilus
LAFLLTASLFCPTGQEAKAAAPFNGTMMQYFEWYLPDDGTLWTKVANEANNLSSLGITALWLPPAYKGTSRSDVGYGVYDLYDLGEFNQKGTVRTKYGTKAQYLQAIQAAHAAGMQVYADVVFDHKGGADGTEWVDAVEVNPSDRNQEISGTYQIQAWTKFDFPGRGNTYSSFKWRWYHFDGVDWDESRKLSRIYKFIGKAWDWEVDTENGNYDYLMYADLDMDHPEVVTELKNWGKWYVNTTNIDGFRLDAVKHIKFSFFPDWLSYVRSQTGKPLFTVGEYWSYDINKLHNYITKTNGTMSLFDAPLHNKFYTASKSGGAFDMRTLMTNTLMKDQPTLAVTFVDNHDTEPGQALQSWVDPWFKPLAYAFILTRQEGYPCVFYGDYYGIPQYNIPSLKSKIDPLLIARRDYAYGTQHDYLDHSDIIGWTREGVTEKPGSGLAALITDGPGGSKWMYVGKQHAGKVFYDLTGNRSDTVTINSDGWGEFKVNGGSVSVWVPRKTT

SEQ ID NO: 19607 - protein, 484 aa, Synthetic construct
VNGTLMQYFEWYTPNDGQHWKRLQNDAEHLSDIGITAVWIPPAYKGLSQSDNGYGPYDLYDLGEFQQKGTVRTKYGTKSELQDAIGSLHSRNVQVYGDVVLNHRMGADATETISAVEVNPSNRNQVTSGAYNISAWTDFEFPGRGNTYSSFKWHSYYFDGVDWDQSRQLSGKIYQIQGTGKAWDWEVDSENGNYDYLMGADIDYDHPDVVAETKKWGIWYANELSLDGFRIDAAKHIKFSFLRDWVQAVRQATGKEMFTVAEYWQNNAGKLENYLNKTSFNQSVFDVPLHFNLQAASSQGGGYDMRRLLDGTVVSRHPEKAVTFVENHDTQPGQSLESTVQTWFKPLAYAFILTRESGYPQVFYGDMYGTKGTSPKEIPSLKDNIEPILKARKEYAYGPQHDYIDHPDVIGWTREGDSSAAKSGLAALITDGPGGSKRMYAGLKNAGETWYDITGNRSDTVKIGSDGWGEFHVNDGSVSIYVQK

SEQ ID NO: 19608 - protein, 484 aa, Synthetic construct
HHNQTNGTMMQYFEWYLPNDGNHWNRLRSDASNLKDKGITAVWIPPAWKGASQNDVGYGAYDLYDLGEFNQKGTVRTKYGTRNQLQAAVTALKSNGIQVYGDVVMNHKGGADATEWVRAVEVNPSNRNQEVSGDYTIEAWTKFDFPGRGNTHSNFKWRWYHFDGVDWDQSRQLQNRIYKFRGDGKGWDWEVDTENGNYDYLMYADIDMDHPEVVNELRNWGVWYTNTLGLDGFRIDAVKHIKYSFTRDWLTHVRNTTGKNMFAVAEFWKNDIGAIENYLSKTNWNHSVFDVPLHYNLYNASRSGGNYDMRQIFNGTVVQRHPTHAVTFVDNHDSQPEEALESFVEEWFKPLAYALTLTRDQGYPSVFYGDYYGIPTHGVPAMKSKIDPILEARQKYAYGKQNDYLDHHNMIGWTREGNTAHPNSGLATIMSDGPGGNKWMYVGRNKAGQVWRDITGNRSGTVTINADGWGNFSVNGGSVSIWVN

SEQ ID NO: 19609 - protein, 484 aa, Synthetic construct
HHNGTNGTMMQYFEWYLPNDGNHWNRLRSDASNLKDKGITAVWIPPAWKGASQNDVGYGAYDLYDLGEFNQKGTVRTKYGLRNQLQAAVTALKSNGIQVYGDVVMNHKGGADATEWVRAVEVNPSNRNQEVSGDYTIEAWTKFDFPGRGNTHSNFKWRWYHFDGVDWDQSRQLQNRIYKFRGDGKGWDWEVDTENGNYDYLMYADIDMDHPEVVNELRNWGVWYTNTLGLDGFRIDAVKHIKYSFTRDWLTHVRNTTGKNMFAVAEFWKNDIGAIENYLSKTNWNHSVFDVPLHYNLYNASRSGGNYDMRQIFNGTVVQRHPTHAVTFVDNHDSQPEEALESFVEEWFKPLAYALTLTRDQGYPSVFYGDYYGIPTHGVPAMKSKIDPILEARQKYAYGKQNDYLDHHNMIGWTREGNTAHPNSGLATIMSDGPGGNKWMYVGRNKAGQVWRDITGNRSGTVTINADGWGNFSVNGGSVSIWVN

SEQ ID NO: 19610 - protein, 484 aa, Synthetic construct
HHNGTNGTMMQYFEWYLPNDGNHWNRLRSDASNLKDKGITAVWIPPAWKGASQNDVGYGAYDLYDLGEFNQKGTVRTKYGTRNQLQAAVTALKSNGIQVYGDVVMNHKGGADATEWVRAVEVNPSNRNQEVSGDYTIEAWTKFDFPGRGNTHSNFKWRWYHFDGVDWDQSRQLQNRIYKFRGDGKGWDWEVDTENGNYDYLMYADIDMDHPEVVNELRNWGVWYTNTLGLDGFRIDAVKHIKYSFTRDWLTHVRNTTGKNMFAVAEFWKNDIGAIENYLSKTNWNHSVFDVPLHYNLYNASRSGGNYDMRQIFNGTVVQRHPTHAVTFVDNHDSQPEEALESFVEEWFKPLAYALTLTRDQGYPSVFYGSYYGIPTHGVPAMKSKIDPILEARQKYAYGKQNDYLDHHNMIGWTREGNTAHPNSGLATIMSDGPGGNKWMYVGRNKAGQVWRDITGNRSGTVTINADGWGNFSVNGGSVSIWVN

SEQ ID NO: 19611 - protein, 484 aa, Synthetic construct
HHNGTNGTMMQYFEWYLPNDGNHWNRLRSDASNLKDKGITAVWIPPAWKGASQNDVGYGAYDLYDLGEFNQKGTVRTKYGTRNQLQAAVTALKSNGIQVYGDVVMNHKGGADATEWVRAVEVNPSNRNQEVSGDYTIEAWTKFDFPGRGNTHSNFKWRWYHFDGVDWDQSRQLQNRIYKFRGDGKGWDWEVDTENGNYDYLMYADIDMDHPEVVNELRNWGVWYTNTLGLDGFRIDAVKHIKYSFTRDWLTHVRNTTGKNMFAVAEFFKNDIGAIENYLSKTNWNHSVFDVPLHYNLYNASRSGGNYDMRQIFNGTVVQRHPTHAVTFVDNHDSQPEEALESFVEEWFKPLAYALTLTRDQGYPSVFYGDYYGIPTHGVPAMKSKIDPILEARQKYAYGKQNDYLDHHNMIGWTREGNTAHPNSGLATIMSDGPGGNKWMYVGRNKAGQVWRDITGNRSGTVTINADGWGNFSVNGGSVSIWVN

SEQ ID NO: 19612 - protein, 484 aa, Synthetic construct
HHNGTNGTMMQYFEWYLPNDGNHWNRLRSDASNLKDKGITAVWIPPAWKGASQNDVGYGAYDLYDLGEFNQKGTVRTKYGTRNQLQAAVTALKSNGIVVYGDVVMNHKGGADATEWVRAVEVNPSNRNQEVSGDYTIEAWTKFDFPGRGNTHSNFKWRWYHFDGVDWDQSRQLQNRIYKFRGDGKGWDWEVDTENGNYDYLMYADIDMDHPEVVNELRNWGVWYTNTLGLDGFRIDAVKHIKYSFTRDWLTHVRNTTGKNMFAVAEFWKNDIGAIENYLSKTNWNHSVFDVPLHYNLYNASRSGGNYDMRQIFNGTVVQRHPTHAVTFVDNHDSQPEEALESFVEEWFKPLAYALTLTRDQGYPSVFYGDYYGIPTHGVPAMKSKIDPILEARQKYAYGKQNDYLDHHNMIGWTREGNTAHPNSGLATIMSDGPGGNKWMYVGRNKAGQVWRDITGNRSGTVTINADGWGNFSVNGGSVSIWVN

SEQ ID NO: 19613 - protein, 484 aa, Synthetic construct
HHNGTPGTMMQYFEWYLPNDGNHWNRLRSDASNLKDKGITAVWIPPAWKGASQNDVGYGAYDLYDLGEFNQKGTVRTKYGTRNQLQAAVTALKSNGIQVYGDVVMNHKGGADATEWVRAVEVNPSNRNQEVSGDYTIEAWTKFDFPGRGNTHSNFKWRWYHFDGVDWDQSRQLQNRIYKFRGDGKGWDWEVDTENGNYDYLMYADIDMDHPEVVNELRNWGVWYTNTLGLDGFRIDAVKHIKYSFTRDWLTHVRNTTGKNMFAVAEFWKNDIGAIENYLSKTNWNHSVFDVPLHYNLYNASRSGGNYDMRQIFNGTVVQRHPTHAVTFVDNHDSQPEEALESFVEEWFKPLAYALTLTRDQGYPSVFYGDYYGIPTHGVPAMKSKIDPILEARQKYAYGKQNDYLDHHNMIGWTREGNTAHPNSGLATIMSDGPGGNKWMYVGRNKAGQVWRDITGNRSGTVTINADGWGNFSVNGGSVSIWVN

SEQ ID NO: 19614 - protein, 484 aa, Synthetic construct
HHNGTNGTMMQYFEWYLPNDGNHWNRLRSDASNLKDKGITAVWIPPAWKGASQNDVGYGAYDLYDLGEFNQKGTVRTKYGTRNQLQAAVTALKSNGIQVYGDVVMNHKGGADATEWVRAVEVNPSNRNQEVSGDGTIEAWTKFDFPGRGNTHSNFKWRWYHFDGVDWDQSRQLQNRIYKFRGDGKGWDWEVDTENGNYDYLMYADIDMDHPEVVNELRNWGVWYTNTLGLDGFRIDAVKHIKYSFTRDWLTHVRNTTGKNMFAVAEFWKNDIGAIENYLSKTNWNHSVFDVPLHYNLYNASRSGGNYDMRQIFNGTVVQRHPTHAVTFVDNHDSQPEEALESFVEEWFKPLAYALTLTRDQGYPSVFYGDYYGIPTHGVPAMKSKIDPILEARQKYAYGKQNDYLDHHNMIGWTREGNTAHPNSGLATIMSDGPGGNKWMYVGRNKAGQVWRDITGNRSGTVTINADGWGNFSVNGGSVSIWVN

SEQ ID NO: 19615 - protein, 484 aa, Synthetic construct
HHNGTNGTMMQYFEWYLPNDGNHWNRLRSDASNLKDKGITAVWIPPAWKGASQNDVGYGAYDLYDLGEFNQKGTVRTKYGTRNQLQAAVTALKSNGIQVYGDVVMNHKGGADATEWVRAVEVNPSNRNQEVSGDYTIEAWTKFDFPGRGNTHSNFKWRWYHFDGVDWDQSRQLQNRIYKFRGDGKGWDWEVDTENGNYDYLMYADIDMDHPEVVNELRNWGVWYTNTLGLDGFRIDAVKHIKYSFTRDWLTHVRNTTGKNMFAVAEFWKNDIGAIENYLSKTNWNHSVFDVPLHYNLYNASRSGGNYDMRQIFNGTVVQRHPTHAVTFVDNHDSQPEEALESFVEEWFKPLAYALTLTRDQGYPSVFYGDYYGIPTHGVPAMKSKIDPILEARQMYAYGKQNDYLDHHNMIGWTREGNTAHPNSGLATIMSDGPGGNKWMYVGRNKAGQVWRDITGNRSGTVTINADGWGNFSVNGGSVSIWVN

SEQ ID NO: 19616 - protein, 484 aa, Synthetic construct
HHNGTNGTMMQYFEWYLPNDGNHWNRLRSDASNLKDKGITAVWIPPAWKGASQNDVGYGAYDLYDLGEFNQKGTVRTKYGTRNQLQAAVTALKSNGIQVYGDVVMNHKGGADATEWVRAVEVNPSNRNQEVSGDYTIEAWTKFDFPGRGNTHSNFKWRWYHFDGVDWDQSRQLQNRIYKFRGDGKGWDWEVDTENGNYDYLMYADIDMDHPEVVNELRNWGVWYTNTLGLDGFRIDAVKHIKYSFTRDWLTHVRNTTGKNMFAVAEFWKNDIGAIENYLSKTNWNHSVFDVPLHYNLYNASRSGGNYDMRQIFNGTVVQRHPTHAVTFVDNHDSQPEEALESFVEEWFKPLAYALTFTRDQGYPSVFYGDYYGIPTHGVPAMKSKIDPILEARQKYAYGKQNDYLDHHNMIGWTREGNTAHPNSGLATIMSDGPGGNKWMYVGRNKAGQVWRDITGNRSGTVTINADGWGNFSVNGGSVSIWVN

SEQ ID NO: 19617 - protein, 484 aa, Synthetic construct
HHNGTNGTMMQYFEWYLPNDGNHWNRLRSDASNLKDKGITAVWIPPAWKGASQNDVGYGAYDLYDLGEFNQCGTVRTKYGTRNQLQAAVTALKSNGIQVYGDVVMNHKGGADATEWVRAVEVNPSNRNQEVSGDYTIEAWTKFDFPGRGNTHSNFKWRWYHFDGVDWDQSRQLQNRIYKFRGDGKGWDWEVDTENGNYDYLMYADIDMDHPEVVNELRNWGVWYTNTLGLDGFRIDAVKHIKYSFTRDWLTHVRNTTGKNMFAVAEFWKNDIGAIENYLSKTNWNHSVFDVPLHYNLYNASRSGGNYDMRQIFNGTVVQRHPTHAVTFVDNHDSQPEEALESFVEEWFKPLAYALTLTRDQGYPSVFYGDYYGIPTHGVPAMKSKIDPILEARQKYAYGKQNDYLDHHNMIGWTREGNTAHPNSGLATIMSDGPGGNKWMYVGRNKAGQVWRDITGNRSGTVTINADGWGNFSVNGGSVSIWVN

SEQ ID NO: 19618 - protein, 484 aa, Synthetic construct
HHNGTNGTMMQYFEWYLPNDGNHWNRLRSDASNLKDKGITAVWIPPAWKGASQNDVGYGAYDLYDLGEFNQKGTVRTKYGTRNQLQAAVTALKSNGIQVYGDVVMNHKGGADATEWVRAVEVNPSNRNQEVSGDYTIEAWTKFDFPGRGNTHSNFKWRWYHFDGSDWDQSRQLQNRIYKFRGDGKGWDWEVDTENGNYDYLMYADIDMDHPEVVNELRNWGVWYTNTLGLDGFRIDAVKHIKYSFTRDWLTHVRNTTGKNMFAVAEFWKNDIGAIENYLSKTNWNHSVFDVPLHYNLYNASRSGGNYDMRQIFNGTVVQRHPTHAVTFVDNHDSQPEEALESFVEEWFKPLAYALTLTRDQGYPSVFYGDYYGIPTHGVPAMKSKIDPILEARQKYAYGKQNDYLDHHNMIGWTREGNTAHPNSGLATIMSDGPGGNKWMYVGRNKAGQVWRDITGNRSGTVTINADGWGNFSVNGGSVSIWVN

SEQ ID NO: 19619 - protein, 484 aa, Synthetic construct
HHNGTNGTMMQYFEWYLPNDGNHWDRLRSDASNLKDKGITAVWIPPAWKGASQNDVGYGAYDLYDLGEFNQKGTVRTKYGTRNQLQAAVTALKSNGIQVYGDVVMNHKGGADATEWVRAVEVNPSNRNQEVSGDYTIEAWTKFDFPGRGNTHSNFKWRWYHFDGVDWDQSRQLQNRIYKFRGDGKGWDWEVDTENGNYDYLMYADIDMDHPEVVNELRNWGVWYTNTLGLDGFRIDAVKHIKYSFTRDWLTHVRNTTGKNMFAVAEFWKNDIGAIENYLSKTNWNHSVFDVPLHYNLYNASRSGGNYDMRQIFNGTVVQRHPTHAVTFVDNHDSQPEEALESFVEEWFKPLAYALTLTRDQGYPSVFYGDYYGIPTHGVPAMKSKIDPILEARQKYAYGKQNDYLDHHNMIGWTREGNTAHPNSGLATIMSDGPGGNKWMYVGRNKAGQVWRDITGNRSGTVTINADGWGNFSVNGGSVSIWVN

SEQ ID NO: 19620 - protein, 484 aa, Synthetic construct
HHNGTNGTMMQYFEWYLPNDGNHWGRLRSDASNLKDKGITAVWIPPAWKGASQNDVGYGAYDLYDLGEFNQKGTVRTKYGTRNQLQAAVTALKSNGIQVYGDVVMNHKGGADATEWVRAVEVNPSNRNQEVSGDYTIEAWTKFDFPGRGNTHSNFKWRWYHFDGVDWDQSRQLQNRIYKFRGDGKGWDWEVDTENGNYDYLMYADIDMDHPEVVNELRNWGVWYTNTLGLDGFRIDAVKHIKYSFTRDWLTHVRNTTGKNMFAVAEFWKNDIGAIENYLSKTNWNHSVFDVPLHYNLYNASRSGGNYDMRQIFNGTVVQRHPTHAVTFVDNHDSQPEEALESFVEEWFKPLAYALTLTRDQGYPSVFYGDYYGIPTHGVPAMKSKIDPILEARQKYAYGKQNDYLDHHNMIGWTREGNTAHPNSGLATIMSDGPGGNKWMYVGRNKAGQVWRDITGNRSGTVTINADGWGNFSVNGGSVSIWVN

SEQ ID NO: 19621 - protein, 484 aa, Synthetic construct
HHNGTNGTMMQYFEWYLPNDGNHWNRLRSDASNLKDKGITAVWIPPAWKGASQNDVGYGAYDLYDLGEFNQKGTVRTKYGTRNQLQAAVTALKSNGIQVYGDVVMNHKGGADATEWVRAVEVNPSNRNQEVSGDYTIEAWTKFDFPGRGNTHSNFKWRWYHFDGVDWDQSRQLQNRIYKFRGDGKGWDWEVDTENGNYDYLMYADIDMDHPEVVNELRNWGVWYTNTLGLDGFRIDAVKHIKYSFTRDWLTHVRNTTGKNMFAVAEFWKADIGAIENYLSKTNWNHSVFDVPLHYNLYNASRSGGNYDMRQIFNGTVVQRHPTHAVTFVDNHDSQPEEALESFVEEWFKPLAYALTLTRDQGYPSVFYGDYYGIPTHGVPAMKSKIDPILEARQKYAYGKQNDYLDHHNMIGWTREGNTAHPNSGLATIMSDGPGGNKWMYVGRNKAGQVWRDITGNRSGTVTINADGWGNFSVNGGSVSIWVN

SEQ ID NO: 19622 - protein, 484 aa, Synthetic construct
HHNGTNGTMMQYFEWYLPNDGNHWNRLRSDASNLKDKGITAVWIPPAWKGASQNDVGYGAYDLYDLGEFNQKGTVRTKYGTRNQLQAAVTALKSNGIQVYGDVVMNHKGGADATEWVRAVEVNPSNRNQEVSGDYTIEAWTKFDFPGRGNTHSNFKWRWYHFDGVDWDQSRQLQNRIYKFRGDGKGWDWEVDTENGNYDYLMYADIDMDHPEVVNELRNWGVWYTNTLGLDGFRIDAVKHIKYSFTRDWLTHVRNTTGKNMFAVAEFWKNDIGAINNYLSKTNWNHSVFDVPLHYNLYNASRSGGNYDMRQIFNGTVVQRHPTHAVTFVDNHDSQPEEALESFVEEWFKPLAYALTLTRDQGYPSVFYGDYYGIPTHGVPAMKSKIDPILEARQKYAYGKQNDYLDHHNMIGWTREGNTAHPNSGLATIMSDGPGGNKWMYVGRNKAGQVWRDITGNRSGTVTINADGWGNFSVNGGSVSIWVN

SEQ ID NO: 19623 - protein, 484 aa, Synthetic construct
HHNGTNGTMMQYFEWYLPNDGNHWNRLRSDASNLKDKGITAVWIPPAWKGASQNDVGYGAYDLYDLGEFNQKGTVRTKYGTRNQLQAAVTALKSNGIQVYGDVVMNHKGGADATEWVRAVEVNPSNRNQEVSGDYTIEAWTKFDFPGRGNTHSNFKWRWYHFDGVDWDQSRQLQNRIYKFRGDGKGWDWEVDTENGNYDYLMYADIDMDHPEVVNELRNWGVWYTNTLGLDGFRIDAVKHIKYSFTRDWLTHVRNTTGKNMFAVAEFWKNDIGAIENYLSKTNWNHSVFDVPLHYNLYNASRSGGNYDMRQIFNGTVVQRHPTHAVTFVDNHDSQPEEALESFVEEWFKPLAYALTLTRDQGYPSVFYGDYYGIPTHGVPAMKSKIDPILEARQKYAYGKQNDYLDHHNMIGWTREGNTAHPNSGLATIMSDGPGGNKKMYVGRNKAGQVWRDITGNRSGTVTINADGWGNFSVNGGSVSIWVN

SEQ ID NO: 19624 - protein, 484 aa, Synthetic construct
HHNGTNGTMMQYFEWYLPNDGNHWNRLRSDASNLKDKGITAVWIPPAWKGASQNDVGYGAYDLYDLGEFHQKGTVRTKYGTRNQLQAAVTALKSNGIQVYGDVVMNHKGGADATEWVRAVEVNPSNRNQEVSGDYTIEAWTKFDFPGRGNTHSNFKWRWYHFDGVDWDQSRQLQNRIYKFRGDGKGWDWEVDTENGNYDYLMYADIDMDHPEVVNELRNWGVWYTNTLGLDGFRIDAVKHIKYSFTRDWLTHVRNTTGKNMFAVAEFWKNDIGAIENYLSKTNWNHSVFDVPLHYNLYNASRSGGNYDMRQIFNGTVVQRHPTHAVTFVDNHDSQPEEALESFVEEWFKPLAYALTLTRDQGYPSVFYGDYYGIPTHGVPAMKSKIDPILEARQKYAYGKQNDYLDHHNMIGWTREGNTAHPNSGLATIMSDGPGGNKWMYVGRNKAGQVWRDITGNRSGTVTINADGWGNFSVNGGSVSIWVN

SEQ ID NO: 19625 - protein, 484 aa, Synthetic construct
HHNGTNGTMMQYFEWYLPNDGNHWNRLRSDASNLKDKGITAVWIPPAWKGASQNDVGYGAYDLYDLGEFNQKGTVRTKYGTRNQLQAAVTALKSNGIQVYGDVVMNHKGGADATEWVRAWEVNPSNRNQEVSGDYTIEAWTKFDFPGRGNTHSNFKWRWYHFDGVDWDQSRQLQNRIYKFRGDGKGWDWEVDTENGNYDYLMYADIDMDHPEVVNELRNWGVWYTNTLGLDGFRIDAVKHIKYSFTRDWLTHVRNTTGKNMFAVAEFWKNDIGAIENYLSKTNWNHSVFDVPLHYNLYNASRSGGNYDMRQIFNGTVVQRHPTHAVTFVDNHDSQPEEALESFVEEWFKPLAYALTLTRDQGYPSVFYGDYYGIPTHGVPAMKSKIDPILEARQKYAYGKQNDYLDHHNMIGWTREGNTAHPNSGLATIMSDGPGGNKWMYVGRNKAGQVWRDITGNRSGTVTINADGWGNFSVNGGSVSIWVN

SEQ ID NO: 19626 - protein, 484 aa, Synthetic construct
HHNGTNGTMMQYFEWYLPNDGNHWNRLRSDASNLKDKGITAVWIPPAWKGASQNDVGYGAYDLYDLGEFNQKGTVRTKYGTRNQLQAAVTALKSNGIQVYGDVVMNHKGGADATEWVRAVEVNPSNRNQEVSGDYTIEAWTKFDFPGRGNTHSNFKWRWYHFDGVDWDQSRQLQNRIYKFRGDGKGWDWEVDTENGNYDYLMYADIDMDHPEVVNELRNWGVWYTNTLGLDGFRIDAVKHIKYSFTRDWLTHVRNTTGKNMFAVAEFWMNDIGAIENYLSKTNWNHSVFDVPLHYNLYNASRSGGNYDMRQIFNGTVVQRHPTHAVTFVDNHDSQPEEALESFVEEWFKPLAYALTLTRDQGYPSVFYGDYYGIPTHGVPAMKSKIDPILEARQKYAYGKQNDYLDHHNMIGWTREGNTAHPNSGLATIMSDGPGGNKWMYVGRNKAGQVWRDITGNRSGTVTINADGWGNFSVNGGSVSIWVN

SEQ ID NO: 19627 - protein, 484 aa, Synthetic construct
HHNGTNGTMMQYFEWYLPNDGNHWNRLRSDASNLKDKGITAVWIPPAWKGASQNDVGYGAYDLYDLGEFNQKGTVRTKYGTRNQLQAAVTALKSNGIQVYGDVVMNHKGGADATEWVRAVEVNPSNRNQEVSGDYTIEAWTKFDFPGRGNTHSNFKWRWYHFDGTDWDQSRQLQNRIYKFRGDGKGWDWEVDTENGNYDYLMYADIDMDHPEVVNELRNWGVWYTNTLGLDGFRIDAVKHIKYSFTRDWLTHVRNTTGKNMFAVAEFWKNDIGAIENYLSKTNWNHSVFDVPLHYNLYNASRSGGNYDMRQIFNGTVVQRHPTHAVTFVDNHDSQPEEALESFVEEWFKPLAYALTLTRDQGYPSVFYGDYYGIPTHGVPAMKSKIDPILEARQKYAYGKQNDYLDHHNMIGWTREGNTAHPNSGLATIMSDGPGGNKWMYVGRNKAGQVWRDITGNRSGTVTINADGWGNFSVNGGSVSIWVN

SEQ ID NO: 19628 - protein, 484 aa, Synthetic construct
HHNGTNGTMMQYFEWYLPNDGNHWNRLRSDASNLKDKGITAVWIPPAWKGASQNDVGYGAYDLYDLGEFNQKGTVRTKYGTRNQLQAAVTALKSNGIQVYGDVVMNHKGGADATEWVRAVEVNPSNRNQEVSGDYTIEAWTKFDFPGRGNTHSNFKWRWYHFDGVDWDQSRQLQNRIYKFRGDGKGWDWEVDTENGNYDYLMYADIDMDHPEVVNELRNWGVWYTNTLGLDGFRIDAVKHIKYSFTRDWLTHVRNTTGKNMFAVAEFWKNDIGAIENYLSKTNWNHSVFDVPLHYNLYNASRSGGNYDMRQIFNGTVVQRHPGHAVTFVDNHDSQPEEALESFVEEWFKPLAYALVLTRDQGYPSVFYGDYYGIPTHGVPAMKSKIDPILEARQKYAYGKQNDYLDHHNMIGWTREGNTAHPNSGLATIMSDGPGGNKWMYVGRNKAGQVWRDITGNRSGTVTINADGWGNFSVNGGSVSIWVN

SEQ ID NO: 19629 - protein, 484 aa, Synthetic construct
HHNGTNGTMMQYFEWYLPNDGNHWNRLRSDASNLKDKGITAVWIPPAWKGASQNDVGYGAYDLYDLGEFNQKGTLRTKYGTRNQLQAAVTALKSNGIQVYGDVVMNHKGGADATEWVRAVEVNPSNRNQEVSGDYTIEAWTKFDFPGRGNTHSNFKWRWYHFDGVDWDQSRQLQNRIYKFRGDGKGWDWEVDTENGNYDYLMYADIDMDHPEVVNELRNWGVWYTNTLGLDGFRIDAVKHIKYSFTRDWLTHVRNTTGKNMFAVAEFWKNDIGAIENYLSKTNWNHSVFDVPLHYNLYNASRSGGNYDMRQIFNGTVVQRHPTHAVTFVDNHDSQPEEALESFVEEWFKPLAYALTLTRDQGYPSVFYGDYYGIPTHGVPAMKSKIDPILEARQKYAYGKQNDYLDHHNMIGWTREGNTAHPNSGLATIMSDGPGGNKWMYVGRNKLGQVWRDITGNRSGTVTINADGWGNFSVNGGSVSIWVN

SEQ ID NO: 19630 - protein, 484 aa, Synthetic construct
HHNGTNGTMMQYFEWYLPNDGNHWNRLRSDASNLKDKGITAVWIPPAWKGASQNDVGYGAYDLYDLGEFNQKGTVRTKYGTRNQLQAAVTALKSNGIQVYGDVVMNHKGGADATEWVRAVEVNPSNRNQEVSGDYTIEAWTKFDFPGRGNTHSNFKWRWYHFDGVDWDQSRQLQNRIYKFRGDGKGWDWEVDTENGNYDYLMYADIDMDHPEVVNELRNWGVWYTNTLGLDGFRIDAVKHIKYSFTRDWLTHVRNTTGKNMFAVAEFWKNDIGAIENYLSKTNWNHSVFDVPLHYNLYNASRSGGNYDMRQIFSGTVVQRHPTHAVTFVDNHDSQPEEALESFVEEWFKPLAYALTLTRDQGYPSVFYGDYYGIPTHGVPAMKSKIDPILEARQKYAYGKQNDYLDHHNMIGWTREGNTAHPNSGLATIMSDGPGGNKWMYVGRNKAGQVWRDITGNRSGTVTINADGWGNFSVNGGSVSIWVN

SEQ ID NO: 19631 - protein, 484 aa, Synthetic construct
HHNGTNGTMMQYFEWYLPNDGNHWNRLRSDASNLKDKGITAVWIPPAWKGASQNDVGYGAYDLYDLGEFNQKGTVRTKYGTRNQLQAAVTALKSNGIQVYGDVVMNHKGGADATEWVRAVEVNPSNRNQEVSGDYTIEAWTKFDFPGRGNTHSNFKWRWYHFDGVDWDQSRQLQNRIYKFRGDGKGWDWEVDTENGNYDYLMYADIDMDHPEVVNELRNWGVWYTNTLGLDGFRIDAVKHIKYSFTRDWLTHVRNTTGKNMFAVAEFWKNDIGAIENYLSKTNWNHSVFDVPLHYNLYNASRSGGNYDMRQIFNGTVVQRHPTHAVTFVDNHDSQPEEALESFVEEWFKPLAYALTLTRDQGYPSVFFGDYYGIPTHGVPAMKSKIDPILEARQKYAYGKQNDYLDHHNMIGWTREGNTAHPNSGLATIMSDGPGGNKWMYVGRNKAGQVWRDITGNRSGTVTINADGWGNFSVNGGSVSIWVN

SEQ ID NO: 19632 - protein, 484 aa, Synthetic construct
HHNGTNHTMMQYFEWYLPNDGNHWNRLRSDASNLKDKGITAVWIPPAWKGASQNDVGYGAYDLYDLGEFNQKGTVRTKYGTRNQLQAAVTALKSNGIQVYGDVVMNHKGGADATEWVRAVEVNPSNRNQEVSGDYTIEAWTKFDFPGRGNTHSNFKWRWYHFDGVDWDQSRQLQNRIYKFRGDGKGWDWEVDTENGNYDYLMYADIDMDHPEVVNELRNWGVWYTNTLGLDGFRIDAVKHIKYSFTRDWLTHVRNTTGKNMFAVAEFWKNDIGAIENYLSKTNWNHSVFDVPLHYNLYNASRSGGNYDMRQIFNGTVVQRHPTHAVTFVDNHDSQPEEALESFVEEWFKPLAYALTLTRDQGYPSVFYGDYYGIPTHGVPAMKSKIDPILEARQKYAYGKQNDYLDHHNMIGWTREGNTAHPNSGLATIMSDGPGGNKWMYVGRNKAGQVWRDITGNRSGTVTINADGWGNFSVNGGSVSIWVN

SEQ ID NO: 19633 - protein, 484 aa, Synthetic construct
HHNGTNGTMMQYFEWYLPNDGNHWNRLRSDASNLKDKGITAVWIPPAWKGASQNDVGYGAYDLYDLGEFNQKGTVRTKYGTRNQLQAAVTALKSNGIQVYGDVVMNHKGGADATEWVRAVEVNPSNRNQEVSGDYTIEAWTKFDFPGRGNTHSNFKWRWYHFDGVDWDQSRQLQNRIYKFRGDGKGWDWEVDTENGNYDYLMYADIDMDHPEVVNELRNWGVWYTNTLGLDGFRIDAVKHIKYSFTRDWLTHVRNTTGKNMFAVAEFWKNDIGAIENYLSKTNWNHSVFDVPLHYNLYNASRSGGNYDMRQIFNGTVVQRHPTHAVTFVDNHDSQPEEALESFVEEWFKPLAYALTLTRDQGYPSVFYGDYYGIPTHGVPAMKSKIDPILEARQKYSYGKQNDYLDHHNMIGWTREGNTAHPNSGLATIMSDGPGGNKWMYVGRNKAGQVWRDITGNRSGTVTINADGWGNFSVNGGSVSIWVN

SEQ ID NO: 19634 - protein, 484 aa, Synthetic construct
HHNGTNGTMMQYFEWYLPNDGNHWYRLRSDASNLKDKGITAVWIPPAWKGASQNDVGYGAYDLYDLGEFNQKGTVRTKYGTRNQLQAAVTALKSNGIQVYGDVVMNHKGGADATEWVRAVEVNPSNRNQEVSGDYTIEAWTKFDFPGRGNTHSNFKWRWYHFDGVDWDQSRQLQNRIYKFRGDGKGWDWEVDTENGNYDYLMYADIDMDHPEVVNELRNWGVWYTNTLGLDGFRIDAVKHIKYSFTRDWLTHVRNTTGKNMFAVAEFWKNDIGAIENYLSKTNWNHSVFDVPLHYNLYNASRSGGNYDMRQIFNGTVVQRHPTHAVTFVDNHDSQPEEALESFVEEWFKPLAYALTLTRDQGYPSVFYGDYYGIPTHGVPAMKSKIDPILEARQKYAYGKQNDYLDHHNMIGWTREGNTAHPNSGLATIMSDGPGGNKWMYVGRNKAGQVWRDITGNRSGTVTINADGWGNFSVNGGSVSIWVN

SEQ ID NO: 19635 - protein, 484 aa, Synthetic construct
HHNGTNGTMMQYFEWYLPNDGNHWNRLRSDASNLKDKGITAVWIPPAWKGASQNDVGYGAYDLYDLGEFNQKGTVRTKYGTRNQLQAAVTALKSNGIQVYGDVVMNHKGGADATEWVRAVEVNPSNRNQEVSGDYTIEAWTKFDFPGRGNTHSNFKWRWYHFDGVDWDQSRQLQNRIYKFRGDGKGWDWEVDTENGNYDYLMYADIDMDHPEVVNELRNWGVWYTNTLGLDGFRIDAVKHIKYSFTRDWLTHVRNTTGKNMFAVAEFWKNDIGAIENYLSKTNWNHSVFDVPLHYNLYNASRSGGNYDMRQIFNGTVVQRHPTHAVTFVDNHDSQPEEALESFVEEWFKPLAYALTLTRDQGMPSVFYGDYYGIPTHGVPAMKSKIDPILEARQKYAYGKQNDYLDHHNMIGWTREGNTAHPNSGLATIMSDGPGGNKWMYVGRNKAGQVWRDITGNRSGTVTINADGWGNFSVNGGSVSIWVN

SEQ ID NO: 19636 - protein, 484 aa, Synthetic construct
HHNGTNGTMMQYFEWYLPNDGNHWNRLRSDASNLKDKGITAVWIPPAWKGASQNDVGYGAYDLYDLGEFNQKGTVRTKYGTRNQLQAAVTALKSNGIQVYGDVVMNHKGGADATEWVRAVEVNPSNRNQEVSGDYTIEAWTKFDFPGRGNTHSNFKWRWEHFDGVDWDQSRQLQNRIYKFRGDGKGWDWEVDTENGNYDYLMYADIDMDHPEVVNELRNWGVWYTNTLGLDGFRIDAVKHIKYSFTRDWLTHVRNTTGKNMFAVAEFWKNDIGAIENYLSKTNWNHSVFDVPLHYNLYNASRSGGNYDMRQIFNGTVVQRHPTHAVTFVDNHDSQPEEALESFVEEWFKPLAYALTLTRDQGYPSVFYGDYYGIPTHGVPAMKSKIDPILEARQKYAYGKQNDYLDHHNMIGWTREGNTAHPNSGLATIMSDGPGGNKWMYVGRNKAGQVWRDITGNRSGTVTINADGWGNFSVNGGSVSIWVN

SEQ ID NO: 19637 - protein, 484 aa, Synthetic construct
HHNGTNGTMMQYFEWYLPNDGNHWNRLRSDASNLKDKGITAVWIPPAWKGASQNDVGYGAYDLYDLGEFNQKGTVRTKYGTRNQLQAAVTALKSNGIQVYGDVVMNHKGGADATEWVRASEVNPSNRNQEVSGDYTIEAWTKFDFPGRGNTHSNFKWRWYHFDGVDWDQSRQLQNRIYKFRGDGKGWDWEVDTENGNYDYLMYADIDMDHPEVVNELRNWGVWYTNTLGLDGFRIDAVKHIKYSFTRDWLTHVRNTTGKNMFAVAEFWKNDIGAIENYLSKTNWNHSVFDVPLHYNLYNASRSGGNYDMRQIFNGTVVQRHPTHAVTFVDNHDSQPEEALESFVEEWFKPLAYALTLTRDQGYPSVFYGDYYGIPTHGVPAMKSKIDPILEARQKYAYGKQNDYLDHHNMIGWTREGNTAHPNSGLATIMSDGPGGNKWMYVGRNKAGQVWRDITGNRSGTVTINADGWGNFSVNGGSVSIWVN

SEQ ID NO: 19638 - protein, 484 aa, Synthetic construct
HHNGTNGTMMQYFEWYLPNDGNHWNRLRSDASNLKDKGITAVWIPPAWKGASQNDVGYGAYDLYDLGEFNQKGTVRTKYGTRNQLQAAVTALKSNGIQVYGDVVMNHKGGADATEWVRAYEVNPSNRNQEVSGDYTIEAWTKFDFPGRGNTHSNFKWRWYHFDGVDWDQSRQLQNRIYKFRGDGKGWDWEVDTENGNYDYLMYADIDMDHPEVVNELRNWGVWYTNTLGLDGFRIDAVKHIKYSFTRDWLTHVRNTTGKNMFAVAEFWKNDIGAIENYLSKTNWNHSVFDVPLHYNLYNASRSGGNYDMRQIFNGTVVQRHPTHAVTFVDNHDSQPEEALESFVEEWFKPLAYALTLTRDQGYPSVFYGDYYGIPTHGVPAMKSKIDPILEARQKYAYGKQNDYLDHHNMIGWTREGNTAHPNSGLATIMSDGPGGNKWMYVGRNKAGQVWRDITGNRSGTVTINADGWGNFSVNGGSVSIWVN

SEQ ID NO: 19639 - protein, 484 aa, Synthetic construct
HHNGTNGTMMQYFEWYLPNDGNHWNRLRSDASNLKDKGITAVWIPPAWKGASQNDVGYGAYDLYDLGEFNQKGTVRTKYGTRNQLQAAVTALKSNGIQVYGDVVMNHKGGADATEWVRAVEVNPSNRNQEVSGDYTIEAWTKFDFPGRGNTHSNFKWRWYHFDGVDWDQSRQLQNRKYKFRGDGKGWDWEVDTENGNYDYLMYADIDMDHPEVVNELRNWGVWYTNTLGLDGFRIDAVKHIKYSFTRDWLTHVRNTTGKNMFAVAEFWKNDIGAIENYLSKTNWNHSVFDVPLHYNLYNASRSGGNYDMRQIFNGTVVQRHPTHAVTFVDNHDSQPEEALESFVEEWFKPLAYALTLTRDQGYPSVFYGDYYGIPTHGVPAMKSKIDPILEARQKYAYGKQNDYLDHHNMIGWTREGNTAHPNSGLATIMSDGPGGNKWMYVGRNKAGQVWRDITGNRSGTVTINADGWGNFSVNGGSVSIWVN

SEQ ID NO: 19640 - protein, 484 aa, Synthetic construct
HHNGTEGTMMQYFEWYLPNDGNHWNRLRSDASNLKDKGITAVWIPPAWKGASQNDVGYGAYDLYDLGEFNQKGTVRTKYGTRNQLQAAVTALKSNGIQVYGDVVMNHKGGADATEWVRAVEVNPSNRNQEVSGDYTIEAWTKFDFPGRGNTHSNFKWRWYHFDGVDWDQSRQLQNRIYKFRGDGKGWDWEVDTENGNYDYLMYADIDMDHPEVVNELRNWGVWYTNTLGLDGFRIDAVKHIKYSFTRDWLTHVRNTTGKNMFAVAEFWKNDIGAIENYLSKTNWNHSVFDVPLHYNLYNASRSGGNYDMRQIFNGTVVQRHPTHAVTFVDNHDSQPEEALESFVEEWFKPLAYALTLTRDQGYPSVFYGDYYGIPTHGVPAMKSKIDPILEARQKYAYGKQNDYLDHHNMIGWTREGNTAHPNSGLATIMSDGPGGNKWMYVGRNKAGQVWRDITGNRSGTVTINADGWGNFSVNGGSVSIWVN

SEQ ID NO: 19641 - protein, 484 aa, Synthetic construct
HHNGTNGTMMQYFEWYLPNDGNHWNRLRSDASNLKDKGITAVWIPPAWKGASQNDVGYGAYDLYDLGEFNQKGTVRTKYGTRNQLQAAVTALKSNGIQVYGDVVMNHKGGADATEWVRAVEVNPSNRNQEVSGDYTIEAWTKFDFPGRGNTHSNFKWRWYHFDGVDWDQSRQLQNRIYKFRGDGKGWDWEVDTENGNYDYLMYADIDMDHPEVVNELRNWGVWYTNTLGLDGFRIDAVKHIKYSFTRDWLTHVRNTTFKNMFAVAEFWKNDIGAIENYLSKTNWNHSVFDVPLHYNLYNASRSGGNYDMRQIFNGTVVQRHPTHAVTFVDNHDSQPEEALESFVEEWFKPLAYALTLTRDQGYPSVFYGDYYGIPTHGVPAMKSKIDPILEARQKYAYGKQNDYLDHHNMIGWTREGNTAHPNSGLATIMSDGPGGNKWMYVGRNKAGQVWRDITGNRSGTVTINADGWGNFSVNGGSVSIWVN

SEQ ID NO: 19642 - protein, 484 aa, Synthetic construct
HHNGTNGTMMQYFEWYLPNDGNHWNRLRSDASNLKDKGITAVWIPPAWKGASQNDVGYGAYDLYDLGEFNQKGTVRTKYGTRNQLQAAVTALKSNGIQVYGDVVMNHKGGADATEWVRAVEVNPSNRNQEVSGDYTIEAWTKFDFPGRGNTHSNFKWRWYHFDGVDWDQSRQLQNRIYKFRGDGKGWDWEVDTENGNYDYLMYADIDMDHPEVVNELRNWGVWYTNTLGLDGFRIDAVKHIKYSFTRDWLTHVRNTTGKNMFAVAEFWKNDIGAIENYLSDTNWNHSVFDVPLHYNLYNASRSGGNYDMRQIFNGTVVQRHPTHAVTFVDNHDSQPEEALESFVEEWFKPLAYALTLTRDQGYPSVFYGDYYGIPTHGVPAMKSKIDPILEARQKYAYGKQNDYLDHHNMIGWTREGNTAHPNSGLATIMSDGPGGNKWMYVGRNKAGQVWRDITGNRSGTVTINADGWGNFSVNGGSVSIWVN

SEQ ID NO: 19643 - protein, 484 aa, Synthetic construct
HHNGTNGTMMQYFEWYLPNDGNHWNRLRSDASNLKDKGITAVWIPPAWKGASQNDVGYGAYDLYDLGEFNQKGTVRTKYGTRNQLQAAVTALKSNGIQVYGDVVMNHKGGADATEWVRAVEVNPSNRNQEVSGDYTIEAWTKFDFPGRGNTHSNFKWRWYHFDGVDWDQSRQLQNRIYKFRGDGKGDDWEVDTENGNYDYLMYADIDMDHPEVVNELRNWGVWYTNTLGLDGFRIDAVKHIKYSFTRDWLTHVRNTTGKNMFAVAEFWKNDIGAIENYLSKTNWNHSVFDVPLHYNLYNASRSGGNYDMRQIFNGTVVQRHPTHAVTFVDNHDSQPEEALESFVEEWFKPLAYALTLTRDQGYPSVFYGDYYGIPTHGVPAMKSKIDPILEARQKYAYGKQNDYLDHHNMIGWTREGNTAHPNSGLATIMSDGPGGNKWMYVGRNKAGQVWRDITGNRSGTVTINADGWGNFSVNGGSVSIWVN

SEQ ID NO: 19644 - protein, 484 aa, Synthetic construct
HHNGTNGTMMQYFEWYLPNDGNHWNRLRSDASNLKDKGITAVWIPPAWKGASQNDVGYGAYDLYDLGEFNQKGTVRTKYGTRNQLQAAVTALKSNGIQVYGDVVMNHKGGADATEWVRAVEVNPSNRNQEVSGDYTIEAWTKFDFPGRGNTHSNFKWRWYHFDGVDWDQSRQLQNRIYKFRGDGKGWDWEVDTENGNYDYLMYADIDMDHPEVVNELRNWGVWYTNTLGLDGFRIDAVKHIKYSFTRDWLTHVRNTTGKNMFAVAEFWKNDIGAIENYLSKTNWNHSVFDVPLHYNLYNASRSGGNYDMRQIFNGTVVQRHPTHAVTFVDNHDSQPEEALESFVEEWFKPLAYALTLTRDQGYPSVFYGDYYGIPTHGRPAMKSKIDPILEARQKYAYGKQNDYLDHHNMIGWTREGNTAHPNSGLATIMSDGPGGNKWMYVGRNKAGQVWRDITGNRSGTVTINADGWGNFSVNGGSVSIWVN

SEQ ID NO: 19645 - protein, 484 aa, Synthetic construct
HHNGTNGTMMQYFEWYLPNDGNHWNRLRSDASNLKDKGITAVWIPPAWKGASQNDVGYGAYDLYDLGEFNQKGTVRTKYGTRNQLQAAVTALKSNGIQVYGDVVMNHKGGADATEWVRAVEVNPSNRNQEVSGDYTIEAWTKFDFPGRGNTHSNFKWRWYHFDGVDWDQSRQLQNRIYKNRGDGKGWDWEVDTENGNYDYLMYADIDMDHPEVVNELRNWGVWYTNTLGLDGFRIDAVKHIKYSFTRDWLTHVRNTTGKNMFAVAEFWKNDIGAIENYLSKTNWNHSVFDVPLHYNLYNASRSGGNYDMRQIFNGTVVQRHPTHAVTFVDNHDSQPEEALESFVEEWFKPLAYALTLTRDQGYPSVFYGDYYGIPTHGVPAMKSKIDPILEARQKYAYGKQNDYLDHHNMIGWTREGNTAHPNSGLATIMSDGPGGNKWMYVGRNKAGQVWRDITGNRSGTVTINADGWGNFSVNGGSVSIWVN

SEQ ID NO: 19646 - protein, 484 aa, Synthetic construct
HHNGTHGTMMQYFEWYLPNDGNHWNRLRSDASNLKDKGITAVWIPPAWKGASQNDVGYGAYDLYDLGEFNQKGTVRTKYGTRNQLQAAVTALKSNGIQVYGDVVMNHKGGADATEWVRAVEVNPSNRNQEVSGDYTIEAWTKFDFPGRGNTHSNFKWRWYHFDGVDWDQSRQLQNRIYKFRGDGKGWDWEVDTENGNYDYLMYADIDMDHPEVVNELRNWGVWYTNTLGLDGFRIDAVKHIKYSFTRDWLTHVRNTTGKNMFAVAEFWKNDIGAIENYLSKTNWNHSVFDVPLHYNLYNASRSGGNYDMRQIFNGTVVQRHPTHAVTFVDNHDSQPEEALESFVEEWFKPLAYALTLTRDQGYPSVFYGDYYGIPTHGVPAMKSKIDPILEARQKYAYGKQNDYLDHHNMIGWTREGNTAHPNSGLATIMSDGPGGNKWMYVGRNKAGQVWRDITGNRSGTVTINADGWGNFSVNGGSVSIWVN

SEQ ID NO: 19647 - protein, 484 aa, Synthetic construct
HHNGTNGTMMQYFEWYLPNDGNHWNRLRSDASNLKDKGITAVWIPPAWKGASQNDVGYGAYDLYDLGEFNQKGTVRTKYGTRNQLQAAVTALKSNGIQVYGDVVMNHKGGADATEWVRAVEVNPSNRNQEVSGDYTIEAWTKFDFPGRGNTHSNFKWRWYHFDGVDWDQSRQLQNRGYKFRGDGKGWDWEVDTENGNYDYLMYADIDMDHPEVVNELRNWGVWYTNTLGLDGFRIDAVKHIKYSFTRDWLTHVRNTTGKNMFAVAEFWKNDIGAIENYLSKTNWNHSVFDVPLHYNLYNASRSGGNYDMRQIFNGTVVQRHPTHAVTFVDNHDSQPEEALESFVEEWFKPLAYALTLTRDQGYPSVFYGDYYGIPTHGVPAMKSKIDPILEARQKYAYGKQNDYLDHHNMIGWTREGNTAHPNSGLATIMSDGPGGNKWMYVGRNKAGQVWRDITGNRSGTVTINADGWGNFSVNGGSVSIWVN

SEQ ID NO: 19648 - protein, 484 aa, Synthetic construct
HHNGTNGTMMQYFEWYLPNDGNHWNRLRSDASNLKDKGITAVWIPPAWKGASQNDVGYGAYDLYDLGEFNQKGTVRTKYGTRNQLQAAVTALKSNGIQVYGDVVMNHKGGADATEWVRAVEVNPSNRNQEVSGDYTIEAWTKFDFPGRGNTHSNFKWRWYHFDGVDWDQSRQLQNRIYKFRGDGKGWDWEVDTENGNYDYLMYADIDMDHPEVVNELRNWGVWYTNTLGLDGFRIDAVKHIKYSFTRDWLTHVRNTTGKNMFAVAEFWKNDIGAIENYLSKTNWNHSVFDVPLHYNLYNASRSGGNYDMRQIFNGTVVQRHPTHAVTFVDNHDSQPEEALESFVEEWFKPLAYALTLTRDQGSPSVFYGDYYGIPTHGVPAMKSKIDPILEARQKYAYGKQNDYLDHHNMIGWTREGNTAHPNSGLATIMSDGPGGNKWMYVGRNKAGQVWRDITGNRSGTVTINADGWGNFSVNGGSVSIWVN

SEQ ID NO: 19649 - protein, 484 aa, Synthetic construct
HHNGTNGTMMQYFEWYLPNDGNHWNRLRSDASNLKDKGITAVWIPPAWKGASQNDVGYGAYDLYDLGEFNQKGTVRTKYGTRNQLQAAVTALKSNGIQVYGDVVMNHKGGADATEWVRAVEVNPSNRNQEVSGDYTIEAWTKFDFPGRGNTHSNFKWRWYHFDGVDWDQSRQLQNRIYKFRGDGKGWDWEVDTENGNYDYLMYADIDMDHPEVVNELRNWGVWYTNTLGLDGFRIDAVKHIKYSFTRDWLTHVRNTTGKNMFAVAEFWKNDIGAIENYLSKTNWNHSVFDVPLHYNLYNASRSGGNYDMRQIFNGTVVQRHPTHAVTFVDNHDSQPEEALESFVEEWFKPLAYALTLTRDQGEPSVFYGDYYGIPTHGVPAMKSKIDPILEARQKYAYGKQNDYLDHHNMIGWTREGNTAHPNSGLATIMSDGPGGNKWMYVGRNKAGQVWRDITGNRSGTVTINADGWGNFSVNGGSVSIWVN

SEQ ID NO: 19650 - protein, 484 aa, Synthetic construct
HHNGTNGTMMQYFEWYLPNDGNHWNRLRSDASNLKDKGITGVWIPPAWKGASQNDVGYGAYDLYDLGEFNQKGTVRTKYGTRNQLQAAVTALKSNGIQVYGDVVMNHKGGADATEWVRAVEVNPSNRNQEVSGDYTIEAWTKFDFPGRGNTHSNFKWRWYHFDGVDWDQSRQLQNRIYKFRGDGKGWDWEVDTENGNYDYLMYADIDMDHPEVVNELRNWGVWYTNTLGLDGFRIDAVKHIKYSFTRDWLTHVRNTTGKNMFAVAEFWKNDIGAIENYLSKTNWNHSVFDVPLHYNLYNASRSGGNYDMRQIFNGTVVQRHPTHAVTFVDNHDSQPEEALESFVEEWFKPLAYALTLTRDQGYPSVFYGDYYGIPTHGVPAMKSKIDPILEARQKYAYGKQNDYLDHHNMIGWTREGNTAHPNSGLATIMSDGPGGNKWMYVGRNKAGQVWRDITGNRSGTVTINADGWGNFSVNGGSVSIWVN

SEQ ID NO: 19651 - protein, 484 aa, Synthetic construct
HHNGTNGTMMQYFEWYLPNDGNHWNRLRSDASNLKDKGITAVWIPPAWKGASQNDVGYGAYDLYDLGEFNQKGTVRTKYGTRNQLQAAVTALKSNGIQVYGDVVMNHKGGADATEWVRAVEVNPSNRNQEVSGDYTIEAWTKFDFPGRGNTHSNFKWRWYHFDGVDWDQSRQLQNRIYKFRGDGKGWDWEVDTENGNYDYLMYADIDMDHPEVVNELRNWGVWYTNTLGLDGFRIDAVKHIKYSFTRDWLTHVRNTTGKNMFAVAEFWKNDIGAIENYLSKTNWNHSVFDVPLHYNLYNASRSGGNYDMRQIFNGTVVQRHPTHAVTFVDNHDSQPEEALESFVEEWFKPLAYALTLTRDQGYPSVFYGDYYGIPTHGVPAMKSKIDPILEARQKYAYGKQNDYLDHHNMIGWTREGNTAHPNSGLATIMSDGPGGNKWMYVGRNKAGQVWRDITGNRSGAVTINADGWGNFSVNGGSVSIWVN

SEQ ID NO: 19652 - protein, 484 aa, Synthetic construct
HHNGTNGTMMQYFEWYLPNDGNHWNRLRSDASNLKDKGITAVWIPPAWKGASQNDVGYGAYDLYDLGEFNQKGTVRTKYGTRNQLQAAVTALKSNGIQVYGDVVMNHKGGADATEWVRAVEVNPSNRNQEVSGDYTIEAWTKFDFPGRGNTHSNFKWRWYHFDGVDWDQSRQLQNRIYKFRGDGKGWDWEVDTENGNYDYLMYADIDMDHPEVVNELRQWGVWYTNTLGLDGFRIDAVKHIKYSFTRDWLTHVRNTTGKNMFAVAEFWKNDIGAIENYLSKTNWNHSVFDVPLHYNLYNASRSGGNYDMRQIFNGTVVQRHPTHAVTFVDNHDSQPEEALESFVEEWFKPLAYALTLTRDQGYPSVFYGDYYGIPTHGVPAMKSKIDPILEARQKYAYGKQNDYLDHHNMIGWTREGNTAHPNSGLATIMSDGPGGNKWMYVGRNKAGQVWRDITGNRSGTVTINADGWGNFSVNGGSVSIWVN

SEQ ID NO: 19653 - protein, 484 aa, Synthetic construct
HHNGTNGTMMQYFEWYLPNDGNHWNRLRSDASNLKDKGITAVWIPPAWKGASQNDVGYGAYDLYDLGEFNQKGTVRTKYGTRNQLQAAVTALKSNGIQVYGDVVMNHKGGADATEWVRAVEVNPSNRNQEVSGDYTIEAWTKFDFPGRGNTHSNFKWRWYHFDGVDWDQSRQLQNRIYKFRGDGKGWDWEVDTENGNYDYLMYADIDMDHPEVVNELRNWGVWYTNTLGLDGFRIDAVKHIKYSFTRDWLTHVRNTTGKNMFAVAEFWKNDIGAIEEYLSKTNWNHSVFDVPLHYNLYNASRSGGNYDMRQIFNGTVVQRHPTHAVTFVDNHDSQPEEALESFVEEWFKPLAYALTLTRDQGYPSVFYGDYYGIPTHGVPAMKSKIDPILEARQKYAYGKQNDYLDHHNMIGWTREGNTAHPNSGLATIMSDGPGGNKWMYVGRNKAGQVWRDITGNRSGTVTINADGWGNFSVNGGSVSIWVN

SEQ ID NO: 19654 - protein, 484 aa, Synthetic construct
HHNGTNGTMMQYFEWYLPNDGNHWNRLRSDASNLKDKGITAVWIPPAWKGASQNDVGYGAYDLYDLGEFNQKGTVRTKYGTRNQLQAAVTALKSNGIQVYGDVVMNHKGGADATEWVRAVEVNPSNRNQEVSGDYTIEAWTKFDFPGRGNTHSNFKWRWYHFDGVDWDQSRQLHNRIYKFRGDGKGWDWEVDTENGNYDYLMYADIDMDHPEVVNELRNWGVWYTNTLGLDGFRIDAVKHIKYSFTRDWLTHVRNTTGKNMFAVAEFWKNDIGAIENYLSKTNWNHSVFDVPLHYNLYNASRSGGNYDMRQIFNGTVVQRHPTHAVTFVDNHDSQPEEALESFVEEWFKPLAYALTLTRDQGYPSVFYGDYYGIPTHGVPAMKSKIDPILEARQKYAYGKQNDYMDHHNMIGWTREGNTAHPNSGLATIMSDGPGGNKWMYVGRNKAGQVWRDITGNRSGTVTINADGWGNFSVNGGSVSIWVN

SEQ ID NO: 19655 - protein, 484 aa, Synthetic construct
HHNGTNGTMMQYFEWYLPNDGNHWNRLRSDASNLKDKGITAVWIPPAWKGASQNDVGYGAYDLYDLGEFNQKGTVRTKYGTLNQLQAAVTALKSNGIQVYGDVVMNHKGGADATEWVRAVEVNPSNRNQEVSGDYTIEAWTKFDFPGRGNTHSNFKWRWYHFDGVDWDQSRQLQNRIYKFRGDGKGWDWEVDTENGNYDYLMYADIDMDHPEVVNELRNWGVWYTNTLGLDGFRIDAVKHIKYSFTRDWLTHVRNTTGKNMFAVAEFWKNDIGAIENYLSKTNWNHSVFDVPLHYNLYNASRSGGNYDMRQIFNGTVVQRHPTHAVTFVDNHDSQPEEALESFVEEWFKPLAYALTLTRDQGYPSVFYGDYYGIPTHGVPAMKSKIDPILEARQKYAYGKQNDYLDHHNMIGWTREGNTAHPNSGLATIMSDGPGGNKWMYVGRNKAGQVWRDITGNRSGTVTINADGWGNFSVNGGSVSIWVN

SEQ ID NO: 19656 - protein, 484 aa, Synthetic construct
HHNGTNGTMMQYFEWYLPNDGNHWNRLRSDASNLKDKGITAVWIPPAWKGASQNDVGYGAYDLYDLGEFNQKGTVRTKYGTCNQLQAAVTALKSNGIQVYGDVVMNHKGGADATEWVRAVEVNPSNRNQEVSGDYTIEAWTKFDFPGRGNTHSNFKWRWYHFDGVDWDQSRQLQNRIYKFRGDGKGWDWEVDTENGNYDYLMYADIDMDHPEVVNELRNWGVWYTNTLGLDGFRIDAVKHIKYSFTRDWLTHVRNTTGKNMFAVAEFWKNDIGAIENYLSKTNWNHSVFDVPLHYNLYNASRSGGNYDMRQIFNGTVVQRHPTHAVTFVDNHDSQPEEALESFVEEWFKPLAYALTLTRDQGYPSVFYGDYYGIPTHGVPAMKSKIDPILEARQKYAYGKQNDYLDHHNMIGWTREGNTAHPNSGLATIMSDGPGGNKWMYVGRNKAGQVWRDITGNRSGTVTINADGWGNFSVNGGSVSIWVN

SEQ ID NO: 19657 - protein, 484 aa, Bacillus sp.
HHNGTNGTMMQYFEWYLPNDGNHWNRLRSDASNLKDKGITAVWIPPAWKGASQNDVGYGAYDLYDLGEFNQKGTVRTKYGTRNQLQAAVTALKSNGIQVYGDVVMNHKGGADATEWVRAVEVNPSNRNQEVSGDYTIEAWTKFDFPGRGNTHSNFKWRWYHFDGVDWDQSRQLQNRIYKFRGDGKGWDWEVDTENGNYDYLMYADIDMDHPEVVNELRNWGVWYTNTLGLDGFRIDAVKHIKYSFTRDWLTHVRNTTGKNMFAVAEFWKNDIGAIENYLSKTNWNHSVFDVPLHYNLYNASRSGGNYDMRQIFNGTVVQRHPTHAVTFVDNHDSQPEEALESFVEEWFKPLACALTLTRDQGYPSVFYGDYYGIPTHGVPAMKSKIDPILEARQKYAYGKQNDYLDHHNMIGWTREGNTAHPNSGLATIMSDGPGGNKWMYVGRNKAGQVWRDITGNRSGTVTINADGWGNFSVNGGSVSIWVN

SEQ ID NO: 19658 - protein, 484 aa, Synthetic construct
HHNGTNGTMMQYFEWYLPNDGNHWNRLRSDASNLKDKGITAVWIPPAWKGASQNDVGYGAYDLYDLGEFNQKGTVRTKYGTRNQLQAAVTALKSNGIQVYGDVVMNHKGGADATEWVRAVEVNPSNRNQEVSGDYTIEAWTKFDFPGRGNTHSNFKWRWYHFDGVDWDQSRQLQNRIYKFRGDGEGWDWEVDTENGNYDYLMYADIDMDHPEVVNELRNWGVWYTNTLGLDGFRIDAVKHIKYSFTRDWLTHVRNTTGKNMFAVAEFWKNDIGAIENYLSKTNWNHSVFDVPLHYNLYNASRSGGNYDMRQIFNGTVVQRHPTHAVTFVDNHDSQPEEALESFVEEWFKPLAYALTLTRDQGYPSVFYGDYYGIPTHGVPAMKSKIDPILEARQKYAYGKQNDYLDHHNMIGWTREGNTAHPNSGLATIMSDGPGGNKWMYVGRNKAGQVWRDITGNRSGTVTINADGWGNFSVNGGSVSIWVN

SEQ ID NO: 19659 - protein, 484 aa, Synthetic construct
HHNGTNGTMMQYFEWYLPNDGNHWNRLRSDASNLKDKGITAVWIPPAWKGASQNDVGYGAYDLYDLGEFNQKGTVRTKYGTRNQLQAAVTALKSNGIQVYGDVVMNHKGGADATEWVRAVEVNPSNRNQEVSGDYTIEAWTKFDFPGRGNTHSNFKWRWYHFDGVDWDQSRQLQNRIYKFRGDGKGWDWEVDTENGNYDYLMYADIDMDHPEVVNELRNWGVWYTNTLGLDGFRIDAVKHIKYSFTRDWLTHVRNTTGKNMFAVAEFWKNDIGAIENYLSKTNWNHSVFDVPLHYNLYNASRSGGNYDMRQIFNGTVVQRHPTHAVTFVDNHDSQPEEALESFVEEWFKPLAYALTLTRDQGYPSVFYGDYYGIPTHGVPAMKSKIDPILEARQKYAYGKQNDYLDHHNMIGWTREGNTAHPNSGLATIMSDGPGGNKWMYVGRNKAGQVWRDITGNRSGTVVINADGWGNFSVNGGSVSIWVN

SEQ ID NO: 19660 - protein, 484 aa, Synthetic construct
HHNGTNGTMMQYFEWYLPNDGNHWNRLRSDASNLKDKGITAVWIPPAWKGASQNDVGYGAYDLYDLGEFNQKGTVRTKYGTRNQLQAAVTALKSNGIQVYGDVVMNHKGGADATEWVRAVEVNPSNRNQEVSGDYTIEAWTKFDFPGRGNTHSNFKWRWYHFDGVDWDQSRQLQNRIYKFRGDGKGWDWEVDTENGNYDYLMYADIDMDHPEVVNELRNWGVWYTNTLGLDGFRIDAVKHIKYSFTRDWLTHVRNTTGKNMFAVAEFWKNDIGAIENYLSKTNWNHSVFDVPLHYNLYNASRSGGNYDMRQIFNGTVVQRHPTHAVTFVDNHDSQPEEALESFVEEWFKPLAYALTLTRDQGYPSVFYGDYYGIPTHGVPAMKSKIDPILEARQCYAYGKQNDYLDHHNMIGWTREGNTAHPNSGLATIMSDGPGGNKWMYVGRNKAGQVWRDITGNRSGTVTINADGWGNFSVNGGSVSIWVN

SEQ ID NO: 19661 - protein, 484 aa, Synthetic construct
HHNGTNGTMMQYFEWYLPNDGNHWNRLRSDASNLKDKGITAVWIPPAWKGASQNDVGYGAYDLYDLGEFNQKGTVRTKYGTRNQLQAAVTALKSNGIQVYGDVVMNHKGGADATEWVRAVEVNPSNRNQEVSGDYTIEAWTKFDFPGRGNTHSNFKWRWYHFDGVDWDQSRQLQNRIYKFRGDGKGWDWEVDTENGNYDYLMYADIDMDHPEVVNELRNWGVWYTNTLGLDGFRIDAVKHIKYSFTRDWLTHVRNTTGKNMFAVAEFWKNDIGAIENYLSKTNWNHSVFDVPLHYNLYNASRSGGNYDMRQIFNGTVVQRHPTHAVTFVDNHDSQPEEALESFVEEWFKPLAYALTLTRDQGYPLVFYGDYYGIPTHGVPAMKSKIDPILEARQKYAYGKQNDYLDHHNMIGWTREGNTAHPNSGLATIMSDGPGGNKWMYVGRNKAGQVWRDITGNRSGTVTINADGWGNFSVNGGSVSIWVN

SEQ ID NO: 19662 - protein, 484 aa, Synthetic construct
HHNGTNGTMMQYFEWYLPNDGNHWNRLRSDASNLKDKGITAVWIPPAWKGASQNDVGYGAYDLYDLGEFNQKGTVRTKYGTRNQLQAAVTALKDNGIQVYGDVVMNHKGGADATEWVRAVEVNPENRNQEVSGDYTIEAWTKFDFPGRGNTHSNFKWRWYHFDGVDWDQSRQLQNRIYKFRGDGKGWDWEVDTENGNYDYLMYADIDMDHPEVVNELRNWGVWYTNTLGLDGFRIDAVKHIKYSFTRDWLTHVRNTTGKNMFAVAEFWKNDIGAIENYLSKTNWNHSVFDVPLHYNLYNASRSGGNYDMRQIFNGTVVQRHPTHAVTFVDNHDSQPEEALESFVEEWFKPLAYALTLTRDQGYPSVFYGDYYGIPTHGVPAMKSKIDPILEARQKYAYGKQNDYLDHHNMIGWTREGNTAHPNSGLATIMSDGPGGNKWMYVGRNKAGQVWRDITGNRSGTVTINADGWGNFSVNGGSVSIWVN

SEQ ID NO: 19663 - protein, 484 aa, Synthetic construct
HHNGTNGTMMQYFEWYLPNDGNHWNRLRSDASNLKDKGITAVWIPPAWKGASQNDVGYGAYDLYDLGEFNQKGTVRTKYGTRNQLQAAVTALKSNGIQVYGDVVMNHKGGADATEWVRAVEVNPSNRNQEVSGDYTIEAWTKFDFPGRGNTHSNFKWRWYHFDGVDWDQSRQLQNRIYKFRGDGKGWDWEVDTENGNYDYLMYADIDMDHPEVVNELRNWGVWYTNTLGLDGFRIDAVKHIKYSFTRDWLTHVRNTTGKNMFAVAEFWKNDIGAIENYLSKTNWNHSVFDVPLHYNLYNASRSGGNYDMRQIFQGTVVQRHPTHAVTFVDNHDSQPEEALESFVEEWFKPLAYALTLTRDQGYPSVFYGDYYGIPTHGVPAMKSKIDPILEARQKYAYGKQNDYLDHHNMIGWTREGNTAHPNSGLATIMSDGPGGNKWMYVGRNKAGQVWRDITGNRSGTVTINADGWGNFSVNGGSVSIWVN

SEQ ID NO: 19664 - protein, 484 aa, Synthetic construct
HHNGTNGTMMQYFEWYLPNDGNHWNRLRSDASNLKDKGITAVWIPPAWKGASQNDVGYGAYDLYDLGEFNQKGTVRTKYGTRNQLQAAVTALKSNGIQVYGDVVMNHKGGADATEWVRAVEVNPSNRNQEVSGDYTIEAWTKFDFPGRGNTHSNFKWRWYHFDGVDWDQSRQLQNRIYKFRGDGKGWDWEVDTENGNYDYLMYADIDMDHPEVVNELRNWGVWYTNTLGLDGFRIDAVKHIKYSFTRDWLTHVRNTTGKNMFAVAEFWKNDIGAIENYLSKTNWNHSVFDVPLHYNLYSASRSGGNYDMRQIFNGTVVQRHPTHAVTFVDNHDSQPEEALESFVEEWFKPLAYALTLTRDQGYPSVFYGDYYGIPTHGVPAMKSKIDPILEARQKYAYGKQNDYLDHHNMIGWTREGNTAHPNSGLATIMSDGPGGNKWMYVGRNKAGQVWRDITGNRSGTVTINADGWGNFSVNGGSVSIWVN

SEQ ID NO: 19665 - protein, 484 aa, Synthetic construct
HHNGTNGTMMQYFEWYLPNDGNHWNRLRSDASNLKDKGITAVWIPPAWKGASQNDVGYGAYDLYDLGEFNQKGTVRTKYGTRNQLQAAVTALKSNGIQVYGDVVMNHKGGADATEWVRAVEVNPSNRNQEVSGDTTIEAWTKFDFPGRGNTHSNFKWRWYHFDGVDWDQSRQLQNRIYKFRGDGKGWDWEVDTENGNYDYLMYADIDMDHPEVVNELRNWGVWYTNTLGLDGFRIDAVKHIKYSFTRDWLTHVRNTTGKNMFAVAEFWKNDIGAIENYLSKTNWNHSVFDVPLHYNLYNASRSGGNYDMRQIFNGTVVQRHPTHAVTFVDNHDSQPEEALESFVEEWFKPLAYALTLTRDQGYPSVFYGDYYGIPTHGVPAMKSKIDPILEARQKYAYGKQNDYLDHHNMIGWTREGNTAHPNSGLATIMSDGPGGNKWMYVGRNKAGQVWRDITGNRSGTVTINADGWGNFSVNGGSVSIWVN

SEQ ID NO: 19666 - protein, 484 aa, Synthetic construct
HHNGTNGTMMQYFEWYLPNDGNHWNRLRSDASNLKDKGITAVWIPPAWKGASQNDVGYGAYDLYDLGEFNQKGTVRTKYGTRNQLQAAVTALKSNGIQVYGDVVMNHKGGADATEWVRAVEVNPSNRNQEVSGDYTIEAWTKFDFPGRGNTHSNFKWRWYHFDGVDWDQSRQLQNRIYKFRGDGKGWDWEVDTENGNYDYLMYADIDMDHPEVVNELRNWGVWYTNTLGLDGFRIDAVKHIKYSFTRDWLTHVRNTTGKHMFAVAEFWKNDIGAIENYLSKTNWNHSVFDVPLHYNLYNASRSGGNYDMRQIFNGTVVQRHPTHAVTFVDNHDSQPEEALESFVEEWFKPLAYALTLTRDQGYPSVFYGDYYGIPTHGVPAMKSKIDPILEARQKYAYGKQNDYLDHHNMIGWTREGNTAHPNSGLATIMSDGPGGNKWMYVGRNKAGQVWRDITGNRSGTVTINADGWGNFSVNGGSVSIWVN

SEQ ID NO: 19667 - protein, 484 aa, Synthetic construct
HHNGTNGTMMQYFEWYLPNDGNHWNRLRSDASNLKDKGITAVWIPPAWKGASQNDVGYGAYDLYDLGEFNQKGTVRTKYGTRNQLQAAVTALKSNGIQVYGDVVMNHKGGADATEWVRAVEVNPSNRNQEVSGDYTIEAWTKFDFPGRGNTHSNFKWRWYHFDGVDWDQSRQLQNRIYKFRGDGKGWDWEVDTENGNYDYLMYADIDMDHPEVVNELRNWGVWYTNTLGLDGFRIDAVKHIKYSFTRDWLTHVRNTTGKNMFAVAEFWKNDIGAIENYLSKTNWNHSVFDVPLHYNMYNASRSGGNYDMRQIFNGTVVQRHPTHAVTFVDNHDSQPEEALESFVEEWFKPLAYALTLTRDQGYPSVFYGDYYGIPTHGVPAMKSKIDPILEARQKYAYGKQNDYLDHHNMIGWTREGNTAHPNSGLATIMSDGPGGNKWMYVGRNKAGQVWRDITGNRSGTVTINADGWGNFSVNGGSVSIWVN

SEQ ID NO: 19668 - protein, 484 aa, Synthetic construct
HHNGTNGTMMQYFEWYLPNDGNHWNRLRSDASNLKDKGITAVWIPPAWKGASQNDVGYGAYDLYDLGEFNQKGTVRTKYGTRNQLQAAVTALKSNGIQVYGDVVMNHKGGADATEWVRAVEVNPSNRNQEVSGDYTIEAWTKFDFPGRGNTHSNFKWRWYHFDGVDWDQSRQLQNRIYKFRGDGKGWDWEVDTENGNYDYLMYADIDMDHPEVVNELRNWGVWYTNTLGLDGFRIDAVKHIKYSFTRDWLTHVRNTTGKNMFAVAEFWKNDIGAIENYLSKTNWNHSVFDVPLHYNLYNASRSGGNYDMRQIFNGTVVQRHPTHAVTFVDNHDSQPEEALESFVEEWFKPLAYALTLTRDQGYPSVFYGDYMGIPTHGVPAMKSKIDPILEARQKYAYGKQNDYLDHHNMIGWTREGNTAHPNSGLATIMSDGPGGNKWMYVGRNKAGQVWRDITGNRSGTVTINADGWGNFSVNGGSVSIWVN

SEQ ID NO: 19669 - protein, 484 aa, Synthetic construct
HHNGTNGTMMQYFEWYLPNDGNHWNRLRSDASNLKDYGITAVWIPPAWKGASQNDVGYGAYDLYDLGEFNQKGTVRTKYGTRNQLQAAVTALKSNGIQVYGDVVMNHKGGADATEWVRAVEVNPSNRNQEVSGDYTIEAWTKFDFPGRGNTHSNFKWRWYHFDGVDWDQSRQLQNRIYKFRGDGKGWDWEVDTENGNYDYLMYADIDMDHPEVVNELRNWGVWYTNTLGLDGFRIDAVKHIKYSFTRDWLTHVRNTTGKNMFAVAEFWKNDIGAIENYLSKTNWNHSVFDVPLHYNLYNASRSGGNYDMRQIFNGTVVQRHPTHAVTFVDNHDSQPEEALESFVEEWFKPLAYALTLTRDQGYPSVFYGDYYGIPTHGVPAMKSKIDPILEARQKYAYGKQNDYLDHHNMIGWTREGNTAHPNSGLATIMSDGPGGNKWMYVGRNKAGQVWRDITGNRSGTVTINADGWGNFSVNGGSVSIWVN

SEQ ID NO: 19670 - protein, 484 aa, Synthetic construct
HHNGTNGTMMQYFEWYLPNDGNHWNRLRSDASNLKDKGITAVWIPPAWKGASQNDVGYGAYDLYDLGEFNQKGTVRTKYGTRNQLQAAVTALKSNGIQVYGDVVMNHKGGADATEWVRAVEVNPSNRNQEVSGDYTIEAWTKFDFPGRGNTHSNFKWRWYHFDGVDWDQSRQLQNRIYKFRGDGKGWDWEVDTENGNYDYLMYADIDMDHPEVVNELRNWGVWYTNTLGLDGFRIDAVKHIKYSFTRDWLTHVRNTTGKNMFAVAEFWKNDIGAIENYLSKTNWNHSVFDVPLHYNLYNASRSGGNYDMRQIFNGTVVQRHPTHAVTFVDNHDSQPEEALESFVEEWFKPLAYALTLTRDQGYPQVFYGDYYGIPTHGVPAMKSKIDPILEARQKYAYGKQNDYLDHHNMIGWTREGNTAHPNSGLATIMSDGPGGNKWMYVGRNKAGQVWRDITGNRSGTVTINADGWGNFSVNGGSVSIWVN

SEQ ID NO: 19671 - protein, 484 aa, Synthetic construct
HHNGTNGTMMQYFEWYLPNDGNHWNRLRSDASNLKDKGITAVWIPPAWKGASQNDVGYGAYDLYDLGEFNQKGTVRTKYGTRNQLQAAVTALKSNGIQVYGDVVMNHKGGADATEWVRAVEVNPSNRNQEVSGDYTIEAWTKFDFPGRGNTHSNFKWRWYHFDGVDWDQSRQLQNRIYKTRGDGKGWDWEVDTENGNYDYLMYADIDMDHPEVVNELRNWGVWYTNTLGLDGFRIDAVKHIKYSFTRDWLTHVRNTTGKNMFAVAEFWKNDIGAIENYLSKTNWNHSVFDVPLHYNLYNASRSGGNYDMRQIFNGTVVQRHPTHAVTFVDNHDSQPEEALESFVEEWFKPLAYALTLTRDQGYPSVFYGDYYGIPTHGVPAMKSKIDPILEARQKYAYGKQNDYLDHHNMIGWTREGNTAHPNSGLATIMSDGPGGNKWMYVGRNKAGQVWRDITGNRSGTVTINADGWGNFSVNGGSVSIWVN

SEQ ID NO: 19672 - protein, 484 aa, Synthetic construct
HHNGTNGTMMQYFEWYLPNDGNHWNRLRSDASNLKDKGITAVWIPPAWKGASQNDVGYGAYDLYDLGEFNQKGTVRTKYGTRNQLQAAVTALKSNGIQVYGDVVMNHKGGADATEWVRAVEVNPSNRNQEVSGDYTIEAWTKFDFPGRGNTHSNFKWRWYHFDGVDWDQSRQLQNRIYKFRGDGKGWDWEVDGENGNYDYLMYADIDMDHPEVVNELRNWGVWYTNTLGLDGFRIDAVKHIKYSFTRDWLTHVRNTTGKNMFAVAEFWKNDIGAIENYLSKTNWNHSVFDVPLHYNLYNASRSGGNYDMRQIFNGTVVQRHPTHAVTFVDNHDSQPEEALESFVEEWFKPLAYALTLTRDQGYPSVFYGDYYGIPTHGVPAMKSKIDPILEARQKYAYGKQNDYLDHHNMIGWTREGNTAHPNSGLATIMSDGPGGNKWMYVGRNKAGQVWRDITGNRSGTVTINADGWGNFSVNGGSVSIWVN

SEQ ID NO: 19673 - protein, 484 aa, Synthetic construct
HHNGTNGTMMQYFEWYLPNDGNHWNRLRSDASNLKDKGITAVWIPPAWKGASQNDVGYGAYDLYDLGEFNQKGTVRTKYGTRNQLQAAVTALKSNGIQVYGDVVMNHKGGADATEWVRAVEVNPSNRNQEVSGDYTIEAWTKFDFPGRGNTHSNFKWRWYHFDGVDWDQSRQLQNRIYKFRGDGKGWDWEVDTENGNYDYLMYADIDMDHPEVVNELRNWGVWYTNTLGLDGFRIDAVKHINYSFTRDWLTHVRNTTGKNMFAVAEFWKNDIGAIENYLSKTNWNHSVFDVPLHYNLYNASRSGGNYDMRQIFNGTVVQRHPTHAVTFVDNHDSQPEEALESFVEEWFKPLAYALTLTRDQGYPSVFYGDYYGIPTHGVPAMKSKIDPILEARQKYAYGKQNDYLDHHNMIGWTREGNTAHPNSGLATIMSDGPGGNKWMYVGRNKAGQVWRDITGNRSGTVTINADGWGNFSVNGGSVSIWVN

SEQ ID NO: 19674 - protein, 484 aa, Synthetic construct
HHNGTNGTMMQYFEWYLPNDGNHWNRLRSDASNLKDKGITAVWIPPAWKGASQNDVGYGAYDLYDLGEFNQKGTVRTKYGTRNQLQAAVTALKSNGIQVYGDVVMNHKGGADATEWVRAVEVNPSNRNQEVSGDYTIEAWTKFDFPGRGNTHSNFKWRWYHFDGVDWDQSRQLQNRPYKFRGDGKGWDWEVDTENGNYDYLMYADIDMDHPEVVNELRNWGVWYTNTLGLDGFRIDAVKHIKYSFTRDWLTHVRNTTGKNMFAVAEFWKNDIGAIENYLSKTNWNHSVFDVPLHYNLYNASRSGGNYDMRQIFNGTVVQRHPTHAVTFVDNHDSQPEEALESFVEEWFKPLAYALTLTRDQGYPSVFYGDYYGIPTHGVPAMKSKIDPILEARQKYAYGKQNDYLDHHNMIGWTREGNTAHPNSGLATIMSDGPGGNKWMYVGRNKAGQVWRDITGNRSGTVTINADGWGNFSVNGGSVSIWVN

SEQ ID NO: 19675 - protein, 484 aa, Synthetic construct
HHNGTNGTMMQYFEWYLPNDGNHWNRLRSDASNLKDKGITAVWIPPAWKGASQNDVGYGAYDLYDLGEFNQKGTVRTKYGTRNQLQAAVTALKSNGIQVYGDVVMNHKGGADATEWVRAVEVNPSNRNQEVSGDYTIEAWTKFDFPGRGNTHSNFKWRWYHFDGVDWDQSRQLQNRSYKFRGDGKGWDWEVDTENGNYDYLMYADIDMDHPEVVNELRNWGVWYTNTLGLDGFRIDAVKHIKYSFTRDWLTHVRNTTGKNMFAVAEFWKNDIGAIENYLSKTNWNHSVFDVPLHYNLYNASRSGGNYDMRQIFNGTVVQRHPTHAVTFVDNHDSQPEEALESFVEEWFKPLAYALTLTRDQGYPSVFYGDYYGIPTHGVPAMKSKIDPILEARQKYAYGKQNDYLDHHNMIGWTREGNTAHPNSGLATIMSDGPGGNKWMYVGRNKAGQVWRDITGNRSGTVTINADGWGNFSVNGGSVSIWVN

SEQ ID NO: 19676 - protein, 484 aa, Synthetic construct
HHNGTNGTMMQYFEWYLPNDGNHWNRLRSDASNLKDKGITAVWIPPAWKGASQNDVGYGAYDLYDLGEFNQKGTVRTKYGTRNQLQAAVTALKSNGIQVYGDVVMNHKGGADATEWVRAVEVNPSNRNQEVSGDYTIEAWTKFDFPGRGNTHSNFKWRWYHFDGVDWDQSRQLQNRIYKFRGDGKGWDWEVDTENGNYDYLMYADIDMDDPEVVNELRNWGVWYTNTLGLDGFRIDAVKHIKYSFTRDWLTHVRNTTGKNMFAVAEFWKNDIGAIENYLSKTNWNHSVFDVPLHYNLYNASRSGGNYDMRQIFNGTVVQRHPTHAVTFVDNHDSQPEEALESFVEEWFKPLAYALTLTRDQGYPSVFYGDYYGIPTHGVPAMKSKIDPILEARQKYAYGKQNDYLDHHNMIGWTREGNTAHPNSGLATIMSDGPGGNKWMYVGRNKAGQVWRDITGNRSGTVTINADGWGNFSVNGGSVSIWVN

SEQ ID NO: 19677 - protein, 484 aa, Synthetic construct
HHNGTNGTMMQYFEWYLPNDGNHWNRLRSDASNLKDKGITAVWIPPAWKGASQNDVGYGAYDLYDLGEFNQKGTVRTKYGTRNQLQAAVTALKSNGIQVYGDVVMNHKGGADATEWVRAVEVNPSNRNQEVSGDYTIEAWTKFDFPGRGNTHSNFKWRWYHFDGVDWDQSRQLQNRIYKFRGDGKGWDWEVDTENGNYDYLMYADIDMDHPEVVNELRNWGVWYTNTLGLDGFRIDAVKHIKYSFTRDWLTHVRNTTGKNMFAVAEFWKNDIGAIENYLSKTNWNHSVFDVPLHYNLYNASRSGGNYDMRQIFNGTVVQRHPTHAVTFVDNHDSQPEEALESFVEEWFKPLAYALTLTRDQGYPSVFYGDYYGIPTHGVPAMKSKINPILEARQKYAYGKQNDYLDHHNMIGWTREGNTAHPNSGLATIMSDGPGGNKWMYVGRNKAGQVWRDITGNRSGTVTINADGWGNFSVNGGSVSIWVN

SEQ ID NO: 19678 - protein, 484 aa, Synthetic construct
HHNGTNGTMMQYFEWYLPNDGNHWNRLRSDASNLKDKGITAVWIPPAWKGASQNDVGYGAYDLYDLGEFNQKGTVRTKYGTRNQLQAAVTALKSNGIQVYGDVVMNHKGGADATEWVRAVEVNPSNRNQEVSGDYTIEAWTKFDFPGRGNTHSNFKWRWYHFDGVDWDQSRQLQNRIYKFRGDGKGWDWEVDTENGNYDYLMYADIDMDHPEVVNELRNWGVWYTNTLGLDGFRIDAVKHIKYSFTRDWLTHVRNTTGKNMFAVAEFWKNDIGAIENYLSKTNWNHSVFDVPLHYNLYNASRSGGNYDMRQIFNGTVVQRHPTHAVTFVDNHDSQPEEALESFVEEWFKPLAYALTLTRDQGYPSVFYGDYYGIPTHGVPAMKSKIDPILEARQKYAYGKQNDYLDHHNMIGWTREGNTAHPNSGLATIMSDGPGGNKWMYVGRNKAGQVWRDITSNRSGTVTINADGWGNFSVNGGSVSIWVN

SEQ ID NO: 19679 - protein, 484 aa, Synthetic construct
HHNGTNGTMMQYFEWYLPNDGNHWHRLRSDASNLKDKGITAVWIPPAWKGASQNDVGYGAYDLYDLGEFNQKGTVRTKYGTRNQLQAAVTALKSNGIQVYGDVVMNHKGGADATEWVRAVEVNPSNRNQEVSGDYTIEAWTKFDFPGRGNTHSNFKWRWYHFDGVDWDQSRQLQNRIYKFRGDGKGWDWEVDTENGNYDYLMYADIDMDHPEVVNELRNWGVWYTNTLGLDGFRIDAVKHIKYSFTRDWLTHVRNTTGKNMFAVAEFWKNDIGAIENYLSKTNWNHSVFDVPLHYNLYNASRSGGNYDMRQIFNGTVVQRHPTHAVTFVDNHDSQPEEALESFVEEWFKPLAYALTLTRDQGYPSVFYGDYYGIPTHGVPAMKSKIDPILEARQKYAYGKQNDYLDHHNMIGWTREGNTAHPNSGLATIMSDGPGGNKWMYVGRNKAGQVWRDITGNRSGTVTINADGWGNFSVNGGSVSIWVN

SEQ ID NO: 19680 - protein, 484 aa, Synthetic construct
HHNGTNGTMMQYFEWYLPNDGNHWNRLRSDASNLKDKGITAVWIPPAWKGASQNDVGYGAYDLYDLGEFNQKGTVRTKYGTRNQLQAAVTALKSNGIQVYGDVVMNHKGGADATEWVRAVEVNPSNRNQEVSGDETIEAWTKFDFPGRGNTHSNFKWRWYHFDGVDWDQSRQLQNRIYKFRGDGKGWDWEVDTENGNYDYLMYADIDMDHPEVVNELRNWGVWYTNTLGLDGFRIDAVKHIKYSFTRDWLTHVRNTTGKNMFAVAEFWKNDIGAIENYLSKTNWNHSVFDVPLHYNLYNASRSGGNYDMRQIFNGTVVQRHPTHAVTFVDNHDSQPEEALESFVEEWFKPLAYALTLTRDQGYPSVFYGDYYGIPTHGVPAMKSKIDPILEARQKYAYGKQNDYLDHHNMIGWTREGNTAHPNSGLATIMSDGPGGNKWMYVGRNKAGQVWRDITGNRSGTVTINADGWGNFSVNGGSVSIWVN

SEQ ID NO: 19681 - protein, 484 aa, Synthetic construct
HHNGTNGTMMQYFEWYLPNNGNHWNRLRSDASNLKDKGITAVWIPPAWKGASQNDVGYGAYDLYDLGEFNQKGTVRTKYGTRNQLQAAVTALKSNGIQVYGDVVMNHKGGADATEWVRAVEVNPSNRNQEVSGDYTIEAWTKFDFPGRGNTHSNFKWRWYHFDGVDWDQSRQLQNRIYKFRGDGKGWDWEVDTENGNYDYLMYADIDMDHPEVVNELRNWGVWYTNTLGLDGFRIDAVKHIKYSFTRDWLTHVRNTTGKNMFAVAEFWKNDIGAIENYLSKTNWNHSVFDVPLHYNLYNASRSGGNYDMRQIFNGTVVQRHPTHAVTFVDNHDSQPEEALESFVEEWFKPLAYALTLTRDQGYPSVFYGDYYGIPTHGVPAMKSKIDPILEARQKYAYGKQNDYLDHHNMIGWTREGNTAHPNSGLATIMSDGPGGNKWMYVGRNKAGQVWRDITGNRSGTVTINADGWGNFSVNGGSVSIWVN

SEQ ID NO: 19682 - protein, 484 aa, Synthetic construct
HHNGTNGTMMQYFEWYLPNDGNHWNRLRSDASNLKDKGITAVWIPPAWKGASQNDVGYGAYDLYDLGEFNQKGTVRTKYGTRNQLQAAVTALKSNGIQVYGDVVMNHKGGADATEWVRAVEVNPKNRNQEVSGDYTIEAWTKFDFPGRGNTHSNFKWRWYHFDGVDWDQSRQLQNRIYKFRGDGKGWDWEVDTENGNYDYLMYADIDMDHPEVVNELRNWGVWYTNTLGLDGFRIDAVKHIKYSFTRDWLTHVRNTTGKNMFAVAEFWKNDIGAIRNYLSKTNWNHSVFDVPLHYNLYNASRSGGNYDMRQIFNGTVVQRHPTHAVTFVDNHDSQPEEALESFVEEWFKPLAYALTLTRDQGYPSVFYGDYYGIPTHGVPAMKSKIDPILEARQKYAYGKQNDYLDHHNMIGWTREGNTAHPNSGLATIMSDGPGGNKWMYVGRNKAGQVWRDITGNRSGTVTINADGWGNFSVNGGSVSIWVN

SEQ ID NO: 19683 - protein, 484 aa, Synthetic construct
HHNGTNGTMMQYFEWYLPNDGNHWNRLRSDASNLKDKGITAVWIPPAWKGASQNDVGYGAYDLYDLGEFNQKGTVRTKYGTRNQLQAAVTALKSNGIQVYGDVVMNHKGGADATEWVRAVEVNPSNRNQEVSGDYTIEAWTKFDFPGRGNTHSNFKWRWYHFDGVDWDQSRQLQNRIYKFRGDGKGWDWEVDTENGNYDYLMYADIDMDHPEVVNELRNWGVWYTNTLGLDGFRIDAVKHIKYSFTRDWLTHVRNTTGKNMFAVAEFWKNDIGAIENYLSKTNWNHSVFDVPLHYNLYNASRSGGNYDMRQIFNGTVVQRHPTHAVTFVDNHDSQPEEALESFVEEWFKPLAYALTLTRDQGYPSVFYGDYYGIPTHGVPAMKSKIDPILEARQKYAYGKQNDYLDHHNMIGWTREGNTAHPNSGLATPMSDGPGGNKWMYVGRNKAGQVWRDITGNRSGTVTINADGWGNFSVNGGSVSIWVN

SEQ ID NO: 19684 - protein, 484 aa, Synthetic construct
HHNGTNGTMMQYFEWYLPNDGNHWNRLRSDASNLKDKGITAVWIPPAWKGASQNDVGYGAYDLYDLGEFNQKGTVRTKYGTRNQLQAAVTALKSNGIQVYGDVVMNHKGGADATEWVRAVEVNPSNRNQEVSGDYTIEAWTKFDFPGRGNTHSNFKWRWYHFDGVDWDQSRQLQNRIYKFRGDGKGWDWEVDTENGNYDYLMYADIDMDHPEVVNELRNWGVWYTNTLGLDGFRIDAVKHIKYSFTRDWLTHVRNTTGKNMFAVAEFWKNDIGAIENYLSKTNWNHSVFDVPLHYNLYNASRSGGNYDMRQIFNGTVVQRHPTHAVTFVDNHDSQPEEALESFVEEWFKPLAYALTLTRDQMYPSVFYGDYYGIPTHGVPAMKSKIDPILEARQKYAYGKQNDYLDHHNMIGWTREGNTAHPNSGLATIMSDGPGGNKWMYVGRNKAGQVWRDITGNRSGTVTINADGWGNFSVNGGSVSIWVN

SEQ ID NO: 19685 - protein, 484 aa, Synthetic construct
HHNGTNGTMMQYFEWYLPNDGNHWNRLRSDASNLKDKGITAVWIPPAWKGASQNDVGYGAYDLYDLGEFNQKGTVRTKYGTRNQLQAAVTALKSNGIQVYGDVVMNHKGGADATEWVRAVEVNPSNRNQEVSGFYTIEAWTKFDFPGRGNTHSNFKWRWYHFDGVDWDQSRQLQNRIYKFRGDGKGWDWEVDTENGNYDYLMYADIDMDHPEVVNELRNWGVWYTNTLGLDGFRIDAVKHIKYSFTRDWLTHVRNTTGKNMFAVAEFWKNDIGAIENYLSKTNWNHSVFDVPLHYNLYNASRSGGNYDMRQIFNGTVVQRHPTHAVTFVDNHDSQPEEALESFVEEWFKPLAYALTLTRDQGYPSVFYGDYYGIPTHGVPAMKSKIDPILEARQKYAYGKQNDYLDHHNMIGWTREGNTAHPNSGLATIMSDGPGGNKWMYVGRNKAGQVWRDITGNRSGLVTINADGWGNFSVNGGSVSIWVN

SEQ ID NO: 19686 - protein, 484 aa, Synthetic construct
HHNGTNGTMMQYFEWYLPNDGNHWNRLRSDASNLKDKGITAVWIPPAWKGASQNDVGYGAYDLYDLGEFNQKGTVRTKYGTRNQLQAAVTALKSNGIQVYGDVVMNHKGGADATEWVRAVEVNPSNRNQEVSGDYTIEAWTKFDFPGRGNTHSNFKWRWYHFDGVDWDQSRQLQNRIYKFRGDGKGWDWEVDTENGNYDYLMYADIDMDHPEVVNELRNWGVWYTNTLGLDGFRIDAVKHIKYSFTRDWLTHVRNTTGKNMFAVAEFWKNDIGAIENYLSATNWNHSVFDVPLHYNLYNASRSGGNYDMRQIFNGTVVQRHPTHAVTFVDNHDSQPEEALESFVEEWFKPLAYALTLTRDQGYPSVFYGDYYGIPTHGVPAMKSKIDPILEARQKYAYGKQNDYLDHHNMIGWTREGNTAHPNSGLATIMSDGPGGNKWMYVGRNKAGQVWRDITGNRSGTVTINADGWGNFSVNGGSVSIWVN

SEQ ID NO: 19687 - protein, 484 aa, Synthetic construct
HHNGTNGTMMQYFEWYLPNDGNHWNRLRSDASNLKDKGITAVWIPPAWKGASQNDVGYGAYDLYDLGEFNQKGTVRTKYGTRNQLQAAVTALKSNGIQVYGDVVMNHKGGADATEWVRAVEVNPSNRNQEVSGDYTIEAWTKFDFPGRGNTHSNFKWRWYHFDGVDWDQSRQLQNRIYKFRGDGKGWDWEVDTENGNYDYLMYADIDMDHPEVVNELRNWGVWYTNTLGLDGFRIDAVKHIKYSFTRDWLTHVRNTTGKNMFAVAEFWKNDIGAIENYLSKTNWNHSVFDVPLHYNLYNASRSGGNYDMRQIFNGTVVQRHPTHAVTFVDNHDSQPEEALESFVEEWFKPLAYALTLMRDQGYPSVFYGDYYGIPTHGVPAMKSKIDPILEARQKYAYGKQNDYLDHHNMIGWTREGNTAHPNSGLATIMSDGPGGNKWMYVGRNKAGQVWRDITGNRSGTVTINADGWGNFSVNGGSVSIWVN

SEQ ID NO: 19688 - protein, 484 aa, Synthetic construct
HHNGTNGTMMQYFEWYLPNDGNHWNRLRSDASNLKDKGITAVWIPPAWKGASQNDVGYGAYDLYDLGEFNQKGTVRTKYGTRNQLQAAVTALKSNGIQVYGDVVMNHKGGADATEWVRAVEVNPSNRNQEVSGDYTIEAWTKFDFPGRGNTHSNFKWRWYHFDGVDWDQSRQLQNRIYKFRGDGKGWDWEVDTENGNYDYLMYADIDMDHPEVVNELRNWGVWYTNTLGLDGFRIDAVKHIKYSFTRDWLTHVRNTTGKNMFAVAEFWKNDIGAIENYLSKTNWNHSVFDVPLHYNLYNASRSGGNYDMRQIFNGTVVQRHPTHAVTFVDNHDSQPEEALESFVEEWFKPLAYALTLTRDQGYPSVFYGDYYGIPTHGVPAMKSKIDPIFEARQKYAYGKQNDYLDHHNMIGWTREGNTAHPNSGLATIMSDGPGGNKWMYVGRNKAGQVWRDITGNRSGTVTINADGWGNFSVNGGSVSIWVN

SEQ ID NO: 19689 - protein, 484 aa, Synthetic construct
HHNGTNGTMMQYFEWYLPNDGNHWNRLRSDASNLKDKGITAVWIPPAWKGASQNDVGYGAYDLYDLGEFNQKGTVRTKYGTRNQLQAAVTALKSNGIQVYGDVVMNHKGGADATEWVRAVEVNPSNRNQEVSGDYTIEAWTKFDFPGRGNTHSNFKWRWYHFDGVDWDQSRQLQNRIYKFRGDGKGWDWEVDTENGNYDYLMYADIDMDHPEVVNELRNWGVWYTNTLGLDGFRIDAVKHIKYSFTRDWLTHVRNTTGKNMFAVAEFWKNDIGAIENYLSKTNWNHSVFDVPLHYNLVNASRSGGNYDMRQIFNGTVVQRHPTHAVTFVDNHDSQPEEALESFVEEWFKPLAYALTLTRDQGYPSVFYGDYYGIPTHGVPAMKSKIDPILEARQKYAYGKQNDYLDHHNMIGWTREGNTAHPNSGLATIMSDGPGGNKWMYVGRNKAGQVWRDITGNRSGTVTINADGWGNFSVNGGSVSIWVN

SEQ ID NO: 19690 - protein, 484 aa, Synthetic construct
HHNGTNGTMMQYFEWYLPNDGNHWNRLRSDASNLKDKGITAVWIPPAWKGASQNDVGYGAYDLYDLGEFNQKCTVRTKYGTRNQLQAAVTALKSNGIQVYGDVVMNHKGGADATEWVRAVEVNPSNRNQEVSGDYTIEAWTKFDFPGRGNTHSNFKWRWYHFDGVDWDQSRQLQNRIYKFRGDGKGWDWEVDTENGNYDYLMYADIDMDHPEVVNELRNWGVWYTNTLGLDGFRIDAVKHIKYSFTRDWLTHVRNTTGKNMFAVAEFWKNDIGAIENYLSKTNWNHSVFDVPLHYNLYNASRSGGNYDMRQIFNGTVVQRHPTHAVTFVDNHDSQPEEALESFVEEWFKPLAYALTLTRDQGYPSVFYGDYYGIPTHGVPAMKSKIDPILEARQKYAYGKQNDYLDHHNMIGWTREGNTAHPNSGLATIMSDGPGGNKWMYVGRNKAGQVWRDITGNRSGTVTINADGWGNFSVNGGSVSIWVN

SEQ ID NO: 19691 - protein, 484 aa, Synthetic construct
HHNGTNGTMMQYFEWYLPNDGNHWNRLRSDASNLKDKGITAVWIPPAWKGASQNDVGYGAYDLYDLGEFNQKGTVRTKYGTRNQLQAAVTALKSNGIQVYGDVVMNHKGGADATEWVRAVEVNPSNRNQEVSGDYTIEAWTKFDFPGRGNTHSNFKWRWYHFDGVDWDQSRQLQNRIYKFRGDGKGWDWEVDTENGNYDYLMYADIDMDHPEVVNELRNWGVWYTNTLGLDGFRIDAVKHIKYSFTRDWLTHVRNTTGKNMFAVAEFWKNDIGAIENYLSKTNWNHSVFDVPLHYNLYNASRSGGNYDMRQIFNGTVVQRHPTHAVTFVDNHDSQPEEALESFVEEWFKPLAYALTLTRDQGYPSVFYGDYYGIPTHEVPAMKSKIDPILEARQKYAYGKQNDYLDHHNMIGWTREGNTAHPNSGLATIMSDGPGGNKWMYVGRNKAGQVWRDITGNRSGTVTINADGWGNFSVNGGSVSIWVN

SEQ ID NO: 19692 - protein, 484 aa, Synthetic construct
HHNGTNGTMMQYFEWYLPNDGNHWNRLRSDASNLKDKGITAVWIPPAWKGASQNDVGYGAYDLYDLGEFNQKGTVRTKYGTRNQLQAAVTALKSNGIQVYGDVVMNHKGGADATEWVRAVEVNPKNRNQEVSGDYTIEAWTKFDFPGRGNTHSNFKWRWYHFDGVDWDQSRQLQNRIYKFRGDGKGWDWEVDTENGNYDYLMYADIDMDHPEVVNELRNWGVWYTNTLGLDGFRIDAVKHIKYSFTRDWLTHVRNTTGKNMFAVAEFWKNDIGAIENYLSKTNWNHSVFDVPLHYNLYNASRSGGNYDMRQIFNGTVVQRHPTHAVTFVDNHDSQPEEALESFVEEWFKPLAYALTLTRDQGYPSVFYGDYYGIPTHGVPAMKSKIDPILEARQKYAYGKQNDYLDHHNMIGWTREGNTAHPNSGLATIMSDGPGGNKWMYVGRNKAGQVWRDITGNRSGLVTINADGWGNFSVNGGSVSIWVN

SEQ ID NO: 19693 - protein, 484 aa, Synthetic construct
HHNGTNGTMMQYFEWYLPNDGNHWNRLRSDASNLKDKGITAVWIPPAWKGASQNDVGYGAYDLYDLGEFNQKGTVRTKYGTRNQLQAAVTALKSNGIQVYGDVVMNHKGGADATEWVRAVEVNPSNRNQEVSGDYTIESWTKFDFPGRGNTHSNFKWRWYHFDGVDWDQSRQLQNRIYKFRGDGKGWDWEVDTENGNYDYLMYADIDMDHPEVVNELRNWGVWYTNTLGLDGFRIDAVKHIKYSFTRDWLTHVRNTTGKNMFAVAEFWKNDIGAIENYLSKTNWNHSVFDVPLHYNLYNASRSGGNYDMRQIFNGTVVQRHPTHAVTFVDNHDSQPEEALESFVEEWFKPLAYALTLTRDQGYPSVFYGDYYGIPTHGVPAMKSKIDPILEARQKYAYGKQNDYLDHHNMIGWTREGNTAHPNSGLATIMSDGPGGNKWMYVGRNKAGQVWRDITGNRSGTVTINADGWGNFSVNGGSVSIWVN

SEQ ID NO: 19694 - protein, 484 aa, Synthetic construct
HHNGTNGTMMQYFEWYLPNDGNHWNRLRSDASNLKDKGITAVWIPPAWKGASQNDVGYGAYDLYDLGEFNQKGTVRTKYGTRNQLQAAVTALKSNGIQVYGDVVMNHKGGADATEWVRSVEVNPSNRNQEVSGDYTIEAWTKFDFPGRGNTHSNFKWRWYHFDGVDWDQSRQLQNRIYKFRGDGKGWDWEVDTENGNYDYLMYADIDMDHPEVVNELRNWGVWYTNTLGLDGFRIDAVKHIKYSFTRDWLTHVRNTTGKNMFAVAEFWKNDIGAIENYLSKTNWNHSVFDVPLHYNLYNASRSGGNYDMRQIFNGTVVQRHPTHAVTFVDNHDSQPEEALESFVEEWFKPLAYALTLTRDQGYPSVFYGDYYGIPTHGVPAMKSKIDPILEARQKYAYGKQNDYLDHHNMIGWTREGNTAHPNSGLATIMSDGPGGNKWMYVGRNKAGQVWRDITGNRSGTVTINADGWGNFSVNGGSVSIWVN

SEQ ID NO: 19695 - protein, 484 aa, Synthetic construct
HHNGTNGTMMQYFEWYLPNDGNHWNRLRSDASNLKDKGITAVWIPPAWKGASQNDVGYGAYDLYDLGEFNQKGTVRTKYGTRNQLQAAVTALKSNGIQVYGDVVMNHKGGADATEWVRAVEVNPSNRNQEQSGDYTIEAWTKFDFPGRGNTHSNFKWRWYHFDGVDWDQSRQLQNRIYKFRGDGKGWDWEVDTENGNYDYLMYADIDMDHPEVVNELRNWGVWYTNTLGLDGFRIDAVKHIKYSFTRDWLTHVRNTTGKNMFAVAEFWKNDIGAIENYLSKTNWNHSVFDVPLHYNLYNASRSGGNYDMRQIFNGTVVQRHPTHAVTFVDNHDSQPEEALESFVEEWFKPLAYALTLTRDQGYPSVFYGDYYGIPTHGVPAMKSKIDPILEARQKYAYGKQNDYLDHHNMIGWTREGNTAHPNSGLATIMSDGPGGNKWMYVGRNKAGQVWRDITGNRSGTVTINADGWGNFSVNGGSVSIWVN

SEQ ID NO: 19696 - protein, 484 aa, Synthetic construct
HHNGTNGTMMQYFEWYLPNDGNHWNRLRSDASNLKDKGITAVWIPPAWKGASQNDVGYGAYDLYDLGEFNQKGTVRTKYGTRNQLQAAVTALKSNGIQVWGDVVMNHKGGADATEWVRAVEVNPSNRNQEVSGDYTIEAWTKFDFPGRGNTHSNFKWRWYHFDGVDWDQSRQLQNRIYKFRGDGKGWDWEVDTENGNYDYLMYADIDMDHPEVVNELRNWGVWYTNTLGLDGFRIDAVKHIKYSFTRDWLTHVRNTTGKNMFAVAEFWKNDIGAIENYLSKTNWNHSVFDVPLHYNLYNASRSGGNYDMRQIFNGTVVQRHPTHAVTFVDNHDSQPEEALESFVEEWFKPLAYALTLTRDQGYPSVFYGDYYGIPTHGVPAMKSKIDPILEARQKYAYGKQNDYLDHHNMIGWTREGNTAHPNSGLATIMSDGPGGNKWMYVGRNKAGQVWRDITGNRSGTVTINADGWGNFSVNGGSVSIWVN

SEQ ID NO: 19697 - protein, 484 aa, Synthetic construct
HHNGTNGTMMQYFEWYLPNDGNHWNRLRSDASNLKDMGITAVWIPPAWKGASQNDVGYGAYDLYDLGEFNQKGTVRTKYGTRNQLQAAVTALKSNGIQVYGDVVMNHKGGADATEWVRAVEVNPSNRNQEVSGDYTIEAWTKFDFPGRGNTHSNFKWRWYHFDGVDWDQSRQLQNRIYKFRGDGKGWDWEVDTENGNYDYLMYADIDMDHPEVVNELRNWGVWYTNTLGLDGFRIDAVKHIKYSFTRDWLTHVRNTTGKNMFAVAEFWKNDIGAIENYLSKTNWNHSVFDVPLHYNLYNASRSGGNYDMRQIFNGTVVQRHPTHAVTFVDNHDSQPEEALESFVEEWFKPLAYALTLTRDQGYPSVFYGDYYGIPTHGVPAMKSKIDPILEARQKYAYGKQNDYLDHHNMIGWTREGNTAHPNSGLATIMSDGPGGNKWMYVGRNKAGQVWRDITGNRSGTVTINADGWGNFSVNGGSVSIWVN

SEQ ID NO: 19698 - protein, 484 aa, Synthetic construct
HHNGTNGTMMQYFEWYLPNDGNHWNRLRSDASNLKDKGITAVWIPPAWKGASQNDVGYGAYDLYDLGEFNQKGTVRTKYGTRNQLQAAVTALKSNGIQVYGDVVMNHKGGADATEWVRAVEVNPRNRNQEVSGDYTIEAWTKFDFPGRGNTHSNFKWRWYHFDGVDWDQSRQLQNRIYKFRGDGKGWDWEVDTENGNYDYLMYADIDMDHPEVVNELRNWGVWYTNTLGLDGFRIDAVKHIKYSFTRDWLTHVRNTTGKNMFAVAEFWKNDIGAIRNYLSKTNWNHSVFDVPLHYNLYNASRSGGNYDMRQIFNGTVVQRHPTHAVTFVDNHDSQPEEALESFVEEWFKPLAYALTLTRDQGYPSVFYGDYYGIPTHGVPAMKSKIDPILEARQKYAYGKQNDYLDHHNMIGWTREGNTAHPNSGLATIMSDGPGGNKWMYVGRNKAGQVWRDITGNRSGTVTINADGWGNFSVNGGSVSIWVN

SEQ ID NO: 19699 - protein, 484 aa, Synthetic construct
HHNGTNGTMMQYFEWYLPNDGNHWNRLRSDASNLKDKGITAVWIPPAWKGASQNDVGYGAYDLYDLGEFNQKGTVRTKYGTRNQLQAAVTALKSNGIQVYGDVVMNHKGGADATEWVRAVEVNPSNRNQEVSGDYTIEAWTKFDFPGRGNTHSNFKWRWYHFDGVDWDQSRQLQNRIYKFRGDGKGWDWEVDTENGNYDYLMYADIDMDHPEVVNELRNWGVWYTNTLGLDGFRIDAVKHIKYSFTRDWLTHVRNTTGKNMFAVAEFWKNDIGAIENYLSKTNWNHSVFDVPLHYNLYNASRSGGNYDMRQIFNGTVVQRHPTHAVTFVDNHDSQPEEALESFVEEWFKPLAYALTLTRDQGYTSVFYGDYYGIPTHGVPAMKSKIDPILEARQKYAYGKQNDYLDHHNMIGWTREGNTAHPNSGLATIMSDGPGGNKWMYVGRNKAGQVWRDITGNRSGTVTINADGWGNFSVNGGSVSIWVN

SEQ ID NO: 19700 - protein, 484 aa, Synthetic construct
HHNGTNGTMMQYFEWYLPNDGNHWNRLRSDASNLKDKGITAVWIPPAWKGASQNDVGYGAYDLYDLGEFNQKGTVRTKYGTRNQLQAAVTALKSNGIQVYGDVVMNHKGGADATEWVRAVEVNPSNRNQEVSGDYTIEAWTKFDFPGRGNTHSNFKWRWYHFDGVDWDQSRQLQNRNYKFRGDGKGWDWEVDTENGNYDYLMYADIDMDHPEVVNELRNWGVWYTNTLGLDGFRIDAVKHIKYSFTRDWLTHVRNTTGKNMFAVAEFWKNDIGAIENYLSKTNWNHSVFDVPLHYNLYNASRSGGNYDMRQIFNGTVVQRHPTHAVTFVDNHDSQPEEALESFVEEWFKPLAYALTLTRDQGYPSVFYGDYYGIPTHGVPAMKSKIDPILEARQKYAYGKQNDYLDHHNMIGWTREGNTAHPNSGLATIMSDGPGGNKWMYVGRNKAGQVWRDITGNRSGTVTINADGWGNFSVNGGSVSIWVN

SEQ ID NO: 19701 - protein, 484 aa, Synthetic construct
HHNGTNGTMMQYFEWYLPNDGNHWNRLRSDASNLKDKGITAVWIPPAWKGASQNDVGYGAYDLYDLGEFNQKGTVRTKYGTRNQLQAAVTALKSNGIQVYGDVVMNHKGGADATEWVRAVEVNPSNRNQEVSGDYTIEAWTKFDFPGRGNTHSNFKWRWYHFDGVDWDQSRQLQNRRYKFRGDGKGWDWEVDTENGNYDYLMYADIDMDHPEVVNELRNWGVWYTNTLGLDGFRIDAVKHIKYSFTRDWLTHVRNTTGKNMFAVAEFWKNDIGAIENYLSKTNWNHSVFDVPLHYNLYNASRSGGNYDMRQIFNGTVVQRHPTHAVTFVDNHDSQPEEALESFVEEWFKPLAYALTLTRDQGYPSVFYGDYYGIPTHGVPAMKSKIDPILEARQKYAYGKQNDYLDHHNMIGWTREGNTAHPNSGLATIMSDGPGGNKWMYVGRNKAGQVWRDITGNRSGTVTINADGWGNFSVNGGSVSIWVN

SEQ ID NO: 19702 - protein, 484 aa, Synthetic construct
HHNGTNGTMMQYFEWYLPNDGNHWNRLRSDASNLKDKGITAVWIPPAWKGASQNDVGYGAYDLYDLGEFNQKGTVRTKYGTRNQLQAAVTALKSNGIQVYGDVVMNHKGGADATEWVRAVEVNPSNRNQEVSGDYTIEAWTKFDFPGRGNTHSNFKWRWYHFDGVDWDQSRQLQNRIYKFRGDGKGWDWEVDTENGNYDYLMYADIDMDHPEVVNELRNWGVWYTNTLGLDGFRIDAVKHIKYSFTRDWLTHVRNTTGKNMFAVAEFWKNDIGAIENYLSKTNWNHSVFDVPLHYNLYNASRSGGNYDMRQIFNGTVVQRHKTHAVTFVDNHDSQPEEALESFVEEWFKPLAYALTLTRDQGYPSVFYGDYYGIPTHGVPAMKSKIDPILEARQKYAYGKQNDYLDHHNMIGWTREGNTAHPNSGLATIMSDGPGGNKWMYVGRNKAGQVWRDITGNRSGTVTINADGWGNFSVNGGSVSIWVN

SEQ ID NO: 19703 - protein, 484 aa, Synthetic construct
HHNGTNGTMMQYFEWYLPNDGNHWNRLRSDASNLKDKGITAVWIPPAWKGASQNDVGYGAYDLYDLGEFNQKGTVRTKYGTRNQLQAAVTALKSNGIQVYGDVVMNHKGGADATEWVRAVEVNPSNRNQEVSGDYTIEAWTKFDFPGRGNTHSNFKWRWYHFDGVDWDQSRQLQNRIYKFRGDGKGVDWEVDTENGNYDYLMYADIDMDHPEVVNELRNWGVWYTNTLGLDGFRIDAVKHIKYSFTRDWLTHVRNTTGKNMFAVAEFWKNDIGAIENYLSKTNWNHSVFDVPLHYNLYNASRSGGNYDMRQIFNGTVVQRHPTHAVTFVDNHDSQPEEALESFVEEWFKPLAYALTLTRDQGYPSVFYGDYYGIPTHGVPAMKSKIDPILEARQKYAYGKQNDYLDHHNMIGWTREGNTAHPNSGLATIMSDGPGGNKWMYVGRNKAGQVWRDITGNRSGTVTINADGWGNFSVNGGSVSIWVN

SEQ ID NO: 19704 - protein, 484 aa, Synthetic construct
HHNGTNGTMMQYFEWYLPNDGNHWNRLRSDASNLKDKGITAVWIPPAWKGASQNDVGYGAYDLYDLGEFNQKGTVRTKYGTRNQLQAAVTALKSNGIQVYGDVVMNHKGGADATEWVRAVEVNPSNRNQEVSGDYTIEAWTKFDFPGRGNTHSNFKWRWYHFDGVDWDQSRQLQNRIYKFRGDGKGWDWEVDTENGNYDYLMYADIDMDHPEVVNELRNWGVWYTNTLGLDGFRIDAVKHIKYSFTRDWLTHVRNTTGKNMFAVAEFWKNDIGAIENYASKTNWNHSVFDVPLHYNLYNASRSGGNYDMRQIFNGTVVQRHPTHAVTFVDNHDSQPEEALESFVEEWFKPLAYALTLTRDQGYPSVFYGDYYGIPTHGVPAMKSKIDPILEARQKYAYGKQNDYLDHHNMIGWTREGNTAHPNSGLATIMSDGPGGNKWMYVGRNKAGQVWRDITGNRSGTVTINADGWGNFSVNGGSVSIWVN

SEQ ID NO: 19705 - protein, 484 aa, Synthetic construct
HHNGTNGTMMQYFEWYLPNDGNHWNRLRSDASNLKDKGITAVWIPPAWKGASQNDVGYGAYDLYDLGEFNQKGTVRTKYGTRNQLQAAVTALKSNGIQVYGDVVMNHKGGADATEWVRAVEVNPSDRNQEVSGDYTIEAWTKFDFPGRGNTHSNFKWRWYHFDGVDWDQSRQLQNRIYKFRGDGKGWDWEVDTENGNYDYLMYADIDMDHPEVVNELRNWGVWYTNTLGLDGFRIDAVKHIKYSFTRDWLTHVRNTTGKNMFAVAEFWKNDIGAIENYLSKTNWNHSVFDVPLHYNLYNASRSGGNYDMRQIFNGTVVQRHPTHAVTFVDNHDSQPEEALESFVEEWFKPLAYALTLTRDQGYPSVFYGDYYGIPTHGVPAMKSKIDPILEARQKYAYGKQNDYLDHHNMIGWTREGNTAHPNSGLATIMSDGPGGNKWMYVGRNKAGQVWRDITGNRSGTVTINADGWGNFSVNGGSVSIWVN

SEQ ID NO: 19706 - protein, 484 aa, Synthetic construct
HHNGTNGTMMQYFEWYLPNDGNHWNRLRSDASNLKHKGITAVWIPPAWKGASQNDVGYGAYDLYDLGEFNQKGTVRTKYGTRNQLQAAVTALKSNGIQVYGDVVMNHKGGADATEWVRAVEVNPSNRNQEVSGDYTIEAWTKFDFPGRGNTHSNFKWRWYHFDGVDWDQSRQLQNRIYKFRGDGKGWDWEVDTENGNYDYLMYADIDMDHPEVVNELRNWGVWYTNTLGLDGFRIDAVKHIKYSFTRDWLTHVRNTTGKNMFAVAEFWKNDIGAIENYLSKTNWNHSVFDVPLHYNLYNASRSGGNYDMRQIFNGTVVQRHPTHAVTFVDNHDSQPEEALESFVEEWFKPLAYALTLTRDQGYPSVFYGDYYGIPTHGVPAMKSKIDPILEARQKYAYGKQNDYLDHHNMIGWTREGNTAHPNSGLATIMSDGPGGNKWMYVGRNKAGQVWRDITGNRSGTVTINADGWGNFSVNGGSVSIWVN

SEQ ID NO: 19707 - protein, 484 aa, Synthetic construct
HHNGTNGTMMQYFEWYLPNDGNHWNRLRSDASNLKDKGITAVWIPPAWKGASQNDVGYGAYDLYDLGEFNQKGTVRTKYGTRNQLQAAVTALKSNGIQVYGDVVMNHKGGADATEWVRAVEVNPSNRNQEVSGDYTIEAWTKFDFPGRGNTHSNFKWRWYHFDGVDWDQSRQLQNRIYKFRGDGKGWDWEVDTENGNYDYLMYADIDMDHPEVVNELRNWGVWYTNTLGLDGFRIDAVKHIKYSFTRDWLTHVRNTTGKNMFAVAEFWKNDIGAIENYLSKTNWNHSVFDVPLHYNLYNASRSGGNYDMRQIFNGTVVQRHPTHAVTFVDNHDSQPEEALESFVEEWFKPLAYALTLTRDQGYPSVFYGDYYGIPTHGVPAMKSKIDPILEARQKYAYGKQNDYLDHHNMIGWTREGNTAHPNSGLATIMSDGPGGNKWMYVGRNKAGQVWRDITGNRSGLVTINADGWGNFSVNGGSVSIWVN

SEQ ID NO: 19708 - protein, 484 aa, Synthetic construct
HHNGTNGTMMQYFEWYLPNDGNHWNRLRSDASNLKDKGITAVWIPPAWKGASQNDVGYGAYDLYDLGEFNQKGTVRTKYGTRNQLQAAVTALKSNGIQVYGDVVMNHKGGADATEWVRAVEVNPSNRNQEVSGDYEIEAWTKFDFPGRGNTHSNFKWRWYHFDGVDWDQSRQLQNRIYKFRGDGKGWDWEVDTENGNYDYLMYADIDMDHPEVVNELRNWGVWYTNTLGLDGFRIDAVKHIKYSFTRDWLTHVRNTTGKNMFAVAEFWKNDIGAIENYLSKTNWNHSVFDVPLHYNLYNASRSGGNYDMRQIFNGTVVQRHPTHAVTFVDNHDSQPEEALESFVEEWFKPLAYALTLTRDQGYPSVFYGDYYGIPTHGVPAMKSKIDPILEARQKYAYGKQNDYLDHHNMIGWTREGNTAHPNSGLATIMSDGPGGNKWMYVGRNKAGQVWRDITGNRSGTVTINADGWGNFSVNGGSVSIWVN

SEQ ID NO: 19709 - protein, 484 aa, Synthetic construct
HHNGTNGTMMQYFEWYLPNDGNHWNRLRSDASNLKDKGITAVWIPPAWKGASQNDVGYGAYDLYDLGEFNQKGTVRTKYGTRNQLQAAVTALKSNGIQVYGDVVMNHKGGADATEWVRAVEVNPSNRNQEVSGDYTIEAWTKFDFPGRGNTHSNFKWRWYHFDGVDWDQSRQLQNRIYKFRGDGKGWDWEVDTENGNYDYLMYADIDMDHPEVVNELRNWGVWYTNTLGLDGFRIDAVKHIKYSFTRDWLTHVRNTTGKNMFAVAEFWKNDIGAIENYLSKTNWNHSVFDVPLHYNLYNASRSGGNYDMRQIFNGTVVQRHPTHAVTFVDNHDSQPEEALESFVEEWFKPLAYALTLTRDQGYPSVFYGDYYGIPTHGVPAMKSKIEPILEARQKYAYGKQNDYLDHHNMIGWTREGNTAHPNSGLATIMSDGPGGNKWMYVGRNKAGQVWRDITGNRSGTVTINADGWGNFSVNGGSVSIWVN

SEQ ID NO: 19710 - protein, 484 aa, Synthetic construct
HHNGTNGTMMQYFEWYLPNDGNHWNRLRSDASNLKDKGITAVWIPPAWKGASQNDVGYGAYDLYDLGEFNQKGTVRTKYGTRNQLQAAVTALKSNGIQVYGDVVMNHKGGADATEWVRAVEVNPSNRNQEVSGDYTIEAWTKFDFPGRGNTHSNFKWRWYHFDGVDWDQSRQLQNRIYKFRGDGKGWDWEVDTENGNYDYLMYADIDMDHPEVVNELRNWGVWYTNTLGLDGFRIDAVKHIKYSFTRDWLTHVRNTTGKNMFAVAEFWKNDIGAIENYLSKTNWNHSVFDVPLHYNLYNASRSGGNYDMRQIFNGTVVQRHPTHAVTFVDNHDSQPEEALESWVEEWFKPLAYALTLTRDQGYPSVFYGDYYGIPTHGVPAMKSKIDPILEARQKYAYGKQNDYLDHHNMIGWTREGNTAHPNSGLATIMSDGPGGNKWMYVGRNKAGQVWRDITGNRSGTVTINADGWGNFSVNGGSVSIWVN

SEQ ID NO: 19711 - protein, 484 aa, Synthetic construct
HHNGTNGTMMQYFEWYLPNDGNHWNRLRSDASNLKDKGITAVWIPPAWKGASQNDVGYGAYDLYDLGEFNQKGTVRTKYGTRNQLQAAVTALKSNGIQVYGDVVMNHKGGADATEWVRAVEVNPSNRNQEVSGDYTIEAWTKFDFPGRGNTHSNFKWRWYHFDGVDWDDSRQLQNRIYKFRGDGKGWDWEVDTENGNYDYLMYADIDMDHPEVVNELRNWGVWYTNTLGLDGFRIDAVKHIKYSFTRDWLTHVRNTTGKNMFAVAEFWKNDIGAIENYLSKTNWNHSVFDVPLHYNLYNASRSGGNYDMRQIFNGTVVQRHPTHAVTFVDNHDSQPEEALESFVEEWFKPLAYALTLTRDQGYPSVFYGDYYGIPTHGVPAMKSKIDPILEARQKYAYGKQNDYLDHHNMIGWTREGNTAHPNSGLATIMSDGPGGNKWMYVGRNKAGQVWRDITGNRSGTVTINADGWGNFSVNGGSVSIWVN

SEQ ID NO: 19712 - protein, 484 aa, Synthetic construct
HHNGTNGTMMQYFEWYLPNDGNHWNRLRSDASNLKDKGITAVWIPPAWKGASQNDVGYGAYDLYDLGEFNQKGTVRTKYGTRNQLQAAVTALKSNGIQVYGDVVMNHKGGADATEWVRAEEVNPSNRNQEVSGDYTIEAWTKFDFPGRGNTHSNFKWRWYHFDGVDWDQSRQLQNRIYKFRGDGKGWDWEVDTENGNYDYLMYADIDMDHPEVVNELRNWGVWYTNTLGLDGFRIDAVKHIKYSFTRDWLTHVRNTTGKNMFAVAEFWKNDIGAIENYLSKTNWNHSVFDVPLHYNLYNASRSGGNYDMRQIFNGTVVQRHPTHAVTFVDNHDSQPEEALESFVEEWFKPLAYALTLTRDQGYPSVFYGDYYGIPTHGVPAMKSKIDPILEARQKYAYGKQNDYLDHHNMIGWTREGNTAHPNSGLATIMSDGPGGNKWMYVGRNKAGQVWRDITGNRSGTVTINADGWGNFSVNGGSVSIWVN

SEQ ID NO: 19713 - protein, 484 aa, Synthetic construct
HHNGTNGTMMQYFEWYLPNDGNHWNRLRSDASNLKDKGITAVWIPPAWKGASQNDVGYGAYDLYDLGEFNQKGTVRTKYGTRNQLQAAVTALKSNGIQVYGDVVMNHKGGADATEWVRAVEVNPSNRNQEVSGDYTIEAWTKFDFPGRGNTHSNFKWRWYHFDGVDWDQSRQLQNRIYKFRGDGKGWDWEVDTENGNYDYLMYADIDMDHPEVVNELRNWGVWYTNTLGLDGFRIDAVKHIKYSFTRDWLTHVRNTTGKNMFAVAEFWKNDIGAIENYLSKTNWNHSVFDVPLHYNLYNASRSGGNYDMRQIFNGTVVQRHPTHAVTFVDNHDSQPEEALESFVEEWFKPLAYALTLTRDQGYPSVFYGDYSGIPTHGVPAMKSKIDPILEARQKYAYGKQNDYLDHHNMIGWTREGNTAHPNSGLATIMSDGPGGNKWMYVGRNKAGQVWRDITGNRSGTVTINADGWGNFSVNGGSVSIWVN

SEQ ID NO: 19714 - protein, 484 aa, Synthetic construct
HHNGTNGTMMQYFEWYLPNDGNHWNRLRSDASNLKDKGITAVWIPPAWKGASQNDVGYGAYDLYDLGEFNQKGTVRTKYGTRNQLQAAVTALKSNGIQVYGDVVMNHKGGADATEWVRAVEVNPSNRNQEVSGDYTIEAWTKFDFPGRGNTHSNFKWRWYHFDGVDWDQSRQLQNRIYKFRGDGKGWDWEVDTENGNYDYLMYADIDMDHPEVVNELRNWGVWYTNTLGLDGFRIDAVKHIKYSFTRDWLTHVRNTTGKNMFAVAEFWKNDIGAIENYLSNTNWNHSVFDVPLHYNLYNASRSGGNYDMRQIFNGTVVQRHPTHAVTFVDNHDSQPEEALESFVEEWFKPLAYALTLTRDQGYPSVFYGDYYGIPTHGVPAMKSKIDPILEARQKYAYGKQNDYLDHHNMIGWTREGNTAHPNSGLATIMSDGPGGNKWMYVGRNKAGQVWRDITGNRSGTVTINADGWGNFSVNGGSVSIWVN

SEQ ID NO: 19715 - protein, 484 aa, Synthetic construct
HHNGTNGTMMQYFEWYLPNDGNHWNRLRSDASNLKDKGITAVWIPPAWKGASQNDVGYGAYDLYDLGEFNQKGTVRTKYGTRNQLQAAVTALKSNGIQVYGDVVMNHKGGADATEWVRAVEVNPSNRNQEVSGDYTIEAWTKFDFPGRGNTHSNFKWRWYHFDGVDWDQSRQLQNRIYKFRGDGKGWDWEVDTENGNYDYLMYADIDMDHPEVVNELRNWGVWYTNTLGLDGFRIDAVKHIKYSFTRDWLTHVRNTTGKNMFAVAEFWKNDIGAIENYLSKTNWNHSVFDVPLHYNLYNASRSGGNYDMRGIFNGTVVQRHPTHAVTFVDNHDSQPEEALESFVEEWFKPLAYALTLTRDQGYPSVFYGDYYGIPTHGVPAMKSKIDPILEARQKYAYGKQNDYLDHHNMIGWTREGNTAHPNSGLATIMSDGPGGNKWMYVGRNKAGQVWRDITGNRSGTVTINADGWGNFSVNGGSVSIWVN

SEQ ID NO: 19716 - protein, 484 aa, Synthetic construct
HHNGTNGTMMQYFEWYLPNDGNHWNRLRSDASNLKDKGITAVWIPPAWKGASQNDVGYGAYDLYDLGEFNQKGTVRTKYGTRNQLQAAVTALKSNGIQVYGDVVMNHKGGADATEWVRAVEVNPSNRNQEVSGDYTIEAWTKFDFPGRGNTHSNFKWRWDHFDGVDWDQSRQLQNRIYKFRGDGKGWDWEVDTENGNYDYLMYADIDMDHPEVVNELRNWGVWYTNTLGLDGFRIDAVKHIKYSFTRDWLTHVRNTTGKNMFAVAEFWKNDIGAIENYLSKTNWNHSVFDVPLHYNLYNASRSGGNYDMRQIFNGTVVQRHPTHAVTFVDNHDSQPEEALESFVEEWFKPLAYALTLTRDQGYPSVFYGDYYGIPTHGVPAMKSKIDPILEARQKYAYGKQNDYLDHHNMIGWTREGNTAHPNSGLATIMSDGPGGNKWMYVGRNKAGQVWRDITGNRSGTVTINADGWGNFSVNGGSVSIWVN

SEQ ID NO: 19717 - protein, 484 aa, Synthetic construct
HHNGTNFTMMQYFEWYLPNDGNHWNRLRSDASNLKDKGITAVWIPPAWKGASQNDVGYGAYDLYDLGEFNQKGTVRTKYGTRNQLQAAVTALKSNGIQVYGDVVMNHKGGADATEWVRAVEVNPSNRNQEVSGDYTIEAWTKFDFPGRGNTHSNFKWRWYHFDGVDWDQSRQLQNRIYKFRGDGKGWDWEVDTENGNYDYLMYADIDMDHPEVVNELRNWGVWYTNTLGLDGFRIDAVKHIKYSFTRDWLTHVRNTTGKNMFAVAEFWKNDIGAIENYLSKTNWNHSVFDVPLHYNLYNASRSGGNYDMRQIFNGTVVQRHPTHAVTFVDNHDSQPEEALESFVEEWFKPLAYALTLTRDQGYPSVFYGDYYGIPTHGVPAMKSKIDPILEARQKYAYGKQNDYLDHHNMIGWTREGNTAHPNSGLATIMSDGPGGNKWMYVGRNKAGQVWRDITGNRSGTVTINADGWGNFSVNGGSVSIWVN

SEQ ID NO: 19718 - protein, 484 aa, Synthetic construct
HHNGTNGTMMQYFEWYLPNDGNHWNRLRSDASNLKDKGITAVWIPPAWKGASQNDVGYGAYDLYDLGEFNQKGTVRTKYGTRNQLQAAVTALKSNGIQVYGDVVMNHKGGADATEWVRAVEVNPSNRNQEVSGDYTIEAWTKFDFPGRGNTHSNFKWRWYHFDGVDWDQSRQLQNRIYKFRGDGKGWDWEVDTENGNYDYLMYADIDMDHPEVVNELRNWGVWYTNTLGLDGFRIDAVKHIKYSFTRDWLTHVRNTTGKNMFAVAEFWKNDIGAIENYLSKTNWNHSVFDTPLHYNLYNASRSGGNYDMRQIFNGTVVQRHPTHAVTFVDNHDSQPEEALESFVEEWFKPLAYALTLTRDQGYPSVFYGDYYGIPTHGVPAMKSKIDPILEARQKYAYGKQNDYLDHHNMIGWTREGNTAHPNSGLATIMSDGPGGNKWMYVGRNKAGQVWRDITGNRNGTVTINADGWGNFSVNGGSVSIWVN

SEQ ID NO: 19719 - protein, 484 aa, Synthetic construct
HHNGTNGTMMQYFEWYLPNDGNHWNRLRSDASNLKDKGITAVWIPPAWKGASQNDVGYGAYDLYDLGEFNQKGTVRTKYGTRNQLQAAVTALKSNGIQVYGDVVMNHKGGADATEWVRAVEVNPSNRNQEVSGDYTIEAWTKFDFPGRGNTHSNFKWRWYHFDGVDWDQSRQLQNRIYKFRGDGKGWDWEVDTENGNYDYLMYADIDMDHPEVVNELRNWGVWYTNTLGLDGFRIDAVKHIKYSFTRDWLTHVRNTTGKNMFAVAEFWKNDIGAIENYLSKTNWNHSVFDVPLHYNLYNASRSGGNYDMRQIFNGTVVQRHPTHAVTFVDNHDSQPEEALESFVEEWFKPLAYALTLTRDQGYPSVFYGDYYGIPTHGVPAQKSKIDPILEARQKYAYGKQNDYLDHHNMIGWTREGNTAHPNSGLATIMSDGPGGNKWMYVGRNKAGQVWRDITGNRSGTVTINADGWGNFSVNGGSVSIWVN

SEQ ID NO: 19720 - protein, 484 aa, Synthetic construct
HHNGTNGTMMQYFEWYLPNDGNHWNRLRSDASNLKDKGITAVWIPPAWKGASQNDVGYGAYDLYDLGEFNQKGTVRTKYGTRNQLQAAVTALKSNGIQVYGDVVMNHKGGADATEWVRAVEVNPSNRNQEVSGDYTIEAWTKFDFPGRGNTHSNFKWRWYHFDGVDWDQSRQLQNRIYKFRGDGKGWDWEVDTENGNYDYLMYADIDMDHPEVVNELRNWGVWYTNTLGLDGFRIDAVKHIKYSFTRDWLTHVRNTTGKNMFAVAEFWKNDIGAIENYLSKTNWNHSVFDVPLHYNLYNASRSGGNYDMRQIFNGTVVQRHPTHAVTFVDNHDSQPEEALESFVEEWFKPLAYALCLTRDQGYPSVFYGDYYGIPTHGVPAMKSKIDPILEARQKYAYGKQNDYLDHHNMIGWTREGNTAHPNSGLATIMSDGPGGNKWMYVGRNKAGQVWRDITGNRSGTVTINADGWGNFSVNGGSVSIWVN

SEQ ID NO: 19721 - protein, 484 aa, Synthetic construct
HHNGTNGTMMQYFEWYLPNDGNHWNRLRSDASNLKDKGITAVWIPPAWKGASQNDVGYGAYDLYDLGEFNQKGTVRTKYGTRNQLQAAVTALKSNGIQVYGDVVMNHKGGADATEWVRAVEVNPSNRNQEVSGDYTIEAWTKFDFPGRGNTHSNFKWRWYHFDGVDWDQSRQLQNRWYKFRGDGKGWDWEVDTENGNYDYLMYADIDMDHPEVVNELRNWGVWYTNTLGLDGFRIDAVKHIKYSFTRDWLTHVRNTTGKNMFAVAEFWKNDIGAIENYLSKTNWNHSVFDVPLHYNLYNASRSGGNYDMRQIFNGTVVQRHPTHAVTFVDNHDSQPEEALESFVEEWFKPLAYALTLTRDQGYPSVFYGDYYGIPTHGVPAMKSKIDPILEARQKYAYGKQNDYLDHHNMIGWTREGNTAHPNSGLATIMSDGPGGNKWMYVGRNKAGQVWRDITGNRSGTVTINADGWGNFSVNGGSVSIWVN

SEQ ID NO: 19722 - protein, 484 aa, Synthetic construct
HHNGTNGTMMQYFEWYLPNDGNHWNRLRSDASNLKDKGITAVWIPPAWKGASQNDVGYGAYDLYDLGEFNQKGTVRTKYGTRNQLQAAVTALKSNGIQVYGDVVMNHKGGADATEWVRAVEVNPSNRNQEVSGDYTIEAWTKFDFPGRGNTHSNFKWRWYHFDGVDWDQSRQLQNRIYKFRGDGNGWDWEVDTENGNYDYLMYADIDMDHPEVVNELRNWGVWYTNTLGLDGFRIDAVKHIKYSFTRDWLTHVRNTTGKNMFAVAEFWKNDIGAIENYLSKTNWNHSVFDVPLHYNLYNASRSGGNYDMRQIFNGTVVQRHPTHAVTFVDNHDSQPEEALESFVEEWFKPLAYALTLTRDQGYPSVFYGDYYGIPTHGVPAMKSKIDPILEARQKYAYGKQNDYLDHHNMIGWTREGNTAHPNSGLATIMSDGPGGNKWMYVGRNKAGQVWRDITGNRSGTVTINADGWGNFSVNGGSVSIWVN

SEQ ID NO: 19723 - protein, 484 aa, Synthetic construct
HHNGTNGTMMQYFEWYLPNDGNHWNRLRSDASNLKDKGITAVWIPPAWKGASQNDVGYGAYDLYDLGEFNQKGTVRTKYGTRNQLQAAVTALKSNGIQVYGDVVMNHKGGADATEWVRAVEVNPSNRNQEVSGDYTIEAWTKFDFPGRGNTHSNFKWRWYHFDGVDWDQSRQLQNRIYKFRGDGKGWDWEVDTENGNYDYLMYADIDMDHPEVVNELRNWGVWYTNTLGLDGFRIDAVKHIKYSFTRDWLTHVRNTTGKNMFAVAEFWKNDIGAIENYLSKTNWNHSVFDVPLHYNLYNASRSGGNYDMRQIFNGTVVQRHPTHAVTFVDNHDSQPEEALESFVEEWFKPLAYALTLTRDQGYPSVFYGDYYGIPTHGVPAMKSKIDHILEARQKYAYGKQNDYLDHHNMIGWTREGNTAHPNSGLATIMSDGPGGNKWMYVGRNKAGQVWRDITGNRSGTVTINADGWGNFSVNGGSVSIWVN

SEQ ID NO: 19724 - protein, 484 aa, Synthetic construct
HHNGTNGTMMQYFEWYLPNDGNHWNRLRSDASNLKDKGITAVWIPPAWKGASQNDVGYGAYDLYDLGEFNQKGTVRTKYGTRNQLQAAVTALKSNGIQVYGDVVMNHKGGADATEWVRAVEVNPRNRNQEVSGDYTIEAWTKFDFPGRGNTHSNFKWRWYHFDGVDWDQSRQLQNRIYKFRGDGKGWDWEVDTENGNYDYLMYADIDMDHPEVVNELRNWGVWYTNTLGLDGFRIDAVKHIKYSFTRDWLTHVRNTTGKNMFAVAEFWKNDIGAIENYLSKTNWNHSVFDVPLHYNLYNASRSGGNYDMRQIFNGTVVQRHPTHAVTFVDNHDSQPEEALESFVEEWFKPLAYALTLTRDQGYPSVFYGDYYGIPTHGVPAQKSKIDPILEARQKYAYGKQNDYLDHHNMIGWTREGNTAHPNSGLATIMSDGPGGNKWMYVGRNKAGQVWRDITGNRSGTVTINADGWGNFSVNGGSVSIWVN

SEQ ID NO: 19725 - protein, 484 aa, Synthetic construct
HHNGTNGTMMQYFEWYLPNDGNHWNRLRSDASNLKDKGITAVWIPPAWKGASQNDVGYGAYDLYDLGEFNQKGTVRTKYGTRNQLQAAVTALKSNGIQVYGDVVMNHKGGADATEWVRAVEVNPSNRNQEVSGDYTIEAWTKFDFPGRGNTHSNFKWRWYHFDGVDWDQSRQLQNRIYKFRGDGKGWDWEVDTENGNYDYLMYADIDMDHPEVVNELRNWGVWYTNTLGLDGFRIDAVKHIKYSFTRDWLTHVRNTTGKNMFAVAEFWKNDIGAIENYLSETNWNHSVFDVPLHYNLYNASRSGGNYDMRQIFNGTVVQRHPTHAVTFVDNHDSQPEEALESFVEEWFKPLAYALTLTRDQGYPSVFYGDYYGIPTHGVPAMKSKIDPILEARQKYAYGKQNDYLDHHNMIGWTREGNTAHPNSGLATIMSDGPGGNKWMYVGRNKAGQVWRDITGNRSGTVTINADGWGNFSVNGGSVSIWVN

SEQ ID NO: 19726 - protein, 484 aa, Synthetic construct
HHNGTNGTMMQYFEWYLPNDGNHWNRLRSDASNLKDKGITAVWIPPAWKGASQNDVGYGAYDLYDLGEFNQKGTVRTKYGTRNQLQAAVTALKSNGIQVYGDVVMNHKGGADATEWVRAVEVNPSNRNQEVSGDYTIEAWTKFDFPGRGNTHSNFKWRWYHFDGVDWDQSRQLQNTIYKFRGDGKGWDWEVDTENGNYDYLMYADIDMDHPEVVNELRNWGVWYTNTLGLDGFRIDAVKHIKYSFTRDWLTHVRNTTGKNMFAVAEFWKNDIGAIENYLSKTNWNHSVFDVPLHYNLYNASRSGGNYDMRQIFNGTVVQRHPTHAVTFVDNHDSQPEEALESFVEEWFKPLAYALTLTRDQGYPSVFYGDYYGIPTHGVPAMKSKIDPILEARQKYAYGKQNDYLDHHNMIGWTREGNTAHPNSGLATIMSDGPGGNKWMYVGRNKAGQVWRDITGNRSGTVTINADGWGNFSVNGGSVSIWVN

SEQ ID NO: 19727 - protein, 484 aa, Synthetic construct
HHNGTNGTMMQYFEWYLPNDGNHWNRLRSDASNLKDKGITAVWIPPAWKGASQNDVGYGAYDLYDLGEFNQKGTVRTKYGTRNQLQAAVTALKSNGIQVYGDVVMNHKGGADATEWVRAVEVNPSNRNQEVSGDYTIEAWTKFDFPGRGNTHSNFKWRWYHFDGVDWDQSRQLQNRAYKFRGDGKGWDWEVDTENGNYDYLMYADIDMDHPEVVNELRNWGVWYTNTLGLDGFRIDAVKHIKYSFTRDWLTHVRNTTGKNMFAVAEFWKNDIGAIENYLSKTNWNHSVFDVPLHYNLYNASRSGGNYDMRQIFNGTVVQRHPTHAVTFVDNHDSQPEEALESFVEEWFKPLAYALTLTRDQGYPSVFYGDYYGIPTHGVPAMKSKIDPILEARQKYAYGKQNDYLDHHNMIGWTREGNTAHPNSGLATIMSDGPGGNKWMYVGRNKAGQVWRDITGNRSGTVTINADGWGNFSVNGGSVSIWVN

SEQ ID NO: 19728 - protein, 484 aa, Synthetic construct
HHNGTNGTMMQYFEWYLPNDGNHWNRLRSDASNLKDKGITAVWIPPAWKGASQNDVGYGAYDLYDLGEFNQKGTVRTKYGTRNQLQAAVTALKSNGIQVYGDVVMNHKGGADATEWVRAVEVNPSNRNQEVSGYYTIEAWTKFDFPGRGNTHSNFKWRWYHFDGVDWDQSRQLQNRIYKFRGDGKGWDWEVDTENGNYDYLMYADIDMDHPEVVNELRNWGVWYTNTLGLDGFRIDAVKHIKYSFTRDWLTHVRNTTGKNMFAVAEFWKNDIGAIENYLSKTNWNHSVFDVPLHYNLYNASRSGGNYDMRQIFNGTVVQRHPTHAVTFVDNHDSQPEEALESFVEEWFKPLAYALTLTRDQGYPSVFYGDYYGIPTHGVPAMKSKIEPILEARQKYAYGKQNDYLDHHNMIGWTREGNTAHPNSGLATIMSDGPGGNKWMYVGRNKAGQVWRDITGNRSGTVTINADGWGNFSVNGGSVSIWVN

SEQ ID NO: 19729 - protein, 484 aa, Synthetic construct
HHNGTNGTMMQYFEWYLPNDGNHWNRLRSDASNLKDKGITAVWIPPAWKGASQNDVGYGAYDLYDLGEFNQKGTVRTKYGTRNQLQAAVTALKSNGIQVYGDVVMNHKGGADATEWVRAVEVNPSNRNQEVSGDYTIEAWTKFDFPGRGNTHSNFKWRWYHFDGVDWDQSRQLQNRIYKFRGDGKGWTWEVDTENGNYDYLMYADIDMDHPEVVNELRNWGVWYTNTLGLDGFRIDAVKHIKYSFTRDWLTHVRNTTGKNMFAVAEFWKNDIGAIENYLSKTNWNHSVFDVPLHYNLYNASRSGGNYDMRQIFNGTVVQRHPTHAVTFVDNHDSQPEEALESFVEEWFKPLAYALTLTRDQGYPSVFYGDYYGIPTHGVPAMKSKIDPILEARQKYAYGKQNDYLDHHNMIGWTREGNTAHPNSGLATIMSDGPGGNKWMYVGRNKAGQVWRDITGNRSGTVTINADGWGNFSVNGGSVSIWVN

SEQ ID NO: 19730 - protein, 484 aa, Synthetic construct
HHNGTNGTMMQYFEWYLPNDGNHWNRLRSDASNLKDKGITAVWIPPAWKGASQNDVGYGAYDLYDLGEFNQKGTVRTKYGTRNQLQAAVTALKSNGIQVYGDVVMNHKGGADATEWVRAVEVNPSNRNQEVSGDYTIEAWTKFDFPGRGNTHSNFKWRWYHFDGVDWDQSRQLQNRIYKWRGDGKGWDWEVDTENGNYDYLMYADIDMDHPEVVNELRNWGVWYTNTLGLDGFRIDAVKHIKYSFTRDWLTHVRNTTGKNMFAVAEFWKNDIGAIENYLSKTNWNHSVFDVPLHYNLYNASRSGGNYDMRQIFNGTVVQRHPTHAVTFVDNHDSQPEEALESFVEEWFKPLAYALTLTRDQGYPSVFYGDYYGIPTHGVPAMKSKIDPILEARQKYAYGKQNDYLDHHNMIGWTREGNTAHPNSGLATIMSDGPGGNKWMYVGRNKAGQVWRDITGNRSGTVTINADGWGNFSVNGGSVSIWVN

SEQ ID NO: 19731 - protein, 484 aa, Synthetic construct
HHNGTNGTMMQYFEWYLPNDGNHWNRLRSDASNLKDKGITAVWIPPAWKGASQNDVGYGAYDLYDLGEFNQKGTVRTKYGTRNQLQAAVTALKSNGIQVYGDVVMNHKGGADATEWVRAVEVNPSNRNQEVSGDYTIEAWTKFDFPGRGNTHSNFKWRWYHFDGVDWDQSRQLQNRIYKFRGDGKGWDWEVDTENGNYDYLMYADIDMDHPEVVNELRNWGVWYTNTLGLDGFRIDAVKHIKYSFTRDWLTHVRNTTGKNMFAVAEFWKNDIGAIENYLSKTNWNHSVFDVPLHYNLYNASRSGGNYDMRQIFNGTVVQRHPTHAVTFVDNHDSQPEEALESFVEEWFKPLAYALTLTRDQGYPSVFYGDYYGIPTHGVPAMKSKIDPILKARQKYAYGKQNDYLDHHNMIGWTREGNTAHPNSGLATIMSDGPGGNKWMYVGRNKAGQVWRDITGNRSGTVTINADGWGNFSVNGGSVSIWVN

SEQ ID NO: 19732 - protein, 484 aa, Synthetic construct
HHNGTNGTMMQYFEWYLPNDGNHWNRLRSDASNLKDKGITAVWIPPAWKGASQNDVGYGAYDLYDLGEFNQKGTVRTKYGTRNQLQAAVTALKSNGIQVYGDVVMNHKGGADATEWVRAVEVNPSNRNQEVSGDYTIEAWTKFDFPGRGNTHSNFKWRWYHFDGVDWDQSRQLQNRIYKFRGDGKGWDWEVDTENGNYDYLMYADIDMDHPEVVNELRNWGVWYTNTLGLDGFRIDAVKHIKYSFTRDWLTHVRNTTGKNMFAVAEFWKNDIGAIENYLSKTNWNHSVFDVPLHYNLYNASRSGGNYDMRQIFNGTVVQRHPTHAVTFVDNHDSQPEEALESFVEEWFKPLAYALTLTRDQGYPSVFYGDYYGIPTHGVPAMKSKIDPILEARQKYAYGKQNDYLDHHNMIGWTREGNTAHPNSGLATIMSDGPGGNKWMYVGRNKAGQVWRDITGNRSGTVTIHADGWGNFSVNGGSVSIWVN

SEQ ID NO: 19733 - protein, 484 aa, Synthetic construct
HHNGTNGTMMQYFEWYLPNDGNHWNRLRSDASNLKDKGITAVWIPPAWKGASQNDVGYGAYDLYDLGEFNQKGTVRTKYGTRNQLQAAVTALKSNGIQVYGDVVMNHKGGADATEWVRAVEVNPSNRNQEVSGDYTIEAWTKFDFPGRGNTHSNFKWRWYHFDGVDWDQSRQLQNRIYKFRGDGKGWDWEVDTENGNYDYLMYADIDMDHPEVVNELRNWGVWYTNTLGLDGFRIDAVKHIKYSFTRDWLTHVRNTTGKNMFAVAEFWKNDIGAIENYLSKTNWNHSVFDVPLHYNLYNASRSGGNYDMRQIFNGTVVQRHPTHAVTFVDNHDSQPEEALESFVEEWFKPLAYALTLTRDQGYPSVFYGDYYGIPTHGVPAMKSKIDPILEARQKYAGGKQNDYLDHHNMIGWTREGNTAHPNSGLATIMSDGSGGNKWMYVGRNKAGQVWRDITGNRSGTVTINADGWGNFSVNGGSVSIWVN

SEQ ID NO: 19734 - protein, 484 aa, Synthetic construct
HHNGTNGTMMQYFEWYLPNDGNHWNRLRSDASNLKDKGITAVWIPPAWKGASQNDVGYGAYDLYDLGEFNQKGTVRTKYGTRNQLQAAVTALKSNGIQVYGDVVMNHKGGADATEWVRAVEVNPSNRNQEVSGDYTIEAWTKFDFPGRGNTHSNFKWRWYHFDGVDWDQSRQLQNRIYKFRGDGKGWDWEVDTENGNYDYLMYADIDMDHPEVVNELRNWGVWYTNTLGLDGFRIDAVKHIKYSFTRDWLTHVRNTTGKNMFAVAEFWKNDIGAIENYLSKTNWNQSVFDVPLHYNLYNASRSGGNYDMRQIFNGTVVQRHPTHAVTFVDNHDSQPEEALESFVEEWFKPLAYALTLTRDQGYPSVFYGDYYGIPTHGVPAMKSKIDPILEARQKYAYGKQNDYLDHHNMIGWTREGNTAHPNSGLATIMSDGPGGNKWMYVGRNKAGQVWRDITGNRSGTVTINADGWGNFSVNGGSVSIWVN

SEQ ID NO: 19735 - protein, 484 aa, Synthetic construct
HHNGTNGTMMQYFEWYLPNDGNHWNRLRSDASNLKDKGITAVWIPPAWKGASQNDVGYGAYDLYDLGEFNQKGTVRTKYGTRNQLQAAVTALKSNGIQVYGDVVMNHKGGADATEWVRAVEVNPSNRNQEVSGDYTIEAWTKFDFPGRGNTHSNFKWRWYHFDGVDWDQSRQLQNRIYKFRGDGKGWDWEVDTENGNYDYLMYADIDMDHPEVVNELRNWGVWYTNTLGLDGFRIDAVKHIKYSFTRDWLTHVRNTTGKNMFAVAEFWKNDIGFIENYLSKTNWNHSVFDVPLHYNLYNASRSGGNYDMRQIFNGTVVQRHPTHAVTFVDNHDSQPEEALESFVEEWFKPLAYALTLTRDQGYPSVFYGDYYGIPTHGVPAMKSKIDPILEARQKYAYGKQNDYLDHHNMIGWTREGNTAHPNSGLATIMSDGPGGNKWMYVGRNKAGQVWRDITGNRSGTVTINADGWGNFSVNGGSVSIWVN

SEQ ID NO: 19736 - protein, 484 aa, Synthetic construct
HHNGTNGTMMQYFEWYLPNDGNHWNRLRSDASNLKDKGITAVWIPPAWKGASQNDVGYGAYDLYDLGEFNQKGTVRTKYGTRNQLQAAVTALKSNGIQVYGDVVMNHKGGADATEWVRAVEVNPSNRNQEVSGDYTIEAWTKFDFPGRGNTHSNFKWRWYHFDGVDWDQSRQLQNRIYKFRGDGKGWDWEVDTENGNYDYLMYADIDMDHPEVVNELRNWGVWYTNTLGLDGFRIDAVKHIKYSFTRDWLTHVRNTTGKNMFAVAEFWKNDIGAIENYLSKTNWNHSVFDVPLHYNLYNASRSGGNYDMRQIFNGTVVQRYPTHAVTFVDNHDSQPEEALESFVEEWFKPLAYALTLTRDQGYPSVFYGDYYGIPTHGVPAMKSKIDPILEARQKYAYGKQNDYLDHHNMIGWTREGNTAHPNSGLATIMSDGPGGNKWMYVGRNKAGQVWRDITGNRSGTVTINADGWGNFSVNGGSVSIWVN

SEQ ID NO: 19737 - protein, 484 aa, Synthetic construct
HHNGTNGTMMQYFEWYLPNDGNHWNRLRSDASNLKDKGITAVWIPPAWKGASQNDVGYGAYDLYDLGEFNQKGTVRTKYGTRNQLQAAVTALKSNGIQVYGDVVMNHKGGADATEWVRAVEVNPSNRNQEVSGDYTIEAWTKFDFPGRGNTHSNFKWRWYHFDGVDWDQSRQLQNRIYKFRGDGKGWDWEVDTENGNYDYLMYADIDMDHPEVVNELRNWGVWYTNTLGLDGFRIDAVKHIKYSFTRDWLTHVRNTTGKNMFAVAEFWKNDIGAIEDYLSKTNWNHSVFDVPLHYNLYNASRSGGNYDMRQIFNGTVVQRHPTHAVTFVDNHDSQPEEALESFVEEWFKPLAYALTLTRDQGYPSVFYGDYYGIPTHGVPAMKSKIDPILEARQKYAYGKQNDYLDHHNMIGWTREGNTAHPNSGLATIMSDGPGGNKWMYVGRNKAGQVWRDITGNRSGTVTINADGWGNFSVNGGSVSIWVN

SEQ ID NO: 19738 - protein, 484 aa, Synthetic construct
HHNGTNGTMMQYFEWYLPNDGNHWNRLRSDASNLKDKGITAVWIPPAWKGASQNDVGYGAYDLYDLGEFNQKGTVRTKYGTRNQLQAAVTALKSNGIQVYGDVVMNHKGGADATEWVRAVEVNPSNRNQEVSGDYTIEAWTKFDFPGRGNTHSNFKWRWYHFDGVDWDQSRQLQNRIYKFRGDGKGWDWEVDTENGNYDYLMYADIDMDHPEVVNELRNWGVWYTNTLGLDGFRIDAVKHIKYSFTRDWLTHVRNTTGKNMFAVAEFWKNDIGAIENYLSKTNWNHSVFDVPLHYNLYNASRSGGNYDMRQIFNGTVVQRHPTHAVTFVDNHDSQPEEALESFVEEWFKPLAYALTLTRDQGYPSVFYGDYYGIPTHGVPAMKSKIDPILEARQKCAYGKQNDYLDHHNMIGWTREGNTAHPNSGLATIMSDGPGGNKWMYVGRNKAGQVWRDITGNRSGTVTINADGWGNFSVNGGSVSIWVN

SEQ ID NO: 19739 - protein, 484 aa, Synthetic construct
HHNGTNGTMMQYFEWYLPNDGNHWNRLRSDASNLKDKGITAVWIPPAWKGASQNDVGYGAYDLYDLGEFNQKGTVRTKYGTRNQLQAAVTALKSNGIQVYGDVVMNHKGGADATEWVRAVEVNPSNRNQEVSGDYTIEAWTKFDFPGRGNTHSNFKWRWYHFDGVDWDQSRQLQNRIYKFRGDGKGWDWEVDTENGNYDYLMYADIDMDHPEVVNELRNWGVWYTNTLGLDGFRIDAVKHIKYSFTRDWLTHVRNTTGKNMFAVAEFWKNDIQAIENYLSKTNWNHSVFDVPLHYNLYNASRSGGNYDMRQIFNGTVVQRHPTHAVTFVDNHDSQPEEALESFVEEWFKPLAYALTLTRDQGYPSVFYGDYYGIPTHGVPAMKSKIDPILEARQKYAYGKQNDYLDHHNMIGWTREGNTAHPNSGLATIMSDGPGGNKWMYVGRNKAGQVWRDITGNRSGTVTINADGWGNFSVNGGSVSIWVN

SEQ ID NO: 19740 - protein, 484 aa, Synthetic construct
HHNGTNGTMMQYFEWYLPNDGNHWNRLRSDASNLKDKGITAVWIPPAWKGASQNDVGYGAYDLYDLGEFNQKGTVRTKYGTRNQLQAAVTALKSNGIQVYGDVVMNHKGGADATEWVRAVEVNPSNRNQEVSGDYTIEAWTKFDFPGRGNTHSNFEWRWYHFDGVDWDQSRQLQNRIYKFRGDGKGWDWEVDTENGNYDYLMYADIDMDHPEVVNELRNWGVWYTNTLGLDGFRIDAVKHIKYSFTRDWLTHVRNTTGKNMFAVAEFWKNDIGAIENYLSKTNWNHSVFDVPLHYNLYNASRSGGNYDMRQIFNGTVVQRHPTHAVTFVDNHDSQPEEALESFVEEWFKPLAYALTLTRDQGYPSVFYGDYYGIPTHGVPAMKSKIDPILEARQKYAYGKQNDYLDHHNMIGWTREGNTAHPNSGLATIMSDGPGGNKWMYVGRNKAGQVWRDITGNRSGTVTINADGWGNFSVNGGSVSIWVN

SEQ ID NO: 19741 - protein, 484 aa, Synthetic construct
HHNGTNGTMMQYFEWYLPNDGNHWNRLRSDASNLKDKGITAVWIPPAWKGASQNDVGYGAYDLYDLGEFNQKGTVRTKYGTRNQLQAAVTALKSNGIQVYGDVVMNHKGGADATEWVRAVEVNPSNRNQEVSGDYTIEAWTKFDFPGRGNTHSNFKWRWYHFDGVDWDQSRQLQNRIYKFRGDGKGWDWEVDTENGNYDYLMYADIDMDHPEVVNELRNWGVWYTNTLGLDGFRIDAVKHIKYSFTRDWLTHCRNTTGKNMFAVAEFWKNDIGAIENYLSKTNWNHSVFDVPLHYNLYNASRSGGNYDMRQIFNGTVVQRHPTHAVTFVDNHDSQPEEALESFVEEWFKPLAYALTLTRDQGYPSVFYGDYYGIPTHGVPAMKSKIDPILEARQKYAYGKQNDYLDHHNMIGWTREGNTAHPNSGLATIMSDGPGGNKWMYVGRNKAGQVWRDITGNRSGTVTINADGWGNFSVNGGSVSIWVN

SEQ ID NO: 19742 - protein, 484 aa, Synthetic construct
HHNGTNGTMMQYFEWYLPNDGNHWNRLRSDASNLKDKGITAVWIPPAWKGASQNDVGYGAYDLYDLGEFNQKGTVRTKYGTRNQLQAAVTALKSNGIQVYGDVVMNHKGGADATEWVRAVEVNPSNRNQEVSGDYTIEAWTKFDFPGRGNTHSNFKWRWYHFDGVDWDQSRQLQNRIYKFRGDGKGWDWEVDTENGNYDYLMYADIDMDHPEVVNELRNWGVWYTNTLGLDGFRIDAVKHIKDSFTRDWLTHVRNTTGKNMFAVAEFWKNDIGAIENYLSKTNWNHSVFDVPLHYNLYNASRSGGNYDMRQIFNGTVVQRHPTHAVTFVDNHDSQPEEALESFVEEWFKPLAYALTLTRDQGYPSVFYGDYYGIPTHGVPAMKSKIDPILEARQKYAYGKQNDYLDHHNMIGWTREGNTAHPNSGLATIMSDGPGGNKWMYVGRNKAGQVWRDITGNRSGTVTINADGWGNFSVNGGSVSIWVN

SEQ ID NO: 19743 - protein, 484 aa, Synthetic construct
HHNGTNGTMMQYFEWYLPNDGNHWNRLRSDASNLKDKGITAVWIPPAWKGASQNDVGYGAYDLYDLGEFNQKNTVRTKYGTRNQLQAAVTALKSNGIQVYGDVVMNHKGGADATEWVRAVEVNPSNRNQEVSGDYTIEAWTKFDFPGRGNTHSNFKWRWYHFDGVDWDQSRQLQNRIYKFRGDGKGWDWEVDTENGNYDYLMYADIDMDHPEVVNELRNWGVWYTNTLGLDGFRIDAVKHIKYSFTRDWLTHVRNTTGKNMFAVAEFWKNDIGAIENYLSKTNWNHSVFDVPLHYNLYNASRSGGNYDMRQIFNGTVVQRHPTHAVTFVDNHDSQPEEALESFVEEWFKPLAYALTLTRDQGYPSVFYGDYYGIPTHGVPAMKSKIDPILEARQKYAYGKQNDYLDHHNMIGWTREGNTAHPNSGLATIMSDGPGGNKWMYVGRNKAGQVWRDITGNRSGTVTINADGWGNFSVNGGSVSIWVN

SEQ ID NO: 19744 - protein, 484 aa, Synthetic construct
HHNGTNGTMMQYFEWYLPNDGNHWNRLRSDASNLKDKGITAVWIPPAWKGASQNDVGYGAYDLYDLGEFNQKGTVRTKYGTRNQLQAAVTALKSNGIQVYGDVVMNHKGGADATEWVRAVEVNPSNRNQEVSGDYTIEAWTKFDFPGRGNTHSNFKWRWYHFDGVDWDQSRQLQNRIYKFRGDGKGWDWEVDTENGNYDYLMYADIDMDHPEVVNELRNWGVWFTNTLGLDGFRIDAVKHIKYSFTRDWLTHVRNTTGKNMFAVAEFWKNDIGAIENYLSKTNWNHSVFDVPLHYNLYNASRSGGNYDMRQIFNGTVVQRHPTHAVTFVDNHDSQPEEALESFVEEWFKPLAYALTLTRDQGYPSVFYGDYYGIPTHGVPAMKSKIDPILEARQKYAYGKQNDYLDHHNMIGWTREGNTAHPNSGLATIMSDGPGGNKWMYVGRNKAGQVWRDITGNRSGTVTINADGWGNFSVNGGSVSIWVN

SEQ ID NO: 19745 - protein, 484 aa, Synthetic construct
HHNGTNGTMMQYFEWYLPNDGNHWNRLRSDASNLKDKGITAVWIPPAWKGASQNDVGYGAYDLYDLGEFNQKGTVRTKYGTRNQLQAAVTALKSNGIQVYGDVVMNHKGGADATEWVRAMEVNPSNRNQEVSGDYTIEAWTKFDFPGRGNTHSNFKWRWYHFDGVDWDQSRQLQNRIYKFRGDGKGWDWEVDTENGNYDYLMYADIDMDHPEVVNELRNWGVWYTNTLGLDGFRIDAVKHIKYSFTRDWLTHVRNTTGKNMFAVAEFWKNDIGAIENYLSKTNWNHSVFDVPLHYNLYNASRSGGNYDMRQIFNGTVVQRHPTHAVTFVDNHDSQPEEALESFVEEWFKPLAYALTLTRDQGYPSVFYGDYYGIPTHGVPAMKSKIDPILEARQKYAYGKQNDYLDHHNMIGWTREGNTAHPNSGLATIMSDGPGGNKWMYVGRNKAGQVWRDITGNRSGTVTINADGWGNFSVNGGSVSIWVN

SEQ ID NO: 19746 - protein, 484 aa, Synthetic construct
HHNGTNGTMMQYFEWYLPNDGNHWNRLRSDASNLKDKGITAVWIPPAWKGASQNDVGYGAYDLYDLGEFNQKGTVRTKYGTRNQLQAAVTALKSNQIQVYGDVVMNHKGGADATEWVRAVEVNPSNRNQEVSGDYTIEAWTKFDFPGRGNTHSNFKWRWYHFDGVDWDQSRQLQNRIYKFRGDGKGWDWEVDTENGNYDYLMYADIDMDHPEVVNELRNWGVWYTNTLGLDGFRIDAVKHIKYSFTRDWLTHVRNTTGKNMFAVAEFWKNDIGAIENYLSKTNWNHSVFDVPLHYNLYNASRSGGNYDMRQIFNGTVVQRHPTHAVTFVDNHDSQPEEALESFVEEWFKPLAYALTLTRDQGYPSVFYGDYYGIPTHGVPAMKSKIDPILEARQKYAYGKQNDYLDHHNMIGWTREGNTAHPNSGLATIMSDGPGGNKWMYVGRNKAGQVWRDITGNRSGTVTINADGWGNFSVNGGSVSIWVN

SEQ ID NO: 19747 - protein, 484 aa, Synthetic construct
HHNGTNGTMMQYFEWYLPNDGNHWNRLRSDASNLKDLGITAVWIPPAWKGASQNDVGYGAYDLYDLGEFNQKGTVRTKYGTRNQLQAAVTALKSNGIQVYGDVVMNHKGGADATEWVRAVEVNPSNRNQEVSGDYTIEAWTKFDFPGRGNTHSNFKWRWYHFDGVDWDQSRQLQNRIYKFRGDGKGWDWEVDTENGNYDYLMYADIDMDHPEVVNELRNWGVWYTNTLGLDGFRIDAVKHIKYSFTRDWLTHVRNTTGKNMFAVAEFWKNDIGAIENYLSKTNWNHSVFDVPLHYNLYNASRSGGNYDMRQIFNGTVVQRHPTHAVTFVDNHDSQPEEALESFVEEWFKPLAYALTLTRDQGYPSVFYGDYYGIPTHGVPAMKSKIDPILEARQKYAYGKQNDYLDHHNMIGWTREGNTAHPNSGLATIMSDGPGGNKWMYVGRNKAGQVWRDITGNRSGTVTINADGWGNFSVNGGSVSIWVN

SEQ ID NO: 19748 - protein, 484 aa, Synthetic construct
HHNGTNGTMMQYFEWYLPNDGNHWNRLRSDASNLKDKGITAVWIPPAWKGASQNDVGYGAYDLYDLGEFNQKGTVRTKYGTRNQLQAAVTALKSNGIQVYGDVVMNHKGGADATEWVRAVEVNPSNRNQEVSGDDTIEAWTKFDFPGRGNTHSNFKWRWYHFDGVDWDQSRQLQNRIYKFRGDGKGWDWEVDTENGNYDYLMYADIDMDHPEVVNELRNWGVWYTNTLGLDGFRIDAVKHIKYSFTRDWLTHVRNTTGKNMFAVAEFWKNDIGAIENYLSKTNWNHSVFDVPLHYNLYNASRSGGNYDMRQIFNGTVVQRHPTHAVTFVDNHDSQPEEALESFVEEWFKPLAYALTLTRDQGYPSVFYGDYYGIPTHGVPAMKSKIDPILEARQKYAYGKQNDYLDHHNMIGWTREGNTAHPNSGLATIMSDGPGGNKWMYVGRNKAGQVWRDITGNRSGTVTINADGWGNFSVNGGSVSIWVN

SEQ ID NO: 19749 - protein, 484 aa, Synthetic construct
HHNGTNGTMMQYFEWYLPNDGNHWNRLRSDASNLKDKGITAVWIPPAWKGASQNDVGYGAYDLYDLGEFNQKGTVRTKYGTRNQLQAAVTALKSNGIQVYGDVVMNHKGGADATEWVRAVEVNPSNRNQEVSGDYTIEAWTKFDFPGRGNTHSNFKWRWYHFDGVDWDQSRQLQNRIYKFRGDGKGWDWEVDTENGNYDYLMYADIDMDHPEVVNELRNWGVWYTNTLGLDGFRIDAAKHIKYSFTRDWLTHVRNTTGKNMFAVAEFWKNDIGAIENYLSKTNWNHSVFDVPLHYNLYNASRSGGNYDMRQIFNGTVVQRHPTHAVTFVDNHDSQPEEALESFVEEWFKPLAYALTLTRDQGYPSVFYGDYYGIPTHGVPAMKSKIDPILEARQKYAYGKQNDYLDHHNMIGWTREGNTAHPNSGLATIMSDGPGGNKWMYVGRNKAGQVWRDITGNRSGTVTINADGWGNFSVNGGSVSIWVN

SEQ ID NO: 19750 - protein, 484 aa, Synthetic construct
HHNGTNGTMMQYFEWYLPNDGNHWNRLRSDASNLKDKGITAVWIPPAWKGASQNDVGYGAYDLYDLGEFNQKGTVRTKYGTRNQLQAAVTALKSNGIQVYGDVVMNHKGGADATEWVRAVEVNPSNRNQEVSGDYTIEAWTKFDFPGRGNTHSNFKWRWYHFDGVDWDQSRQLQNRIYKFRGDGKGWDWEVDTENGNYDYLMYADIDMDHPEVVNELRNWGVWYTNTLGLDGFRIDAVKHIKYSFTRDWLTHVRNTTGKNMFAVAEFWKNDIGAIENYLSKTNWNHSVFDVPLHYNLYNASRSGGNYDMRQIFNGTVVQRHPTHAVTFVDNHDSQPEEALESFVEEWFKPLAYALTLTRDQGHPSVFYGDYYGIPTHGVPAMKSKIDPILEARQKYAYGKQNDYLDHHNMIGWTREGNTAHPNSGLATIMSDGPGGNKWMYVGRNKAGQVWRDITGNRSGTVTINADGWGNFSVNGGSVSIWVN

SEQ ID NO: 19751 - protein, 484 aa, Synthetic construct
HHNGTNGTMMQYFEWYLPNDGNHWNRLRSDASNLKDKGITAVWIPPAWKGASQNDVGYGAYDLYDLGEFNQKGTVRTKYGTRNQLQAAVTALKSNGIQVYGDVVMNHKGGADATEWVRAVEVNPSNRNQEVSGDPTIEAWTKFDFPGRGNTHSNFKWRWYHFDGVDWDQSRQLQNRIYKFRGDGKGWDWEVDTENGNYDYLMYADIDMDHPEVVNELRNWGVWYTNTLGLDGFRIDAVKHIKYSFTRDWLTHVRNTTGKNMFAVAEFWKNDIGAIENYLSKTNWNHSVFDVPLHYNLYNASRSGGNYDMRQIFNGTVVQRHPTHAVTFVDNHDSQPEEALESFVEEWFKPLAYALTLTRDQGYPSVFYGDYYGIPTHGVPAMKSKIDPILEARQKYAYGKQNDYLDHHNMIGWTREGNTAHPNSGLATIMSDGPGGNKWMYVGRNKAGQVWRDITGNRSGTVTINADGWGNFSVNGGSVSIWVN

SEQ ID NO: 19752 - protein, 484 aa, Synthetic construct
HHNGTNGTMMQYFEWYLPNDGNHWNRLRSDASNLKDKGITAVWIPPAWKGASQNDVGYGAYDLYDLGEFNQKGTVRTKYGTRNQLQAAVTALKSNGIQVYGDVVMNHKGGADATEWVRAVEVNPSNRNQEVSGDYTIEAWTKFDFPGRGNTHSNFKWRWYHFDGVDWDQSRQLQNRIYKFRGDGKGWDWEVDTENGNYDYLMYADIDMDHPEVVNELRNWGVWYTNTLGLDGFRIDAVKHIKYSFTRDWLTHVRNTTGKNMFAVAEFWKNDIGAIENYLSKTNWNHSVFDVPLHYNLYNASRSGGNYDMRQIFNGTVVQRHPGHAVTFVDNHDSQPEEALESFVEEWFKPLAYALTLTRDQGYTSVFYGDYYGIPTHGVPAMKSKIDPILEARQKYAYGKQNDYLDHHNMIGWTREGNTAHPNSGLATIMSDGPGGNKWMYVGRNKAGQVWRDITGNRSGTVTINADGWGNFSVNGGSVSIWVN

SEQ ID NO: 19753 - protein, 484 aa, Synthetic construct
HHNGTNGTMMQYFEWYLPNDGNHWNRLRSDASNLKDKGITAVWIPPAWKGASQNDVGYGAYDLYDLGEFNQKGTVRTKYGTRNQLQAAVTALKSNGIQVYGDVVMNHKGGADATEWVRAVEVNPSNRNQEVSGDYTIEAWTKFDFPGRGNTHSNFKWRWYHFDGVDWDQSRQLQNRIYKFRGDGKGWDWEVDTENGNYDYLMYADIDMDHPEVVNELRNWGVWYTNTLGLDGFRIDAVKHIKYSFTRDWLTHVRNTTQKNMFAVAEFWKNDIGAIENYLSKTNWNHSVFDVPLHYNLYNASRSGGNYDMRQIFNGTVVQRHPTHAVTFVDNHDSQPEEALESFVEEWFKPLAYALTLTRDQGYPSVFYGDYYGIPTHGVPAMKSKIDPILEARQKYAYGKQNDYLDHHNMIGWTREGNTAHPNSGLATIMSDGPGGNKWMYVGRNKAGQVWRDITGNRSGTVTINADGWGNFSVNGGSVSIWVN

SEQ ID NO: 19754 - protein, 484 aa, Synthetic construct
HHNGTNWTMMQYFEWYLPNDGNHWNRLRSDASNLKDKGITAVWIPPAWKGASQNDVGYGAYDLYDLGEFNQKGTVRTKYGTRNQLQAAVTALKSNGIQVYGDVVMNHKGGADATEWVRAVEVNPSNRNQEVSGDYTIEAWTKFDFPGRGNTHSNFKWRWYHFDGVDWDQSRQLQNRIYKFRGDGKGWDWEVDTENGNYDYLMYADIDMDHPEVVNELRNWGVWYTNTLGLDGFRIDAVKHIKYSFTRDWLTHVRNTTGKNMFAVAEFWKNDIGAIENYLSKTNWNHSVFDVPLHYNLYNASRSGGNYDMRQIFNGTVVQRHPTHAVTFVDNHDSQPEEALESFVEEWFKPLAYALTLTRDQGYPSVFYGDYYGIPTHGVPAMKSKIDPILEARQKYAYGKQNDYLDHHNMIGWTREGNTAHPNSGLATIMSDGPGGNKWMYVGRNKAGQVWRDITGNRSGTVTINADGWGNFSVNGGSVSIWVN

SEQ ID NO: 19755 - protein, 484 aa, Synthetic construct
HHNGTNGTMMQYFEWYLPNDGNHWNRLRSDASNLKDKGITAVWIPPAWKGASQNDVGYGAYDLYDLGEFNQKGTVRTKYGTRNQLQAAVTALKSAGIQVYGDVVMNHKGGADATEWVRAVEVNPSNRNQEVSGDYTIEAWTKFDFPGRGNTHSNFKWRWYHFDGVDWDQSRQLQNRIYKFRGDGKGWDWEVDTENGNYDYLMYADIDMDHPEVVNELRNWGVWYTNTLGLDGFRIDAVKHIKYSFTRDWLTHVRNTTGKNMFAVAEFWKNDIGAIENYLSKTNWNHSVFDVPLHYNLYNASRSGGNYDMRQIFNGTVVQRHPTHAVTFVDNHDSQPEEALESFVEEWFKPLAYALTLTRDQGYPSVFYGDYYGIPTHGVPAMKSKIDPILEARQKYAYGKQNDYLDHHNMIGWTREGNTAHPNSGLATIMSDGPGGNKWMYVGRNKAGQVWRDITGNRSGTVTINADGWGNFSVNGGSVSIWVN

SEQ ID NO: 19756 - protein, 484 aa, Synthetic construct
HHNGTNGTMMQYFEWYLPNDGNHWNRLRSDASNLKDKGITAVWIPPAWKGASQNDVGYGAYDLYDLGEFNQKGTVRTKYGTRNQLQAAVTALKSNGIQVYGDVVMNHKGGADATEWVRAVEVNPSNRNQEVSGDYTIEAWTKFDFPGRGNTHSNFKWRWYHFDGVDWDQSRQLQNRIYKFRGDGKGWDWEVDTENGNYDYLMYADIDMDHPEVVNELRNWGVWYTNTLGLDGFRIDAVKHIKYSFTRDWLTHVRNTTGKNMFAVAEFWKNDIGAIENYLSKVNWNHSVFDVPLHYNLYNASRSGGNYDMRQIFNGTVVQRHPTHAVTFVDNHDSQPEEALESFVEEWFKPLAYALTLTRDQGYPSVFYGDYYGIPTHGVPAMKSKIDPILEARQKYAYGKQNDYLDHHNMIGWTREGNTAHPNSGLATIMSDGPGGNKWMYVGRNKAGQVWRDITGNRSGTVTINADGWGNFSVNGGSVSIWVN

SEQ ID NO: 19757 - protein, 484 aa, Synthetic construct
HHNGTNGTMMQYFEWYLPNDGNHWNRLRSDASNLKDKGITAVWIPPAWKGASQNDVGYGAYDLYDLGEFNQKGTVRTKYGTRNQLQAAVTALKSNGIQVYGDVVMNHKGGADATEWVRAVEVNPSNRNQEVSGDYTIEAWTKFDFPGRGNTHSNFKWRWYHFDGVDWDQSRQLQNRIYKFRGDGKGWDWEVDTENGNYDYLMYADIDMDHPEVVNELRNWGVWYTNTLGLDGFRIDAVKHIKYSFTRDWLTHVRNTTGKNMFAVAEFWKNDIGAIENYLSKTNWNHSVFDVPLHYNLYNASRSGGNYDMRQIFNGTVVQRHPTHAVTFVDNHDSQPEEALESFVEEWFKPLAYALTLTRDQGYPSVFYGDYTGIPTHGVPAMKSKIDPILEARQKYAYGKQNDYLDHHNMIGWTREGNTAHPNSGLATIMSDGPGGNKWMYVGRNKAGQVWRDITGNRSGTVTINADGWGNFSVNGGSVSIWVN

SEQ ID NO: 19758 - protein, 484 aa, Synthetic construct
HHNGTNGTMMQYFEWYLPNDGNHWNRLRSDASNLKDKGITAVWIPPAWKGASQNDVGYGAYDLYDLGEFNQKGTVRTKYGTRNQLQAAVTALKSNGIQVYGDVVMNHKGGADATEWVRAVEVNPSNRNQEVSGDYTIEAWTKFDFPGRGNTHSNFKWRWYHFDGVDWDQSRQLQNRIYKFRGDGKGMDWEVDTENGNYDYLMYADIDMDHPEVVNELRNWGVWYTNTLGLDGFRIDAVKHIKYSFTRDWLTHVRNTTGKNMFAVAEFWKNDIGAIENYLSKTNWNHSVFDVPLHYNLYNASRSGGNYDMRQIFNGTVVQRHPTHAVTFVDNHDSQPEEALESFVEEWFKPLAYALTLTRDQGYPSVFYGDYYGIPTHGVPAMKSKIDPILEARQKYAYGKQNDYLDHHNMIGWTREGNTAHPNSGLATIMSDGPGGNKWMYVGRNKAGQVWRDITGNRSGTVTINADGWGNFSVNGGSVSIWVN

SEQ ID NO: 19759 - protein, 484 aa, Synthetic construct
HHNGTNGTMMQYFEWYLPNDGNHWNRLRSDASNLKDKGITAVWIPPAWKGASQNDVGYGAYDLYDLGEFNQKGTVRTKYGTRNQLQAAVTALKSNGIQVYGDVVMNHKGGADATEWVRAVEVNPSNRNQEVSGDYTIEAWTKFDFPGRGNTHSNFKWRWYHFDGVDWDQSRQLQNRIYKMRGDGKGWDWEVDTENGNYDYLMYADIDMDHPEVVNELRNWGVWYTNTLGLDGFRIDAVKHIKYSFTRDWLTHVRNTTGKNMFAVAEFWKNDIGAIENYLSKTNWNHSVFDVPLHYNLYNASRSGGNYDMRQIFNGTVVQRHPTHAVTFVDNHDSQPEEALESFVEEWFKPLAYALTLTRDQGYPSVFYGDYYGIPTHGVPAMKSKIDPILEARQKYAYGKQNDYLDHHNMIGWTREGNTAHPNSGLATIMSDGPGGNKWMYVGRNKAGQVWRDITGNRSGTVTINADGWGNFSVNGGSVSIWVN

SEQ ID NO: 19760 - protein, 484 aa, Synthetic construct
HHNGTNGTMMQYFEWYLPNDGNHWNRLRSDASNLKDKGITAVWIPPAWKGASQNDVGYGAYDLYDLGEFNQKGTVRTKYGTRNQLQAAVTALKENGIQVYGDVVMNHKGGADATEWVRAVEVNPSNRNQEVSGDYTIEAWTKFDFPGRGNTHSNFKWRWYHFDGVDWDQSRQLQNRIYKFRGDGKGWDWEVDTENGNYDYLMYADIDMDHPEVVNELRNWGVWYTNTLGLDGFRIDAVKHIKYSFTRDWLTHVRNTTGKNMFAVAEFWKNDIGAIENYLSKTNWNHSVFDVPLHYNLYNASRSGGNYDMRQIFNGTVVQRHPTHAVTFVDNHDSQPEEALESFVEEWFKPLAYALTLTRDQGYPSVFYGDYYGIPTHGVPAMKSKIDPILEARQKYAYGKQNDYLDHHNMIGWTREGNTAHPNSGLATIMSDGPGGNKWMYVGRNKAGQVWRDITGNRSGTVTINADGWGNFSVNGGSVSIWVN

SEQ ID NO: 19761 - protein, 484 aa, Synthetic construct
HHNGTNGTMMQYFEWYLPNDGNHWNRLRSDASNLKDKGITAVWIPPAWKGASQNDVGYGAYDLYDLGEFNQKGTVRTKYGTRNQLQAAVTALKSNGIQVYGDVVMNHKGGADATEWVRAVEVNPSNRNQEVSGDYTIEAWTKFDFPGRGNTHSNFKWRWYHFDGVDWDQSRQLQNRIYKFRGDGKGWDWEVDTENGNYDYLMYADIDMDHPEVVNELRNWGVWYTNTLGLDGFRIDAVKHIKYSFTRDWLTHVRNTTGKNMFAVAEFWKNDIGAIENYLSKTNWNHSVFDVPLHYNLYNASRSGGNYDMRQIFNGTVVQRHPTHAVTFVDNHDSQPEEALESFVEEWFKPLAYALTLTRDQGYPSVFYGDYCGIPTHGVPAMKSKIDPILEARQKYAYGKQNDYLDHHNMIGWTREGNTAHPNSGLATIMSDGPGGNKWMYVGRNKAGQVWRDITGNRSGTVTINADGWGNFSVNGGSVSIWVN

SEQ ID NO: 19762 - protein, 484 aa, Synthetic construct
HHNGTNGTMMQYFEWYLPNDGNHWNRLRSDASNLKDKGITAVWIPPAWKGASQNDVGYGAYDLYDLGEFNQKGTVRTKYGTRNQLQAAVTALKSNGIQVYGDVVMNHKGGADATEWVRAVEVNPSNRNQEVSGDYTIEAWTKFDFPGRGNTHSNFKWRWYHFDGVDWDQSRQLQNRIYKFRGDGKGWDWEVDTENGNYDYLMYADIDMDHPEVVNELRNWGVWYTNTLGLDGFRIDAVKHIKYSFTRDWLTHVRNTTGKNMFAVAEFWKNDIGAIENYLSKTNWNHSVFDVPLHYNLYNASRSGGNYDMRQIFNGTVVQRHPTHAVTFVDNHDSQPEEALESFVEEWFKPLCYALTLTRDQGYPSVFYGDYYGIPTHGVPAMKSKIDPILEARQKYAYGKQNDYLDHHNMIGWTREGNTAHPNSGLATIMSDGPGGNKWMYVGRNKAGQVWRDITGNRSGTVTINADGWGNFSVNGGSVSIWVN

SEQ ID NO: 19763 - protein, 484 aa, Synthetic construct
HHNGTNGTMMQYFEWYLPNDGNHWNRLRSDASNLKDKGITAVWIPPAWKGASQNDVGYGAYDLYDLGEFNQKGTVRTKYGTRNQLQAAVTALKSNGIQVYGDVVMNHKGGADATEWVRAVEVNPSNRNQEVSGDYTIEAWTKFDFPGRGNTHSNFKWRWYHFDGVDWDQSRQLQNRIYKFRGDGKGWDWEVDTENGNYDYLMYADIDMDHPEVVNELRNWGVWYTNTLGLDGFRIDAVKHIKYSFTRDWLTHVRNTTGKNMFAVAEFWKNDIGAIENYLSKTNWNHSVFDVPLHYNLYNASRSGGNYDMRQIFNGTVVQRHPTHAVTFVDNHDSQPEEALESFVEEWFKPLAYALLLTRDQGYPSVFYGDYYGIPTHGVPAMKSKIDPILEARQKYAYGKQNDYLDHHNMIGWTREGNTAHPNSGLATIMSDGPGGNKWMYVGRNKAGQVWRDITGNRSGTVTINADGWGNFSVNGGSVSIWVN

SEQ ID NO: 19764 - protein, 484 aa, Synthetic construct
HHNGTNGTMMQYFEWYLPNDGNHWNRLRSDASNLKDKGITAVWIPPAWKGASQNDVGYGAYDLYDLGEFNQKGTVRTKYGTRNQLQAAVTALKSNGIQVYGDVVMNHKGGADATEWVRAVEVNPSNRNQEVSGDYTIEAWTKFDFPGRGNTHSNFKWRWYHFDGVDWDQSRQLQNRIYKFRGDGKGWDWEVDEENGNYDYLMYADIDMDHPEVVNELRNWGVWYTNTLGLDGFRIDAVKHIKYSFTRDWLTHVRNTTGKNMFAVAEFWKNDIGAIENYLSKTNWNHSVFDVPLHYNLYNASRSGGNYDMRQIFNGTVVQRHPTHAVTFVDNHDSQPEEALESFVEEWFKPLAYALTLTRDQGYPSVFYGDYYGIPTHGVPAMKSKIDPILEARQKYAYGKQNDYLDHHNMIGWTREGNTAHPNSGLATIMSDGPGGNKWMYVGRNKAGQVWRDITGNRSGTVTINADGWGNFSVNGGSVSIWVN

SEQ ID NO: 19765 - protein, 484 aa, Synthetic construct
HHNGTNGTMMQYFEWYLPNDGNHWNRLRSDASNLKDKGITAVWIPPAWKGASQNDVGYGAYDLYDLGEFNQKGTVRTKYGTRNQLQAAVTALKSNGIQVYGDVVMNHKGGADATEWVRAVEVNPSNRNQEVSGDYTIEAWTKFDFPGRGNTHSNFKWRWYHFDGVDWDQSRQLQNRIYKFRGDGKEWDWEVDTENGNYDYLMYADIDMDHPEVVNELRNWGVWYTNTLGLDGFRIDAVKHIKYSFTRDWLEHVRNTTGKNMFAVAEFWKNDIGAIENYLSKTNWNHSVFDVPLHYNLYNASRSGGNYDMRQIFNGTVVQRHPTHAVTFVDNHDSQPEEALESFVEEWFKPLAYALTLTRDQGYPSVFYGDYYGIPTHGVPAMKSKIDPILEARQKYAYGKQNDYLDHHNMIGWTREGNTAHPNSGLATIMSDGPGGNKWMYVGRNKAGQVWRDITGNRSGTVTINADGWGNFSVNGGSVSIWVN

SEQ ID NO: 19766 - protein, 484 aa, Synthetic construct
HHNGTNGTMMQYFEWYLPNDGNHWNRLRSDASNLKDKGITAVWIPPAWKGASQNDVGYGAYDLYDLGEFNQKGTVRTKYGTRNQLQAAVTALKSNGIQVYGDVVMNHKGGADATEWVRAVEVNPSNRNQEVSGYYTIEAWTKFDFPGRGNTHSNFKWRWYHFDGVDWDQSRQLQNRIYKFRGDGKGWDWEVDTENGNYDYLMYADIDMDHPEVVNELRNWGVWYTNTLGLDGFRIDAVKHIKYSFTRDWLTHVRNTTGKNMFAVAEFWKNDIGAIENYLSKTNWNHSVFDVPLHYNLYNASRSGGNYDMRQIFNGTVVQRHPTHAVTFVDNHDSQPEEALESFVEEWFKPLAYALTLTRDQGYPSVFYGDYYGIPTHGVPAMKSKIDPILEAQQKYAYGKQNDYLDHHNMIGWTREGNTAHPNSGLATIMSDGPGGNKWMYVGRNKAGQVWRDITGNRSGTVTINADGWGNFSVNGGSVSIWVN

SEQ ID NO: 19767 - protein, 484 aa, Synthetic construct
HHNGTNGTMMQYFEWYLPNDGNHWNRLRSDASNLKDKGITAVWIPPAWKGASQNDVGYGAYDLYDLGEFNQKGTVRTKYGTRNQLQAAVTALKSNGIQVYGDVVMNHKGGADATEWVRAVEVNPSNRNQEVSGDYTIEAWTKFDFPGRGNTHSNFKWRWYHFDGVDWDQSRQLQNRIYKFRGDGKGWDWEVDTENGNYDYLMYADIDMDHPEVVNELRNWGVWYTNTLGLDGFRIDAVKHIKYSFTRDWLTHVRNTTGKNMFAVAEFWKNDIGAIETYLSKTNWNHSVFDVPLHYNLYNASRSGGNYDMRQIFNGTVVQRHPTHAVTFVDNHDSQPEEALESFVEEWFKPLAYALTLTRDQGYPSVFYGDYYGIPTHGVPAMKSKIDPILEARQKYAYGKQNDYLDHHNMIGWTREGNTAHPNSGLATIMSDGPGGNKWMYVGRNKAGQVWRDITGNRSGTVTINADGWGNFSVNGGSVSIWVN

SEQ ID NO: 19768 - protein, 484 aa, Synthetic construct
HHNGTNGTMMQYFEWYLPNDGNHWNRLRSDASNLKDKGITAVWIPPAWKGASQNDVGYGAYDLYDLGEFNQKGTVRTKYGTRNQLQAAVTALKSNGIQVYGDVVMNHKGGADATEWVRAVEVNPSNRNQEVSGDYTIEAWTKFDFPGRGNTHSNFKWRWYHFDGVDWDQSRQLQNRIYKFRGDGKGWDWEVDTENGNYDYLMYADIDMDHPEVVNELRNWGVWYTNTLGLDGFRIDAVKHIKYSFTRDWLTHVRNTTGKNMFAVAEFWKNDIGAIENYLSSTNWNHSVFDVPLHYNLYNASRSGGNYDMRQIFNGTVVQRHPTHAVTFVDNHDSQPEEALESFVEEWFKPLAYALTLTRDQGYPSVFYGDYYGIPTHGVPAMKSKIDPILEARQKYAYGKQNDYLDHHNMIGWTREGNTAHPNSGLATIMSDGPGGNKWMYVGRNKAGQVWRDITGNRSGTVTINADGWGNFSVNGGSVSIWVN

SEQ ID NO: 19769 - protein, 484 aa, Synthetic construct
HHNGTNGTMMQYFEWYLPNDGNHWNRLRSDASNLKDKGITAVWIPPAWKGASQNDVGYGAYDLYDLGEFNQKGTVRTKYGTRNQLQAAVTALKSNGIQVYGDVVMNHKGGADATEWVRAVEVNPSNRNQEVSGDYTIEAWTKFDFPGRGNTHSNFKWRWYHFDGVDWDQSRQLQNRIYKFRGDGKGWDWEVDTENGNYDYLMYADIDMDHPEVVNELRNWGVWYTNTLGLDGFRIDAVKHIKYSFTRDWLTHVRNTTGKNMFAVAEFWKNDIGAIENYLSKTNWNHSVFDVPLHYNLYNASRSGGNYDMRQIFNGTVVQRHPTHAVTFVDNHDSQPEEALESFVEEWFKPLAYALTLTRDQCYPSVFYGDYYGIPTHGVPAMKSKIDPILEARQKYAYGKQNDYLDHHNMIGWTREGNTAHPNSGLATIMSDGPGGNKWMYVGRNKAGQVWRDITGNRSGTVTINADGWGNFSVNGGSVSIWVN

SEQ ID NO: 19770 - protein, 484 aa, Synthetic construct
HHNGTNGTMMQYFEWYLPNDGNHWNRLRSDASNLKDKGITAVWIPPAWKGASQNDVGYGAYDLYDLGEFNQKGTVRTKYGTRNQLQAAVTALKSNGIQVYGDVVMNHKGGADATEWVRAVEVNPSNRNQEVSGDYTIEAWTKFDFPGRGNTHSNFKWRWYHFDGVDWDQSRQLQNRIYKFRGDGKGWDWEVDTENGNYDYLMYADIDMDHPEVVNELRNWGVWYTNTLGLDGFRIDAVKHIKYSFTRDWLTSVRNTTGKNMFAVAEFWKNDIGAIENYLSKTNWNHSVFDVPLHYNLYNASRSGGNYDMRQIFNGTVVQRHPTHAVTFVDNHDSQPEEALESFVEEWFKPLAYALTLTRDQGYPSVFYGDYYGIPTHGVPAMKSKIDPILEARQKYAYGKQNDYLDHHNMIGWTREGNTAHPNSGLATIMSDGPGGNKWMYVGRNKAGQVWRDITGNRSGTVTINADGWGNFSVNGGSVSIWVN

SEQ ID NO: 19771 - protein, 484 aa, Synthetic construct
HHNGTNGTMMQYFEWYLPNDGNHWNRLRSDASNLKDKGITAVWIPPAWKGASQNDVGYGAYDLYDLGEFNQKGTVRTKYGTRNQLQAAVTALKSNGIQVYGDVVMNHKGGADATEWVRAVEVNPSNRNQEVSGDYTIEAWTKFDFPGRGNTHSNFKWRWYHFDGVDWDQSRQLQNRIYKFRGDGKGWDWEVDTENGNYDYLMYADIDMDHPEVVNELRNWGVWYTNTLGLDGFRIDAVKHIKYSFTRDWLTHVRNTTGKNMFAVAEFWKQDIGAIENYLSKTNWNHSVFDVPLHYNLYNASRSGGNYDMRQIFNGTVVQRHPTHAVTFVDNHDSQPEEALESFVEEWFKPLAYALTLTRDQGYPSVFYGDYYGIPTHGVPAMKSKIDPILEARQKYAYGKQNDYLDHHNMIGWTREGNTAHPNSGLATIMSDGPGGNKWMYVGRNKAGQVWRDITGNRSGTVTINADGWGNFSVNGGSVSIWVN

SEQ ID NO: 19772 - protein, 484 aa, Synthetic construct
HHNGTNGTMMQYFEWYLPNDGNHWNRLRSDASNLKDKGITAVWIPPAWKGASQNDVGYGAYDLYDLGEFNQKGTVRTKYGTRNQLQAAVTALKSNGIQVYGDVVMNHKGGADATEWVRAVEVNPSNRNQEVSGDYTIEAWTKFDFPGRGNTHSNFKWRWYHFDGVDWDQSRQLQNRIYKFRGDGKGWDWEVDTENGNYDYLMYADIDMDHPEVVNELRNWGVWYTNTLGLDGFRIDAVKHIKYSFTRDWLTHVRNTTGKNMFAVAEFWKNDIGAIENYLSKTNWNHSVFDVPLHYNLYSASRSGGNYDMRQIFNGTVVQRHPTHAVTFVDNHDSQPEEALESFVEEWFKPLAYALTLTRDQGYPSVFYGDYYGIPTHGVPAMKSKIDPILEARQKYAYGSQNDYLDHHNMIGWTREGNTAHPNSGLATIMSDGPGGNKWMYVGRNKAGQVWRDITGNRSGTVTINADGWGNFSVNGGSVSIWVN

SEQ ID NO: 19773 - protein, 484 aa, Synthetic construct
HHNGTNGTMMQYFEWYLPNDGNHWNRLRSDASNLKDKGITAVWIPPAWKGASQNDVGYGAYDLYDLGEFNQKGTVRTKYGTRNQLQAAVTALKSNGIQVYGDVVMNHKGGADATEWVRAVEVNPSNRNQEVSGDYTIEAWTKFDFPGRGNTHSNFKWRWYHFDGVDWDQSRQLQNRIYKFRGDGKGWDWEVDTENGNYDYLMYADIDMDHPEVVNELRNWGVWYTNTLGLDGFRIDAVKHIKYSFTRDWLTHVRNTTRKNMFAVAEFWKNDIGAIENYLSKTNWNHSVFDVPLHYNLYNASRSGGNYDMRQIFNGTVVQRHPTHAVTFVDNHDSQPEEALESFVEEWFKPLAYALTLTRDQGYPSVFYGDYYGIPTHGVPAMKSKIDPILEARQKYAYGKQNDYLDHHNMIGWTREGNTAHPNSGLATIMSDGPGGNKWMYVGRNKAGQVWRDITGNRSGTVTINADGWGNFSVNGGSVSIWVN

SEQ ID NO: 19774 - protein, 484 aa, Synthetic construct
HHNGTNGTMMQYFEWYLPNDGNHWNRLRSDASNLKDKGITAVWIPPAWKGASQNDVGYGAYDLYDLGEFNQKGTVRTKYGTRNQLQAAVTALKSNGINVYGDVVMNHKGGADATEWVRAVEVNPSNRNQEVSGDYTIEAWTKFDFPGRGNTHSNFKWRWYHFDGVDWDQSRQLQNRIYKFRGDGKGWDWEVDTENGNYDYLMYADIDMDHPEVVNELRNWGVWYTNTLGLDGFRIDAVKHIKYSFTRDWLTHVRNTTGKNMFAVAEFWKNDIGAIENYLSKTNWNHSVFDVPLHYNLYNASRSGGNYDMRQIFNGTVVQRHPTHAVTFVDNHDSQPEEALESFVEEWFKPLAYALTLTRDQGYPSVFYGDYYGIPTHGVPAMKSKIDPILEARQKYAYGKQNDYLDHHNMIGWTREGNTAHPNSGLATIMSDGPGGNKWMYVGRNKAGQVWRDITGNRSGTVTINADGWGNFSVNGGSVSIWVN

SEQ ID NO: 19775 - protein, 484 aa, Synthetic construct
HHNGTNGTMMQYFEWYLPNDGNHWNRLRSDASNLKDKGITAVWIPPAWKGASQNDVGYGAYDLYDLGEFNQKGTVRTKYGTRNQLQAAVTALKSNGIQVYGDVVMNHKGGADATEWVRAVEVNPSNRNQEVSGDYTIEAWTKFDFPGRGNTHSNFKWRWYHFDGVDWDQSRQLQNRIYKFRGDGMGWDWEVDTENGNYDYLMYADIDMDHPEVVNELRNWGVWYTNTLGLDGFRIDAVKHIKYSFTRDWLTHVRNTTGKNMFAVAEFWKNDIGAIENYLSKTNWNHSVFDVPLHYNLYNASRSGGNYDMRQIFNGTVVQRHPTHAVTFVDNHDSQPEEALESFVEEWFKPLAYALTLTRDQGYPSVFYGDYYGIPTHGVPAMKSKIDPILEARQKYAYGKQNDYLDHHNMIGWTREGNTAHPNSGLATIMSDGPGGNKWMYVGRNKAGQVWRDITGNRSGTVTINADGWGNFSVNGGSVSIWVN

SEQ ID NO: 19776 - protein, 484 aa, Synthetic construct
HHNGTNGTMMQYFEWYLPNDGNHWNRLRSDASNLKDKGITAVWIPPAWKGASQNDVGYGAYDLYDLGEFNQKGTVRTKYGTRNQLQAAVTALKSNGIQVYGDVVMNHKGGADATEWVRAVEVNPSNRNQEVSGDYTIEAWTKFDFPGRGNTHSNFKWRWYHFDGVDWDSSRQLQNRIYKFRGDGKGWDWEVDTENGNYDYLMYADIDMDHPEVVNELRNWGVWYTNTLGLDGFRIDAVKHIKYSFTRDWLTHVRNTTGKNMFAVAEFWKNDIGAIENYLSKTNWNHSVFDVPLHYNLYNASRSGGNYDMRQIFNGTVVQRHPTHAVTFVDNHDSQPEEALESFVEEWFKPLAYALTLTRDQGYPSVFYGDYYGIPTHGVPAMKSKIDPILEARQKYAYGKQNDYLDHHNMIGWTREGNTAHPNSGLATIMSDGPGGNKWMYVGRNKAGQVWRDITGNRSGTVTINADGWGNFSVNGGSVSIWVN

SEQ ID NO: 19777 - protein, 484 aa, Synthetic construct
HHNGTNGTMMQYFEWYLPNDGNHWNRLRSDASNLKDKGITAVWIPPAWKGASQNDVGYGAYDLYDLGEFNQKGTVRTKYGTRNQLQAAVTALKSNGIQVYGDVVMNHKGGADATEWVRAVEVNPSNRNQEVSGDYTIEAWTKFDFPGRGNTHSNFKWRWYHFDGVDWDQSRQLQNRIYKFRGDGKGWDWEVDTENGNYDYLMYADIDMDHPEVVNELRNWGVWYTNTLGLDGFRIDAVKHIKYSFTRDWLTHVRNTTGKNMFAVAEFWKNDIGAIENYLSKTNWNHSVFDVPLHYNLYNASRSGGNYDMRQIFNGTVLQRHPTHAVTFVDNHDSQPEEALESFVEEWFKPLAYALTLTRDQGYPSVFYGDYYGIPTHGVPAMKSKIDPILEARQKYAYGKQNDYLDHHNMIGWTREGNTAHPNSGLATIMSDGPGGNKWMYVGRNKAGQVWRDITGNRSGTVTINADGWGNFSVNGGSVSIWVN

SEQ ID NO: 19778 - protein, 484 aa, Synthetic construct
HHNGTNGTMMQYFEWYLPNDGNHWNRLRSDASNLKDKGITAVWIPPAWKGASQNDVGYGAYDLYDLGEFNQKGTVRTKYGTRNQLQAAVTALKSNGIQVYGDVVMNHKGGADATEWVRAVEVNPSNRNQEVSGDYTIEAWTKFDFPGRGNTHSNFKWRWYHFDGVDWDQSRQLQNRIYKFRGDGKGWDWEVDTENGNYDYLMYADIDMDHPEVVNELRNWGVWYTNTLGLDGFRIDAVKHIKYSFTRDWLTHVRNTTGKNMFAVAEFWKNDIGAIENYLSKTNWNHSVFDVPLHYNLYNASRSGGNYDMRQIFNGTVVQRHPTHAVTFVDNHDSQPEEALESFVEEWFKPLAYALTLTRDQGYPSVFYGDYYGIPTHGVPAMKSKIDPILEARQKYAYGKQNDYMDHHNMIGWTREGNTAHPNSGLATIMSDGPGGNKWMYVGRNKAGQVWRDITGNRSGTVTINADGWGNFSVNGGSVSIWVN

SEQ ID NO: 19779 - protein, 484 aa, Synthetic construct
HHNGTNGTMMQYFEWYLPNDGNHWNRLRSDASNLKDKGITAVWIPPAWKGASQNDVGYGAYDLYDLGEFNQKGTVRTKYGTRNQLQAAVTALKSNGIQVYGDVVMNHKGGADATEWVRAVEVNPSNRNQEVSGDSTIEAWTKFDFPGRGNTHSNFKWRWYHFDGVDWDQSRQLQNRIYKFRGDGKGWDWEVDTENGNYDYLMYADIDMDHPEVVNELRNWGVWYTNTLGLDGFRIDAVKHIKYSFTRDWLTHVRNTTGKNMFAVAEFWKNDIGAIENYLSKTNWNHSVFDVPLHYNLYNASRSGGNYDMRQIFNGTVVQRHPTHAVTFVDNHDSQPEEALESFVEEWFKPLAYALTLTRDQGYPSVFYGDYYGIPTHGVPAMKSKIDPILEARQKYAYGKQNDYLDHHNMIGWTREGNTAHPNSGLATIMSDGPGGNKWMYVGRNKAGQVWRDITGNRSGTVTINADGWGNFSVNGGSVSIWVN

SEQ ID NO: 19780 - protein, 484 aa, Synthetic construct
HHNGTNGTMMQYFEWYLPNDGNHWNRLRSDASNLKDKGITCVWIPPAWKGASQNDVGYGAYDLYDLGEFNQKGTVRTKYGTRNQLQAAVTALKSNGIQVYGDVVMNHKGGADATEWVRAVEVNPSNRNQEVSGDYTIEAWTKFDFPGRGNTHSNFKWRWYHFDGVDWDQSRQLQNRIYKFRGDGKGWDWEVDTENGNYDYLMYADIDMDHPEVVNELRNWGVWYTNTLGLDGFRIDAVKHIKYSFTRDWLTHVRNTTGKNMFAVAEFWKNDIGAIENYLSKTNWNHSVFDVPLHYNLYNASRSGGNYDMRQIFNGTVVQRHPTHAVTFVDNHDSQPEEALESFVEEWFKPLAYALTLTRDQGYPSVFYGDYYGIPTHGVPAMKSKIDPILEARQKYAYGKQNDYLDHHNMIGWTREGNTAHPNSGLATIMSDGPGGNKWMYVGRNKAGQVWRDITGNRSGTVTINADGWGNFSVNGGSVSIWVN

SEQ ID NO: 19781 - protein, 484 aa, Synthetic construct
HHNGTNGTMMQYFEWYLPNDGNHWNRLRSDASNLKDKGITAVWIPPAWKGASQNDVGYGAYDLYDLGEFNQKGTVRTKYGTRNQLQAAVTALKSNGIQVYGDVVMNHKGGADATEWVRAVEVNPSNRNQEVSGDYTIEAWTKFDFPGRGNTHSNFKWRWWHFDGVDWDQSRQLHNRIYKFRGDGKGWDWEVDTENGNYDYLMYADIDMDHPEVVNELRNWGVWYTNTLGLDGFRIDAVKHIKYSFTRDWLTHVRNTTGKNMFAVAEFWKNDIGAIENYLSKTNWNHSVFDVPLHYNLYNASRSGGNYDMRQIFNGTVVQRHPTHAVTFVDNHDSQPEEALESFVEEWFKPLAYALTLTRDQGYPSVFYGDYYGIPTHGVPAMKSKIDPILEARQKYAYGKQNDYLDHHNMIGWTREGNTAHPNSGLATIMSDGPGGNKWMYVGRNKAGQVWRDITGNRSGTVTINADGWGNFSVNGGSVSIWVN

SEQ ID NO: 19782 - protein, 484 aa, Synthetic construct
HHNGTNGTMMQYFEWYLPNDGNHWNRLRSDASLLKDKGITAVWIPPAWKGASQNDVGYGAYDLYDLGEFNQKGTVRTKYGTRNQLQAAVTALKSNGIQVYGDVVMNHKGGADATEWVRAVEVNPSNRNQEVSGDYTIEAWTKFDFPGRGNTHSNFKWRWYHFDGVDWDQSRQLQNRIYKFRGDGKGWDWEVDTENGNYDYLMYADIDMDHPEVVNELRNWGVWYTNTLGLDGFRIDAVKHIKYSFTRDWLTHVRNTTGKNMFAVAEFWKNDIGAIENYLSKTNWNHSVFDVPLHYNLYNASRSGGNYDMRQIFNGTVVQRHPTHAVTFVDNHDSQPEEALESFVEEWFKPLAYALTLTRDQGYPSVFYGDYYGIPTHGVPAMKSKIDPILEARQKYAYGKQNDYLDHHNMIGWTREGNTAHPNSGLATIMSDGPGGNKWMYVGRNKAGQVWRDITGNRSGTVTINADGWGNFSVNGGSVSIWVN

SEQ ID NO: 19783 - protein, 484 aa, Synthetic construct
HHNGTNGTMMQYFEWYLPNDGNHWNRLRSDASNLKDKGITAVWIPPAWKGASQNDVGYGAYDLYDLGEFNQKGTVRTKYGTRNQLQAAVTALKSNGIQVYGDVVMNHKGGADATEWVRAVEVNPSNRNQEVSGDYTIEAWTKFDFPGRGNTHSNFKWRWYHFDGVDWDQSRQLQNRIYKFRGDGKGWDWEVDTENGNYDYLMYADIDMDHPEVVNELRNWGVWYTNTLGLDGFRIDAVKHIKYSFTRDWLTHVRNTTGKNMFAVAEFWKNDIGAIENYLSKTNWNHSVFDVPLHYNLYNASRSGGNYDMRQIFNGTVVQRHPTHAVTFVDNHDSQPEEALESFVEEWFKPLAYALTLTRDQGYPSVFYGDYYGIPTHGVPAMKSKIDPILEARQKSAYGKQNDYLDHHNMIGWTREGNTAHPNSGLATIMSDGPGGNKWMYVGRNKAGQVWRDITGNRSGTVTINADGWGNFSVNGGSVSIWVN

SEQ ID NO: 19784 - protein, 484 aa, Synthetic construct
HHNGTNGTMMQYFEWYLPNDGNHWNRLRSDASNLKDKGITAVWIPPAWKGASQNDVGYGAYDLYDLGEFNQKGTVRTKYGTRNQLQAAVTALKSNGIQVYGDVVMNHKGGADATEWVRAVEVNPSNRNQEVSGDYTIEAWTKFDFPGRGNTHSNFKWRWYHFDGVDWDQSRQLQNRIYKFRGDGKGWDWEVDTENGNYDYLMYADIDMDHPEVVNELRNWGVWYTNTLGLDGFRIDAVKHIKYSFTRDWLTHVRNTTGKNMFAVAEFWKNDIGAIENYLSKTNWNHSVFDVPLHYNLYNASRSGGNYDMRQIFNGTVVQRHPTHAVTFVDNHDSQPEEALESFVEEWFKPLAYALTLTRDQGYPSVFYGDYYGIPTHGVPAMKSKIDKILEARQKYAYGKQNDYLDHHNMIGWTREGNTAHPNSGLATIMSDGPGGNKWMYVGRNKAGQVWRDITGNRSGTVTINADGWGNFSVNGGSVSIWVN

SEQ ID NO: 19785 - protein, 484 aa, Synthetic construct
HHNGTNGTMMQYFEWYLPNDGNHWNRLRSDASNLKDKGITAVWIPPAWKGASQNDVGYGAYDLYDLGEFNQKGTVRTKYGTRNQLQAAVTALKSNGIQVYGDVVMNHKGGADATEWVRAVEVNPSNRNQEVSGDYTIEAWTKFDFPGRGNTHSNFKWRWYHFDGVDWDQSRQLQNRIYKFRGDGKGWDWEVDTENGNYDYLMYADIDMDHPEVVNELRNWGVWYTNTLGLDGFRIDAVKHIKYSFTRDWLTHVRNTTGKNMFAVAEFWKNDIGAIENYLSKTNWNHSVFDVPLHYNLYNASRSGGNYDMRQIFNGTVVQRHPTHAVTFVDNHDSQPEEALESFVEEWFKPLAYALTCTRDQGYPSVFYGDYYGIPTHGVPAMKSKIDPILEARQKYAYGKQNDYLDHHNMIGWTREGNTAHPNSGLATIMSDGPGGNKWMYVGRNKAGQVWRDITGNRSGTVTINADGWGNFSVNGGSVSIWVN

SEQ ID NO: 19786 - protein, 484 aa, Synthetic construct
HHNGTNGTMMQYFEWYLPNDGNHWNRLRSDASNLKDKGITAVWIPPAWKGASQNDVGYGAYDLYDLGEFNQKGTVRTKYGTRNQLQAAVTALKSNGIQVYGDVVMNHKGGADATEWVRAVEVNPSNRNQEVSGDYTIEAWTKFDFPGRGNTHSNFKWRWYHFDGVDWDQSRQLQNRIYKFRGDGKGWDWEVDTENGNYDYLMYADIDMDHPEVVNELRNWGVWYTNTLGLDGFRIDAVKHIKYSFTRDWLTHVRNTTGKNMFAVAEFWKNDIGAIENYLSKTNWNHSVFDVPLHYNLYNASRSGGNYDMRQIFNGTVVQRHPTHAVTFVDNHDSQPEEALESFVEEWFKPLAYALTLTRDQGYPSVFYGDYYGIPTHGVPAMKSKIDEILEARQKYAYGKQNDYLDHHNMIGWTREGNTAHPNSGLATIMSDGPGGNKWMYVGRNKAGQVWRDITGNRSGTVTINADGWGNFSVNGGSVSIWVN

SEQ ID NO: 19787 - protein, 484 aa, Synthetic construct
HHNGTNGTMMQYFEWYLPNDGNHWNRLRSDASNLKDKGITAVWIPPAWKGASQNDVGYGAYDLYDLGEFNQKGTVRTKYGTRNQLQAAVTALKSNGIQVYGDVVMNHKGGADATEWVRAVEVNPSNRNQEVSGDYTIEAWTKFDFPGRGNTHSNFKWRWYHFDGVDWDQSRQLQNRIYKFRGDGKGWDWEVDTENGNYDYLMYADIDMDHPEVVNELRNWGVWYTNTLGLDGFRIDAVKHIKYSFTRDWLTHVRNTTGKNMFAVAEFWKNDIGAIENYLSKTNWNHSVFDVPLHYNLYNASRSGGNYDMRQIFNGTMVQRHPTHAVTFVDNHDSQPEEALESFVEEWFKPLAYALTLTRDQGYPSVFYGDYYGIPTHGVPAMKSKIDPILEARQKYAYGKQNDYLDHHNMIGWTREGNTAHPNSGLATIMSDGPGGNKWMYVGRNKAGQVWRDITGNRSGTVTINADGWGNFSVNGGSVSIWVN

SEQ ID NO: 19788 - protein, 484 aa, Synthetic construct
HHNGTNGTMMQYFEWYLPNDGNHWNRLRSDASNLKDKGITAVWIPPAWKGASQNDVGYGAYDLYDLGEFNQKGTVRTKYGTRNQLQAAVTALKSNGIQVYGDVVMNHKGGADATEWVRAVEVNPSNRNQEVSGDYTIEAWTKFDFPGRGNTHSNFKWRWYHFDGVDWDQSRQLQNRIYKFRGDGKGWDWEVDVENGNYDYLMYADIDMDHPEVVNELRNWGVWYTNTLGLDGFRIDAVKHIKYSFTRDWLTHVRNTTGKNMFAVAEFWKNDIGAIENYLSKTNWNHSVFDVPLHYNLYNASRSGGNYDMRQIFNGTVVQRHPTHAVTFVDNHDSQPEEALESFVEEWFKPLAYALTLTRDQGYPSVFYGDYYGIPTHGVPAMKSKIDPILEARQKYAYGKQNDYLDHHNMIGWTREGNTAHPNSGLATIMSDGPGGNKWMYVGRNKAGQVWRDITGNRSGTVTINADGWGNFSVNGGSVSIWVN

SEQ ID NO: 19789 - protein, 484 aa, Synthetic construct
HHNGTNGTMMQYFEWYLPNDGNHWNRLRSDASNLKDKGITAVWIPPAWKGASQNDVGYGAYDLYDLGEFNQKGTVRTKYGTRNQLQAAVTALKSNGIQVYGDVVMNHKGGADATEWVRAVEVNPSNRNQEVSGDYTIEAWTKFDFPGRGNTHSNFKWRWYHFDGVDWDQSRQLQNRIYKFRGDGKGWDWEVDTENGNYDYLMYADIDMDHPEVVNELRNWGVWYTNTLGLDGFRIDAVKHIKYSFTRDWLTHVRNTTGKNMFAVAEFWKNDIGAIENYLSKTNWNHSVFDVPLHYNLYNASRSGGNYDMRQIFNGTVVQRHPTKAVTFVDNHDSQPEEALESFVEEWFKPLAYALTLTRDQGYPSVFYGDYYGIPTHGVPAMKSKIDPILEARQKYAYGKQNDYLDHHNMIGWTREGNTAHPNSGLATIMSDGPGGNKWMYVGRNKAGQVWRDITGNRSGTVTINADGWGNFSVNGGSVSIWVN

SEQ ID NO: 19790 - protein, 484 aa, Synthetic construct
HHNGTNGTMMQYFEWYLPNDGNHWNRLRSDASNLKDKGITAVWIPPAWKGASQNDVGYGAYDLYDLGEFNQKGTVRTKYGTRNQLQAAVTALKSNGIQVYGDVVMNHKGGADATEWVRAVEVNPSNRNQEVSGDYTIEAWTKFDFPGRGNTHSNFKWRWYHFDGVDWDQSRQLQNRIYKFRGDGKGWDWEMDTENGNYDYLMYADIDMDHPEVVNELRNWGVWYTNTLGLDGFRIDAVKHIKYSFTRDWLTHVRNTTGKNMFAVAEFWKNDIGAIENYLSKTNWNHSVFDVPLHYNLYNASRSGGNYDMRQIFNGTVVQRHPTHAVTFVDNHDSQPEEALESFVEEWFKPLAYALTLTRDQGYPSVFYGDYYGIPTHGVPAMKSKIDPILEARQKYAYGKQNDYLDHHNMIGWTREGNTAHPNSGLATIMSDGPGGNKWMYVGRNKAGQVWRDITGNRSGTVTINADGWGNFSVNGGSVSIWVN

SEQ ID NO: 19791 - protein, 484 aa, Synthetic construct
HHNGTNGTMMQYFEWYLPNDGNHWNRLRSDASNLKDKGITAVWIPPAWKGASQNDVGYGAYDLYDLGEFNQKGTVRTKYGTRNQLQAAVTALKSNGIQVYGDVVMNHKGGADATEWVRAVEVNPSNRNQEVSGDYTIEAWTKFDFPGRGNTHSNFKWRWYHFDGVDWDQSRQLQNRIYKFRGDGKGWDWEVDTENGNYDYLMYADIDMDHPEVVNELRNWGVWYTNTLGLDGFRIDAVKHIKYSFTRDWLTHVRNTTGKNMFAVAEFWKNDIGAIENYLSKTNWNHSVFDVPLHYNLYNASRSGGNYDMRQIFNGTVVQRHPTHAYTFVDNHDSQPEEALESFVEEWFKPLAYALTLTRDQGYPSVFYGDYYGIPTHGVPAMKSKIDPILEARQKYAYGKQNDYLDHHNMIGWTREGNTAHPNSGLATIMSDGPGGNKWMYVGRNKAGQVWRDITGNRSGTVTINADGWGNFSVNGGSVSIWVN

SEQ ID NO: 19792 - protein, 484 aa, Synthetic construct
HHNGTNGTMMQYFEWYLPNDGNHWNRLRSDASNLKDKGITAVWIPPAWKGASQNDVGYGAYDLYDLGEFNQKGTVRTKYGTRNQLQAAVTALKSNGIQVYGDVVMNHKGGADATEWVRAVEVNPSNRNQEVSGDYTIEAWTKFDFPGRGNTHSNFKWRWYHFDGVDWDQSRQLQNRIYKFRGDGKGWDWEVDTENGNYDYLMYADIDMDHPEVVNELRNWGVWYTNTLGLDGFRIDAVKHIKYSFTRDWLTHVRNTTGKNMFAVAEFWKNDIGAIENYLSKTNWNHSVFDVPLHYNLYNASRSGGNYDMRQIFNGTVVQRHPTHAVTFVDNHDSQPEEALESFVEEWFKPLAYALTLTWDQGYPSVFYGDYYGIPTHGVPAMKSKIDPILEARQKYAYGKQNDYLDHHNMIGWTREGNTAHPNSGLATIMSDGPGGNKWMYVGRNKAGQVWRDITGNRSGTVTINADGWGNFSVNGGSVSIWVN

SEQ ID NO: 19793 - protein, 484 aa, Synthetic construct
HHNGTNGTMMQYFEWYLPNDGNHWNRLRSDASNLKDKGITAVWIPPAWKGASQNDVGYGAYDLYDLGEFNQKGTVRTKYGTRNQLQAAVTALKSNGIQVYGDVVMNHKGGADATEWVRAVEVNPSNRNQEVSGDYTIEAWTKFDFPGRGNTHSNFKWRWYHFAGVDWDQSRQLQNRIYKFRGDGKGWDWEVDTENGNYDYLMYADIDMDHPEVVNELRNWGVWYTNTLGLDGFRIDAVKHIKYSFTRDWLTHVRNTTGKNMFAVAEFWKNDIGAIENYLSKTNWNHSVFDVPLHYNLYNASRSGGNYDMRQIFNGTVVQRHPTHAVTFVDNHDSQPEEALESFVEEWFKPLAYALTLTRDQGYPSVFYGDYYGIPTHGVPAMKSKIDPILEARQKYAYGKQNDYLDHHNMIGWTREGNTAHPNSGLATIMSDGPGGNKWMYVGRNKAGQVWRDITGNRSGTVTINADGWGNFSVNGGSVSIWVN

SEQ ID NO: 19794 - protein, 484 aa, Synthetic construct
HHNGTNGTMMQYFEWYLPNDGNHWNRLRSDASNLKDKGITAVWIPPAWKGASQNDVGYGAYDLYDLGEFNQKGTVRTKYGTRNQLQAAVTALKSNGIQVYGDVVMNHKGGADATEWVRAVEVNPSNRNQEVSGDWTIEAWTKFDFPGRGNTHSNFKWRWYHFDGVDWDQSRQLQNRIYKFRGDGKGWDWEVDTENGNYDYLMYADIDMDHPEVVNELRNWGVWYTNTLGLDGFRIDAVKHIKYSFTRDWLTHVRNTTGKNMFAVAEFWKNDIGAIENYLSKTNWNHSVFDVPLHYNLYNASRSGGNYDMRQIFNGTVVQRHPTHAVTFVDNHDSQPEEALESFVEEWFKPLAYALTLTRDQGYPSVFYGDYYGIPTHGVPAMKSKIDPILEARQKYAYGKQNDYLDHHNMIGWTREGNTAHPNSGLATIMSDGPGGNKWMYVGRNKAGQVWRDITGNRSGTVTINADGWGNFSVNGGSVSIWVN

SEQ ID NO: 19795 - protein, 484 aa, Synthetic construct
HHNGTNGTMMQYFEWYLPNDGNHWNRLRSDASNLKDKGITAVWIPPAWKGASQNDVGYGAYDLYDLGEFNQKGTVRTKYGTRNQLQAAVTALKSNGIQVYGDVVMNHKGGADATEWVRAVEVNPSNRNQEVSGDYTIEAWTKFDFPGRGNTHSNFKWRWYHFDGVDWDQSRQLQNRIYKFRGDGKGWDWEVDTENGNYDYLMYADIDMDHPEVVNELRNWGVWYTNTLGLDGFRIDAVKHIKYSFTRDWLTHVRNTTGKNMFAVAEFWKNDIGAIENYLSKTNWNHSVFDVPLHYNLYNASRSGGNYDMRQIFNGTVVQRHPTHAVTFVDNHDSQPEEALESFVEEWFKPLAYALTLTRDQGYPSVFYGDYYGIPTHGVPAMKSKIDPILEAQQKYAYGKQNDYLDHHNMIGWTREGNTAHPNSGLATIMSDGPGGNKWMYVGRNKAGQVWRDITGNRSGTVTINADGWGNFSVNGGSVSIWVN

SEQ ID NO: 19796 - protein, 484 aa, Synthetic construct
HHNGTNGTMMQYFEWYLPNDGNHWNRLRSDASNLKDKGITAVWIPPAWKGASQNDVGYGAYDLYDLGEFNQKGTVRTKYGTREQLQAAVTALKSNGIQVYGDVVMNHKGGADATEWVRAVEVNPSNRNQEVSGDYTIEAWTKFDFPGRGNTHSNFKWRWYHFDGVDWDQSRQLQNRIYKFRGDGKGWDWEVDTENGNYDYLMYADIDMDHPEVVNELRNWGVWYTNTLGLDGFRIDAVKHIKYSFTRDWLTHVRNTTGKNMFAVAEFWKNDIGAIENYLSKTNWNHSVFDVPLHYNLYNASRSGGNYDMRQIFNGTVVQRHPTHAVTFVDNHDSQPEEALESFVEEWFKPLAYALTLTRDQGYPSVFYGDYYGIPTHGVPAMKSKIDPILEARQKYAYGKQNDYLDHHNMIGWTREGNTAHPNSGLATIMSDGPGGNKWMYVGRNKAGQVWRDITGNRSGTVTINADGWGNFSVNGGSVSIWVN

SEQ ID NO: 19797 - protein, 484 aa, Synthetic construct
HHNGTNGTMMQYFEWYLPNDGNHWNRLRSDASNLKDKGITAVWIPPAWKGASQNDVGYGAYDLYDLGEFNQKGTVRTKYGTRNQLQAAVTALKSNGIQVYGDVVMNHKGGADATEWVRAVEVNPSNRNQEVSGDYTIEAWTKFDFPGRGNTHSNFKWRWYHFDGVDWDQSRQLQNRIYKFRGDGKGWDWEVDTENGNYDYLMYADIDMDHPEVVNELRNWGVWYTNTLGLDGFRIDAVKHIKYSFTRDWLTHVRNTTGKNMFAVAEFWKNDIGAIENYLSKTNWNHSVFDVPLHYNLYNASRSGGNYDMRQIFNGTVVQRHPTHAVTFVDNHDSQPEEALESFVEEWFKPLAYALVLTRDQGYPSVFYGDYYGIPTHGVPAMKSKIDPILEARQKYAYGKQNDYLDHHNMIGWTREGNTAHPNSGLATIMSDGPGGNKWMYVGRNKAGQVWRDITGNRSGTVTINADGWGNFSVNGGSVSIWVN

SEQ ID NO: 19798 - protein, 484 aa, Synthetic construct
HHNGTNGTMMQYFEWYLPNDGNHWNRLRSDASNLKDKGITAVWIPPAWKGASQNDVGYGAYDLYDLGEFNQKGTVRTKYGTRNQLQAAVTALKSNGIQVYGDVVMNHKGGADATEWVRAVEVNPSNRNQEVSGDYTIEAWTKFDFPGRGNTHSNFKWRWYHFDGVDWDQSRQLQNRIYKFRGDGKGWDWEVDTENGNYDYLMYADIDMDHPEVVNELRNWGVWYTNTLGLDGFRIDAVKHIKYSFTRDWLTHVRNTTGKNMFAVAEFWKNDIGAVENYLSKTNWNHSVFDVPLHYNLYNASRSGGNYDMRQIFNGTVVQRHPTHAVTFVDNHDSQPEEALESFVEEWFKPLAYALTLTRDQGYPSVFYGDYYGIPTHGVPAMKSKIDPILEARQKYAYGKQNDYLDHHNMIGWTREGNTAHPNSGLATIMSDGPGGNKWMYVGRNKAGQVWRDITGNRSGTVTINADGWGNFSVNGGSVSIWVN

SEQ ID NO: 19799 - protein, 484 aa, Synthetic construct
HHNGTNGTMMQYFEWYLPNDGNHWNRLRSDASNLKDKGITAVWIPPAWKGASQNDVGYGAYDLYDLGEFNQKGTVRTKYGTRNQLQAAVTALKSNGIQVYGDVVMNHKGGADATEWVRAVEVNPSNRNQEVSGDYTIEAWTKFDFPGRGNTHSNFKWRWYHFDGVDWDQSRQLQNRIYKFRGDGKGWDWEVDTENGNYDYLMYADIDMDHPEVVNELRNWGVWYTNTLGLDGFRIDAVKHIKYSFTRDWLTHVRNTTGKNMFAVAEFWKNDIGAIENYLSKTNWNHSVFDVPLHYNLYNASRSGGNYDMRQIFNGTVVQRHPTHAVTFVDNHDSQPEEALESFVEEWFKPLAYALTLTRDQGYPSVFYGDYYGIPTHGVPAMKSKIDPILEARQKYAYGKQNDYHDHHNMIGWTREGNTAHPNSGLATIMSDGPGGNKWMYVGRNKAGQVWRDITGNRSGTVTINADGWGNFSVNGGSVSIWVN

SEQ ID NO: 19800 - protein, 484 aa, Synthetic construct
HHNGTNGTMMQYFEWYLPNDGNHWNRLRSDASNLKDKGITAVWIPPAWKGASQNDVGYGAYDLYDLGEFNQKGTVRTKYGTRNQLQAAVTALKSNGIQVYGDVVMNHKGGADATEWVRAVEVNPSNRNQEVSGDYTIEAWTKFDFPGRGNTHSNFKWRWYHFDGVDWDQSRQLQNRIYKFRGDGKGWDWEVDTENGNYDYLMYADIDMDHPEVVNELRNWGVWYTNTLGLDGFRIDAFKHIKYSFTRDWLTHVRNTTGKNMFAVAEFWKNDIGAIENYLSKTNWNHSVFDVPLHYNLYNASRSGGNYDMRQIFNGTVVQRHPTHAVTFVDNHDSQPEEALESFVEEWFKPLAYALTLTRDQGYPSVFYGDYYGIPTHGVPAMKSKIDPILEARQKYAYGKQNDYLDHHNMIGWTREGNTAHPNSGLATIMSDGPGGNKWMYVGRNKAGQVWRDITGNRSGTVTINADGWGNFSVNGGSVSIWVN

SEQ ID NO: 19801 - protein, 484 aa, Synthetic construct
HHNGTNGTMMQYFEWYLPNDGNHWNRLRSDASNLKDKGITAVWIPPAWKGASQNDVGYGAYDLYDLGEFNQKGTVRTKYGTRNQLQAAVTALKSNGIQVYGDVVMNHKGGADATEWVRAVEVNPSNRNQEVSGDYTIEAWTKFDFPGRGNTHSNFKWRWYHFDGVDWDQSRQLQNRIYKFRGDGKGWDWEVDTENGNYDYLMYADIDMDHPEVVNELRNWGVWYTNTLGLDGFRIDAVKHIKYSFTRDWLTHVRNTTGKNMFAVAEFWKNDIGAIENYLSKTNWNHSVFDVPLHYNLYNASRSGGNYDMRQIFNGTVVQRHPTHAVTFVDNHDSQPEEALESFVEEWFKPLAYALTLTRDQGYPSVFYGDYYGIPTHGVPAMKSWIDPILEARQKYAYGKQNDYLDHHNMIGWTREGNTAHPNSGLATIMSDGPGGNKWMYVGRNKAGQVWRDITGNRSGTVTINADGWGNFSVNGGSVSIWVN

SEQ ID NO: 19802 - protein, 484 aa, Synthetic construct
HHNGTNGTMMQYFEWYLPNDGNHWNRLRSDASNLKDKGITAVWIPPAWKGASQNDVGYGAYDLYDLGEFNQKGTVRTKYGTRNQLQAAVTALKSNGIQVYGDVVMNHKGGADATEWVRAVEVNPSNRNQEVSGDYTIEAWTKFDFPGRGNTHSNFKWRWYHFDGVDWDQSRQLQNRIYKFRGDGKGWDWEVDTENGNYDYLMYADIDMDHPEVVNELRNWGVWYTNTLGLDGFRIDAVKHIKYSFTRDWLTHVRNTTGKNMFAVAEFWKNDIGAIENYLSHTNWNHSVFDVPLHYNLYNASRSGGNYDMRQIFNGTVVQRHPTHAVTFVDNHDSQPEEALESFVEEWFKPLAYALTLTRDQGYPSVFYGDYYGIPTHGVPAMKSKIDPILEARQKYAYGKQNDYLDHHNMIGWTREGNTAHPNSGLATIMSDGPGGNKWMYVGRNKAGQVWRDITGNRSGTVTINADGWGNFSVNGGSVSIWVN

SEQ ID NO: 19803 - protein, 484 aa, Synthetic construct
HHNGTNGTMMQYFEWYLPNDGNHWNRLRSDASNLKDKGITAVWIPPAWKGASQNDVGYGAYDLYDLGEFNQKGTVRTKYGTRNQLQAAVTALKSNGIQVYGDVVMNHKGGADATEWVRAVEVNPSNRNQEVSGDYTIEAWTKFDFPGRGNTHSNFKWRWYHFDGVDWDQSRQLQNRIYKFRGDGKGWDWEVDTENGNYDYLMYADIDMDHPEVVNELRNWGVWYTNTLGLDGFRIDAVKHIKYSFTRDWLTHVRNTTGKNMFAVAEFWKNDIGAIENYLSKTNWNHSVFDVPLHYNLYNASRSGGNYDMRQIFNGTVVQRHPTHAVTFVDNHDSQPEEALESFVEEWFKPLAYALTLTRDQGNPSVFYGDYYGIPTHGVPAMKSKIDPILEARQKYAYGKQNDYLDHHNMIGWTREGNTAHPNSGLATIMSDGPGGNKWMYVGRNKAGQVWRDITGNRSGTVTINADGWGNFSVNGGSVSIWVN

SEQ ID NO: 19804 - protein, 484 aa, Synthetic construct
HHNGDNGTMMQYFEWYLPNDGNHWNRLRSDASNLKDKGITAVWIPPAWKGASQNDVGYGAYDLYDLGEFNQKGTVRTKYGTRNQLQAAVTALKSNGIQVYGDVVMNHKGGADATEWVRAVEVNPSNRNQEVSGDYTIEAWTKFDFPGRGNTHSNFKWRWYHFDGVDWDQSRQLQNRIYKFRGDGKGWDWEVDTENGNYDYLMYADIDMDHPEVVNELRNWGVWYTNTLGLDGFRIDAVKHIKYSFTRDWLTHVRNTTGKNMFAVAEFWKNDIGAIENYLSKTNWNHSVFDVPLHYNLYNASRSGGNYDMRQIFNGTVVQRHPTHAVTFVDNHDSQPEEALESFVEEWFKPLAYALTLTRDQGYPSVFYGDYYGIPTHGVPAMKSKIDPILEARQKYAYGKQNDYLDHHNMIGWTREGNTAHPNSGLATIMSDGPGGNKWMYVGRNKAGQVWRDITGNRSGTVTINADGWGNFSVNGGSVSIWVN

SEQ ID NO: 19805 - protein, 484 aa, Synthetic construct
HHNGTNGTMMQYFEWYLPNDGNHWNRLRSDASNLKDKGITAVWIPPAWKGASQNDVGYGAYDLYDLGEFNQKGTVRTKYGTRNQLQAAVTALKSNGIQVYGDVVMNHKGGADATEWVRAVEVNPSNRNQEVSGDYTIEAWTKFDFPGRGNTHSNFKWRWYHFTGVDWDQSRQLQNRIYKFRGDGKGWDWEVDTENGNYDYLMYADIDMDHPEVVNELRNWGVWYTNTLGLDGFRIDAVKHIKYSFTRDWLTHVRNTTGKNMFAVAEFWKNDIGAIENYLSKTNWNHSVFDVPLHYNLYNASRSGGNYDMRQIFNGTVVQRHPTHAVTFVDNHDSQPEEALESFVEEWFKPLAYALTLTRDQGYPSVFYGDYYGIPTHGVPAMKSKIDPILEARQKYAYGKQNDYLDHHNMIGWTREGNTAHPNSGLATIMSDGPGGNKWMYVGRNKAGQVWRDITGNRSGTVTINADGWGNFSVNGGSVSIWVN

SEQ ID NO: 19806 - protein, 484 aa, Synthetic construct
HHNGTNGTMMQYFEWYLPNDGNHWNRLRSDASNLKKKGITAVWIPPAWKGASQNDVGYGAYDLYDLGEFNQKGTVRTKYGTRNQLQAAVTALKSNGIQVYGDVVMNHKGGADATEWVRAVEVNPSNRNQEVSGDYTIEAWTKFDFPGRGNTHSNFKWRWYHFDGVDWDQSRQLQNRIYKFRGDGKGWDWEVDTENGNYDYLMYADIDMDHPEVVNELRNWGVWYTNTLGLDGFRIDAVKHIKYSFTRDWLTHVRNTTGKNMFAVAEFWKNDIGAIENYLSKTNWNHSVFDVPLHYNLYNASRSGGNYDMRQIFNGTVVQRHPTHAVTFVDNHDSQPEEALESFVEEWFKPLAYALTLTRDQGYPSVFYGDYYGIPTHGVPAMKSKIDPILEARQKYAYGKQNDYLDHHNMIGWTREGNTAHPNSGLATIMSDGPGGNKWMYVGRNKAGQVWRDITGNRSGTVTINADGWGNFSVNGGSVSIWVN

SEQ ID NO: 19807 - protein, 484 aa, Synthetic construct
HHNGTNGTMMQYFEWYLPNDGNHWNRLRSDASNLKDKGITAVWIPPAWKGASQNDVGYGAYDLYDLGEFNQKGTVRTKYGTRNQLQAAVTALKSNGIQVYGDVVMNHKGGADATEWVRAVEVNPSNRNQEVSGDYTIEAWTKFDFPGRGNTHSNFKWRWYHFDGVDWDQSRQLQNRIYKFRGDGKGWDWEVDTENGNYDYLMYADIDMDHPEVVNELRNWGVWYTNTLGLDGFRIDAVKHIKYSFTRDWLTHVRNTTGKNMFAVAEFWKNDIGAIENYLSKTNWNHSVFDVPLHYNLYNASRSGGNYDMRQIFNGTVVQRHPTHAVTFVDNHDSQPEEALESFVEEWFKPLAYALTLTRDQGYPYVFYGDYYGIPTHGVPAMKSKIDPILEARQKYAYGKQNDYLDHHNMIGWTREGNTAHPNSGLATIMSDGPGGNKWMYVGRNKAGQVWRDITGNRSGTVTINADGWGNFSVNGGSVSIWVN

SEQ ID NO: 19808 - protein, 484 aa, Synthetic construct
HHNGTNGTMMQYFEWYLPNDGNHWNRLRSDASNLKDWGITAVWIPPAWKGASQNDVGYGAYDLYDLGEFNQKGTVRTKYGTRNQLQAAVTALKSNGIQVYGDVVMNHKGGADATEWVRAVEVNPSNRNQEVSGDYTIEAWTKFDFPGRGNTHSNFKWRWYHFDGVDWDQSRQLQNRIYKFRGDGKGWDWEVDTENGNYDYLMYADIDMDHPEVVNELRNWGVWYTNTLGLDGFRIDAVKHIKYSFTRDWLTHVRNTTGKNMFAVAEFWKNDIGAIENYLSKTNWNHSVFDVPLHYNLYNASRSGGNYDMRQIFNGTVVQRHPTHAVTFVDNHDSQPEEALESFVEEWFKPLAYALTLTRDQGYPSVFYGDYYGIPTHGVPAMKSKIDPILEARQKYAYGKQNDYLDHHNMIGWTREGNTAHPNSGLATIMSDGPGGNKWMYVGRNKAGQVWRDITGNRSGTVTINADGWGNFSVNGGSVSIWVN

SEQ ID NO: 19809 - protein, 484 aa, Synthetic construct
HHNGTNGTMMQYFEWYLPNDGNHWNRLRSDASNLKDKGITAVWIPPAWKGASQNDVGYGAYDLYDLGEFNQKGTVRTKYGTRNQLQAAVTALKSNGIQVYGDVVMNHKGGADATEWVRAVEVNPSNRNQEVSGDYTIEAWTKFDFPGRGNTHSNFKWRWYHFDGVDWDQSRQLQNSIYKFRGDGKGWDWEVDTENGNYDYLMYADIDMDHPEVVNELRNWGVWYTNTLGLDGFRIDAVKHIKYSFTRDWLTHVRNTTGKNMFAVAEFWKNDIGAIENYLSKTNWNHSVFDVPLHYNLYNASRSGGNYDMRQIFNGTVVQRHPTHAVTFVDNHDSQPEEALESFVEEWFKPLAYALTLTRDQGYPSVFYGDYYGIPTHGVPAMKSKIDPILEARQKYAYGKQNDYLDHHNMIGWTREGNTAHPNSGLATIMSDGPGGNKWMYVGRNKAGQVWRDITGNRSGTVTINADGWGNFSVNGGSVSIWVN

SEQ ID NO: 19810 - protein, 484 aa, Synthetic construct
HHNGTNGTMMQYFEWYLPNDGNHWNRLRSDASNLKDKGITAVWIPPAWKGASQNDVGYGAYDLYDLGEFNQKGTVRTKYGTRNQLQAAVTALKSNGIQVYGDVVMNHKGGADATEWVRAVEVNPSNRNQEVSGDYTIEAWTKFDFPGRGNTHSNFKWRWYHFDGVDWDQSRQLQNRIYKFRGDGKGWDWEVDTENGNYDYLMYADIDMDHPEVVNELRNWGVWYTNTLGLDGFRIDAVKHIKYSFTRDWLTHVRNTTGKNMFAVAEFWKNDIGAIENYLSKTNWNHSVFDVPLHYNLYNASRSGGNYDMRQIFNGTVVQRHPTHAYTFVDNHDSQPEEALESFVEEWFKPLAYALTLTRDQGYPSVFYGDYYGIPTHGVPAMKSKIDPILEARQKYAYGKQNDYLDHHNMIGWTREGNTAHPNSGLATIMSDGPGGNKWMYVGRNKAGQVWRDITGNRNGTVTINADGWGNFSVNGGSVSIWVN

SEQ ID NO: 19811 - protein, 484 aa, Synthetic construct
HHNGTNGTMMQYFEWYLPNDGNHWNRLRSDASNLKDKGITAVWIPPAWKGASQNDVGYGAYDLYDLGEFNQKGTVRTKYGTRNQLQAAVTALKSNGIQVYGDVVMNHKGGADATEWVRAVEVNPSNRNQEVSGDYTIEAWTKFDFPGRGNTHSNFKWRWYHFDGVDWDQSRQLQNRIYKFRGDGKGWDWEVDDENGNYDYLMYADIDMDHPEVVNELRNWGVWYTNTLGLDGFRIDAVKHIKYSFTRDWLTHVRNTTGKNMFAVAEFWKNDIGAIENYLSKTNWNHSVFDVPLHYNLYNASRSGGNYDMRQIFNGTVVQRHPTHAVTFVDNHDSQPEEALESFVEEWFKPLAYALTLTRDQGYPSVFYGDYYGIPTHGVPAMKSKIDPILEARQKYAYGKQNDYLDHHNMIGWTREGNTAHPNSGLATIMSDGPGGNKWMYVGRNKAGQVWRDITGNRSGTVTINADGWGNFSVNGGSVSIWVN

SEQ ID NO: 19812 - protein, 484 aa, Synthetic construct
HHNGTNGTMMQYFEWYLPNDGNHWNRLRSDASNLKDKGITAVWIPPAWKGASQNDVGYGAYDLYDLGEFNQKGTVRTKYGTRNQLQAAVTALKSNGIAVYGDVVMNHKGGADATEWVRAVEVNPSNRNQEVSGDYTIEAWTKFDFPGRGNTHSNFKWRWYHFDGVDWDQSRQLQNRIYKFRGDGKGWDWEVDTENGNYDYLMYADIDMDHPEVVNELRNWGVWYTNTLGLDGFRIDAVKHIKYSFTRDWLTHVRNTTGKNMFAVAEFWKNDIGAIENYLSKTNWNHSVFDVPLHYNLYNASRSGGNYDMRQIFNGTVVQRHPTHAVTFVDNHDSQPEEALESFVEEWFKPLAYALTLTRDQGYPSVFYGDYYGIPTHGVPAMKSKIDPILEARQKYAYGKQNDYLDHHNMIGWTREGNTAHPNSGLATIMSDGPGGNKWMYVGRNKAGQVWRDITGNRSGTVTINADGWGNFSVNGGSVSIWVN

SEQ ID NO: 19813 - protein, 484 aa, Synthetic construct
HHNGTNGTMMQYFEWYLPNDGNHWNRLRSDASNLKDKGITAVWIPPAWKGASQNDVGYGAYDLYDLGEFNQKGTVRTKYGTRNQLQAAVTALKSNGIQVYGDVVMNHKGGADATEWVRAVEVNPSNRNQEVSGDYTIEAWTKFDFPGRGNTHSNFKWRWYHFDGVDWDQSRQLQNRIYKFRGDGKGADWEVDTENGNYDYLMYADIDMDHPEVVNELRNWGVWYTNTLGLDGFRIDAVKHIKYSFTRDWLTHVRNTTGKNMFAVAEFWKNDIGAIENYLSKTNWNHSVFDVPLHYNLYNASRSGGNYDMRQIFNGTVVQRHPTHAVTFVDNHDSQPEEALESFVEEWFKPLAYALTLTRDQGYPSVFYGDYYGIPTHGVPAMKSKIDPILEARQKYAYGKQNDYLDHHNMIGWTREGNTAHPNSGLATIMSDGPGGNKWMYVGRNKAGQVWRDITGNRSGTVTINADGWGNFSVNGGSVSIWVN

SEQ ID NO: 19814 - protein, 484 aa, Synthetic construct
HHNGTNGTMMQYFEWYLPNDGNHWNRLRSDASNLKDKGITAVWIPPAWKGASQNDVGYGAYDLYDLGEFNQKGTVRTKYGTRNQLQAAVTALKSNGIQVYGDVVMNHKGGADATEWVRAVEVNPSNRNQEVSGDYTIEAWTKFDFPGRGNTHSNFKWRWYHFDGVDWDQSRQLQNRIFKFRGDGKGWDWEVDTENGNYDYLMYADIDMDHPEVVNELRNWGVWYTNTLGLDGFRIDAVKHIKYSFTRDWLTHVRNTTGKNMFAVAEFWKNDIGAIENYLSKTNWNHSVFDVPLHYNLYNASRSGGNYDMRQIFNGTVVQRHPTHAVTFVDNHDSQPEEALESFVEEWFKPLAYALTLTRDQGYPSVFYGDYYGIPTHGVPAMKSKIDPILEARQKYAYGKQNDYLDHHNMIGWTREGNTAHPNSGLATIMSDGPGGNKWMYVGRNKAGQVWRDITGNRSGTVTINADGWGNFSVNGGSVSIWVN

SEQ ID NO: 19815 - protein, 484 aa, Synthetic construct
HHNGTNGTMMQYFEWYLPNDGNHWNRLRSDASNLKDKGITAVWIPPAWKGASQNDVGYGAYDLYDLGEFNQKGTVRTKYGTRNQLQAAVTALKSNGIQVYGDVVMNHKGGADATEWVRAVEVNPSNRNQEVSGDNTIEAWTKFDFPGRGNTHSNFKWRWYHFDGVDWDQSRQLQNRIYKFRGDGKGWDWEVDTENGNYDYLMYADIDMDHPEVVNELRNWGVWYTNTLGLDGFRIDAVKHIKYSFTRDWLTHVRNTTGKNMFAVAEFWKNDIGAIENYLSKTNWNHSVFDVPLHYNLYNASRSGGNYDMRQIFNGTVVQRHPTHAVTFVDNHDSQPEEALESFVEEWFKPLAYALTLTRDQGYPSVFYGDYYGIPTHGVPAMKSKIDPILEARQKYAYGKQNDYLDHHNMIGWTREGNTAHPNSGLATIMSDGPGGNKWMYVGRNKAGQVWRDITGNRSGTVTINADGWGNFSVNGGSVSIWVN

SEQ ID NO: 19816 - protein, 484 aa, Synthetic construct
HHNGTNGTMMQYFEWYLPNDGNHWNRLRSDASNLKDKGITAVWIPPAWKGASQNDVGYGAYDLYDLGEFNQKGTVRTKYGTRNQLQAAVTALKSNGIQVYGDVVMNHKGGADATEWVRAVEVNPSNRNQEVSGDYTIEAWTKFDFPGRGNTHSNFKWRWYHFDGVDWDQSRQLQNRIYKFRGDGKGWDWEVDTENGNYDYLMYADIDMDHPEVVNELRNWGVWYTNTLGLDGFRIDAVKHIKYSFTRDWLTHVRNTTGKNMFAVAEFWKNDIGAIENYLSKTNWNHSVFDVPLHYNLYNASRSGGNYDMRWIFNGTVVQRHPTHAVTFVDNHDSQPEEALESFVEEWFKPLAYALTLTRDQGYPSVFYGDYYGIPTHGVPAMKSKIDPILEARQKYAYGKQNDYLDHHNMIGWTREGNTAHPNSGLATIMSDGPGGNKWMYVGRNKAGQVWRDITGNRSGTVTINADGWGNFSVNGGSVSIWVN

SEQ ID NO: 19817 - protein, 484 aa, Synthetic construct
HHNGTNGTMMQYFEWYLPNDGNHWNRLRSDASNLKDKGITAVWIPPAWKGASQNDVGYGAYDLYDLGEFNQKGTVRTKYGTRNQLQAAVTALKSNGIQVYGDVVMNHKGGADATEWVRAVEVNPSNRNQEVSGDYTIEAWTKFDFPGRGNTHSNFKWRWWHFDGVDWDQSRQLQNRIYKFRGDGKGWDWEVDTENGNYDYLMYADIDMDHPEVVNELRNWGVWYTNTLGLDGFRIDAVKHIKYSFTRDWLEHVRNTTGKNMFAVAEFWKNDIGAIENYLSKTNWNHSVFDVPLHYNLYNASRSGGNYDMRQIFNGTVVQRHPTHAVTFVDNHDSQPEEALESFVEEWFKPLAYALTLTRDQGYPSVFYGDYYGIPTHGVPAMKSKIDPILEARQKYAYGKQNDYLDHHNMIGWTREGNTAHPNSGLATIMSDGPGGNKWMYVGRNKAGQVWRDITGNRSGTVTINADGWGNFSVNGGSVSIWVN

SEQ ID NO: 19818 - protein, 484 aa, Synthetic construct
HHNGTNGTMMQYFEWYLPNDGNHWNRLRSDASNLKDKGITAVWIPPAWKGASQNDVGYGAYDLYDLGEFNQKGTLRTKYGTRNQLQAAVTALKSNGIQVYGDVVMNHKGGADATEWVRAVEVNPSNRNQEVSGDYTIEAWTKFDFPGRGNTHSNFKWRWYHFDGVDWDQSRQLQNRIYKFRGDGKGWDWEVDTENGNYDYLMYADIDMDHPEVVNELRNWGVWYTNTLGLDGFRIDAVKHIKYSFTRDWLTHVRNTTGKNMFAVAEFWKNDIGAIENYLSKTNWNHSVFDVPLHYNLYNASRSGGNYDMRQIFNGTVVKRHPTHAVTFVDNHDSQPEEALESFVEEWFKPLAYALTLTRDQGYPSVFYGDYYGIPTHGVPAMKSKIDPILEARQKYAYGKQNDYLDHHNMIGWTREGNTAHPNSGLATIMSDGPGGNKWMYVGRNKAGQVWRDITGNRSGTVTINADGWGNFSVNGGSVSIWVN

SEQ ID NO: 19819 - protein, 484 aa, Synthetic construct
HHNGTNGTMMQYFEWYLPNDGNHWNRLRSDASNLKDFGITAVWIPPAWKGASQNDVGYGAYDLYDLGEFNQKGTVRTKYGTRNQLQAAVTALKSNGIQVYGDVVMNHKGGADATEWVRAVEVNPSNRNQEVSGDYTIEAWTKFDFPGRGNTHSNFKWRWYHFDGVDWDQSRQLQNRIYKFRGDGKGWDWEVDTENGNYDYLMYADIDMDHPEVVNELRNWGVWYTNTLGLDGFRIDAVKHIKYSFTRDWLTHVRNTTGKNMFAVAEFWKNDIGAIENYLSKTNWNHSVFDVPLHYNLYNASRSGGNYDMRQIFNGTVVQRHPTHAVTFVDNHDSQPEEALESFVEEWFKPLAYALTLTRDQGYPSVFYGDYYGIPTHGVPAMKSKIDPILEARQKYAYGKQNDYLDHHNMIGWTREGNTAHPNSGLATIMSDGPGGNKWMYVGRNKAGQVWRDITGNRSGTVTINADGWGNFSVNGGSVSIWVN

SEQ ID NO: 19820 - protein, 484 aa, Synthetic construct
HHNGTNGTMMQYFEWYLPNDGNHWNRLRSDASNLKDKGITAVWIPPAWKGASQNDVGYGAYDLYDLGEFNQKGTVRTKYGTRNQLQAAVTALKSNGIQVYGDVVMNHKGGADATEWVRAVEVNPSNRNQEVSGDYTIEAWTKFDFPGRGNTHSNFKWRWYHFQGVDWDQSRQLQNRIYKFRGDGKGWDWEVDTENGNYDYLMYADIDMDHPEVVNELRNWGVWYTNTLGLDGFRIDAVKHIKYSFTRDWLTHVRNTTGKNMFAVAEFWKNDIGAIENYLSKTNWNHSVFDVPLHYNLYNASRSGGNYDMRQIFNGTVVQRHPTHAVTFVDNHDSQPEEALESFVEEWFKPLAYALTLTRDQGYPSVFYGDYYGIPTHGVPAMKSKIDPILEARQKYAYGKQNDYLDHHNMIGWTREGNTAHPNSGLATIMSDGPGGNKWMYVGRNKAGQVWRDITGNRSGTVTINADGWGNFSVNGGSVSIWVN

SEQ ID NO: 19821 - protein, 484 aa, Synthetic construct
HHNGTNGTMMQYFEWYLPNDGNHWNRLRSDASNLKDKGITAVWIPPAWKGASQNDVGYGAYDLYDLGEFNQKGTVRTKYGTRNQLQAAVTALKSNGIQVYGDVVMNHKGGADATEWVRAVEVNPSNRNQEVSGDYTIEAWTKFDFPGRGNTHSNFKWRWYHFDGVDWDQSRQLQNRIYKFRGDGKGWDWEVDTENGNYDYLMYADIDMDHPEVVNELRNWGVWYTNTLGLDGFRIDAVKHIKYSFTRDWLTHVRNTTGKNMFAVAEFWKNDIGAIENYLSKTNWNHSVFDVPLHYNLYNASRSGGNYDMRQIFNGTVVQRHPTHAVTFVDNHDSQPEEALESFVEEWFKPLAYALTLTRDQGYPSVFYGDYYGIPTHGVPAMKSKIDPILEARQKYAYGKQNDYLDHHNMIGWTREGNTAHPNSGLATIMSDGPGGNKWMYVGRNKAGQVWRDITGNRSGRVTINADGWGNFSVNGGSVSIWVN

SEQ ID NO: 19822 - protein, 484 aa, Synthetic construct
HHNGTNGTMMQYFEWYLPNDGNHWNRLRSDASNLKDKGITAVWIPPAWKGASQNDVGYGAYDLYDLGEFNQKGTVRTKYGTRNQLQAAVTALKSNGIQVYGDVVMNHKGGADATEWVRAVEVNPSNRNQEVSGDYTIEAWTKFDFPGRGNTHSNFKWRWYHFDGVDWDQSRQLQNRIYKFRGDGKGWDWEVDTENGNYDYLMYADIDMDHPEVVNELRNWGVWYTNTLGLDGFRIDAVKHIKYSFTRDWLTHVRNTTGKNMFAVAEFWKNDIGAIENYLSKTNWNHSVFDVPLHYNLYNASRSGGNYDMRQIFNGTVVQRHPTHAVTFVDNHDSQPEEALESFVEEWFKPLAYALTLTRDQGYPSVFYGDYYGIPTHGVPAMKSKISPILEARQKYAYGKQNDYLDHHNMIGWTREGNTAHPNSGLATIMSDGPGGNKWMYVGRNKAGQVWRDITGNRSGTVTINADGWGNFSVNGGSVSIWVN

SEQ ID NO: 19823 - protein, 484 aa, Synthetic construct
HHNGTNGTMMQYFEWYLPNDGNHWNRLRSDASNLKDKGITAVWIPPAWKGASQNDVGYGAYDLYDLGEFNQKGTVRTKYGTRNQLQAAVTALKSNGIQVYGDVVMNHKGGADATEWVRAGEVNPSNRNQEVSGDYTIEAWTKFDFPGRGNTHSNFKWRWYHFDGVDWDQSRQLQNRIYKFRGDGKGWDWEVDTENGNYDYLMYADIDMDHPEVVNELRNWGVWYTNTLGLDGFRIDAVKHIKYSFTRDWLTHVRNTTGKNMFAVAEFWKNDIGAIENYLSKTNWNHSVFDVPLHYNLYNASRSGGNYDMRQIFNGTVVQRHPTHAVTFVDNHDSQPEEALESFVEEWFKPLAYALTLTRDQGYPSVFYGDYYGIPTHGVPAMKSKIDPILEARQKYAYGKQNDYLDHHNMIGWTREGNTAHPNSGLATIMSDGPGGNKWMYVGRNKAGQVWRDITGNRSGTVTINADGWGNFSVNGGSVSIWVN

SEQ ID NO: 19824 - protein, 484 aa, Synthetic construct
HHNGTNGTMMQYFEWYLPNDGNHWNRLRSDASNLKDKGITAVWIPPAWKGASQNDVGYGAYDLYDLGEFNQKGTVRTKYGTRNQLQAAVTALKSNGIQVYGDVVMNHKGGADATEWVRAVEVNPSNRNQEVSGDYTIEAWTKFDFPGRGNTHSNFKWRWYHFDGVDWDQSRQLQNRIYKFRGDGKGWDWEVDTENGNYDYLMYADIDMDHPEVVNELRNWGVWYTNTLGLDGFRIDAVKHIKYSFTRDWLTHVRNTTGKNMFAVAEFWKNDIGAIENYLSKTNWNHSVFDVPLHYNLYNASRSGGNYDMRQIFNGTVVQRHPTHAVTFVDNHDSQPEEALESFVEEWFKPLAYALTLTRDQGYPSVFYGDYYGIPTHGVPAMKSKIDPILEARQKYAYGKQNDYLDHHNMIGWTREGNTAHPNSGLATIMSDGPGGNKWMYVGRNKAGQVWRDITGNRSGTVAINADGWGNFSVNGGSVSIWVN

SEQ ID NO: 19825 - protein, 481 aa, Bacillus sp.
HNGTNATMMQYFEWHLPNDGNHWNRLRDDASNLRNRGITAIWIPPAWKGTSQNDVGYGAYDLYDLGEFNQKGTVRTKYGTRSQLESAIHALKNNGVQVYGDVVMNHKAGADGTEFVDAVEVDPSNRNQETSGTYQIQAWTKFDFPGRGNTYSSFKWRWYHFDGTDWDESRKLNRIYKFTGKAWDWEVDTENGNYDYLMFADLDMDHPEVVNELRRWGEWYTNTLNLDGFRIDAVKHIKFSFTRDWLTHVRNATGKGMFAVAEFWKNDLGALENYLSKTNNNHSVFDVPLHYNLYNASNSRGNYDMAKLLNGTVVQKHPMAAVTFVDNHDSQPGESLESFVQEWFKPLAYALILTREQGYPSVFYGDYYGIPTHSVPAMKAKIDPILAARQNFAYGTQHDYFDHHNIIGWTREGNTTHPNSGLATIMSDGPGGEKWMYVGQNKAGQVWHDITGNKPGTVTINADGWANFSVNKGSVSIWVKR

SEQ ID NO: 19826 - protein, 481 aa, Bacillus sp.
HNGTNATMMQYFEWHLPNDGNHWNRLRDDASNLRNRGITAIWIPPAWKGTSQNDVGYGAYDLYDLGEFNQKGTVRTKYGTRSQLESAIHALKNNGVQVYGDVVMNHKAGADGTEFVTAVEVDPSNRNQETSGTYQIQAYTKFDFPGRGNTYSSFKWRWYHFDGTDWDESRKLNRIYKFSGKAWDWEVDTEFGNYDYLMFADYDMDHPEVVNELRRWGEWYTNTLNLDGFRIDAVKHIKFSFTRDWLTHVRNATGKGMFAVAEFWKNDLGALENYLSKTNWNHSVFDVPLHYNLYNASNSRGNYDMAKLLNGTVVQKHPMHAVTFVDNHDSQPGESLESFVQEWFKPLAYALILTREQGYPSVFYGDYYGIPTHSVPAMKAKIDPILAARQNFAYGTQHDYFDHHNIIGWTREGNTTHPNSGLATIMSDGPGGEKWMYVGQNKAGQVWHDITGNKPGTVTINADGWANFSVNKGSVSIWVKR

SEQ ID NO: 19827 - protein, 481 aa, Bacillus sp.
HNGTNATMMQYFEWHLPNDGNHWNRLRDDASNLRNRGITAIWIPPAWKGTSQNDVGYGAYDLYDLGEFNQKGTVRTKYGTRSQLESAIHALKNNGVQVYGDVVMNHKAGADGTEFVDAVEVDPSNRNQETSGTYQIQAWTKFDFPGRGNTYSSFKWRWYHFDGTDWDESRKLNRIYKFTGKAWDWEVDTENGNYDYLMFADLDMDHPEVVNELRRWGEWYTNTLNLDGFRIDAVKHIKFSFTRDWLTHVRNATGKGMFAVAEFWKNDLGALENYLSKTNNNHSVFDVPLHYNLYNASNSRGNYDMAKLLNGTVVQKTPMHAVTFVDNHDSQPGESLESFVQEWFKPLAYALILTREQGYPSVFYGDYYGIPTHSVPAMKAKIDPILAARQNFAYGTQHDYFDHHNIIGWTREGNTTHPNSGLATIMSDGPGGEKWMYVGQNKAGQVWHDITGNKPGTVTINADGWANFSVNKGSVSIWVKR

SEQ ID NO: 19828 - protein, 481 aa, Bacillus sp.
HNGTNATMMQYFEWHLPNDGNHWNRLRDDASNLRNRGITAIWIPPAWKGTSQNDVGYGAYDLYDLGEFNQKGTVRTKYGTRSQLESAIHALKNNGVQVYGDVVMNHKAGADGTEFVDAVEVDPSNRNQETSGTYQIQAYTKFDFPGRGNTYSSFKWRWYHFDGTDWDESRKLNRIYKFTGKAWDWEVDTEFGNYDYLMFADYDMDHPEVVNELRRWGEWYTNTLNLDGFRIDAVKHIKFSFTRDWLTHVRNATGKGMFAVAEFWKNDLGALENYLSKTNWNHSVFDVPLHYNLYNASNSRGNYDMAKLLNGTVVQKHPMHAVTFVDNHDSQPGESLESFVQEWFKPLAYALILTREQGYPSVFYGDYYGIPTHSVPAMKAKIDPILAARQNFAYGTQHDYFDHHNIIGWTREGNTTHPNSGLATIMSDGPGGEKWMYVGQNKAGQVWHDITGNKPGTVTINADGWANFSVNEGSVSIWVKR

SEQ ID NO: 19829 - protein, 481 aa, Bacillus sp.
HNGTNATMMQYFEWHLPNDGNHWNRLRDDASNLRNRGITAIWIPPAWKGTSQNDVGYGAYDLYDLGEFNQKGTVRTKYGTRSQLESAIHALKNNGVQVYGDVVMNHKAGADGTEFVDAVEVDPSNRNQETSGTYQIQAYTKFDFPGRGNTYSSFKWRWYHFDGTDWDESRKLNRIYKFTGKAWDWEVDTEFGNYDYLMFADYDMDHPEVVNELRRWGEWYTNTLNLDGFRIDAVKHIKFSFTRDWLTHVRNATGKGMFAVAEFWKNDLGALENYLSKTNWNHSVFDVPLHYNLYNASNSRGNYDMAKLLNGTVVQKHPMHAVTFVDNHDSQPGESLESFVQEWFKPLAYALILTREQGYPSVFYGDYYGIPTHSVPAMKAKIDPILAARQNFAYGTQHDYFDHHNIIGWTREGNTTHPNSGLATIMSDGPGGEKWMYVGQNKAGQVWHDITGNKPGTVTINADGWANFSVFGGSVSIWVKR

SEQ ID NO: 19830 - protein, 481 aa, Bacillus sp.
HNGTNATMMQYFEWHLPNDGNHWNRLRDDASNLRNRGITAIWIPPAWKGTSQNDVGYGAYDLYDLGEFNQKGTVRTKYGTRSQLESAIHALKNNGVQVYGDVVMNHKAGADGTEFVDAVEVDPSNRNQETSGTYQIQAWTKFDFPGRGNTYSSFKWRWYHFDGTDWDESRKLNRIYKFTGKAWDWEVDTENGNYDYLMFADLDMDHPEVVNELRRWGEWYTNTLNLDGFRIDAVKHIKFSFTRDWLTHVRNATGKGMSAVAEFWKNDLGALENYLSKTNWNHSVFDVPLHYNLYNASNSRGNYDMAKLLNGTVVQKHPMHAVTFVDNHDSQPGESLESFVQEWFKPLAYALILTREQGVPSVFYGDYYGIPTHSVPAMKAKIDPILAARQNFAYGTQHDYFDHHNIIGWTREGNTTHPNSGLATIMSDGPGGEKWMYVGQNKAGQVWHDITGNKPGTVTINADGWANFSVNKGSVSIWVKR

SEQ ID NO: 19831 - protein, 481 aa, Bacillus sp.
HNGTNATMMQYFEWHLPNDGNHWNRLRDDASNLRNRGINAIWIPPAWKGTSQNDVGYGAYDLYDLGEFNQKGTVRTKYGTRSQLESAIHALKNNGVLVYGDVVMNHKAGADGTEFVDAVEVDPSNRNQETSGTYQIQAWTKFDFPGRGNTYSSFKWRWYHFDGTDWDESRKLNRIYKFTGKAWDWEVDTENGNYDYLMFADLDMDHPEVVNELRRWGEWYTNTLNLDGFRIDAVKHIKFSFTRDWLTHVRNATGKGMFAVAEFWKNDLGALENYLSKTNWNHSVFDVPLHYNLYNASNSRGNYDMAKLLNGTVVQKHPMHAVTFVDNHDSQPGESLESFVQEWFKPLAYALILTREQGYPSVFYGDYYGIPTHSVPAMKAKIDPILAARQNFAYGTQHDYFDHHNIIGWTREGNTTHPNSGLATIMSDGPGGEKWMYVGQNKAGQVWHDITGNKPGTVTINADGWANFSVNKGSVSIWVKR

SEQ ID NO: 19832 - protein, 481 aa, Bacillus sp.
HNGTNATMMQYFEWHLPNDGNHWNRLRDDASNLRNRGITAIWIPPAWKGTSQNDVGYGAYDLYDLGEFNQKGTVRTKYGTRSQLESAIHALKNNGVQVYGDVVMNHKAGADGTEFVDAVEVDPSNRNQETSGTYQIQAWTKFDFPGRGNTYSSFKWRWYHFDGTDWDESRKLNRIYKFTGKAWDWPVDTENGNYDYLMFADLDMDHPEVVNELRRWGEWYTNTLNLDGFRIDAVKHIKFSFTRDWLTHVRNATGKGMFAVAEFWKNDLGALENYLSYTNWNHSVFDVPLHYNLYNASNSRGNYDMAKLLNGTVVQKHPMHAVTFVDNHDSQPGESLESFVQEWFKPLAYALILTREQGYPSVFYGDYYGIPTHSVPAMKAKIDPILAARQNFAYGTQHDYFDHHNIIGWTREGNTTHPNSGLATIMSDGPGGEKWMYVGQNKAGQVWHDITGNKPGTVTINADGWANFSVNKGSVSIWVKR

SEQ ID NO: 19833 - protein, 481 aa, Bacillus sp.
HNGTNATMMQYFEWHLPNDGNHWNRLRDDASNLRNRGITAIWIPPAWKGTSQNDVGYGAYDLYDLGEFNQKGTVRTKYGTRSQLESAIHALKNNGVQVYGDVVMNHKAGADGTEFVDAVEVDPSNRNQETSGTYQIQAWTKFDFPGRGNTYSSFKWRWYHFDGTDWDESRKLNRIYKFTGKAWDWPVDTENGNYDYLMFADYDMDHPEVVNELRRWGEWYTNTLNLDGFRIDAVKHIKFSFTRDWLTHVRNATGKGMFAVAEFWKNDLGALENYLSFTNWNHSVFDVPLHYNLYNASNSRGNYDMAKLLNGTVVQKHPMHAVTFVDNHDSQPGESLESFVQEWFKPLAYALILTREQGYPSVFYGDYYGIPTHSVPAMKAKIDPILAARQNFAYGTQHDYFDHHNIIGWTREGNTTHPNSGLATIMSDGPGGEKWMYVGQNKAGQVWHDITGNKPGTVTINADGWANFSVNKGSVSIWVKR

SEQ ID NO: 19834 - protein, 481 aa, Bacillus sp.
HNGTNATMMQYFEWHLPNDGNHWNRLRDDASNLRNRGITAIWIPPAWKGTSQNDVGYGAYDLYDLGEFNQKGTVRTKYGTRSQLESAIHALKNNGVQVYGDVVMNHKAGADGTEFVDAVEVDPSNRNQETSGTYQIQAWTKFDFPGRGNTYSSFKWRWYHFDGTDWDESRKLNRIYKFTGKAWDWPVDTENGNYDYLMFADYDMDHPEVVNELRRWGEWYTNTLNLDGFRIDAVKHIKFSFTRDWLTHVRNATGKGMFAVAEFWKNDLGALEFYLSKTNWNHSVFDVPLHYNLYNASNSRGNYDMAKLLNGTVVQKHPMHAVTFVDNHDSQPGESLESFVQEWFKPLAYALILTREQGYPSVFYGDYYGIPTHSVPAMKAKIDPILAARQNFAYGTQHDYFDHHNIIGWTREGNTTHPNSGLATIMSDGPGGEKWMYVGQNKAGQVWHDITGNKPGTVTINADGWANFSVNKGSVSIWVKR

SEQ ID NO: 19835 - protein, 481 aa, Bacillus sp.
HNGTNSTMMQYFEWHLPNDGNHWNRLRDDASNLRNRGINAIWIPPAWKGTSQNDVGYGAYDLYDLGEFNQKGTVRTKYGTRSQLESAIHALKNNGVQVYGDVVMNHKAGADGTEFVDAVEVDPSNRNQETSGTYQIQAWTKFDFPGRGNTYSSFKWRWYHFDGTDWDESRKLNRIYKFTGKAWDWEVDTENGNYDYLMFADLDMDHPEVVNELRRWGEWYTNTLNLDGFRIDAVKHIKFSFTRDWLTHVRNATGKGMFAVAEFWKNDLGALENYLSKTNWNHSVFDVPLHYNLYNASNSRGNYDMAKLLNGTVVQKHPMHAVTFVDNHDSQPGESLESFVQEWFKPLAYALILTREQGVPSVFYGDYYGIPTHSVPAMKAKIDPILAARQNFAYGTQHDYFDHHNIIGWTREGNTTHPNSGLATIMSDGPGGEKWMYVGQNKAGQVWHDITGNKPGTVTINADGWANFSVNKGSVSIWVKR

SEQ ID NO: 19836 - protein, 481 aa, Bacillus sp.
HNGTNATMMQYFEWHLPNDGNHWNRLRDDASNLRNRGITAIWIPPAWKGTSQNDVGYGAYDLYDLGEFNQKGTVRTKYGTRSQLESAIHALKNNGVQVYGDVVMNHKAGADGTEFVDAVEVDPSNRNQETSGTYQIQAWTKFDFPGRGNTYSSFKWRWYHFDGTDWDESRKLNRIYKFTGKAWDWEVDTENGNYDYLMFADLDMDHPEVVNELRRWGEWYTNTLNLDGFRIDAVKHIKFSFTRDWLTHVRNATGKGMFAVAEFWKNDLGALENYLSKTNWNHSVFDVPLHYNLYNASNSRGNYDMAKLLNGTVVQKHPYHAVTFVDNHDSQPGESLESFVQEWFKPLAYALILTREYGYPSVFYGDYYGIPTHSVPAMKAKIDPILAARQNFAYGTQHDYFDHHNIIGWTREGNTTHPNSGLATIMSDGPGGEKWMYVGQNKAGQVWHDITGNKPGTVTINADGWANFSVNKGSVSIWVKR

SEQ ID NO: 19837 - protein, 481 aa, Bacillus sp.
HNGTNATMMQYFEWHLPNDGNHWNRLRDDASNLRNRGITAIWIPPAWKGTSQNDVGYGAYDLYDLGEFNQKGTVRTKYGTRSQLESAIHALKNNGVQVYGDVVMNHKAGADGTEFVDAVEVDPSNRNQETSGTYQIQAYTKFDFPGRGNTYSSFKWRWYHFDGTDWDESRKLNRIYKFTGKAWDWEVDTEFGNYDYLMFADYDMDHPEVVNELRRWGEWYTNTLNLDGFRIDAVKHIKFSFTRDWLTHVRNATGKGMFAVAEFWKNDLGALENYLSKTNWNHSVFDVPLHYNLYNASNSRGNYDMAKLLNGTVVQKHPMHAVTFVDNHDSQPGESLESFVQEWFKPLAYALILTREQGYPSVFYGDYYGIPTHSVPAMKAKIDPILAARQNFAYGTQHDYFDHHNIIGWTREGNTTHPNSGLATIMSDGPGGEKWMYVGQNKAGQVWHDITGNKPGTVTINADGWANFSVLGGSVSIWVKR

SEQ ID NO: 19838 - protein, 481 aa, Bacillus sp.
HNGTNATMMQYFEWHLPNDGNHWNRLRDDASNLRNRGITAIWIPPAWKGTSQNDVGYGAYDLYDLGEFNQKGTVRTKYGTRSQLESAIHALKNNGVQVYGDVVMNHKAGADGTEFVDAVEVDPSNRNQETSGTYQIQAWTKFDFPGRGNTYSSFKWRWYHFDGTDWDESRKLNRIYKFTGKAWDWPVDTENGNYDYLMFADYDMDHPEVVNELRRWGEWYTNTLNLDGFRIDAVKHIKFSFTRDWLTHVRNATGKGMFAVAEFWKNDLGALEWYLSKTNWNHSVFDVPLHYNLYNASNSRGNYDMAKLLNGTVVQKHPMHAVTFVDNHDSQPGESLESFVQEWFKPLAYALILTREQGYPSVFYGDYYGIPTHSVPAMKAKIDPILAARQNFAYGTQHDYFDHHNIIGWTREGNTTHPNSGLATIMSDGPGGEKWMYVGQNKAGQVWHDITGNKPGTVTINADGWANFSVNKGSVSIWVKR

SEQ ID NO: 19839 - protein, 481 aa, Bacillus sp.
HNGTNGTMMQYFEWHLPNDGNHWNRLRDDASNLRNRGITAIWIPPAWKGTSQNDVGYGAYDLYDLGEFNQKGTVRTKYGTRSQLESAIHALKNNGVQVYGDVVMNHKAGADGTEFVDAVEVDPSNRNQETSGTYQIQAYTKFDFPGRGNTYSSFKWRWYHFDGTDWDESRKLNRIYKFTGKAWDWEVDTEFGNYDYLMFADYDMDHPEVVNELRRWGEWYTNTLNLDGFRIDAVKHIKFSFTRDWLTHVRNATGKGMFAVAEFWKNDLGALENYLSKTNWNHSVFDVPLHYNLYNASNSRGNYDMAKLLNGTVVQKHYMHAVTFVDNHDSQPGESLESFVQEWFKPLAYALILTREQGYPSVFYGDYYGIPTHSVPAMKAKIDPILAARQNFAYGTQHDYFDHHNIIGWTREGNTTHPNSGLATIMSDGPGGEKWMYVGQNKAGQVWHDITGNKPGTVTINADGWANFSVNKGSVSIWVKR

SEQ ID NO: 19840 - protein, 481 aa, Bacillus sp.
HNGTNATMMQYFEWHLPNDGNHWNRLRDDASNLRNRGITAIWIPPAWKGTSQNDVGYGAYDLYDLGEFNQKGTVRTKYGTRSQLESAIHALKNNGVQVYGDVVMNHKAGADGTEFVDAVEVDPSNRNQETSGTYQIQAYTKFDFPGRGNTYSSFKWRWYHFDGTDWDESRKLNRIYKFTGKAWDWEVDTEFGNYDYLMFADVDMDHPEVVNELRRWGEWYTNTLNLDGFRIDAVKHIKFSFTRDWLTHVRNATGKGMFAVAEYWKNDLGALENYLSKTNWNHSVFDVPLHYNLYNASNSRGNYDMAKLLNGTVVQKHPMHAVTFVDNHDSQPGESLESFVQEWFKPLAYALILTREQGYPSVFYGDYYGIPTHSVPAMKAKIDPILAARQNFAYGTQHDYFDHHNIIGWTREGNTTHPNSGLATIMSDGPGGEKWMYVGQNKAGQVWHDITGNKPGTVTINADGWANFSVNKGSVSIWVKR

SEQ ID NO: 19841 - protein, 481 aa, Bacillus sp.
HNGTNATMMQYFEWHLPNDGNHWNRLRDDASNLRNRGITAIWIPPAWKGTSQNDVGYGAYDLYDLGEFNQKGTVRTKYGTRSQLESAIHALKNNGVQVYGDVVMNHKAGADGTEFVDAVEVDPSNRNQETSGTYQIQAWTKFDFPGRGNTYSSFKWRWYHFDGTDWDESRKLNRIYKFTGKAWDWEVDTENGNYDYLMFADLDMDHPEVVNELRRWGEWYTNTLNLDGFRIDAVKHIKFSFTRDWLTHVRNATGKGMFAVAEFWKNDLGALENYLSKTNWNHSVFDVPLHYNLYNASNSRGNYDMAKLLNGTVVQKHPGHAVTFVDNHDSQPGESLESFVQEWFKPLAYALILTREWGYPSVFYGDYYGIPTHSVPAMKAKIDPILAARQNFAYGTQHDYFDHHNIIGWTREGNTTHPNSGLATIMSDGPGGEKWMYVGQNKAGQVWHDITGNKPGTVTINADGWANFSVNKGSVSIWVKR

SEQ ID NO: 19842 - protein, 481 aa, Bacillus sp.
HNGTNATMMQYFEWHLPNDGNHWNRLRDDASNLRNRGITAIWIPPAWKGTSQNDVGYGAYDLYDLGEFNQKGTVRTKYGTRSQLESAIHALKNNGVQVYGDVVMNHKAGADGTEFVDAVEVDPSNRNQETSGTYQIQAYTKFDFPGRGNTYSSFKWRWYHFDGTDWDESRKLNRIYKFDGKAWDWEVDTEFGNYDYLMFADYDMDHPEVVNELRRWGEWYTNTLNLDGFRIDAVKHIKFSFTRDWLTHVRNATGKGMFAVAEFWKNDLGALENYLSKTNWNHSVFDVPLHYNLYNASNSRGNYDMAKLLNGTVVQKHPMHAVTFVDNHDSQPGESLESFVQEWFKPLAYALILTREQGYPSVFYGDYYGIPTHSVPAMKAKIDPILAARQNFAYGTQHDYFDHHNIIGWTREGNTTHPNSGLATIMSDGPGGEKWMYVGQNKAGQVWHDITGNKPGTVTINADGWANFSVNKGSVSIWVKR

SEQ ID NO: 19843 - protein, 481 aa, Bacillus sp.
HNGTNATMMQYFEWHLPNDGNHWNRLRDDASNLRNRGITAIWIPPAWKGTSQNDVGYGAYDLYDLGEFNQKGTVRTKYGTRSQLESAIHALKNNGVQVYGDVVMNHKAGADGTEFVDAVEVDPSNRNQETSGTYQIQAYTKFDFPGRGNTYSSFKWRWYHFDGTDWDESRKLNRIYKFDGKQWDWEVDTEFGNYDYLMFADVDMDHPEVVNELRRWGEWYTNTLNLDGFRIDAVKHIKFSFTRDWLTHVRNATGKGMFAVAEFWKNDLGALENYLSKTNWNHSVFDVPLHYNLYNASNSRGNYDMAKLLNGTVVQKHPMHAVTFVDNHDSQPGESLESFVQEWFKPLAYALILTREQGYPSVFYGDYYGIPTHSVPAMKAKIDPILAARQNFAYGTQHDYFDHHNIIGWTREGNTTHPNSGLATIMSDGPGGEKWMYVGQNKAGQVWHDITGNKPGTVTINADGWANFSVNKGSVSIWVKR

SEQ ID NO: 19844 - protein, 481 aa, Bacillus sp.
HNGTNATMMQYFEWHLPNDGNHWNRLRDDASNLRNRGITAIWIPPAWKGTSQNDVGYGAYDLYDLGEFNQKGTVRTKYGTRSQLESAIHALKNNGVQVYGDVVMNHKAGADGTENVDAVEVDPSNRNQETSGTYQIQAYTKFDFPGRGNTYSSFKWRWYHFDGTDWDESRKLNRIYKFTGKAWDWEVDTEFGNYDYLMFADYDMDHPEVVNELRRWGEWYTNTLNLDGFRIDAVKHIKFSFTRDWLTHVRNATGKGMFAVAEYWKNDLGALENYLSKTNWNHSVFDVPLHYNLYNASNSRGNYDMAKLLNGTVVQKHPMHAVTFVDNHDSQPGESLESFVQEWFKPLAYALILTREQGYPSVFYGDYYGIPTHSVPAMKAKIDPILAARQNFAYGTQHDYFDHHNIIGWTREGNTTHPNSGLATIMSDGPGGEKWMYVGQNKAGQVWHDITGNKPGTVTINADGWANFSVNKGSVSIWVKR

SEQ ID NO: 19845 - protein, 481 aa, Bacillus sp.
HNGTNATMMQYFEWHLPNDGNHWNRLRDDASNLRNRGITAIWIPPAWKGTSQNDVGYGAYDLYDLGEFNQKGTVRTKYGTRSQLESAIHALKNNGVQVYGDVVMNHKAGADGTEFVDAVEVDPSNRNQETSGTYQIQAWTKFDFPGRGNTYSSFKWRWYHFDGTDWDESRKLNRIYKFTGKAWDWEVDTENGNYDYLMFADLDMDHPEVVNELRRWGEWYTNTLNLDGFRIDAVKHIKFSFTRDWLTHVRNATGKGMFAVAEFWKNDLGALENYLSKTNNNHKVFDVPLHYNLYNASNSRGNYDMAKLLNGTVVQKHPMHAVTFVDNHDSQPGESLESFVQEWFKPLAYALILTREQGYPSVFYGDYYGIPTHSVPAMKAKIDPILAARQNFAYGTQHDYFDHHNIIGWTREGNTTHPNSGLATIMSDGPGGEKWMYVGQNKAGQVWHDITGNKPGTVTINADGWANFSVNKGSVSIWVKR

SEQ ID NO: 19846 - protein, 481 aa, Bacillus sp.
HNGTNGTMMQYFEWHLPNDGNHWNRLRDDASNLRNRGITAIWIPPAWKGTSQNDVGYGAYDLYDLGEFNQKGTVRTKYGTRSQLESAIHALKNNGVQVYGDVVMNHKAGADGTEFVDAVEVDPSNRNQETSGTYQIQAYTKFDFPGRGNTYSSFKWRWYHFDGTDWDESRKLNRIYKFTGKAWDWEVDTEFGNYDYLMFADYDMDHPEVVNELRRWGEWYTNTLNLDGFRIDAVKHIKFSFTRDWLTHVRNATGKGMFAVAEFWKNDLGALENYLSKTNWNHSVFDVPLHYNLYNASNSRGNYDMAKLLNGTVVQKHPMHAVTFVDNHDSQPGESLESFVQEWFKPLAYALILTREMGYPSVFYGDYYGIPTHSVPAMKAKIDPILAARQNFAYGTQHDYFDHHNIIGWTREGNTTHPNSGLATIMSDGPGGEKWMYVGQNKAGQVWHDITGNKPGTVTINADGWANFSVNKGSVSIWVKR

SEQ ID NO: 19847 - protein, 481 aa, Bacillus sp.
HNGTNATMMQYFEWHLPNDGNHWNRLRDDASNLRNRGITAIWIPPAWKGTSQNDVGYGAYDLYDLGEFNQKGTVRTKYGTRSQLESAIHALKNNGVQVYGDVVMNHKAGADGTEFVDAVEVDPSNRNQETSGTYQIQAWTKFDFPGRGNTYSSFKWRWYHFDGTDWDESRKLNRIYKFTGKAWDWEVDTENGNYDYLMFADLDMDHPEVVNELRRWGEWYTNTLNLDGFRIDAVKHIKFSFTRDWLTHVRNATGKGMFAVAEFWKNDLGALENYLSKTNWNHSVFDVPLHYNLYNASNSRGNYDMAKLLNGTVVQKTPMAAVTFVDNHDSQPGESLESFVQEWFKPLAYALILTREQGYPSVFYGDYYGIPTHSVPAMKAKIDPILAARQNFAYGTQHDYFDHHNIIGWTREGNTTHPNSGLATIMSDGPGGEKWMYVGQNKAGQVWHDITGNKPGTVTINADGWANFSVNKGSVSIWVKR

SEQ ID NO: 19848 - protein, 481 aa, Bacillus sp.
HNGTNATMMQYFEWHLPNDGNHWNRLRDDASNLRNRGITAIWIPPAWKGTSQNDVGYGAYDLYDLGEFNQKGTVRTKYGTRSQLESAIHALKNNGVQVYGDVVMNHKAGADGTEFVDAVEVDPSNRNQETSGTYQIQAWTKFDFPGRGNTYSSFKWRWYHFDGTDWDESRKLNRIYKFTGKAWDWPVDTENGNYDYLMFADFDMDHPEVVNELRRWGEWYTNTLNLDGFRIDAVKHIKFSFTRDWLTHVRNATGKGMFAVAEFWKNDLGALENYLSYTNWNHSVFDVPLHYNLYNASNSRGNYDMAKLLNGTVVQKHPMHAVTFVDNHDSQPGESLESFVQEWFKPLAYALILTREQGYPSVFYGDYYGIPTHSVPAMKAKIDPILAARQNFAYGTQHDYFDHHNIIGWTREGNTTHPNSGLATIMSDGPGGEKWMYVGQNKAGQVWHDITGNKPGTVTINADGWANFSVNKGSVSIWVKR

SEQ ID NO: 19849 - protein, 481 aa, Bacillus sp.
HNGTNATMMQYFEWHLPNDGNHWNRLRDDASNLRNRGITAIWIPPAWKGTSQNDVGYGAYDLYDLGEFNQKGTVRTKYGTRSQLESAIHALKNNGVQVYGDVVMNHKAGADGTEFVDAVEVDPSNRNQETSGTYQIQAYTKFDFPGRGNTYSSFKWRWYHFDGTDWDESRKLNRIYKFDGKQWDWEVDTENGNYDYLMFADLDMDHPEVVNELRRWGEWYTNTLNLDGFRIDAVKHIKFSFTRDWLTHVRNATGKGMFAVAEFWKNDLGALENYLSKTNWNHSVFDVPLHYNLYNASNSRGNYDMAKLLNGTVVQKHPMHAVTFVDNHDSQPGESLESFVQEWFKPLAYALILTREQGYPSVFYGDYYGIPTHSVPAMKAKIDPILAARQNFAYGTQHDYFDHHNIIGWTREGNTTHPNSGLATIMSDGPGGEKWMYVGQNKAGQVWHDITGNKPGTVTINADGWANFSVNKGSVSIWVKR

SEQ ID NO: 19850 - protein, 481 aa, Bacillus sp.
HNGTNATMMQYFEWHLPNDGNHWNRLRDDASNLRNRGITAIWIPPAWKGTSQNDVGYGAYDLYDLGEFNQKGTVRTKYGTRSQLESAIHALKNNGVQVYGDVVMNHKAGADGTENVDAVEVDPSNRNQETSGTYQIQAYTKFDFPGRGNTYSSFKWRWYHFDGTDWDESRKLNRIYKFDGKAWDWEVDTEFGNYDYLMFADYDMDHPEVVNELRRWGEWYTNTLNLDGFRIDAVKHIKFSFTRDWLTHVRNATGKGMFAVAEYWKNDLGALENYLSKTNWNHSVFDVPLHYNLYNASNSRGNYDMAKLLNGTVVQKHPMHAVTFVDNHDSQPGESLESFVQEWFKPLAYALILTREQGYPSVFYGDYYGIPTHSVPAMKAKIDPILAARQNFAYGTQHDYFDHHNIIGWTREGNTTHPNSGLATIMSDGPGGEKWMYVGQNKAGQVWHDITGNKPGTVTINADGWANFSVNKGSVSIWVKR

SEQ ID NO: 19851 - protein, 481 aa, Bacillus sp.
HNGTNATMMQYFEWHLPNDGNHWNRLRDDASNLRNRGITAIWIPPAWKGTSQNDVGYGAYDLYDLGEFNQKGTVRTKYGTRSQLESAIHALKNNGVQVYGDVVMNHKAGADGTEFVDAVEVDPSNRNQETSGTYQIQAWTKFDFPGRGNTYSSFKWRWYHFDGTDWDESRKLNRIYKFTGKAWDWPVDTENGNYDYLMFADFDMDHPEVVNELRRWGEWYTNTLNLDGFRIDAVKHIKFSFTRDWLTHVRNATGKGMFAVAEFWKNDLGALEYYLSKTNWNHSVFDVPLHYNLYNASNSRGNYDMAKLLNGTVVQKHPMHAVTFVDNHDSQPGESLESFVQEWFKPLAYALILTREQGYPSVFYGDYYGIPTHSVPAMKAKIDPILAARQNFAYGTQHDYFDHHNIIGWTREGNTTHPNSGLATIMSDGPGGEKWMYVGQNKAGQVWHDITGNKPGTVTINADGWANFSVNKGSVSIWVKR

SEQ ID NO: 19852 - protein, 481 aa, Bacillus sp.
HNGTNATMMQYFEWHLPNDGNHWNRLRDDASNLRNRGITAIWIPPAWKGTSQNDVGYGAYDLYDLGEFNQKGTVRTKYGTRSQLESAIHALKNNGVQVYGDVVMNHKAGADGTEFVDAVEVDPSNRNQETSGTYQIQAWTKFDFPGRGNTYSSFKWRWYHFDGTDWDESRKLNRIYKFTGKAWDWPVDTENGNYDYLMFADLDMDHPEVVNELRRWGEWYTNTLNLDGFRIDAVKHIKFSFTRDWLTHVRNATGKGMFAVAEFWKNDLGALENYLSWTNWNHSVFDVPLHYNLYNASNSRGNYDMAKLLNGTVVQKHPMHAVTFVDNHDSQPGESLESFVQEWFKPLAYALILTREQGYPSVFYGDYYGIPTHSVPAMKAKIDPILAARQNFAYGTQHDYFDHHNIIGWTREGNTTHPNSGLATIMSDGPGGEKWMYVGQNKAGQVWHDITGNKPGTVTINADGWANFSVNKGSVSIWVKR

SEQ ID NO: 19853 - protein, 481 aa, Bacillus sp.
HNGTNATMMQYFEWHLPNDGNHWNRLRDDASNLRNRGITAIWIPPAWKGTSQNDVGYGAYDLYDLGEFNQKGTVRTKYGTRSQLESAIHALKNNGVQVYGDVVMNHKAGADGTEFVDAVEVDPSNRNQETSGTYQIQAWTKFDFPGRGNTYSSFKWRWYHFDGTDWDESRKLNRIYKFTGKAWDWPVDTENGNYDYLMFADFDMDHPEVVNELRRWGEWYTNTLNLDGFRIDAVKHIKFSFTRDWLTHVRNATGKGMFAVAEFWKNDLGALEFYLSKTNWNHSVFDVPLHYNLYNASNSRGNYDMAKLLNGTVVQKHPMHAVTFVDNHDSQPGESLESFVQEWFKPLAYALILTREQGYPSVFYGDYYGIPTHSVPAMKAKIDPILAARQNFAYGTQHDYFDHHNIIGWTREGNTTHPNSGLATIMSDGPGGEKWMYVGQNKAGQVWHDITGNKPGTVTINADGWANFSVNKGSVSIWVKR

SEQ ID NO: 19854 - protein, 481 aa, Bacillus sp.
HNGTNATMMQYFEWHLPNDGNHWNRLRDDASNLRNRGITAIWIPPAWKGTSQNDVGYGAYDLYDLGEFNQKGTVRTKYGTRSQLESAIHALKNNGVQVYGDVVMNHKAGADGTEFVTAVEVDPSNRNQETSGTYQIQAYTKFDFPGRGNTYSSFKWRWYHFDGTDWDESRKLNRIYKFDGKAWDWEVDTEFGNYDYLMFADYDMDHPEVVNELRRWGEWYTNTLNLDGFRIDAVKHIKFSFTRDWLTHVRNATGKGMFAVAEFWKNDLGALENYLSKTNWNHSVFDVPLHYNLYNASNSRGNYDMAKLLNGTVVQKHPMHAVTFVDNHDSQPGESLESFVQEWFKPLAYALILTREQGYPSVFYGDYYGIPTHSVPAMKAKIDPILAARQNFAYGTQHDYFDHHNIIGWTREGNTTHPNSGLATIMSDGPGGEKWMYVGQNKAGQVWHDITGNKPGTVTINADGWANFSVNKGSVSIWVKR

SEQ ID NO: 19855 - protein, 481 aa, Bacillus sp.
HNGTNATMMQYFEWHLPNDGNHWNRLRDDASNLRNRGITAIWIPPAWKGTSQNDVGYGAYDLYDLGEFNQKGTVRTKYGTRSQLESAIHALKNNGVQVYGDVVMNHKAGADGTEFVDAVEVDPSNRNQETSGTYQIQAWTKFDFPGRGNTYSSFKWRWYHFDGTDWDESRKLNRIYKFTGKAWDWPVDTENGNYDYLMFADLDMDHPEVVNELRRWGEWYTNTLNLDGFRIDAVKHIKFSFTRDWLTHVRNATGKGMFAVAEFWKNDLGALEYYLSKTNWNHSVFDVPLHYNLYNASNSRGNYDMAKLLNGTVVQKHPMHAVTFVDNHDSQPGESLESFVQEWFKPLAYALILTREQGYPSVFYGDYYGIPTHSVPAMKAKIDPILAARQNFAYGTQHDYFDHHNIIGWTREGNTTHPNSGLATIMSDGPGGEKWMYVGQNKAGQVWHDITGNKPGTVTINADGWANFSVNKGSVSIWVKR

SEQ ID NO: 19856 - protein, 481 aa, Bacillus sp.
HNGTNHTMMQYFEWHLPNDGNHWNRLRDDASNLRNRGITAIWIPPAWKGTSQNDVGYGAYDLYDLGEFNQKGTVRTKYGTRSQLESAIHALKNNGVLVYGDVVMNHKAKADGTEFVDAVEVDPSNRNQETSGTYQIQAWTKFDFPGRGNTYSSFKWRWYHFDGTDWDESRKLNRIYKFTGKAWDWEVDTENGNYDYLMFADLDMDHPEVVNELRRWGEWYTNTLNLDGFRIDAVKHIKFSFTRDWLTHVRNATGKGMFAVAEFWKNDLGALENYLSKTNWNHSVFDVPLHYNLYNASNSRGNYDMAKLLNGTVVQKHPMHAVTFVDNHDSQPGESLESFVQEWFKPLAYALILTREQGYPSVFYGDYYGIPTHSVPAMKAKIDPILAARQNFAYGTQHDYFDHHNIIGWTREGNTTHPNSGLATIMSDGPGGEKWMYVGQNKAGQVWHDITGNKPGTVTINADGWANFSVNKGSVSIWVKR

SEQ ID NO: 19857 - protein, 481 aa, Bacillus sp.
HNGTNATMMQYFEWHLPNDGNHWNRLRDDASNLRNRGITAIWIPPAWKGTSQNDVGYGAYDLYDLGEFNQKGTVRTKYGTRSQLESAIHALKNNGVQVYGDVVMNHKAGADGTEFVDAVEVDPSNRNQETSGTYQIQAYTKFDFPGRGNTYSSFKWRWYHFDGTDWDESRKLNRIYKFTGKAWDWEVDTEFGNYDYLMFADYDMDHPEVVNELRRWGEWYTNTLNLDGFRIDAVKHIKFSFTRDWLTHVRNATGKGMFAVAEFWKNDLGALENYLSKTNWNHSVFDVPLHYNLYNASNTGGNYDMAKLLNGTVVQKHPMHAVTFVDNHDSQPGESLESFVQEWFKPLAYALILTREQGYPSVFYGDYYGIPTHSVPAMKAKIDPILAARQNFAYGTQHDYFDHHNIIGWTREGNTTHPNSGLATIMSDGPGGEKWMYVGQNKAGQVWHDITGNKPGTVTINADGWANFSVNKGSVSIWVKR

SEQ ID NO: 19858 - protein, 481 aa, Bacillus sp.
HNGTNATMMQYFEWHLPNDGNHWNRLRDDASNLRNRGITAIWIPPAWKGTSQNDVGYGAYDLYDLGEFNQKGTVRTKYGTRSQLESAIHALKNNGVQVYGDVVMNHKAGADGTEFVDAVEVDPSNRNQETSGTYQIQAWTKFDFPGRGNTYSSFKWRWYHFDGTDWDESRKLNRIYKFTGKAWDWPVDTENGNYDYLMFADFDMDHPEVVNELRRWGEWYTNTLNLDGFRIDAVKHIKFSFTRDWLTHVRNATGKGMFAVAEFWKNDLGALEWYLSKTNWNHSVFDVPLHYNLYNASNSRGNYDMAKLLNGTVVQKHPMHAVTFVDNHDSQPGESLESFVQEWFKPLAYALILTREQGYPSVFYGDYYGIPTHSVPAMKAKIDPILAARQNFAYGTQHDYFDHHNIIGWTREGNTTHPNSGLATIMSDGPGGEKWMYVGQNKAGQVWHDITGNKPGTVTINADGWANFSVNKGSVSIWVKR

SEQ ID NO: 19859 - protein, 481 aa, Bacillus sp.
HNGTNSTMMQYFEWHLPNDGNHWNRLRDDASNLRNRGINAIWIPPAWKGTSQNDVGYGAYDLYDLGEFNQKGTVRTKYGTRSQLESAIHALKNNGVLVYGDVVMNHKAGADGTEFVDAVEVDPSNRNQETSGTYQIQAWTKFDFPGRGNTYSSFKWRWYHFDGTDWDESRKLNRIYKFTGKAWDWEVDTENGNYDYLMFADLDMDHPEVVNELRRWGEWYTNTLNLDGFRIDAVKHIKFSFTRDWLTHVRNATGKGMFAVAEFWKNDLGALENYLSKTNWNHSVFDVPLHYNLYNASNSRGNYDMAKLLNGTVVQKHPMHAVTFVDNHDSQPGESLESFVQEWFKPLAYALILTREQGYPSVFYGDYYGIPTHSVPAMKAKIDPILAARQNFAYGTQHDYFDHHNIIGWTREGNTTHPNSGLATIMSDGPGGEKWMYVGQNKAGQVWHDITGNKPGTVTINADGWANFSVNKGSVSIWVKR

SEQ ID NO: 19860 - protein, 481 aa, Bacillus sp.
HNGTNATMMQYFEWHLPNDGNHWNRLRDDASNLRNRGITAIWIPPAWKGTSQNDVGYGAYDLYDLGEFNQKGTVRTKYGTRSQLESAIHALKNNGVQVYGDVVMNHKAGADGTEFVDAVEVDPSNRNQETSGTYQIQAWTKFDFPGRGNTYSSFKWRWYHFDGTDWDESRKLNRIYKFTGKAWDWPVDTENGNYDYLMFADLDMDHPEVVNELRRWGEWYTNTLNLDGFRIDAVKHIKFSFTRDWLTHVRNATGKGMFAVAEFWKNDLGALEWYLSKTNWNHSVFDVPLHYNLYNASNSRGNYDMAKLLNGTVVQKHPMHAVTFVDNHDSQPGESLESFVQEWFKPLAYALILTREQGYPSVFYGDYYGIPTHSVPAMKAKIDPILAARQNFAYGTQHDYFDHHNIIGWTREGNTTHPNSGLATIMSDGPGGEKWMYVGQNKAGQVWHDITGNKPGTVTINADGWANFSVNKGSVSIWVKR

SEQ ID NO: 19861 - protein, 481 aa, Bacillus sp.
HNGTNATMMQYFEWHLPNDGNHWNRLRDDASNLRNRGITAIWIPPAWKGTSQNDVGYGAYDLYDLGEFNQKGTVRTKYGTRSQLESAIHALKNNGVQVYGDVVMNHKAGADGTEFVDAVEVNPSNRNQETSGTYQIQAYTKFDFPGRGNTYSSFKWRWYHFDGTDWDESRKLNRVYKFTGKAWDWEVDTEFGNYDYLMFADYDMDHPEVVNELRRWGEWYTNTLNLDGFRIDAVKHIKFSFTRDWLTHVRNATGKGMFAVAEFWKNDLGALENYLSKTNWNHSVFDVPLHYNLYNASNSRGNYDMAKLLNGTVVQKHPMHAVTFVDNHDSQPGESLESFVQEWFKPLAYALILTREQGYPSVFYGDYYGIPTHSVPAMKAKIDPILAARQNFAYGTQHDYFDHHNIIGWTREGNTTHPNSGLATIMSDGPGGEKWMYVGQNKAGQVWHDITGNKPGTVTINADGWANFSVNKGSVSIWVKR

SEQ ID NO: 19862 - protein, 481 aa, Bacillus sp.
HNGTNATMMQYFEWHLPNDGNHWNRLRDDASNLRNRGITAIWIPPAWKGTSQNDVGYGAYDLYDLGEFNQKGTVRTKYGTRSQLESAIHALKNNGVQVYGDVVMNHKAGADGTEFVDAVEVDPSNRNQETSGTYQIQAYTKFDFPGRGNTYSSFKWRWYHFDGTDWDESRKLNRIYKFTGKAWDWEVDTEFGNYDYLMFADYDMDHPEVVNELRRWGEWYTNTLNLDGFRIDAVKHIKFSFTRDWLTHVRNADGKEMFAVAEFWKNDLGALENYLSKTNWNHSVFDVPLHYNLYNASNSRGNYDMAKLLNGTVVQKHPMHAVTFVDNHDSQPGESLESFVQEWFKPLAYALILTREQGYPSVFYGDYYGIPTHSVPAMKAKIDPILAARQNFAYGTQHDYFDHHNIIGWTREGNTTHPNSGLATIMSDGPGGEKWMYVGQNKAGQVWHDITGNKPGTVTINADGWANFSVNKGSVSIWVKR

SEQ ID NO: 19863 - protein, 481 aa, Bacillus sp.
HNGTNATMMQYFEWHLPNDGNHWNRLRDDASNLRNRGITAIWIPPAWKGTSQNDVGYGAYDLYDLGEFNQKGTVRTKYGTRSQLESAIHALKNNGVQVYGDVVMNHKAGADGTEFVDAVEVDPSNRNQETSGTYQIQAWTKFDFPGRGNTYSSFKWRWYHFDGTDWDESRKLNRIYKFTGKAWDWEVDTENGNYDYLMFADLDMDHPEVVNELRRWGEWYTNTLNLDGFRIDAVKHIKFSFTRDWLTHVRNATGKGMFAVAEFWKNDLGALENYLSKTNWNHLVFDVPLHYNLYNASNSRGNYDMAKLLNGTVVQKTPMHAVTFVDNHDSQPGESLESFVQEWFKPLAYALILTREQGYPSVFYGDYYGIPTHSVPAMKAKIDPILAARQNFAYGTQHDYFDHHNIIGWTREGNTTHPNSGLATIMSDGPGGEKWMYVGQNKAGQVWHDITGNKPGTVTINADGWANFSVNKGSVSIWVKR

SEQ ID NO: 19864 - protein, 481 aa, Bacillus sp.
HNGTNATMMQYFEWHLPNDGNHWNRLRDDASNLRNRGITAIWIPPAWKGTSQNDVGYGAYDLYDLGEFNQKGTVRTKYGTRSQLESAIHALKNNGVQVYGDVVMNHKAGADGTEFVDAVEVDPSNRNQETSGTYQIQAYTKFDFPGRGNTYSSFKWRWYHFDGTDWDESRKLNRIYKFTGKAWDWEVDTEFGNYDYLMFADYDMDHPEVVNELRRWGEWYTNTLNLDGFRIDAVKHIKFSFTRDWLTHVRNATGKGMFAVAEFWKNDLGALENYLSKTNWNHSVFDVPLHYNLYNASNSRGNYDMAKLLNGTVVQKHPMHAVTFVDNHDSQPGESLESFVQEWFKPLAYALILTREQGYPSVFYGDYYGIPTHSVPAMKAKIDPILEARQWFAYGTQHDYFDHHNIIGWTREGNTTHPNSGLATIMSDGPGGEKWMYVGQNKAGQVWHDITGNKPGTVTINADGWANFSVNKGSVSIWVKR

SEQ ID NO: 19865 - protein, 481 aa, Bacillus sp.
HNGTNATMMQYFEWHLPNDGNHWNRLRDDASNLRNRGITAIWIPPAWKGTSQNDVGYGAYDLYDLGEFNQKGTVRTKYGTRSQLESAIHALKNNGVQVYGDVVMNHKAGADGTEFVDAVEVDPSNRNQETSGTYQIQAWTKFDFPGRGNTYSSFKWRWYHFDGTDWDESRKLNRIYKFTGKAWDWEVDTENGNYDYLMFADLDMDHPEVVNELRRWGEWYTNTLNLDGFRIDAVKHIKFSFTRDWLTHVRNATGKGMFAVAEFWKNDLGALENYLSKTNWNHLVFDVPLHYNLYNASNSRGNYDMAKLLNGTVVQKHPMHAVTFVDNHDSQPGESLESFVQEWFKPLAYALILTREQGVPSVFYGDYYGIPTHSVPAMKAKIDPILAARQNFAYGTQHDYFDHHNIIGWTREGNTTHPNSGLATIMSDGPGGEKWMYVGQNKAGQVWHDITGNKPGTVTINADGWANFSVNKGSVSIWVKR

SEQ ID NO: 19866 - protein, 481 aa, Bacillus sp.
HNGTNATMMQYFEWHLPNDGNHWNRLRDDASNLRNRGITAIWIPPAWKGTSQNDVGYGAYDLYDLGEFNQKGTVRTKYGTRSQLESAIHALKNNGVQVYGDVVMNHKAGADGTEFVDAVEVDPSNRNQETSGTYQIQAWTKFDFPGRGNTYSSFKWRWYHFDGTDWDESRKLNRIYKFTGKAWDWEVDTENGNYDYLMFADLDMDHPEVVNELRRWGEWYTNTLNLDGFRIDAVKHIKFSFTRDWLTHVRNATGKGMFAVAEFWKNDLGALENYLSKTNWNHSVFDVPLHYNLYNASNSRGNYDMAKLLNGTVVQKHPMHAVTFVDNHDSQPGESLESFVQEWFKPLAYALILTRWWGYPSVFYGDYYGIPTHSVPAMKAKIDPILAARQNFAYGTQHDYFDHHNIIGWTREGNTTHPNSGLATIMSDGPGGEKWMYVGQNKAGQVWHDITGNKPGTVTINADGWANFSVNKGSVSIWVKR

SEQ ID NO: 19867 - protein, 481 aa, Bacillus sp.
HNGTNATMMQYFEWHLPNDGNHWNRLRDDASNLRNRGITAIWIPPAWKGTSQNDVGYGAYDLYDLGEFNQKGTVRTKYGTRSQLESAIHALKNNGVQVYGDVVMNHKAGADGTEFVTAVEVDPSNRNQETSGTYQIQAYTKFDFPGRGNTYSSFKWRWYHFDGTDWDESRKLNRIYKFTGKAWDWEVDTEFGNYDYLMFADLDMDHPEVVNELRRWGEWYTNTLNLDGFRIDAVKHIKFSFTRDWLTHVRNATGKGMFAVAEFWKNDLGALENYLSYTNWNHSVFDVPLHYNLYNASNSGGNYDMAKLLNGTVVQKHPMHAVTFVDNHDSQPGESLESFVQEWFKPLAYALILTREQGYPSVFYGDYYGIPTHSVPAMKAKIDPILAARQNFAYGTQHDYFDHHNIIGWTREGNTTHPNSGLATIMSDGPGGEKWMYVGQNKAGQVWHDITGNKPGTVTINADGWANFSVNGASVSIWVKR

SEQ ID NO: 19868 - protein, 481 aa, Bacillus sp.
HNGTNATMMQYFEWHLPNDGNHWNRLRDDASNLRNRGITAIWIPPAWKGTSQNDVGYGAYDLYDLGEFNQKGTVRTKYGTRSQLESAIHALKNNGVQVYGDVVMNHKAGADGTEFVDAVEVDPSNRNQETSGTYQIQAYTKFDFPGRGNTYSSFKWRWYHFDGTDWDESRKLNRIYKFDGKAWDWEVDTEFGNYDYLMFADVDMDHPEVVNELRRWGEWYTNTLNLDGFRIDAVKHIKFSFTRDWLTHVRNATGKGMFAVAEYWKNDLGALENYLSKTNWNHSVFDVPLHYNLYNASNSRGNYDMAKLLNGTVVQKHPMHAVTFVDNHDSQPGESLESFVQEWFKPLAYALILTREQGYPSVFYGDYYGIPTHSVPAMKAKIDPILAARQNFAYGTQHDYFDHHNIIGWTREGNTTHPNSGLATIMSDGPGGEKWMYVGQNKAGQVWHDITGNKPGTVTINADGWANFSVNKGSVSIWVKR

SEQ ID NO: 19869 - protein, 481 aa, Bacillus sp.
HNGTNATMMQYFEWHLPNDGNHWNRLRDDASNLRNRGITAIWIPPAWKGTSQNDVGYGAYDLYDLGEFNQKGTVRTKYGTRSQLESAIHALKNNGVQVYGDVVMNHKAGADGTEFVDAVEVDPSNRNQETSGTYQIQAWTKFDFPGRGNTYSSFKWRWYHFDGTDWDESRKLNRIYKFTGKAWDWEVDTENGNYDYLMFADLDMDHPEVVNELRRWGEWYTNTLNLDGFRIDAVKHIKFSFTRDWLTHVRNATGKGMFAVAEFWKNDLGALENYLSKTNWNHSVFDVPLHYNLYNASNSRGNYDMAKLLNGTVVQKHPGHAVTFVDNHDSQPGESLESFVQEWFKPLAYALILTRWQGYPSVFYGDYYGIPTHSVPAMKAKIDPILAARQNFAYGTQHDYFDHHNIIGWTREGNTTHPNSGLATIMSDGPGGEKWMYVGQNKAGQVWHDITGNKPGTVTINADGWANFSVNKGSVSIWVKR

SEQ ID NO: 19870 - protein, 481 aa, Bacillus sp.
HNGTNATMMQYFEWHLPNDGNHWNRLRDDASNLRNRGITAIWIPPAWKGTSQNDVGYGAYDLYDLGEFNQKGTVRTKYGTRSQLESAIHALKNNGVQVYGDVVMNHKAGADGTENVDAVEVDPSNRNQETSGTYQIQAYTKFDFPGRGNTYSSFKWRWYHFDGTDWDESRKLNRIYKFTGKQWDWEVDTEFGNYDYLMFADYDMDHPEVVNELRRWGEWYTNTLNLDGFRIDAVKHIKFSFTRDWLTHVRNATGKGMFAVAEFWKNDLGALENYLSKTNWNHSVFDVPLHYNLYNASNSRGNYDMAKLLNGTVVQKHPMHAVTFVDNHDSQPGESLESFVQEWFKPLAYALILTREQGYPSVFYGDYYGIPTHSVPAMKAKIDPILAARQNFAYGTQHDYFDHHNIIGWTREGNTTHPNSGLATIMSDGPGGEKWMYVGQNKAGQVWHDITGNKPGTVTINADGWANFSVNKGSVSIWVKR

SEQ ID NO: 19871 - protein, 481 aa, Bacillus sp.
HNGTNATMMQYFEWHLPNDGNHWNRLRDDASNLRNRGITAIWIPPAWKGTSQNDVGYGAYDLYDLGEFNQKGTVRTKYGTRSQLESAIHALKNNGVQVYGDVVMNHKAGADGTEFVTAVEVDPSNRNQETSGTYQIQAYTKFDFPGRGNTYSSFKWRWYHFDGTDWDESRKLNRIYKFTGKAWDWEVDTEFGNYDYLMFADLDMDHPEVVNELRRWGEWYTNTLNLDGFRIDAVKHIKFSFTRDWLTHVRNATGKGMFAVAEFWKNDLGALENYLSKTNWNHSVFDVPLHYNLYNASNSRGNYDMAKLLNGTVVQKHPMHAVTFVDNHDSQPGESLESFVQEWFKPLAYALILTREQGYPSVFYGDYYGIPTHSVPAMKAKIDPILAARQNFAYGTQHDYFDHHNIIGWTREGNTTHPNSGLATIMSDGPGGEKWMYVGQNKAGQVWHDITGNKPGTVTINADGWANFSVNGASVSIWVKR

SEQ ID NO: 19872 - protein, 481 aa, Bacillus sp.
HNGTNATMMQYFEWHLPNDGNHWNRLRDDASNLRNRGITAIWIPPAWKGTSQNDVGYGAYDLYDLGEFNQKGTVRTKYGTRSQLESAIHALKNNGVQVYGDVVMNHKAGADGTEFVDAVEVDPSNRNQETSGTYQIQAWTKFDFPGRGNTYSSFKWRWYHFDGTDWDESRKLNRIYKFTGKAWDWPVDTENGNYDYLMFADLDMDHPEVVNELRRWGEWYTNTLNLDGFRIDAVKHIKFSFTRDWLTHVRNATGKGMFAVAEFWKNDLGALEFYLSKTNWNHSVFDVPLHYNLYNASNSRGNYDMAKLLNGTVVQKHPMHAVTFVDNHDSQPGESLESFVQEWFKPLAYALILTREQGYPSVFYGDYYGIPTHSVPAMKAKIDPILAARQNFAYGTQHDYFDHHNIIGWTREGNTTHPNSGLATIMSDGPGGEKWMYVGQNKAGQVWHDITGNKPGTVTINADGWANFSVNKGSVSIWVKR

SEQ ID NO: 19873 - protein, 481 aa, Bacillus sp.
HNGTNATMMQYFEWHLPNDGNHWNRLRDDASNLRNRGITAIWIPPAWKGTSQNDVGYGAYDLYDLGEFNQKGTVRTKYGTRSQLESAIHALKNNGVLVYGDVVMNHKAKADGTEFVDAVEVDPSNRNQETSGTYQIQAWTKFDFPGRGNTYSSFKWRWYHFDGTDWDESRKLNRIYKFTGKAWDWEVDTENGNYDYLMFADLDMDHPEVVNELRRWGEWYTNTLNLDGFRIDAVKHIKFSFTRDWLTHVRNATGKGMFAVAEFWKNDLGALENYLSKTNWNHSVFDVPLHYNLYNASNSRGNYDMAKLLNGTVVQKHPMHAVTFVDNHDSQPGESLESFVQEWFKPLAYALILTREQGYPSVFYGDYYGIPTHSVPAMKAKIDPILAARQNFAYGTQHDYFDHHNIIGWTREGNTTHPNSGLATIMSDGPGGEKWMYVGQNKAGQVWHDITGNKPGTVTINADGWANFSVNKGSVSIWVKR

SEQ ID NO: 19874 - protein, 481 aa, Bacillus sp.
HNGTNSTMMQYFEWHLPNDGNHWNRLRDDASNLRNRGITAIWIPPAWKGTSQNDVGYGAYDLYDLGEFNQKGTVRTKYGTRSQLESAIHALKNNGVQVYGDVVMNHKAGADGTEFVDAVEVDPSNRNQETSGTYQIQAWTKFDFPGRGNTYSSFKWRWYHFDGTDWDESRKLNRIYKFTGKAWDWEVDTENGNYDYLMFADLDMDHPEVVNELRRWGEWYTNTLNLDGFRIDAVKHIKFSFTRDWLTHVRNATGKGMSAVAEFWKNDLGALENYLSKTNWNHSVFDVPLHYNLYNASNSRGNYDMAKLLNGTVVQKHPMHAVTFVDNHDSQPGESLESFVQEWFKPLAYALILTREQGVPSVFYGDYYGIPTHSVPAMKAKIDPILAARQNFAYGTQHDYFDHHNIIGWTREGNTTHPNSGLATIMSDGPGGEKWMYVGQNKAGQVWHDITGNKPGTVTINADGWANFSVNKGSVSIWVKR

SEQ ID NO: 19875 - protein, 481 aa, Bacillus sp.
HNGTNATMMQYFEWHLPNDGNHWNRLRDDASNLRNRGITAIWIPPAWKGTSQNDVGYGAYDLYDLGEFNQKGTVRTKYGTRSQLESAIHALKNNGVQVYGDVVMNHKAGADGTEFVTAVEVDPSNRNQETSGTYQIQAYTKFDFPGRGNTYSSFKWRWYHFDGTDWDESRKLNRIYKFTGKAWDWEVDTEFGNYDYLMFADLDMDHPEVVNELRRWGEWYTNTLNLDGFRIDAVKHIKFSFTRDWLTHVRNATGKGMFAVAEFWKNDLGALENYLSKTNWNHSVFDVPLHYNLYNASNSRGNYDMAKLLNGTVVQKHPMHAVTFVDNHDSQPGESLESFVQEWFKPLAYALILTREQGYPSVFYGDYYGIPTHSVPAMKAKIDPILAARQNFAYGTQHDYFDHHNIIGWTREGNTTHPNSGLATIMSDGPGGEKWMYVGQNKAGQVWHDITGNKPGTVTINADGWANFSVNKGSVSIWVKR

SEQ ID NO: 19876 - protein, 481 aa, Bacillus sp.
HNGTNATMMQYFEWHLPNDGNHWNRLRDDASNLRNRGITAIWIPPAWKGTSQNDVGYGAYDLYDLGEFNQKGTVRTKYGTRSQLESAIHALKNNGVQVYGDVVMNHKAGADGTEFVDAVEVDPSNRNQETSGTYQIQAWTKFDFPGRGNTYSSFKWRWYHFDGTDWDESRKLNRIYKFTGKAWDWEVDTENGNYDYLMFADLDMDHPEVVNELRRWGEWYTNTLNLDGFRIDAVKHIKFSFTRDWLTHVRNATGKGMFAVAEFWKNDLGALENYLSKTNWNHSVFDVPLHYNLYNASNSRGNYDMAKLLNGTVVQKHHYHAVTFVDNHDSQPGESLESFVQEWFKPLAYALILTREQGYPSVFYGDYYGIPTHSVPAMKAKIDPILAARQNFAYGTQHDYFDHHNIIGWTREGNTTHPNSGLATIMSDGPGGEKWMYVGQNKAGQVWHDITGNKPGTVTINADGWANFSVNKGSVSIWVKR

SEQ ID NO: 19877 - protein, 481 aa, Bacillus sp.
HNGTNATMMQYFEWHLPNDGNHWNRLRDDASNLRNRGITAIWIPPAWKGTSQNDVGYGAYDLYDLGEFNQKGTVRTKYGTRSQLESAIHALKNNGVQVYGDVVMNHKAGADGTEFVDAVEVDPSNRNQETSGTYQIQAWTKFDFPGRGNTYSSFKWRWYHFDGTDWDESRKLNRIYKFTGKAWDWPVDTENGNYDYLMFADYDMDHPEVVNELRRWGEWYTNTLNLDGFRIDAVKHIKFSFTRDWLTHVRNATGKGMFAVAEFWKNDLGALENYLSYTNWNHSVFDVPLHYNLYNASNSRGNYDMAKLLNGTVVQKHPMHAVTFVDNHDSQPGESLESFVQEWFKPLAYALILTREQGYPSVFYGDYYGIPTHSVPAMKAKIDPILAARQNFAYGTQHDYFDHHNIIGWTREGNTTHPNSGLATIMSDGPGGEKWMYVGQNKAGQVWHDITGNKPGTVTINADGWANFSVNKGSVSIWVKR

SEQ ID NO: 19878 - protein, 481 aa, Bacillus sp.
HNGTNATMMQYFEWHLPNDGNHWNRLRDDASNLRNRGITAIWIPPAWKGTSQNDVGYGAYDLYDLGEFNQKGTVRTKYGTRSQLESAIHALKNNGVQVYGDVVMNHKAGADGTEFVDAVEVDPSNRNQETSGTYQIQAWTKFDFPGRGNTYSSFKWRWYHFDGTDWDESRKLNRIYKFTGKAWDWEVDTENGNYDYLMFADLDMDHPEVVNELRRWGEWYTNTLNLDGFRIDAVKHIKFSFTRDWLTHVRNATGKGMFAVAEFWKNDLGALENYLSKTNWNHKVFDVPLHYNLYNASNSRGNYDMAKLLNGTVVQKHPMHAVTFVDNHDSQPGESLESFVQEWFKPLAYALILTREQGVPSVFYGDYYGIPTHSVPAMKAKIDPILAARQNFAYGTQHDYFDHHNIIGWTREGNTTHPNSGLATIMSDGPGGEKWMYVGQNKAGQVWHDITGNKPGTVTINADGWANFSVNKGSVSIWVKR

SEQ ID NO: 19879 - protein, 481 aa, Bacillus sp.
HNGTNATMMQYFEWHLPNDGNHWNRLRDDASNLRNRGITAIWIPPAWKGTSQNDVGYGAYDLYDLGEFNQKGTVRTKYGTRSQLESAIHALKNNGVQVYGDVVMNHKAGADGTEFVDAVEVDPSNRNQETSGTYQIQAYTKFDFPGRGNTYSSFKWRWYHFDGTDWDESRKLNRIYKFTGKAWDWEVDTEFGNYDYLMFADYDMDHPEVVNELRRWGEWYTNTLNLDGFRIDAVKHIKFSFTRDWLTHVRNATGKGMFAVAEFWKNDLGALENYLSKTNWNHSVFDVPLHYNLYNASNYGGNYDMAKLLNGTVVQKHPMHAVTFVDNHDSQPGESLESFVQEWFKPLAYALILTREQGYPSVFYGDYYGIPTHSVPAMKAKIDPILAARQNFAYGTQHDYFDHHNIIGWTREGNTTHPNSGLATIMSDGPGGEKWMYVGQNKAGQVWHDITGNKPGTVTINADGWANFSVNKGSVSIWVKR

SEQ ID NO: 19880 - protein, 481 aa, Bacillus sp.
HNGTNGTMMQYFEWHLPNDGNHWNRLRDDASNLRNRGITAIWIPPAWKGTSQNDVGYGAYDLYDLGEFNQKGTVRTKYGTRSQLESAIHALKNNGVQVYGDVVMNHKAGADGTEFVDAVEVDPSNRNQETSGTYQIQAYTKFDFPGRGNTYSSFKWRWYHFDGTDWDESRKLNRIYKFTGKAWDWEVDTEFGNYDYLMFADYDMDHPEVVNELRRWGEWYTNTLNLDGFRIDAVKHIKFSFTRDWLTHVRNATGKGMFAVAEFWKNDLGALENYLSKTNWNHSVFDVPLHYNLYNASNSRGNYDMAKLLNGTVVQKHPMHAVTFVDNHDSQPGESLESFVQEWFKPLAYALILTREYGYPSVFYGDYYGIPTHSVPAMKAKIDPILAARQNFAYGTQHDYFDHHNIIGWTREGNTTHPNSGLATIMSDGPGGEKWMYVGQNKAGQVWHDITGNKPGTVTINADGWANFSVNKGSVSIWVKR

SEQ ID NO: 19881 - protein, 481 aa, Bacillus sp.
HNGTNATMMQYFEWHLPNDGNHWNRLRDDASNLRNRGITAIWIPPAWKGTSQNDVGYGAYDLYDLGEFNQKGTVRTKYGTRSQLESAIHALKNNGVQVYGDVVMNHKAGADGTENVDAVEVDPSNRNQETSGTYQIQAYTKFDFPGRGNTYSSFKWRWYHFDGTDWDESRKLNRIYKFDGKAWDWPVDTEFGNYDYLMFADYDMDHPEVVNELRRWGEWYTNTLNLDGFRIDAVKHIKFSFTRDWLTHVRNATGKGMFAVAEFWKNDLGALENYLSKTNWNHSVFDVPLHYNLYNASNSRGNYDMAKLLNGTVVQKHPMHAVTFVDNHDSQPGESLESFVQEWFKPLAYALILTREQGYPSVFYGDYYGIPTHSVPAMKAKIDPILAARQNFAYGTQHDYFDHHNIIGWTREGNTTHPNSGLATIMSDGPGGEKWMYVGQNKAGQVWHDITGNKPGTVTINADGWANFSVNKGSVSIWVKR

SEQ ID NO: 19882 - protein, 481 aa, Bacillus sp.
HNGTNATMMQYFEWHLPNDGNHWNRLRDDASNLRNRGITAIWIPPAWKGTSQNDVGYGAYDLYDLGEFNQKGTVRTKYGTRSQLESAIHALKNNGVQVYGDVVMNHKAGADGTEFVDAVEVDPSNRNQETSGTYQIQAYTKFDFPGRGNTYSSFKWRWYHFDGTDWDESRKLNRIYKFTGKAWDWEVDTEFGNYDYLMFADYDMDHPEVVNELRRWGEWYTNTLNLDGFRIDAVKHIKFSFTRDWLTHVRNATGKGMFAVAEFWKNDLGALENYLSKTNWNHSVFDVPLHYNLYNASNSRGNYDMAKLLNGTVVQKHPMHAVTFVDNHDSQPGESLESFVQEWFKPLAYALILTREQGYPSVFYGDYYGIPTHSVPAMKAKIDPILAARQNFAYGTQHDYFDHHNIIGWTREGNTTHPNSGLATIMSDGPGGEKWMYVGQNKAGQVWHDITGNKPGTVTINADGWANFSVNGASVSIWVKR

SEQ ID NO: 19883 - protein, 481 aa, Bacillus sp.
HNGTNATMMQYFEWHLPNDGNHWNRLRDDASNLRNNGITAIWIPPAWKGTSQNDVGYGAYDLYDLGEFNQKGTVRTKYGTRSQLESAIHALKNNGVQVYGDVVMNHKAGADGTEFVDAVEVDPSNRNQETSGTYQIQAYTKFDFPGRGNTYSSFKWRWYHFDGTDWDESRKLNRIYKFTGKAWDWEVDTEFGNYDYLMFADYDMDHPEVVNELRRWGEWYTNTLNLDGFRIDAVKHIKFSFTRDWLTHVRNATGKGMFAVAEFWKNDLGALENYLSKTNWNHSVFDVPLHYNLYNASNSRGNYDMAKLLNGTVVQKHPMHAVTFVDNHDSQPGESLESFVQEWFKPLAYALILTREQGYPSVFYGDYYGIPTHSVPAMKAKIDPILEARQNFAYGTQHDYFDHHNIIGWTREGNTTHPNSGLATIMSDGPGGEKWMYVGQNKAGQVWHDITGNKPGTVTINADGWANFSVNKGSVSIWVKR

SEQ ID NO: 19884 - protein, 481 aa, Bacillus sp.
HNGTNATMMQYFEWHLPNDGNHWNRLRDDASNLRNRGITAIWIPPAWKGTSQNDVGYGAYDLYDLGEFNQKGTVRTKYGTRSQLESAIHALKNNGVQVYGDVVMNHKAGADGTEFVDAVEVDPSNRNQETSGTYQIQAYTKFDFPGRGNTYSSFKWRWYHFDGTDWDESRKLNRIYKFSGKAWDWEVDTEFGNYDYLMFADYDMDHPEVVNELRRWGEWYTNTLNLDGFRIDAVKHIKFSFTRDWLTHVRNATGKGMFAVAEFWKNDLGALENYLSKTNWNHSVFDVPLHYNLYNASNSRGNYDMAKLLNGTVVQKHPMHAVTFVDNHDSQPGESLESFVQEWFKPLAYALILTREQGYPSVFYGDYYGIPTHSVPAMKAKIDPILAARQNFAYGTQHDYFDHHNIIGWTREGNTTHPNSGLATIMSDGPGGEKWMYVGQNKAGQVWHDITGNKPGTVTINADGWANFSVNKGSVSIWVKR

SEQ ID NO: 19885 - protein, 481 aa, Bacillus sp.
HNGTNATMMQYFEWHLPNDGNHWNRLRDDASNLRNRGITAIWIPPAWKGTSQNDVGYGAYDLYDLGEFNQKGTVRTKYGTRSQLESAIHALKNNGVQVYGDVVMNHKAGADGTEFVDAVEVDPSNRNQETSGTYQIQAWTKFDFPGRGNTYSSFKWRWYHFDGTDWDESRKLNRIYKFTGKAWDWEVDTENGNYDYLMFADLDMDHPEVVNELRRWGEWYTNTLNLDGFRIDAVKHIKFSFTRDWLTHVRNATGKGMFAVAEFWKNDLGALENYLSKTNWNHSVFDVPLHYNLYNASNSRGNYDMAKLLNGTVVQKHHMHAVTFVDNHDSQPGESLESFVQEWFKPLAYALILTREYGYPSVFYGDYYGIPTHSVPAMKAKIDPILAARQNFAYGTQHDYFDHHNIIGWTREGNTTHPNSGLATIMSDGPGGEKWMYVGQNKAGQVWHDITGNKPGTVTINADGWANFSVNKGSVSIWVKR

SEQ ID NO: 19886 - protein, 481 aa, Bacillus sp.
HNGTNATMMQYFEWHLPNDGNHWNRLRDDASNLRNRGITAIWIPPAWKGTSQNDVGYGAYDLYDLGEFNQKGTVRTKYGTRSQLESAIHALKNNGVQVYGDVVMNHKAGADGTEFVDAVEVDPSNRNQETSGTYQIQAYTKFDFPGRGNTYSSFKWRWYHFDGTDWDESRKLNRIYKFTGKQWDWEVDTEFGNYDYLMFADVDMDHPEVVNELRRWGEWYTNTLNLDGFRIDAVKHIKFSFTRDWLTHVRNATGKGMFAVAEFWKNDLGALENYLSKTNWNHSVFDVPLHYNLYNASNSRGNYDMAKLLNGTVVQKHPMHAVTFVDNHDSQPGESLESFVQEWFKPLAYALILTREQGYPSVFYGDYYGIPTHSVPAMKAKIDPILAARQNFAYGTQHDYFDHHNIIGWTREGNTTHPNSGLATIMSDGPGGEKWMYVGQNKAGQVWHDITGNKPGTVTINADGWANFSVNKGSVSIWVKR

SEQ ID NO: 19887 - protein, 481 aa, Bacillus sp.
HNGTNATMMQYFEWHLPNDGNHWNRLRDDASNLRNRGITAIWIPPAWKGTSQNDVGYGAYDLYDLGEFNQKGTVRTKYGTRSQLESAIHALKNNGVQVYGDVVMNHKAGADGTEFVDAVEVDPSNRNQETSGTYQIQAWTKFDFPGRGNTYSSFKWRWYHFDGTDWDESRKLNRIYKFTGKAWDWEVDTENGNYDYLMFADLDMDHPEVVNELRRWGEWYTNTLNLDGFRIDAVKHIKFSFTRDWLTHVRNATGKGMFAVAEFWKNDLGALENYLSKTNWNHKVFDVPLHYNLYNASNSRGNYDMAKLLNGTVVQKTPMHAVTFVDNHDSQPGESLESFVQEWFKPLAYALILTREQGYPSVFYGDYYGIPTHSVPAMKAKIDPILAARQNFAYGTQHDYFDHHNIIGWTREGNTTHPNSGLATIMSDGPGGEKWMYVGQNKAGQVWHDITGNKPGTVTINADGWANFSVNKGSVSIWVKR

SEQ ID NO: 19888 - protein, 481 aa, Bacillus sp.
HNGTNATMMQYFEWHLPNDGNHWNRLRDDASNLRNRGITAIWIPPAWKGTSQNDVGYGAYDLYDLGEFNQKGTVRTKYGTRSQLESAIHALKNNGVQVYGDVVMNHKAGADGTEFVDAVEVDPSNRNQETSGTYQIQAWTKFDFPGRGNTYSSFKWRWYHFDGTDWDESRKLNRIYKFTGKAWDWPVDTENGNYDYLMFADYDMDHPEVVNELRRWGEWYTNTLNLDGFRIDAVKHIKFSFTRDWLTHVRNATGKGMFAVAEFWKNDLGALEYYLSKTNWNHSVFDVPLHYNLYNASNSRGNYDMAKLLNGTVVQKHPMHAVTFVDNHDSQPGESLESFVQEWFKPLAYALILTREQGYPSVFYGDYYGIPTHSVPAMKAKIDPILAARQNFAYGTQHDYFDHHNIIGWTREGNTTHPNSGLATIMSDGPGGEKWMYVGQNKAGQVWHDITGNKPGTVTINADGWANFSVNKGSVSIWVKR

SEQ ID NO: 19889 - protein, 481 aa, Bacillus sp.
HNGTNATMMQYFEWHLPNDGNHWNRLRDDASNLRNRGITAIWIPPAWKGTSQNDVGYGAYDLYDLGEFNQKGTVRTKYGTRSQLESAIHALKNNGVQVYGDVVMNHKAGADGTEFVDAVEVDPSNRNQETSGTYQIQAWTKFDFPGRGNTYSSFKWRWYHFDGTDWDESRKLNRIYKFTGKAWDWPVDTENGNYDYLMFADFDMDHPEVVNELRRWGEWYTNTLNLDGFRIDAVKHIKFSFTRDWLTHVRNATGKGMFAVAEFWKNDLGALENYLSFTNWNHSVFDVPLHYNLYNASNSRGNYDMAKLLNGTVVQKHPMHAVTFVDNHDSQPGESLESFVQEWFKPLAYALILTREQGYPSVFYGDYYGIPTHSVPAMKAKIDPILAARQNFAYGTQHDYFDHHNIIGWTREGNTTHPNSGLATIMSDGPGGEKWMYVGQNKAGQVWHDITGNKPGTVTINADGWANFSVNKGSVSIWVKR

SEQ ID NO: 19890 - protein, 481 aa, Bacillus sp.
HNGTNATMMQYFEWHLPNDGNHWNRLRDDASNLRNAGITAIWIPPAWKGTSQNDVGYGAYDLYDLGEFNQKGTVRTKYGTRSQLESAIHALKNNGVQVYGDVVMNHKAGADGTEFVDAVEVDPSNRNQETSGTYQIQAYTKFDFPGRGNTYSSFKWRWYHFDGTDWDESRKLNRIYKFTGKAWDWEVDTEFGNYDYLMFADYDMDHPEVVNELRRWGEWYTNTLNLDGFRIDAVKHIKFSFTRDWLTHVRNATGKGMFAVAEFWKNDLGALENYLSKTNWNHSVFDVPLHYNLYNASNSRGNYDMAKLLNGTVVQKHPMHAVTFVDNHDSQPGESLESFVQEWFKPLAYALILTREQGYPSVFYGDYYGIPTHSVPAMKAKIDPILEARQNFAYGTQHDYFDHHNIIGWTREGNTTHPNSGLATIMSDGPGGEKWMYVGQNKAGQVWHDITGNKPGTVTINADGWANFSVNKGSVSIWVKR

SEQ ID NO: 19891 - protein, 481 aa, Bacillus sp.
HNGTNATMMQYFEWHLPNDGNHWNRLRDDASNLRNRGITAIWIPPAWKGTSQNDVGYGAYDLYDLGEFNQKGTVRTKYGTRSQLESAIHALKNNGVQVYGDVVMNHKAGADGTEFVDAVEVDPSNRNQETSGTYQIQAWTKFDFPGRGNTYSSFKWRWYHFDGTDWDESRKLNRIYKFTGKAWDWEVDTENGNYDYLMFADLDMDHPEVVNELRRWGEWYTNTLNLDGFRIDAVKHIKFSFTRDWLTHVRNATGKGMFAVAEFWKNDLGALENYLSKTNWNHKVFDVPLHYNLYNASNSRGNYDMAKLLNGTVVQKHPMAAVTFVDNHDSQPGESLESFVQEWFKPLAYALILTREQGYPSVFYGDYYGIPTHSVPAMKAKIDPILAARQNFAYGTQHDYFDHHNIIGWTREGNTTHPNSGLATIMSDGPGGEKWMYVGQNKAGQVWHDITGNKPGTVTINADGWANFSVNKGSVSIWVKR

SEQ ID NO: 19892 - protein, 481 aa, Bacillus sp.
HNGTNATMMQYFEWHLPNDGNHWNRLRDDASNLRNRGITAIWIPPAWKGTSQNDVGYGAYDLYDLGEFNQKGTVRTKYGTRSQLESAIHALKNNGVQVYGDVVMNHKAGADGTEFVDAVEVDPSNRNQETSGTYQIQAYTKFDFPGRGNTYSSFKWRWYHFDGTDWDESRKLNRIYKFSGKAWDWPVDTEFGNYDYLMFADVDMDHPEVVNELRRWGEWYTNTLNLDGFRIDAVKHIKFSFTRDWLTHVRNATGKGMFAVAEFWKNDLGALENYLSKTNWNHSVFDVPLHYNLYNASNSRGNYDMAKLLNGTVVQKHPMHAVTFVDNHDSQPGESLESFVQEWFKPLAYALILTREQGYPSVFYGDYYGIPTHSVPAMKAKIDPILAARQNFAYGTQHDYFDHHNIIGWTREGNTTHPNSGLATIMSDGPGGEKWMYVGQNKAGQVWHDITGNKPGTVTINADGWANFSVNKGSVSIWVKR

SEQ ID NO: 19893 - protein, 481 aa, Bacillus sp.
HNGTNATMMQYFEWHLPNDGNHWNRLRDDASNLRNRGITAIWIPPAWKGTSQNDVGYGAYDLYDLGEFNQKGTVRTKYGTRSQLESAIHALKNNGVQVYGDVVMNHKAGADGTENVDAVEVDPSNRNQETSGTYQIQAYTKFDFPGRGNTYSSFKWRWYHFDGTDWDESRKLNRIYKFDGKQWDWEVDTEFGNYDYLMFADYDMDHPEVVNELRRWGEWYTNTLNLDGFRIDAVKHIKFSFTRDWLTHVRNATGKGMFAVAEFWKNDLGALENYLSKTNWNHSVFDVPLHYNLYNASNSRGNYDMAKLLNGTVVQKHPMHAVTFVDNHDSQPGESLESFVQEWFKPLAYALILTREQGYPSVFYGDYYGIPTHSVPAMKAKIDPILAARQNFAYGTQHDYFDHHNIIGWTREGNTTHPNSGLATIMSDGPGGEKWMYVGQNKAGQVWHDITGNKPGTVTINADGWANFSVNKGSVSIWVKR

SEQ ID NO: 19894 - protein, 481 aa, Bacillus sp.
HNGTNATMMQYFEWHLPNDGNHWNRLRDDASNLRNRGITAIWIPPAWKGTSQNDVGYGAYDLYDLGEFNQKGTVRTKYGTRSQLESAIHALKNNGVQVYGDVVMNHKAGADGTEFVDAVEVDPSNRNQETSGTYQIQAWTKFDFPGRGNTYSSFKWRWYHFDGTDWDESRKLNRIYKFTGKAWDWPVDTENGNYDYLMFADFDMDHPEVVNELRRWGEWYTNTLNLDGFRIDAVKHIKFSFTRDWLTHVRNATGKGMFAVAEFWKNDLGALENYLSWTNWNHSVFDVPLHYNLYNASNSRGNYDMAKLLNGTVVQKHPMHAVTFVDNHDSQPGESLESFVQEWFKPLAYALILTREQGYPSVFYGDYYGIPTHSVPAMKAKIDPILAARQNFAYGTQHDYFDHHNIIGWTREGNTTHPNSGLATIMSDGPGGEKWMYVGQNKAGQVWHDITGNKPGTVTINADGWANFSVNKGSVSIWVKR

SEQ ID NO: 19895 - protein, 481 aa, Bacillus sp.
HNGTNATMMQYFEWHLPNDGNHWNRLRDDASNLRNRGITAIWIPPAWKGTSQNDVGYGAYDLYDLGEFNQKGTVRTKYGTRSQLESAIHALKNNGVQVYGDVVMNHKAGADGTEFVDAVEVDPSNRNQETSGTYQIQAWTKFDFPGRGNTYSSFKWRWYHFDGTDWDESRKLNRIYKFTGKAWDWPVDTENGNYDYLMFADYDMDHPEVVNELRRWGEWYTNTLNLDGFRIDAVKHIKFSFTRDWLTHVRNATGKGMFAVAEFWKNDLGALENYLSWTNWNHSVFDVPLHYNLYNASNSRGNYDMAKLLNGTVVQKHPMHAVTFVDNHDSQPGESLESFVQEWFKPLAYALILTREQGYPSVFYGDYYGIPTHSVPAMKAKIDPILAARQNFAYGTQHDYFDHHNIIGWTREGNTTHPNSGLATIMSDGPGGEKWMYVGQNKAGQVWHDITGNKPGTVTINADGWANFSVNKGSVSIWVKR

SEQ ID NO: 19896 - protein, 481 aa, Synthetic construct
AAPFNGTMMQYFEWYLPDDGTLWTKVANEANNLSSLGITALWLPPAYKGTSRSDVGYGVYDLYDLGEFNQKGAVRTKYGTKAQYLQAIQAAHAAGMQVYADVVFNHKGGADATEDVTAVEVDPADRNRVISGEHLIKAWTHFHFPGRGSTYSDFKWHWYHFDGTDWDESRKLNRIYKFQGKAWDWEVSNEFGNYDYLMYADIDMDHPEVVTELKNWGKWYVNTTNIDGFRLDAVKHIKFSFFPDWLSYVRSQTGKPLFTVGEYWSYDINKLHNYIMKTNGTMSLFDAPLHNKFYTASKSGGTFDMRTLMTNTLMKDQPTLAVTFVDNHDTEPGQALQSWVDPWFKPLAYAFILTRQEGYPCVFYGDYYGIPQYNIPSLKSKIDPLLIARRDYAYGTQHDYLDHSDIIGWTREGVTEKPGSGLAALITDGPGGSKWMYVGKQHAGKVFYDLTGNRSDTVTINSDGWGEFKVNGGSVSVWVPR

SEQ ID NO: 19897 - protein, 483 aa, Synthetic construct
HHNGTNGTMMQYFEWYLPNDGNHWNRLRSDASNLKDKGITAVWIPPAWKGASQNDVGYGAYDLYDLGEFNQKGTVRTKYGTRNQLQAAVTALKSNGIQVYGDVVMNHKGGADATEWVRAVEVNPSNRNQESGDYTIEAWTKFDFPGRGNTHSNFKWRWYHFDGVDWDQSRQLQNRIYKFRGDGKGWDWEVDTENGNYDYLMYADIDMDHPEVVNELRNWGVWYTNTLGLDGFRIDAVKHIKYSFTRDWLTHVRNTTGKNMFAVAEFWKNDIGAIENYLSKTNWNHSVFDVPLHYNLYNASRSGGNYDMRQIFNGTVVQRHPTHAVTFVDNHDSQPEEALESFVEEWFKPLAYALTLTRDQGYPSVFYGDYYGIPTQGVPAMKSKIDPILEARQKYAYGKQNDYLDHHNHIGWTREGNTAHPNSGLATIMSDGPGGNKWMYVGRNKAGQVWRDITGNRSGTVTINADGWGNFSVNGGSVSIWVN

SEQ ID NO: 19898 - protein, 483 aa, Synthetic construct
AAPFNGTMMQYFEWYLPDDGTLWTKVANEANNLSSLGITALWLPPAYKGTSRSDVGYGVYDLYDLGEFNQKGAVRTKYGTKAQYLQAIQAAHAAGMQVYADVVFNHKAGADYTENVTAVEVNPSNRNQETSGEYNIQAWTGFNFPGRGTTYSNFKWQWFHFDGTDWDQSRSLSRIFKFRGTGKAWDWEVSSENGNYDYLMYADIDMDHPEVVTELKNWGKWYVNTTNIDGFRLDAVKHIKFSFFPDWLSYVRSQTGKPLFTVGEYWSYDINKLHNYIMKTNGTMSLFDAPLHNKFYTASKSGGTFDMRTLMTNTLMKDQPTLAVTFVDNHDTEPGQALQSWVDPWFKPLAYAFILTRQEGYPCVFYGDYYGIPQYNIPSLKSKIDPLLIARRDYAYGTQHDYLDHSDIIGWTREGVTEKPGSGLAALITDGPGGSKWMYVGKQHAGKVFYDLTGNRSDTVTINSDGWGEFKVNGGSVSVWVPR

SEQ ID NO: 19899 - protein, 516 aa, Bacillus sp.
AAPFNGTMMQYFEWHLPDDGTLWTKLANDANNLSSLGITALWIPPAWKGTSRSDVGYGVYDLYDLGEFNQKGTVRTKYGTKAQYLQAIQAAHAAGIQVYADVVFDHKGGADGTEWVDAVEVNPSDRNQEISGTYQIQAWTKFDFPGRGNTHSSFKWRWYHFDGVDWDESRQKLSKIYKFRGIGKAWDWEVDTENGNYDYLMYADIDMDHPEVITELKNWGKWYVNTTNIDGFRIDAVKHIKFSFFPDWLSHVRSQTGKPLFTVAEFWSYDINKIHNYITKTNGTMSLFDAPLHNKFYTASKSGGAFDMRTILTNSLMKDQPTLAVTFVDNHDSEPGQALQSFVDPWFKPLAYAFILTRQEGYPCVFYGDYYGIPQHNIPSLKSKIDPLLIARRDYAYGTQHDYLDHSDIIGWTREGVSEKPGSGLAAIISDGPGGSKWMYVGKQHAGKVFYDITGNRSDTVTINADGWGEFKVNGGAVSVWVPRKTTVSTIARPITTRPWTGEFVRWTEPRLVAWP

SEQ ID NO: 19900 - protein, 534 aa, unidentified
LAFLLTALLFCPTGQPAKAAAPFNGTMMQYFEWYLPDDGTLWTKVANEANNLSSLGITALWLPPAYKGTSRSDVGYGVYDLYDLGEFNQKGAVRTKYGTKAQYLQAIQAAHAAGMQVYADVVFDHKGGADGTEWVDAVEVNPSDRNQEISGTYQIQAWTKFDFPGRGNTYSSFKWRWYHFDGVDWDESRKLSRIYKFRGIGKAWDWEVDTENGNYDYLMYADLDMDHPQVVTELKSWGKWYVNTTNIDGFPLDAVKHIKFSFFPDWVSDVRSQTAKPLFTVGEYGSYDINKFHNYFMKTNGTMSLFDAPLHNKFYNAPKSGGTFDMRTLMTNTLMKDQPTLAVTFVDNHDTEPAQAPQSWVVPWFKPLAYAFILTRQEGYPCVFYGDYYGIPQYNIPSLKSKIDPLLIARRDYAYGTQHDYLDHSDIIGWTREGVTEKPGSGLAALITDGPGGSKWMYVGKQHAGKVFYDLTGNRSDTVTINSDGWGEFKVNGGSVSVWVPRKTTVSTITRPITTRPWTGEFVRWTEPRLVAWP

SEQ ID NO: 19901 - protein, 513 aa, Bacillus sp.
LLAFLLTVSLFCPTGQPAKAAAPFNGTMMQYFEWYLPDDGTLWTKVANEANNLSSLGITALWLPPAYKGTSRSDVGYGVYDLYDLGEFNQKGTVRTKYGTKAQYLQAIQAAHAAGMQVYADVVFDHKGGADGTEWVDAVEVNPSDRNQEISGTYQIQAWTKFDFPGRGNTYSSFKWRWYHFDGVDWDESRKLSRIYKFRGIGKAWDWEVDTENGNYDYLMYADLDMDHPEVVTELKNWGKWYVNTTNIDGFRLDAVKHIKFSFFPDWLSYVRSQTGKPLFTVGEYWSYDINKLHNYITKTDGTMSLFDAPLHNKFYTASKSGGAFDMRTLMTNTLMKDQPTLAVTFVDNHDTEPGQALQSWVDPWFKPLAYAFILTRQEGYPCVFYGDYYGIPQYNIPSLKSKIDPLLIARRDYAYGTQHDYLDHSDIIGWTREGVTEKPGSGLAALITDGPGGSKWMYVGKQHAGKVFYDLTGNRSDTVTINSDGWGEFKVNGGSVSVWVPRKTTVSTITRP

SEQ ID NO: 19902 - protein, 512 aa, unidentified
LAFLLTASLFCPTGQHAKAAAPFNGTMMQYFEWYLPDDGTLWTKVANEANNLSSLGITALWLPPAYKGTSRSDVGYGVYDLYDLGEFNQKGTVRTKYGTKAQYLQAIQAAHAAGMQVYADVVFDHKGGADGTEWVDAVEVNPSDRNQEISGTYQIQAWTKFDFPGRGNTYSSFKWRWYHFDGVDWDESRKLSRIYKFRGIGKAWDWEVDTENGNYDYLMYADLDMDHPEVVTELKNWGKWYVNTTNIDGFRLDAVKHIKFSFFPDWLSYVRSQTGKPLFTVGEYWSYDINKLHNYITKTNGTMSLFDAPLHNKFYTASKSGGAFDMRTLMTNTLMKDQPTLAVTFVDNHDTEPGQALQSWCDPWFKPLAYAFILTRQEGYPCVFYGDYYGIPQYNIPSLKSKIDPLLIARRDYAYGTQHDYLDHSDIIGWTREGVTEKPGSGLAALITDGPGGSKWMYVGKQHAGKVFYDLTGNRSDTVTINSDGWGEFKVNGGSVSVWVPRKTTVSTIARP

SEQ ID NO: 19903 - protein, 512 aa, unidentified
LAFLLTASLFCPTGQPAKAAAPFNGTMMQYFEWYLPDDGTLWTKVANEANNLSSLGITALWLPPAYKGTSRSDVGYGVYDLYDLGEFNQKGTVRTKYGTKAQYLQAIQAAHAAGMQVYADVVFDHKGGADGTEWVDAVEVNPSDRNQEISGTYQIQAWTKFDFPGRGNTYSSFKWRWYHFDGVDWDESRKLSRIYKFRGIGKAWDWEVDTENGNYDYLMYADLDMDHPEVVTELKNWGEWYVNTTNIDGFRLDAVKHIKFSFFPDWLSYVRSQTGKPLFTVGEYWSYDINKLHNYITKTNGTMSLFDAPLHNKFYTASKSGGAFDMRTLMTNTLMKDQPTLAVTFVDNHDTEPGQALQSWVDPWFKPLAYAFILTRQEGYPCVFYGDYYGIPQYNIPSLKSKIDPLLIARRDYAYGTQHDYLDHSDIIGWTREGVTEKPGSGLAALITDGPGGSKWMYVGKQHAGKVFYDLTGNRSDTVTINSDGWGEFKVNGGSVSVWVPRKTTVSTIARP

SEQ ID NO: 19904 - protein, 512 aa, unidentified
LAFLLTASLFCPTGQPAKAAAPFNGTMMQYFEWYLPDDGTLWTKVANEANNLSSLGITALWLPPAYKGTSRSDVGYGVYDLYDLGEFNQKGTVRTKYGTKAQYLQAIQAAHAAGMQVYADVVFDHKGGADGTEWVDAVEVNPSDRNQEISGTYQIQAWTKFDFPGRGNTYSSFKWRWYHFDGVDWDESRKLSRIYKFRGIGKAWDWEVDTENGNYDYLMYADLDMDHPEVVTELKNWGKWYVNTTNIDGFRLDAVKHIKFSFFPDWLSYVRSQTGKPLFTVGEYWSYDINKLHNYITKTNGTMSLFDAPLHNKFYTASKSGGAFDMRTLMTNTLMKDQPTLAVTFVDNHDTEPGQALQSWVDPWFKPLAYAFILTRQEGYPCVFYGDYYGIPQYNIPSLKSKIDPLLIARRDYAYGTQHDYLDHSDIIGWTREGVTEKPGSGLAALITDGPGGSKWMYVGKQHAGKVFYDLTGNRSDTVTINSDGWGEFKVNGGSVSVWVPRKTTVSTIAWP

SEQ ID NO: 19905 - protein, 493 aa, Geobacillus stearothermophilus
AAPFNGTMMQYFEWYLPDNGTLWTKVARQANNLSSLGITALWLPPAYKGTSRSDVGYGVYDLYDLGEFNQKGTVRTKYGTKAQYLRAIRAAHAAGMQVYADVVFDHKGGADGTEWVDAVEVNPSDRNQEISGTYQIQAWTKFDFPGRGNTYSSFKWRWYHFDGVDWDESRKLSRIYKFRGIGKAWDWEVDTENGNYDYLMYADLDMDHPEVVTELKNWGKWYVRTTNIDGFRLDAVKHIKFSFFPDWLSYVRSQTGKPLFTVGEYWSYDIRKLHNYITKTRGTMSLFDAPLHNKFYTASKSGGAFNMRTLMTNTLMKNQPTLAVTFVDNHDTEPGQALQSWVDPWFKPLAYAFILTRQEGYPCVFYGDYYGIPQYNIPSLKSKIDPLLIARRNYAYGTQHDYLDHSDIIGWTREGVTEKPGSGLAALITDGPGGSKWMYVGKQHAGKVFYDLTGNRSNTVTINSDGWGEFKVNGGSVSVWVPRKTTVSTIARP

SEQ ID NO: 19906 - protein, 493 aa, Geobacillus stearothermophilus
AAPFNGTMMQYFEWYLPDNGTLWTKVAKEANNLSSLGITALWLPPAYKGTSRSDVGYGVYDLYDLGEFNQKGTVRTKYGTKAQYLQAIQAAHAAGMRVYADVVFDHKGGADGTEWVDAVEVNPSDRNQEISGTYQIQAWTKFDFPGRGNTYSSFKWRWYHFDGVDWDESRKLSRIYKFRGIGKAWDWEVDTENGNYDYLMYADLDMDHPEVVTELKNWGKWYVKTTNIDGFRLDAVKHIKFSFFPDWLSYVRSQTGKPLFTVGEYWSYDIKKLHNYITKTKGTMSLFDAPLHNKFYTASKSGGAFNMRTLMTNTLMKNRPTLAVTFVDNHDTEPGQALQSWVDPWFKPLAYAFILTREEGYPCVFYGDYYGIPQYNIPSLKSKIDPLLIARRNYAYGTQHDYLDHSDIIGWTREGVTEKPGSGLAALITDGPGGSKWMYVGKEHAGKVFYDLTGNRSDTVTINSDGWGEFKVNGGSVSVWVPRKTTVSTIARP

SEQ ID NO: 19907 - protein, 491 aa, Geobacillus stearothermophilus
AAPFNGTLMQYFEWYLPDDGTLWTKLANDANNLASLGITALWIPPAYKGTSRADVGYGVYDLYDLGEFNQKGTVRTKYGTKAQYLQAIQAAHAAGINVYADVVFDHKGGADATEWVDAVEVNPADRNQEISGTHQIQAWTKFDFPGRGNTYSSFKWRWYHFDGVDWDESRKLSRIYKFRGIGKAWDWEVDTENGNYDYLMYADIDMDHPDVVTEIKNWGKWYVNTTNIDGFRLDAVKHIKFSFFPDWLSHVRSQTGKPLFTVAEYWSYDINKLHNYITKTNGTMSLFDAPLHNKFHTASKSGGAFDMRTLLTNTLMKDQPTLAVTFVDNHDTEPGQALQSWVDPWFKPLAYAFILTRQEGYPCVFYGDYYGIPGDSQYNIPALKSKIDPILIARKDYAYGTQHDYLDHSDIIGWTREGVSEKPGSGLAALITDGPGGAKWMYVGKQHAGKVFHDITGNRSDTVTINSDGWGEFKVNGGSVSIWVPRKTTVS

SEQ ID NO: 19908 - protein, 488 aa, Bacillus sp.
AAPFNGTMMQYFEWHLPDDGTLWTKLANDANNLSSLGITAIWIPPAYKGTSRADVGYGVYDLYDLGEFNQKGTVRTKYGTKAQYLQAIQAAHAAGINVYADVVFDHKGGADGTEWVDAVEVNPSDRNQDISGTYQIQAWTKFDFPGRGNTYSSFKWRWFHFDGVDWDESRKLSRIFKFRGIGKAWDWEVDTENGNYDYLLYADIDMDHPEVVTELKNWGKWFVNTTNIDGFRLDAIKHIKFSFFPDWLSHVRSQTGKPLFTVGEYWSYDINKLHNYITKTNGTMSLFDAPLHNKFYTASKSGGAFDMRTILTNSLMKDQPTLAVTFVDNHDTEPGQALQSWVDPWFKPLAYAFILTRQEGYPCVFYGDYYGIPNYNIPALKSKIDPLLIARRDYAYGTQHDYLDHSDIIGWTREGVSEKPGSGLAAIISDGPGGSKWMYVGKQHAGKVFYDLTGNRADSVTINSDGWGEFKVNGGSVSVWVPRKTTVS

SEQ ID NO: 19909 - protein, 483 aa, Synthetic construct
AAAPFNGTMMQYFEWYLPDDGTLWTKVANEANNLSSLGITALWLPPAYKGTSRSDVGYGVYDLYDLGEFNQKGAVRTKYGTKAQYLQAIQAAHAAGMQVYADVVFNHKAGADGTEFVDAVEVDPSNRNQETSGTYQIQAWTKFDFPGRGNTYSSFKWRWYHFDGTDWDESRKLNRIYKFSTGKAWDWEVDTENGNYDYLMFADLDMDHPEVVTELKNWGKWYVNTTNIDGFRLDAVKHIKFSFFPDWLSYVRSQTGKPLFTVGEYWSYDINKLHNYIMKTNGTMSLFDAPLHNKFYTASKSGGTFDMRTLMTNTLMKDQPTLAVTFVDNHDTEPGQALQSWVDPWFKPLAYAFILTRQEGYPCVFYGDYYGIPQYNIPSLKSKIDPLLIARRDYAYGTQHDYLDHSDIIGWTREGVTEKPGSGLAALITDGPGGSKWMYVGKQHAGKVFYDLTGNRSDTVTINSDGWGEFKVNGGSVSVWVPR

SEQ ID NO: 19910 - protein, 484 aa, Bacillus sp. 7-7
HHIGTNGTMMQYFEWYLPNDGNHWNRLRSDASNLKDKGITAVWIPPAWKGASQNDVGYGAYDLYDLGEFNQKGTVRTKYGTRNQLQAAVTALKSNGIQVYGDVVMNHKGGADATEWVRAVEVNPSNRNQEVSGDYTIEAWTKFDFPGRGNTHSNFKWRWYHFDGVDWDQSRQLQNRIYKFRGDGKGWDWEVDTENGNYDYLMYADIDMDHPEVVNELRNWGVWYTNTLGLDGFRIDAVKHIKYSFTRDWLTHVRNTTGKNMFAVAEFWKNDIGAIENYLSKTNWNHSVFDVPLHYNLYNASRSGGNYDMRQIFNGTVVQRHPTHAVTFVDNHDSQPEEALESFVEEWFKPLAYALTLTRDQGYPSVFYGDYYGIPTHGVPAMKSKIDPILEARQKYAYGKQNDYLDHHNMIGWTREGNTAHPNSGLATIMSDGPGGNKWMYVGRNKAGQVWRDITGNRSGTVTINADGWGNFSVXGGSVSIWVN

SEQ ID NO: 19911 - protein, 484 aa, Synthetic construct
HHNGTNGTMMQYFEWYLPNDGNHWNRLRSDASNLKDKGITAVWIPPAWKGASQNDVGYGAYDLYDLGEFNQKGTVRTKYGTRNQLQAAVTALKSNGIQVYGDVVMNHKGGADATEWVRAVEVNPSNRNQEVSGDYTIEAWTKFDFPGRGNTHSNFKWRWYHFDGVDWDQSRQLQNRIYKFRGDGKGWDWEVDTENGNYDYLMYADIDMDHPEVVNELRNWGVWYTNTLGLDGFRIDAVKHIKYSFTRDWLTHVRNTTGKNMFAVAEFWKNDIGAIENYLSKTNWNHSVFDVCLHYNLYNASRSGGNYDMRQIFNGTVVQRHPTHAVTFVDNHDSQPEEALESFVEEWFKPLAYALTLTRDQGYPSVFFGDYYGIPTHGVPAMKSKIDPILEARQKYAYGKQNDYLDHHNMIGWTREGNTAHPNSGLATIMSDGPGGNKWMYVGRNKAGQVWRDITGNRSGTVTINADGWGNFSVNGGSVSIWVN

SEQ ID NO: 19912 - protein, 484 aa, Synthetic construct
HHNGTNGTMMQYFEWYLPNDGNHWHRLRSDASNLKDKGITAVWIPPAWKGASQNDVGYGAYDLYDLGEFNQKGTVRTKYGTRNQLQAAVTALKSNGIQVYGDVVMNHKGGADATEWVRAVEVNPSNRNQEVSGDYTIEAWTKFDFPGRGNTHSNFKWRWYHFDGVDWDQSRQLQNRIYKFRGDGKEWDWEVDTENGNYDYLMYADIDMDHPEVVNELRNWGVWYTNTLGLDGFRIDAVKHIKYSFTRDWLEHVRNTTGKNMFAVAEFWKNDIGAIENYLSKTNWNHSVFDVPLHYNLYNASRSGGNYDMRQIFNGTVVQRHPTHAVTFVDNHDSQPEEALESFVEEWFKPLAYALTLTRDQGYPSVFYGDYYGIPTHGVPAMKSKIDPILEARQKYAYGKQNDYLDHHNMIGWTREGNTAHPNSGLATIMSDGPGGNKWMYVGRNKAGQVWRDITGNRSGTVTINADGWGNFSVNGGSVSIWVN

SEQ ID NO: 19913 - protein, 484 aa, Synthetic construct
HHNGTNGTMMQYFEWYLPNDGNHWNRLRSDASNLKDKGITAVWIPPAWKGASQNDVGYGAYDLYDLGEFNQKGTVRTKYGTRNQLQAAVTALKSNGIQVYGDVVMNHKGGADATEWVRAVEVNPSNRNQEVSGDYTIEAWTKFDFPGRGNTHSNFKWRWYHFDGVDWDQSRQLQNRIYKFRGDGKGWDWEVDTENGNYDYLMYADIDMDHPEVVNELRNWGVWYTNTLGLDGFRIDAVKHIKYSFTRDWLTHVRNTTGKNMFAVAEFWKNDIGAIENYLSKTNWNHSVFDVPLHYNLYNASRSGGNYDMRQIFNGTVVQRHPTHAVTFVDNHDSQPEEALESWVEEWFKPLAYALTLTWDQGYPSVFYGDYYGIPTHGVPAMKSKIDPILEARQKYAYGKQNDYLDHHNMIGWTREGNTAHPNSGLATIMSDGPGGNKWMYVGRNKAGQVWRDITGNRSGTVTINADGWGNFSVNGGSVSIWVN

SEQ ID NO: 19914 - protein, 484 aa, Synthetic construct
HHNGTNGTMMQYFEWYLPNKGNHWNRIRSDASNLKDKGITAVWIPPAWKGASQNDVGYGAYDLYDLGEFNQKGTVRTKYGTRNQLQAAVTALKSNGIQVYGDVVMNHKGGADATEWVRAVEVNPSNRNQEVSGDYTIEAWTKFDFPGRGNTHSNFKWRWYHFDGVDWDQSRQLQNRIYKFRGDGKGWDWEVDTENGNYDYLMYADIDMDHPEVVNELRNWGVWYTNTLGLDGFRIDAVKHIKYSFTRDWLTHVRNTTGKNMFAVAEFWKNDIGAIENYLSKTNWNHSVFDVPLHYNLYNASRSGGNYDMRQIFNGTVVQRHPTHAVTFVDNHDSQPEEALESFVEEWFKPLAYALTLTRDQGYPSVFYGDYYGIPTHGVPAMKSKIDPILEARQKYAYGKQNDYLDHHNMIGWTREGNTAHPNSGLATIMSDGPGGNKWMYVGRNKAGQVWRDITGNRSGTVTINADGWGNFSVNGGSVSIWVN

SEQ ID NO: 19915 - protein, 484 aa, Synthetic construct
HHNGTNGTMMQYFEWYLPNDGNHWNRLRSDASNLKDKGITAVWIPPAWKGASQNDVGYGAYDLYDLGEFNQKGTVRTKYGTRDQLQAAVTALKENGIQVYGDVVMNHKGGADATEWVRAVEVNPSNRNQEVSGDYTIEAWTKFDFPGRGNTHSNFKWRWYHFDGVDWDQSRQLQNRIYKFRGDGKGWDWEVDTENGNYDYLMYADIDMDHPEVVNELRNWGVWYTNTLGLDGFRIDAVKHIKYSFTRDWLTHVRNTTGKNMFAVAEFWKNDIGAIENYLSKTNWNHSVFDVPLHYNLYNASRSGGNYDMRQIFNGTVVQRHPTHAVTFVDNHDSQPEEALESFVEEWFKPLAYALTLTRDQGYPSVFYGDYYGIPTHGVPAMKSKIDPILEARQKYAYGKQNDYLDHHNMIGWTREGNTAHPNSGLATIMSDGPGGNKWMYVGRNKAGQVWRDITGNRSGTVTINADGWGNFSVNGGSVSIWVN

SEQ ID NO: 19916 - protein, 484 aa, Synthetic construct
HHNGTNGTMMQYFEWYLPNDGNHWNRLRSDASNLKDKGITAVWIPPAWKGASQNDVGYGAYDLYDLGEFNQKGTVRTKYGTRNQLQAAVTALKSNGIQVYGDVVMNHKGGADATEWVRAVEVNPSNRNQEVSGDYTIEAWTKFDFPGRGNTHSNFKWRWYHFDGVDWDQSRQLQNRIYKFRGDGKGWDWEVDTENGNYDYLMYADIDMDHPEVVNELRNWGVWYTNTLGLDGFRIDAVKHIKYSFTRDWLTHVRNTTGKNMFAVAEFWKNDIGAIENYLSKTNWNHSVFDVCLHYNLYNASRSGGNYDMRQIFNGTVVQRHPTHAVTFVDNHDSQPEEALESFVEEWFKPLAYALTLTRDQGYPSVFYGDYYGIPTHGVPAMKSKIDPILEARQKYAYGKQNDYMDHHNMIGWTREGNTAHPNSGLATIMSDGPGGNKWMYVGRNKAGQVWRDITGNRSGTVTINADGWGNFSVNGGSVSIWVN

SEQ ID NO: 19917 - protein, 484 aa, Bacillus sp. 7-7
HHVGTNGTMMQYFEWYLPNDGNHWNRLRSDASNLKDKGITAVWIPPAWKGASQNDVGYGAYDLYDLGEFNQKGTVRTKYGTRNQLQAAVTALKSNGIQVYGDVVMNHKGGADATEWVRAVEVNPSNRNQEVSGDYTIEAWTKFDFPGRGNTHSNFKWRWYHFDGVDWDQSRQLQNRIYKFRGDGKGWDWEVDTENGNYDYLMYADIDMDHPEVVNELRNWGVWYTNTLGLDGFRIDAVKHIKYSFTRDWLTHVRNTTGKNMFAVAEFWKNDIGAIENYLSKTNWNHSVFDVPLHYNLYNASRSGGNYDMRQIFNGTVVQRHPTHAVTFVDNHDSQPEEALESFVEEWFKPLAYALTLTRDQGYPSVFYGDYYGIPTHGVPAMKSKIDPILEARQKYAYGKQNDYLDHHNMIGWTREGNTAHPNSGLATIMSDGPGGNKWMYVGRNKAGQVWRDITGNRSGTVTINADGWGNFSVXGGSVSIWVN

SEQ ID NO: 19918 - protein, 484 aa, Synthetic construct
HHNGTNGTMMQYFEWYLPNDGNHWNRLRSDASNLKDKGITAVWIPPAWKGASQNDVGYGAYDLYDLGEFNQKGTVRTKYGTRNQLQAAVTALKSNGIQVYGDVVMNHKGGADATEWVRAVEVNPSNRNQEVSGDYTIEAWTKFDFPGRGNTHSNFKWRWYHFDGVDWDQSRQLQNKIYKFRGDGKGWDWEVDTENGNYDYLMYADYDMDHPEVVNELRNWGVWYTNTLGLDGFRIDAVKHIKYSFTRDWLEHVRNTTGKNMFAVAEFWKNDIGAIENYLSKTNWNHSVFDVPLHYNLYNASRSGGNYDMRQIFNGTVVQRHPTHAVTFVDNHDSQPEEALESFVEEWFKPLAYALTLTRDQGYPSVFYGDYYGIPTHGVPAMKSKIDPILEARQKYAYGKQNDYLDHHNMIGWTREGNTAHPNSGLATIMSDGPGGNKWMYVGRNKAGQVWRDITGNRSGTVTINADGWGNFSVNGGSVSIWVN

SEQ ID NO: 19919 - protein, 484 aa, Bacillus sp. 7-7
HHHGTNGTMMQYFEWYLPNDGNHWNRLRSDASNLKDKGITAVWIPPAWKGASQNDVGYGAYDLYDLGEFNQKGTVRTKYGTRNQLQAAVTALKSNGIQVYGDVVMNHKGGADATEWVRAVEVNPSNRNQEVSGDYTIEAWTKFDFPGRGNTHSNFKWRWYHFDGVDWDQSRQLQNRIYKFRGDGKGWDWEVDTENGNYDYLMYADIDMDHPEVVNELRNWGVWYTNTLGLDGFRIDAVKHIKYSFTRDWLTHVRNTTGKNMFAVAEFWKNDIGAIENYLSKTNWNHSVFDVPLHYNLYNASRSGGNYDMRQIFNGTVVQRHPTHAVTFVDNHDSQPEEALESFVEEWFKPLAYALTLTRDQGYPSVFYGDYYGIPTHGVPAMKSKIDPILEARQKYAYGKQNDYLDHHNMIGWTREGNTAHPNSGLATIMSDGPGGNKWMYVGRNKAGQVWRDITGNRSGTVTINADGWGNFSVXGGSVSIWVN

SEQ ID NO: 19920 - protein, 484 aa, Synthetic construct
HHNGTNGTMMQYFEWYLPNDGNHWNRLRSDASNLKDKGITAVWIPPAWKGASQNDVGYGAYDLYDLGEFNQKGTVRTKYGTRNQLQAAVTALKSNGIQVYGDVVMNHKGGADATEWVRAVEVNPSNRNQEVSGDYTIEAWTKFDFPGRGNTHSNFKWRWYHFDGVDWDQSRQLQNRIYKFRGDGKEWDWEVDTENGNYDYLMYADIDMDHPEVVNELRNWGVWYTNTLGLDGFRIDAVKHIKYSFTRDWLTHVRNTTGKNMFAVAEFWKNDIGAIRNYLSKTNWNHSVFDVPLHYNLYNASRSGGNYDMRQIFNGTVVQRHPTHAVTFVDNHDSQPEEALESFVEEWFKPLAYALTLTRDQGYPSVFYGDYYGIPTHGVPAMKSKIDPILEARQKYAYGKQNDYLDHHNMIGWTREGNTAHPNSGLATIMSDGPGGNKWMYVGRNKAGQVWRDITGNRSGTVTINADGWGNFSVNGGSVSIWVN

SEQ ID NO: 19921 - protein, 484 aa, Synthetic construct
HHNGTNGTMMQYFEWYLPNDGNHWHRLRSDASNLKDKGITAVWIPPAWKGASQNDVGYGAYDLYDLGEFNQKGTVRTKYGTRNQLQAAVTALKSNGIQVYGDVVMNHKGGADATEWVRAVEVNPSNRNQEVSGDYTIEAWTKFDFPGRGNTHSNFKWRWYHFDGVDWDQSRQLQNRIYKFRGDGKEWDWEVDTENGNYDYLMYADIDMDHPEVVNELRNWGVWYTNTLGLDGFRIDAVKHIKYSFTRDWLTHVRNTTGKNMFAVAEFWKNDIGAIENYLSKTNWNHSVFDVPLHYNLYNASRSGGNYDMRQIFNGTVVQRHPTHAVTFVDNHDSQPEEALESFVEEWFKPLAYALTLTRDQGYPSVFYGDYYGIPTHGVPAMKSKIDPILEARQKYAYGKQNDYLDHHNMIGWTREGNTAHPNSGLATIMSDGPGGNKWMYVGRNKAGQVWRDITGNRSGTVTINADGWGNFSVNGGSVSIWVN

SEQ ID NO: 19922 - protein, 484 aa, Synthetic construct
HHNGTNGTMMQYFEWYLPNDGNHWNRLRSDASNLKDKGITAVWIPPAWKGASQNDVGYGAYDLYDLGEFNQKGTVRTKYGTRNQLQAAVTALKSNGIQVYGDVVMNHKGGADATEWVRAVEVNPSNRCQEVSGDYTIEAWTKFDFPGRGNTHSNFKWRWYHFDGVDWDQSRQLQNRIYKFRGDGKGWDWEVDTENGNYDYLMYADIDMDHPEVVNELRNWGVWYTNTLGLDGFRIDAVKHIKYSFTRDWLTHVRNTTGKNMFAVAEFWKNDIGAIENYLSKTNWNHSVFDVPLHYNLYNASRSGGNYDMRQIFNGTVVQRHPTHAVTFVDNHDSQPEEALESFVEEWFKPLAYALTLTRDQGYPSVFYGDYYGIPTHGVPAMKSKIDPILEARQKYAYGKQNDYLDHHNMIGWTREGNTAHPNSGLATIMSDGPGGNKWMYVGRNKAGGVWRDITGNRSGTVTINADGWGNFSVNGGSVSIWVN

SEQ ID NO: 19923 - protein, 484 aa, Synthetic construct
HHNQTNGTMMQYFEWYLPNDGNHWNRLRSDASNLKDKGITAVWIPPAWKGASQNDVGYGAYDLYDLGEFNQKGTVRTKYGTRNQLQAAVTALKSNGIQVYGDVVMNHKGGADATEWVRAVEVNPSNRNQEVSGDYTIEAWTKFDFPGRGNTHSNFKWRWYHFDGVDWDQSRQLQNRIYKFRGDGKGWDWEVDTENGNYDYLMYADIDMDHPEVVNELRNWGVWYTNTLGLDGFRIDAVKHIKYSFTRDWLTHVRNTTGKNMFAVAEFWKNDIGAIENYLSKTNWNHSVFDVPLHYNLYNASRSGGNYDMRQIFNGTVVQRHPTHAVTFVDNHDSQPESALESFVEEWFKPLAYALTLTRDQGYPSVFYGDYYGIPTHGVPAMKSKIDPILEARQKYAYGKQNDYLDHHNMIGWTREGNTAHPNSGLATIMSDGPGGNKWMYVGRNKAGQVWRDITGNRSGTVTINADGWGNFSVNGGSVSIWVN

SEQ ID NO: 19924 - protein, 484 aa, Synthetic construct
HHNGTNGTMMQYFEWYLPNDGNHWNRLRSDASNLKDKGITAVWIPPAWKGASQNDVGYGAYDLYDLGEFNQCGTVRTKYGTRNQLQAAVTALKSNGIQVYGDVVMNHKGGADATEWVRAVEVNPSNRNQEVSGDYTIEAWTKFDFPGRGNTHSNFKWRWYHFDGVDWDQSRQLQNRIYKFRGDGKGWDWEVDTENGNYDYLMYADIDMDHPEVVNELRNWGVWYTNTLGLDGFRIDAVKHIKYSFTRDWLTHVRNTTGKNMFAVAEFWKNDIGAIENYLSKTNWNHSVFDVPLHYNLYNASRSGGNYDMRQIFNGTVVQRHPTHAVTFVDNHDSQPEEALESFVEEWFKPLAYALTLTRDQGYPSVFYGDYYGIPTHGVPAMKSKIDPILEARQKYAYGKQNDYLDHHNMIGWTREGFTAHPNSGLATIMSDGPGGNKWMYVGRNKAGQVWRDITGNRSGTVTINADGWGNFSVNGGSVSIWVN

SEQ ID NO: 19925 - protein, 484 aa, Synthetic construct
HHNGTNGTMMQYFEWYLPNDGNHWNRLRSDASMLKDKGITAVWIPPAWKGASQNDVGYGAYDLYDLGEFNQKGTVRTKYGTRNQLQAAVTALKSNGIQVYGDVVMNHKGGADATEWVRAVEVNPSNRNQEVSGDYTIEAWTKFDFPGRGNTHSNFKWRWYHFDGVDWDQSRQLQNRIYKFRGDGKGWDWEVDTENGNYDYLMYADIDMDHPEVVNELRNWGVWYTNTLGLDGFRIDAVKHIKYSFTRDWLTHVRNTTGKNMFAVAEFWKNDIGAIENYLSKTNWNHSVFDVPLHYNLYNASRSGGNYDMRQIFNGTVVQRHPTHAVTFVDNHDSQPEEALESFVEEWFKPLAYALTLTRDQGYPSVFYGDYYGIPTHEVPAMKSKIDPILEARQKYAYGKQNDYLDHHNMIGWTREGNTAHPNSGLATIMSDGPGGNKWMYVGRNKAGQVWRDITGNRSGTVTINADGWGNFSVNGGSVSIWVN

SEQ ID NO: 19926 - protein, 484 aa, Synthetic construct
HHNQTNGTMMQYFEWYLPNDGNHWNRLRSDASNLKDKGITAVWIPPAWKGASQNDVGYGAYDLYDLGEFNQKGTVRTKYGTRNQLQAAVTALKSNGIQVYGDVVMNHKGGADATEWVRAVEVNPSNRNQEVSGDYTIEAWTKFDFPGRGNTHSNFKWRWYHFDGVDWDQSRQLQNRIYKFRGDGKEWDWEVDTENGNYDYLMYADIDMDHPEVVNELRNWGVWYTNTLGLDGFRIDAVKHIKYSFTRDWLTHVRNTTGKNMFAVAEFWKNDIGAIENYLSKTNWNHSVFDVPLHYNLYNASRSGGNYDMRQIFNGTVVQRHPTHAVTFVDNHDSQPEEALESFVEEWFKPLAYALTLTRDQGYPSVFYGDYYGIPTHGVPAMKSKIDPILEARQKYAYGKQNDYLDHHNMIGWTREGNTAHPNSGLATIMSDGPGGNKWMYVGRNKAGQVWRDITGNRSGTVTINADGWGNFSVNGGSVSIWVN

SEQ ID NO: 19927 - protein, 484 aa, Synthetic construct
HHNGTNGTMMQYFEWYLPNDGNHWNRLRSDASNLKDKGITAVWIPPAWKGASQNDVGYGAYDLYDLGEFNQKGTVRTKYGTRNQLQAAVTALKSNGIQVYGDVVMNHKGGADATEWVRAVEVNPSNRNQEVSGDYTIEAWTKFDFPGRGNTHSNFKWRWYHFDGVDWDQSRQLQNRIYKFRGDGKGWDWEVDTENGNYDYLMYADIDMDHPEVVNELRNWGVWYTNTLGLDGFRIDAVKHIKYSFTRDWLTHVRNTTGKNMFAVAEFWKNDIGAIENYLSKTNWNHSVFDVPLHYNLYNASRSGGNYDMRQIFNGTVLQRHPTHAVTFVDNHDSQPEEALESFVEEWFKPLAYALTLTRDQGYPSVFYGDYYGIPTHGVPAQKSKIDPILEARQKYAYGKQNDYLDHHNMIGWTREGNTAHPNSGLATIMSDGPGGNKWMYVGRNKAGQVWRDITGNRSGTVTINADGWGNFSVNGGSVSIWVN

SEQ ID NO: 19928 - protein, 484 aa, Synthetic construct
HHNGTNGTMMQYFEWYLPNDGNHWNRLRSDASNLKDKGITAVWIPPAWKGASQNDVGYGAYDLYDLGEFNQKGTVRTKYGTRNQLQAAVTALKSNGIQVYGDVVMNHKGGADATEWVRAVEVNPSNRNQEVSGDYTIEAWTKFDFPGRGNTHSNFKWRWYHFDGVDWDQSRQLQNRIYKFRGDGKGWDWEVDTENGNYDYLMYADIDMDHPEVVNELRNWGVWYTNTLGLDGFRIDAVKHIKYSFTRDWLTHVRNTTGKNMFAVAEFWKNDIGAIENYLSKTNWNHSVFDVPLHYNLYNASRSGGNYDMRQIFNGTVVQRHPTHAVTFVDNHDSQPEEALESFVEEWFKPLAYALTLTWDQGYPSVFYGDYYGIPTHGVPAMKSKIDYILEARQKYAYGKQNDYLDHHNMIGWTREGNTAHPNSGLATIMSDGPGGNKWMYVGRNKAGQVWRDITGNRSGTVTINADGWGNFSVNGGSVSIWVN

SEQ ID NO: 19929 - protein, 484 aa, Synthetic construct
HHNGTNGTMMQYFEWYLPNDGNHWNRLRSDASNLKDKGITAVWIPPAWKGASQNDVGYGAYDLYDLGEFNQKGTVRTKYGTRNQLQAAVTALKSNGIQVYGDVVMNHKGGADATEWVRAVEVNPSNRNQEVSGDYTIEAWTKFDFPGRGNTHSNFKWRWYHFDGVDWDQSRQLQNKIYKFRGDGKGWDWEVDTENGNYDYLMYADYDMDHPEVVNELRNWGVWYTNTLGLDGFRIDAVKHIKYSFTRDWLTHVRNTTGKNMFAVAEFWKNDIGAIENYLSKTNWNHSVFDVPLHYNLYNASRSGGNYDMRQIFNGTVVQRHPTHAVTFVDNHDSQPEEALESFVEEWFKPLAYALTLTRDQGYPSVFYGDYYGIPTHGVPAMKSKIDPILEARQKYAYGKQNDYLDHHNMIGWTREGNTAHPNSGLATIMSDGPGGNKWMYVGRNKAGQVWRDITGNRSGTVTINADGWGNFSVNGGSVSIWVN

SEQ ID NO: 19930 - protein, 484 aa, Synthetic construct
HHNGTNGTMMQYFEWYLPNDGNHWNRLRSDASNLKDKGITAVWIPPAWKGASQNDVGYGAYDLYDLGEFNQKGTVRTKYGTRNQLQAAVTALKSNGIQVYGDVVMNHKGGADATEWVRAVEVNPSDRNQEVSGDYTIEAWTKFDFPGRGNTHSNFKWRWYHFDGVDWDQSRQLQNRIYKFRGDGKGWDWEVDTENGNYDYLMYADIDMDHPEVVNELRNWGVWYTNTLGLDGFRIDAVKHIKYSFTRDWLTHVRNTTGKNMFAVAEFWKNDIGAIENYLSKTNWNHSVFDVPLHYNLYNASRSGGNYDMRQIFNGTVVQRHPTHAVTFVDNHDSQPEEALESFVEEWFKPLAYALTLTRDQGYPSVFYGDYYGIPTHGVPAMKSKINPILEARQKYAYGKQNDYLDHHNMIGWTREGNTAHPNSGLATIMSDGPGGNKWMYVGRNKAGQVWRDITGNRSGTVTINADGWGNFSVNGGSVSIWVN

SEQ ID NO: 19931 - protein, 484 aa, Synthetic construct
HHNGTNGTMMQYFEWYLPNDGNHWNRLRSDASNLKDKGITAVWIPPAWKGASQNDVGYGAYDLYDLGEFNQKGTVRTKYGLRNQLQAAVTALKSNGIQVYGDVVMNHKGGADATEWVRAVEVNPSNRNQEVSGDYTIEAWTKFDFPGRGNTHSNFKWRWYHFDGVDWDQSRQLQNRIYKFRGDGKGWDWEVDTENGNYDYLMYADIDMDHPEVVNELRNWGVWYTNTLGLDGFRIDAVKHIKYSFTRDWLTHVRNTTGKNMFAVAEFWKNDIGAIENYLSKTNWNHSVFDVPLHYNLYNASRSGGNYDMRQIFNGTVVQRHPTHAVTFVDNHDSQPEEALESFVEEWFKPLAYALTLTRDQGYPSVFYGDYYGIPTHGVPAMKSKIDEILEARQKYAYGKQNDYLDHHNMIGWTREGNTAHPNSGLATIMSDGPGGNKWMYVGRNKAGQVWRDITGNRSGTVTINADGWGNFSVNGGSVSIWVN

SEQ ID NO: 19932 - protein, 484 aa, Synthetic construct
HHNGTNGTMMQYFEWYLPNDGNHWNRLRSDASNLKDKGITAVWIPPAWKGASQNDVGYGAYDLYDLGEFNQKGTVRTKYGTRNQLQAAVTALKSNQIQVYGDVVMNHKGGADATEWVRAVEVNPSNRNQEVSGDYTIEAWTKFDFPGRGNTHSNFKWRWYHFDGVDWDQSRQLQNRIYKFRGDGKGWDWEVDTENGNYDYLMYADIDMDHPEVVNELRNWGVWYTNTLGLDGFRIDAVKHIKYSFTRDWLTHVRNTTGKNMFAVAEFWKNDIGAIENYLSKTNWNHSVFDVPLHYNLYNASRSGGNYDMRQIFNGTVVQRHPTHAVTFVDNHDSQPEEALESFVEEWFKPLAYALTLTRDQGYPSVFYGDYYGIPTHGAPAMKSKIDPILEARQKYAYGKQNDYLDHHNMIGWTREGNTAHPNSGLATIMSDGPGGNKWMYVGRNKAGQVWRDITGNRSGTVTINADGWGNFSVNGGSVSIWVN

SEQ ID NO: 19933 - protein, 484 aa, Synthetic construct
HHNGTNGTMMQYFEWYLPNDGNHWNRLRSDASNLKDKGITAVWIPPAWKGASQNDVGYGAYDLYDLGEFNQKGTVRTKYGTRNQLQAAVTALKSNGIQVYGDVVMNHKGGADATEWVRAVEVNPSNRNQEVSGDYTIEAWTKFDFPGRGNTHSNFKWRWYHFDGVDWDQSRQLQNRIYKFRGDGKEWDWEVDTENGNYDYLMYADIDMDHPEVVNELRNWGVWYTNTLGLDGFRIDAVKHIKYSFTRDWLEHVRNTTGKNMFAVAEFWKNDIGAIENYLSKTNWNHSVFDVPLHYNLYNASRSGGNYDMRQIFNGTVVQRHPTHAVTFVDNHDSQPEEALESFVEEWFKPLAYALTLTRDQGYPSVFYGDYYGIPTHGVPAMKSKIDPILEARQKYAYGKQNDYMDHHNMIGWTREGNTAHPNSGLATIMSDGPGGNKWMYVGRNKAGQVWRDITGNRSGTVTINADGWGNFSVNGGSVSIWVN

SEQ ID NO: 19934 - protein, 484 aa, Bacillus sp. 7-7
HHTGTNGTMMQYFEWYLPNDGNHWNRLRSDASNLKDKGITAVWIPPAWKGASQNDVGYGAYDLYDLGEFNQKGTVRTKYGTRNQLQAAVTALKSNGIQVYGDVVMNHKGGADATEWVRAVEVNPSNRNQEVSGDYTIEAWTKFDFPGRGNTHSNFKWRWYHFDGVDWDQSRQLQNRIYKFRGDGKGWDWEVDTENGNYDYLMYADIDMDHPEVVNELRNWGVWYTNTLGLDGFRIDAVKHIKYSFTRDWLTHVRNTTGKNMFAVAEFWKNDIGAIENYLSKTNWNHSVFDVPLHYNLYNASRSGGNYDMRQIFNGTVVQRHPTHAVTFVDNHDSQPEEALESFVEEWFKPLAYALTLTRDQGYPSVFYGDYYGIPTHGVPAMKSKIDPILEARQKYAYGKQNDYLDHHNMIGWTREGNTAHPNSGLATIMSDGPGGNKWMYVGRNKAGQVWRDITGNRSGTVTINADGWGNFSVXGGSVSIWVN

SEQ ID NO: 19935 - protein, 484 aa, Bacillus sp. 7-7
HHAGTNGTMMQYFEWYLPNDGNHWNRLRSDASNLKDKGITAVWIPPAWKGASQNDVGYGAYDLYDLGEFNQKGTVRTKYGTRNQLQAAVTALKSNGIQVYGDVVMNHKGGADATEWVRAVEVNPSNRNQEVSGDYTIEAWTKFDFPGRGNTHSNFKWRWYHFDGVDWDQSRQLQNRIYKFRGDGKGWDWEVDTENGNYDYLMYADIDMDHPEVVNELRNWGVWYTNTLGLDGFRIDAVKHIKYSFTRDWLTHVRNTTGKNMFAVAEFWKNDIGAIENYLSKTNWNHSVFDVPLHYNLYNASRSGGNYDMRQIFNGTVVQRHPTHAVTFVDNHDSQPEEALESFVEEWFKPLAYALTLTRDQGYPSVFYGDYYGIPTHGVPAMKSKIDPILEARQKYAYGKQNDYLDHHNMIGWTREGNTAHPNSGLATIMSDGPGGNKWMYVGRNKAGQVWRDITGNRSGTVTINADGWGNFSVXGGSVSIWVN

SEQ ID NO: 19936 - protein, 484 aa, Synthetic construct
HHNGTNGTMMQYFEWYLPNDGNHWNRLRSDASNLKDKGITAVWIPPAWKGASQNDVGYGAYDLYDLGEFNQKGTVRTKYGTREQLQAAVTALKSNGIQVYGDVVMNHKGGADATEWVRAVEVNPSNRNQEVSGDYTIEAWTKFDFPGRGNTHSNFKWRWYHFDGVDWDQSRQLQNRIYKFEGDGKGWDWEVDTENGNYDYLMYADIDMDHPEVVNELRNWGVWYTNTLGLDGFRIDAVKHIKYSFTRDWLTHVRNTTGKNMFAVAEFWKNDIGAIENYLSKTNWNHSVFDVPLHYNLYNASRSGGNYDMRQIFNGTVVQRHPTHAVTFVDNHDSQPEEALESFVEEWFKPLAYALTLTRDQGYPSVFYGDYYGIPTHGVPAMKSKIDPILEARQKYAYGKQNDYLDHHNMIGWTREGNTAHPNSGLATIMSDGPGGNKWMYVGRNKAGQVWRDITGNRSGTVTINADGWGNFSVNGGSVSIWVN

SEQ ID NO: 19937 - protein, 484 aa, Synthetic construct
HHNGTNGTMMQYFEWYLPNDGNHWNRLRSDASNLKDKGITAVWIPPAWKGASQNDVGYGAYDLYDLGEFNQKGTVRTKYGTRNQLQAAVTALKSNQIQVYGDVVMNHKGGADATEWVRAVEVNPSNRNQEVSGDYTIEAWTKFDFPGRGNTHSNFKWRWYHFDGVDWDQSRQLQNRIYKFRGDGKGWDWEVDTENGNYDYLMYADIDMDHPEVVNELRNWGVWYTNTLGLDGFRIDAVKHIKYSFTRDWLTHVRNTTGKNMFAVAEFWKNDIGAIENYLSKTNWNHSVFDVPLHYNLYNASRSGGNYDMRQIFNGTVVQRHPTHAVTFVDNHDSQPEEALESFVEEWFKPLAYALTLTRDQGYPSVFYGDYYGIPTHGVPAMKSKIDPILEARQKYAYGKQNDYLDHHNMIGWTREGNTAHPNSGLATIMSDGPGGNKWMYVGRNKAGQVWRDITGNRSGTVTIHADGWGNFSVNGGSVSIWVN

SEQ ID NO: 19938 - protein, 484 aa, Synthetic construct
HHNQTNGTMMQYFEWYLPNDGNHWNRLRSDASNLKDKGITCVWIPPAWKGASQNDVGYGAYDLYDLGEFNQKGTVRTKYGTRNQLQAAVTALKSNGIQVYGDVVMNHKGGADATEWVRAVEVNPSNRNQEVSGDYTIEAWTKFDFPGRGNTHSNFKWRWYHFDGVDWDQSRQLQNRIYKFRGDGKGWDWEVDTENGNYDYLMYADIDMDHPEVVNELRNWGVWYTNTLGLDGFRIDAVKHIKYSFTRDWLTHVRNTTGKNMFAVAEFWKNDIGAIENYLSKTNWNHSVFDVPLHYNLYNASRSGGNYDMRQIFNGTVVQRHPTHAVTFVDNHDSQPEEALESFVEEWFKPLAYALTLTRDQGYPSVFYGDYYGIPTHGVPAMKSKIDPILEARQKYAYGKQNDYLDHHNMIGWTREGNTAHPNSGLATIMSDGPGGNKWMYVGRNKAGQVWRDITGNRSGTVTINADGWGNFSVNGGSVSIWVN

SEQ ID NO: 19939 - protein, 484 aa, Synthetic construct
HHNGTNGTMMQYFEWYLPNDGNHWNRLRSDASNLKDKGITAVWIPPAYKGASQNDVGYGAYDLYDLGEFNQKGTVRTKYGTRNQLQAAVTALKSNGIQVYGDVVMNHKGGADATEKVRAVEVNPSNRNQEVSGDYTIEAWTKFDFPGRGNTHSNFKWRWYHFDGVDWDQSRQLQNRIYKFRGDGKGWDWEVDTENGNYDYLMYADIDMDHPEVVNELKNWGVWYTNTLGLDGFRIDAVKHIKYSFTRDWLTHVRNTTGKNMFAVAEFWKNDIGAIENYLSKTNWNHSVFDVPLHYNLYNASRSGGNYDMRQIFNGTVVQRHPTHAVTFVDNHDSQPEEALESFVEEWFKPLAYALTLTRDQGYPSVFYGDYYGIPTHGVPAMKSKIDPILEARQKYAYGKQNDYLDHHNMIGWTREGNTAHPNSGLATIMSDGPGGNKWMYVGRNKAGQVWRDITGNRSGTVTINADGWGNFSVNGGSVSIWVN

SEQ ID NO: 19940 - protein, 484 aa, Synthetic construct
HHNGTNGTMMQYFEWYLPNDGNHWNRLRSDASNLKDKGITAVWIPPAWKGASQNDVGYGAYDLYDLGEFNQKGTVRTKYGTRNQLQAAVTALKSNGIQVYGDVVMNHKGGADATEWVRAVEVNPSNRNQEVSGDYTIEAWTKFDFPGRGNTHSNFKWRWYHFDGVDWDQSRQLQNRIYKFRGDGKEWDWEVDTENGNYDYLMYADYDMDHPEVVNELRNWGVWYTNTLGLDGFRIDAVKHIKYSFTRDWLEHVRNTTGKNMFAVAEFWKNDIGAIENYLSKTNWNHSVFDVPLHYNLYNASRSGGNYDMRQIFNGTVVQRHPTHAVTFVDNHDSQPEEALESFVEEWFKPLAYALTLTRDQGYPSVFYGDYYGIPTHGVPAMKSKIDPILEARQKYAYGKQNDYLDHHNMIGWTREGNTAHPNSGLATIMSDGPGGNKWMYVGRNKAGQVWRDITGNRSGTVTINADGWGNFSVNGGSVSIWVN

SEQ ID NO: 19941 - protein, 484 aa, Bacillus sp.
HHNGTNGTMMQYFEWYLPNDGNHWNRLRSDASNLKDKGITAVWIPPAWKGASQNDVGYGAYDLYDLGEFNQKGTVRTKYGTRNQLQAAVTALKSNGIQVYGDVVMNHKGGADATEWVRAVEVNPSNRNQEVSGDYTIEAWTKFDFPGRGNTHSNFKWRWYHFDGVDWDQSRQLQNRIYKFRGDGKGWDWEVDTENGNYDYLMYADIDMDHPEVVNELRNWGVWYTNTLGLDGFRIGAVKHIKYSFTRDWLTHVRNTTGKNMFAVAEFWKNDIGAIENYLSKTNWNHSVFDVPLHYNLYNASRSGGNYDMRQIFNGTVVQRHPTHAVTFVDNHDSQPEEALESFVEEWFKPLACALTLTRDQGYPSVFYGDYYGIPTHGVPAMKSKIDPILEARQKYAYGKQNDYLDHHNMIGWTREGNTAHPNSGLATIMSDGPGGNKWMYVGRNKAGQVWRDITGNRSGTVTINADGWGNFSVNGGSVSIWVN

SEQ ID NO: 19942 - protein, 484 aa, Synthetic construct
HHNGTNGTMMQYFEWYLPNDGNHWNRLVSDASNLKDKGITAVWIPPAWKGASQNDVGYGAYDLYDLGEFNQKGTVRTKYGTRNQLQAAVTALKSNGIQVYGDVVMNHKGGADATEWVRAVEVNPSNRNQEVSGDYTIEAWTKFDFPGRGNTHSNFKWRWYHFDGVDWDQSRQLQNRIYKFRGDGKGWDWEVDTENGNYDYLMYADIDMDHPEVVNELRNWGVWYTNTLGLDGFRIDAVKHIKYSFTRDWLTHVRNTTGKNMFAVAEFWKNDIGAIENYLSKTNWNHSVFDVPLHYNLYNASRSGGNYDMRQIFNGTVLQRHPTHAVTFVDNHDSQPEEALESFVEEWFKPLAYALTLTRDQGYPSVFYGDYYGIPTHGVPAMKSKIDPILEARQKYAYGKQNDYLDHHNMIGWTREGNTAHPNSGLATIMSDGPGGNKWMYVGRNKAGQVWRDITGNRSGTVTINADGWGNFSVNGGSVSIWVN

SEQ ID NO: 19943 - protein, 484 aa, Synthetic construct
HHNGTNGTMMQYFEWYLPNDGNHWNRLRSDASNLKDKGITAVWIPPAWKGASQNDVGYGAYDLYDLGEFNQKGTVRTKYGTRNQLQAAVTALKSNGIQVYGDVVMNHKGGADATEWVRAVEVNPSNRNQEVSGDYTIEAWTKFDFPGRGNTHSNFKWRWYHFDGVDWDQSRQLQNRIYKFRGDGKGWDWEVDTENGNYDYLMYADIDMDDPECVNELRNWGVWYTNTLGLDGFRIDAVKHIKYSFTRDWLTHVRNTTGKNMFAVAEFWKNDIGAIENYLSKTNWNHSVFDVPLHYNLYNASRSGGNYDMRQIFNGTVVQRHPTHAVTFVDNHDSQPEEALESFVEEWFKPLAYALTLTRDQGYPSVFYGDYYGIPTHGVPAMKSKIDPILEARQKYAYGKQNDYLDHHNMIGWTREGNTAHPNSGLATIMSDGPGGNKWMYVGRNKAGQVWRDITGNRSGTVTINADGWGNFSVNGGSVSIWVN

SEQ ID NO: 19944 - protein, 484 aa, Synthetic construct
HHNGTNGTMMQYFEWYLPNDGNHWNRLRSDASNLKDKGITAVWIPPAWKGASQNDVGYGAYDLYDLGEFNQKGTVRTKYGTRNQLQAAVTALKSNGIQVYGDVVMNHKGGADATEWVRAVEVNPSNRNQEVSGDYTIEAWTKFDFPGRGNTHSNFKWRWYHFDGVDWDQSRQLQARIYKFRGDGKGWDWEVDTENGNYDYLMYADIDMDHPEVVNELRNWGVWYTNTLGLDGFRIDAVKHIKYSFTRDWLTHVRNTTGKNMFAVAEFWKNDIGAIENYLSKTNWNHSVFDVPLHYNLYNASRSGGNYDMRQIFNGTVVQRHPTHAVTFVDNHDSQPEEALESFVEEWFKPLAYALTLTRDQGYPSVFYGDYYGIPTHGVPAMKSWIDPILEARQKYAYGKQNDYLDHHNMIGWTREGNTAHPNSGLATIMSDGPGGNKWMYVGRNKAGQVWRDITGNRSGTVTINADGWGNFSVNGGSVSIWVN

SEQ ID NO: 19945 - protein, 484 aa, Bacillus sp. 7-7
HHYGTNGTMMQYFEWYLPNDGNHWNRLRSDASNLKDKGITAVWIPPAWKGASQNDVGYGAYDLYDLGEFNQKGTVRTKYGTRNQLQAAVTALKSNGIQVYGDVVMNHKGGADATEWVRAVEVNPSNRNQEVSGDYTIEAWTKFDFPGRGNTHSNFKWRWYHFDGVDWDQSRQLQNRIYKFRGDGKGWDWEVDTENGNYDYLMYADIDMDHPEVVNELRNWGVWYTNTLGLDGFRIDAVKHIKYSFTRDWLTHVRNTTGKNMFAVAEFWKNDIGAIENYLSKTNWNHSVFDVPLHYNLYNASRSGGNYDMRQIFNGTVVQRHPTHAVTFVDNHDSQPEEALESFVEEWFKPLAYALTLTRDQGYPSVFYGDYYGIPTHGVPAMKSKIDPILEARQKYAYGKQNDYLDHHNMIGWTREGNTAHPNSGLATIMSDGPGGNKWMYVGRNKAGQVWRDITGNRSGTVTINADGWGNFSVXGGSVSIWVN

SEQ ID NO: 19946 - protein, 484 aa, Synthetic construct
HHNGTNGTMMQYFEWYLPNDGNHWNRLRSDASNLKDKGITAVWIPPAWKGVSQNDVGYGAYDLYDLGEFNQKGTVRTKYGTRNQLQAAVTALKSNGIQVYGDVVMNHKGGADATEWVRAVEVNPSNRNQEVSGDYTIEAWTKFDFPGRGNTHSNFKWRWYHFDGVDWDQSRQLQNRIYKFRGDGKGWDWEVDTENGNYDYLMYADIDMDHPEVVNELKNWGVWYTNTLGLDGFRIDAVKHIKYSFTRDWLTHVRNTTGKNMFAVAEFWKNDIGAIENYLSKTNWNHSVFDVPLHYNLYNASRSGGNYDMRQIFNGTVVQRHPTHAVTFVDNHDSQPEEALESFVEEWFKPLAYALTLTRDQGYPSVFYGDYYGIPTHGVPAMKSKIDPILEARQKYAYGKQNDYLDHHNMIGWTREGNTAHPNSGLATIMSDGPGGNKWMYVGRNKAGQVWRDITGNRSGTVTINADGWGNFSVNGGSVSIWVN

SEQ ID NO: 19947 - protein, 484 aa, Synthetic construct
HHNGTEGTMMQYFEWYLPNDGNHWNRLRSDASNLKDKGITAVWIPPAWKGASQNDVGYGAYDLYDLGEFNQKGTVRTKYGTRNQLQAAVTALKSNGIQVYGDVVMNHKGGADATEWVRAVEVNPSNRNQEVSGDYTIEAWTKFDFPGRGNTHSNFKWRWYHFDGVDWDQSRQLQNRIYKFRGDGKGWDWEVDTENGNYDYLMYADIDMDHPEVVNELRNWGVWYTNTLGLDGFRIDAVKHIKYSFTRDWLTHVRNTTGKNMFAVAEFWKNDIGAIENYLSKTNWNHSVFDVPLHYNLYNASRSGGNYDMRQIFNGTVVQRHPTHAVTFVDNHDSQPETALESFVEEWFKPLAYALTLTRDQGYPSVFYGDYYGIPTHGVPAMKSKIDPILEARQKYAYGKQNDYLDHHNMIGWTREGNTAHPNSGLATIMSDGPGGNKWMYVGRNKAGQVWRDITGNRSGTVTINADGWGNFSVNGGSVSIWVN

SEQ ID NO: 19948 - protein, 484 aa, Synthetic construct
HHNGTNGTMMQYFEWYLPNDGNHWNRLRSDASNLKDKGITAVWIPPAWKGASQNDVGYGAYDLYDLGEFNQKGTVRTKYGTRNQLQAAVTALKSNGIQVYGDVVMNHKGGADATEWVRAVEVNPSNRNQEVSGDYTIEAWTKFDFPGRGNTHSNFKWRWYHFDGVDWDQSRQLQNKIYKFRGDGKGWDWEVDTENGNYDYLMYADIDMDHPEVVNELRNWGVWYTNTLGLDGFRIDAVKHIKYSFTRDWLTHVRNTTGKNMFAVAEFWKNDIGAIENYLSKTNWNHSVFDVPLHYNLYNASRSGGNYDMRQIFNGTVVQRHPTHAVTFVDNHDSQPEEALESFVEEWFKPLAYALTLTRDQGYTSVFYGDYYGIPTHGVPAMKSKIDPILEARQKYAYGKQNDYLDHHNMIGWTREGNTAHPNSGLATIMSDGPGGNKWMYVGRNKAGQVWRDITGNRSGTVTINADGWGNFSVNGGSVSIWVN

SEQ ID NO: 19949 - protein, 484 aa, Synthetic construct
HHNGTHGTMMQYFEWYLPNDGNHWNRLRSDASNLKDKGITAVWIPPAWKGASQNDVGYGAYDLYDLGEFNQKGTVRTKYGTRNQLQAAVTALKSNGIQVYGDVVMNHKGGADATTWVRAVEVNPSNRNQEVSGDYTIEAWTKFDFPGRGNTHSNFKWRWYHFDGVDWDQSRQLQNRIYKFRGDGKGWDWEVDTENGNYDYLMYADIDMDHPEVVNELRNWGVWYTNTLGLDGFRIDAVKHIKYSFTRDWLTHVRNTTGKNMFAVAEFWKNDIGAIENYLSKTNWNHSVFDVPLHYNLYNASRSGGNYDMRQIFNGTVVQRHPTHAVTFVDNHDSQPEEALESFVEEWFKPLAYALTLTRDQGYPSVFYGDYYGIPTHGVPAMKSKIDPILEARQKYAYGKQNDYLDHHNMIGWTREGNTAHPNSGLATIMSDGPGGNKWMYVGRNKAGQVWRDITGNRSGTVTINADGWGNFSVNGGSVSIWVN

SEQ ID NO: 19950 - protein, 484 aa, Synthetic construct
HHNGTNGTMMQYFEWYLPNDGNHWNRLRSDASNLKDKGITAVWIPPAWKGASQNDVGYGAYDLYDLGEFNQKGTVRTKYGTRNQLQAAVTALKSNGIQVYGDVVMNHKGGADATEWVRAVEVNPSNRCQEVSGDYTIEAWTKFDFPGRGNTHSNFKWRWYHFDGVDWDQSRQLQNRIYKFRGDGKGWDWEVDTENGNYDYLMYADIDMDHPEVVNELRNWGVWYTNTLGLDGFRIDAVKHIKYSFTRDWLTHVRNTTGKNMFAVAEFWKNDIGAIENYLSKTNWNHSVFDVPLHYNLYNASRSGGNYDMRQIFNGTVVQRHPTHAVTFVDNHDSQPEEALESFVEEWFKPLAYALTLTRDQGYPSVFYGDYYGIPTHGVPAMKSKIDPILEARQKSAYGKQNDYLDHHNMIGWTREGNTAHPNSGLATIMSDGPGGNKWMYVGRNKAGQVWRDITGNRSGTVTINADGWGNFSVNGGSVSIWVN

SEQ ID NO: 19951 - protein, 484 aa, Bacillus sp. 7-7
HHGGTNGTMMQYFEWYLPNDGNHWNRLRSDASNLKDKGITAVWIPPAWKGASQNDVGYGAYDLYDLGEFNQKGTVRTKYGTRNQLQAAVTALKSNGIQVYGDVVMNHKGGADATEWVRAVEVNPSNRNQEVSGDYTIEAWTKFDFPGRGNTHSNFKWRWYHFDGVDWDQSRQLQNRIYKFRGDGKGWDWEVDTENGNYDYLMYADIDMDHPEVVNELRNWGVWYTNTLGLDGFRIDAVKHIKYSFTRDWLTHVRNTTGKNMFAVAEFWKNDIGAIENYLSKTNWNHSVFDVPLHYNLYNASRSGGNYDMRQIFNGTVVQRHPTHAVTFVDNHDSQPEEALESFVEEWFKPLAYALTLTRDQGYPSVFYGDYYGIPTHGVPAMKSKIDPILEARQKYAYGKQNDYLDHHNMIGWTREGNTAHPNSGLATIMSDGPGGNKWMYVGRNKAGQVWRDITGNRSGTVTINADGWGNFSVXGGSVSIWVN

SEQ ID NO: 19952 - protein, 484 aa, Synthetic construct
HHNGTNGTMMQYFEWYLPNDGNHWNRLRSDASNLKDKGITAVWIPPAWKGASQNDVGYGAYDLYDLGEFNQKGTVRTKYGTRNQLQAAVTALKSNGIQVYGDVVMNHKGGADATEWVRAVEVNPSNRNQEVSGDYTIEAWTKFDFPGRGNTHSNFKWRWYHFDGVDWDQSRQLQNRIYKFRGDGKEWDWEVDTENGNYDYLMYADIDMDHPEVVNELRNWGVWYTNTLGLDGFRIDAVKHIKYSFTRDWLTHVRNTTGKNMFAVAEFWKNDIGAIENYLSKTNWNHSVFDVPLHYNLYNASRSGGNYDMRQIFNGTVVQRHPTHAVTFVDNHDSQPEEALESFVEEWFKPLAYALTLTRDQGYPSVFYGDYYGIPTHGVPAMKSKIDPILEARQKYAYGKQNDYMDHHNMIGWTREGNTAHPNSGLATIMSDGPGGNKWMYVGRNKAGQVWRDITGNRSGTVTINADGWGNFSVNGGSVSIWVN

SEQ ID NO: 19953 - protein, 484 aa, Bacillus sp. 7-7
HHRGTNGTMMQYFEWYLPNDGNHWNRLRSDASNLKDKGITAVWIPPAWKGASQNDVGYGAYDLYDLGEFNQKGTVRTKYGTRNQLQAAVTALKSNGIQVYGDVVMNHKGGADATEWVRAVEVNPSNRNQEVSGDYTIEAWTKFDFPGRGNTHSNFKWRWYHFDGVDWDQSRQLQNRIYKFRGDGKGWDWEVDTENGNYDYLMYADIDMDHPEVVNELRNWGVWYTNTLGLDGFRIDAVKHIKYSFTRDWLTHVRNTTGKNMFAVAEFWKNDIGAIENYLSKTNWNHSVFDVPLHYNLYNASRSGGNYDMRQIFNGTVVQRHPTHAVTFVDNHDSQPEEALESFVEEWFKPLAYALTLTRDQGYPSVFYGDYYGIPTHGVPAMKSKIDPILEARQKYAYGKQNDYLDHHNMIGWTREGNTAHPNSGLATIMSDGPGGNKWMYVGRNKAGQVWRDITGNRSGTVTINADGWGNFSVXGGSVSIWVN

SEQ ID NO: 19954 - protein, 484 aa, Synthetic construct
HHNGTNGTMMQYFEWYLPNDGNHWNRLRSDASNLKDKVITAVWIPPAWKGASQNDVGYGAYDLYDLGEFNQKGTVRTKYGTRNQLQAAVTALKSNGIQVYGDVVMNHKGGADATEWVRAVEVNPSNRNQEVSGDYTIEAWTKFDFPGRGNTHSNFKWRWYHFDGVDWDQSRQLQNRIYKFRGDGKGWDWEVDTENGNYDYLMYADIDMDHPEVVNELRNWGVWYTNTLGLDGFRIDAVKHIKYSFTRDWLTHVRNTTGKNMFAVAEFWKNDIGAIENYLSKTNWNHSVFDVPLHYNLYNASRSGGNYDMRQIFNGTVVQRHPTHAVTFVDNHDSQPEEALESFVEEWFKPLAYALVLTRDQGYPSVFYGDYYGIPTHGVPAMKSKIDPILEARQKYAYGKQNDYLDHHNMIGWTREGNTAHPNSGLATIMSDGPGGNKWMYVGRNKAGQVWRDITGNRSGTVTINADGWGNFSVNGGSVSIWVN

SEQ ID NO: 19955 - protein, 484 aa, Synthetic construct
HHNGTNGTMMQYFEWYLPNDGNHWNRIRSDASNLKDKGITAVWIPPAWKGASQNDVGYGAYDLYDLGEFNQKGTVRTKYGTRNQLQAAVTALKSNGIQVYGDVVMNHKGGADATEWVRAVEVNPSNRNQEVSGDYTIEAWTKFDFPGRGNTHSNFKWRWYHFDGVDWDQSRQLQNRIYKFRGDGKGWDWEVDTENGNYDYLMYADIDMDHPEVVNELRNWGVWYTNTLGLDGFRIDAVKHIKYSFTRDWLTHVRNTTGKNMFAVAEFWKNDIGAIENYLSKTNWNHSVFDVPLHYNLYNASRSGGNYDMRQIFNGTVVQRHPTHAVTFVDNHDSQPEEALESFVEEWFKPLCYALTLTRDQGYPSVFYGDYYGIPTHGVPAMKSKIDPILEARQKYAYGKQNDYLDHHNMIGWTREGNTAHPNSGLATIMSDGPGGNKWMYVGRNKAGQVWRDITGNRSGTVTINADGWGNFSVNGGSVSIWVN

SEQ ID NO: 19956 - protein, 484 aa, Bacillus sp. 7-7
HHWGTNGTMMQYFEWYLPNDGNHWNRLRSDASNLKDKGITAVWIPPAWKGASQNDVGYGAYDLYDLGEFNQKGTVRTKYGTRNQLQAAVTALKSNGIQVYGDVVMNHKGGADATEWVRAVEVNPSNRNQEVSGDYTIEAWTKFDFPGRGNTHSNFKWRWYHFDGVDWDQSRQLQNRIYKFRGDGKGWDWEVDTENGNYDYLMYADIDMDHPEVVNELRNWGVWYTNTLGLDGFRIDAVKHIKYSFTRDWLTHVRNTTGKNMFAVAEFWKNDIGAIENYLSKTNWNHSVFDVPLHYNLYNASRSGGNYDMRQIFNGTVVQRHPTHAVTFVDNHDSQPEEALESFVEEWFKPLAYALTLTRDQGYPSVFYGDYYGIPTHGVPAMKSKIDPILEARQKYAYGKQNDYLDHHNMIGWTREGNTAHPNSGLATIMSDGPGGNKWMYVGRNKAGQVWRDITGNRSGTVTINADGWGNFSVXGGSVSIWVN

SEQ ID NO: 19957 - protein, 484 aa, Bacillus sp. 7-7
HHLGTNGTMMQYFEWYLPNDGNHWNRLRSDASNLKDKGITAVWIPPAWKGASQNDVGYGAYDLYDLGEFNQKGTVRTKYGTRNQLQAAVTALKSNGIQVYGDVVMNHKGGADATEWVRAVEVNPSNRNQEVSGDYTIEAWTKFDFPGRGNTHSNFKWRWYHFDGVDWDQSRQLQNRIYKFRGDGKGWDWEVDTENGNYDYLMYADIDMDHPEVVNELRNWGVWYTNTLGLDGFRIDAVKHIKYSFTRDWLTHVRNTTGKNMFAVAEFWKNDIGAIENYLSKTNWNHSVFDVPLHYNLYNASRSGGNYDMRQIFNGTVVQRHPTHAVTFVDNHDSQPEEALESFVEEWFKPLAYALTLTRDQGYPSVFYGDYYGIPTHGVPAMKSKIDPILEARQKYAYGKQNDYLDHHNMIGWTREGNTAHPNSGLATIMSDGPGGNKWMYVGRNKAGQVWRDITGNRSGTVTINADGWGNFSVXGGSVSIWVN

SEQ ID NO: 19958 - protein, 484 aa, Synthetic construct
HHNGTNGTMMQYFEWYLPNDGNHWNRLRSDASNLKDKGITAVWIPPAWKGASQNDVGYGAYDLYDLGEFNQKGTVRTKYGTRNQLQAAVTALKSNGIQVYGDVVMNHKGGADATEWVRAVEVNPSNRNQEVSGDYTIEAWTKFDFPGRGNTHSNFKWRWYHFDGVDWDQSRQLQNRIYKFRGDGKGWDWEVDTENGNYDYLMYADIDMDCPEVVNELRNWGVWYTNTLGLDGFRIDAVKHIKYSFTRDWLTHVRNTTGKNMFAVAEFWKNDIGAIENYLSKTNWNHSVFDVPLHYNLYNASRSGGNYDMRQIFNGTVVQRHPTHAVTFVDNHDSQPEEALESFVEEWFKPLAYALTLTRDQGMPSVFYGDYYGIPTHGVPAMKSKIDPILEARQKYAYGKQNDYLDHHNMIGWTREGNTAHPNSGLATIMSDGPGGNKWMYVGRNKAGQVWRDITGNRSGTVTINADGWGNFSVNGGSVSIWVN

SEQ ID NO: 19959 - protein, 484 aa, Synthetic construct
HHNGTNGTMMQYFEWYLPNDGNHWNRLRSDASNLKDKGITAVWIPPAWKGASQNDVGYGAYDLYDLGEFNQKGTVRTKYGTRNQLQAAVTALKSNGIQVYGDVVMNHKGGADATEWVRAVEVNPSNRNQEVSGDYTIEAWTKFDFPGRGNTHSNFKWRWYHFDGVDWDQSRQLQNRIYKFRGDGKGWDWEVDTENGNYDYLMYADIDMDHPEVVNELRNWGVWYTNTLGLDGFRIDAVKHIKYSFTRDWLTHVRNTTGKNMFAVAEFWKNDIGAIENYLSKTNWNHSVFDVPLHYNLYNASRSGGNYDMRQIFNGTVVQRHPTHAVTFVDNHDSQPEEALESFVEEWFKPLCYALTLTRDQGYPSVFYGDYCGIPTHGVPAMKSKIDPILEARQKYAYGKQNDYLDHHNMIGWTREGNTAHPNSGLATIMSDGPGGNKWMYVGRNKAGQVWRDITGNRSGTVTINADGWGNFSVNGGSVSIWVN

SEQ ID NO: 19960 - protein, 484 aa, Synthetic construct
HHNGTNGTMMQYFEWYLPNDGNHWYRLRSDASNLKDKGITAVWIPPAWKGASQNDVGYGAYDLYDLGEFNQKGTVRTKYGTRNQLQAAVTALKSNGIQVYGDVVMNHKGGADATEWVRAVEVNPSNRNQEVSGDYTIEAWTKFDFPGRGNTHSNFKWRWYHFDGVDWDQSRQLQNRIYKFRGDGKGWDWEVDTENGNYDYLMYADIDMDHPEVVNELRNWGVWYTNTLGLDGFRIDAVKHIKYSFTRDWLTHVRNTTGKNMFAVAEFWKNDIGAIENYLSKTNWNHSVFDVPLHYNLYNASRSGGNYDMRQIFNGTVVQRHPTHAVTFVDNHDSQPEEALESFVEEWFKPLAYALTLTRDQGYPSVFYGDYYGIPTHGVPAMKSKIDKILEARQKYAYGKQNDYLDHHNMIGWTREGNTAHPNSGLATIMSDGPGGNKWMYVGRNKAGQVWRDITGNRSGTVTINADGWGNFSVNGGSVSIWVN

SEQ ID NO: 19961 - protein, 484 aa, Bacillus sp. 7-7
HHFGTNGTMMQYFEWYLPNDGNHWNRLRSDASNLKDKGITAVWIPPAWKGASQNDVGYGAYDLYDLGEFNQKGTVRTKYGTRNQLQAAVTALKSNGIQVYGDVVMNHKGGADATEWVRAVEVNPSNRNQEVSGDYTIEAWTKFDFPGRGNTHSNFKWRWYHFDGVDWDQSRQLQNRIYKFRGDGKGWDWEVDTENGNYDYLMYADIDMDHPEVVNELRNWGVWYTNTLGLDGFRIDAVKHIKYSFTRDWLTHVRNTTGKNMFAVAEFWKNDIGAIENYLSKTNWNHSVFDVPLHYNLYNASRSGGNYDMRQIFNGTVVQRHPTHAVTFVDNHDSQPEEALESFVEEWFKPLAYALTLTRDQGYPSVFYGDYYGIPTHGVPAMKSKIDPILEARQKYAYGKQNDYLDHHNMIGWTREGNTAHPNSGLATIMSDGPGGNKWMYVGRNKAGQVWRDITGNRSGTVTINADGWGNFSVXGGSVSIWVN

SEQ ID NO: 19962 - protein, 484 aa, Synthetic construct
HHNGTNGTMMQYFEWYLPNDGNHWNRLVSDASNLKDKGITAVWIPPAWKGASQNDVGYGAYDLYDLGEFNQKGTVRTKYGTRNQLQAAVTALKSNGIQVYGDVVMNHKGGADATEWVRAVEVNPSNRNQEVSGDYTIEAWTKFDFPGRGNTHSNFKWRWYHFDGVDWDQSRQLQNRIYKFRGDGKGWDWEVDTENGNYDYLMYADIDMDHPEVVNELRNWGVWYTNTLGLDGFRIDAVKHIKYSFTRDWLTHVRNTTGKNMFAVAEFWKNDIGAIENYLSKTNWNHSVFDVPLHYNLYNASRSGGNYDMRQIFNGTVVQRHPTHAVTFVDNHDSQPEEALESFVEEWFKPLAYALTLTRDQGYPSVFYGDYYGIPTHGVPAMKSKIDPILEAQQKYAYGKQNDYLDHHNMIGWTREGNTAHPNSGLATIMSDGPGGNKWMYVGRNKAGQVWRDITGNRSGTVTINADGWGNFSVNGGSVSIWVN

SEQ ID NO: 19963 - protein, 484 aa, Synthetic construct
HHNGTNGTMMQYFEWYLPNDGNHWNRLRSDASNLKDKGITAVWIPPAWKGASQNDVGYGAYDLYDLGEFNQKGTVRTKYGTRNQLQAAVTALKSNGIQVYGDVVMNHKGGADATEWVRAVEVNPSNRNQEVSGDYTIEAWTKFDFPGRGNTHSNFKWRWYHFDGVDWDQSRQLQNRIYKFRGDGKGWDWEVDTENGNYDYLMYADIDMDHPEVVNELRNWGVWYTNTLGLDGFRIDAVKHIKYSFTRDWLTHVRNTTGKNMFAVAEFWKNDIGAIENYLSKTNWNHSVFDVPLHYNLYNASRSGGNYDMRQIFNGTVVQRHPTHAVTFVDNHDSQPEEALESFVEEWFKPLAYALTLTRDQGSPSVFFGDYYGIPTHGVPAMKSKIDPILEARQKYAYGKQNDYLDHHNMIGWTREGNTAHPNSGLATIMSDGPGGNKWMYVGRNKAGQVWRDITGNRSGTVTINADGWGNFSVNGGSVSIWVN

SEQ ID NO: 19964 - protein, 484 aa, Synthetic construct
HHNGTNGTMMQYFEWYLPNDGNHWNRLRSDASNLKDKGITAVWIPPAWKGASQNDVGYGAYDLYDLGEFNQKGTVRTKYGTRNQLQAAVTALKSNGIQVYGDVVMNHKGGADATEWVRAVEVNPSNRNQEVSGDYTIEAWTKFDFPGRGNTHSNFKWRWWHFDGVDWDQSRQLQNRIYKFRGDGKEWDWEVDTENGNYDYLMYADIDMDHPEVVNELRNWGVWYTNTLGLDGFRIDAVKHIKYSFTRDWLTHVRNTTGKNMFAVAEFWKNDIGAIENYLSKTNWNHSVFDVPLHYNLYNASRSGGNYDMRQIFNGTVVQRHPTHAVTFVDNHDSQPEEALESFVEEWFKPLAYALTLTRDQGYPSVFYGDYYGIPTHGVPAMKSKIDPILEARQKYAYGKQNDYLDHHNMIGWTREGNTAHPNSGLATIMSDGPGGNKWMYVGRNKAGQVWRDITGNRSGTVTINADGWGNFSVNGGSVSIWVN

SEQ ID NO: 19965 - protein, 484 aa, Synthetic construct
HHNGTNGTMMQYFEWYLPNDGNHWNRLRSDASNLKDKGITAVWIPPAWKGASQNDVGYGAYDLYDLGEFNQKGTVRTKYGTRNQLQAAVTALKSNGIQVYGDVVMNHKGGADATEWVRAVEVNPSNRNQEVSGDYTIECWTKFDFPGRGNTHSNFKWRWYHFDGVDWDQSRQLQNRIYKFRGDGKGWDWEVDTENGNYDYLMYADIDMDHPEVVNELRNWGVWYTNTLGLDGFRIDAVKHIKYSFTRDWLTHVRNTTGKNMFAVAEFWKNDIGAIENYLSKTNWNHSVFDVPLHYNLYNASRSGGNYDMRQIFNGTVVQRHPTHAVTFVDNHDSQPEEALESFVEEWFKPLAYALTLTRDQGYPSVFYGDYCGIPTHGVPAMKSKIDPILEARQKYAYGKQNDYLDHHNMIGWTREGNTAHPNSGLATIMSDGPGGNKWMYVGRNKAGQVWRDITGNRSGTVTINADGWGNFSVNGGSVSIWVN

SEQ ID NO: 19966 - protein, 484 aa, Synthetic construct
HHNGTNGTMMQYFEWYLPNDGNHWNRLRSDASNLKDKGITAVWIPPAWKGASQNDVGYGAYDLYDLGEFNQKGTVRTKYGTRNQLQAAVTALKSNGIQVYGDVVMNHKGGADATEWVRAVEVNPSNRNQEVSGDYTIEAWTKFDFPGRGNTHSNFKWRWWHFDGVDWDQSRQLQNRIYKFRGDGKQWDWEVDTENGNYDYLMYADIDMDHPEVVNELRNWGVWYTNTLGLDGFRIDAVKHIKYSFTRDWLTHVRNTTGKNMFAVAEFWKNDIGAIENYLSKTNWNHSVFDVPLHYNLYNASRSGGNYDMRQIFNGTVVQRHPTHAVTFVDNHDSQPEEALESFVEEWFKPLAYALTLTRDQGYPSVFYGDYYGIPTHGVPAMKSKIDPILEARQKYAYGKQNDYLDHHNMIGWTREGNTAHPNSGLATIMSDGPGGNKWMYVGRNKAGQVWRDITGNRSGTVTINADGWGNFSVNGGSVSIWVN

SEQ ID NO: 19967 - protein, 484 aa, Synthetic construct
HHNGTHGTMMQYFEWYLPNDGNHWNRLRSDASNLKDKGITAVWIPPAWKGASQNDVGYGAYDLYDLGEFNQKGTVRTKYGTRNQLQAAVTALKSNGIQVYGDVVMNHKGGADATEWVRAVEVNPSNRNQEVSGDYTIEAWTKFDFPGRGNTHSNFKWRWYHFDGVDWDQSRQLQNRIYKFRGDGKGWDWEVDTENGNYDYLMYADIDMDHPEVVNELRNWGVWYTNTLGLDGFRIDAVKHIKYSFTRDWLTHVRNTTGKNMFAVAEFWKNDIGAIENYLSKTNWNHSVFDVPLHYNLYNASRSGGNYDMRQIFNGTVVQRHPTHAVTFVDNHDSQPEEALESFVEEWFKPLAYALTLTRDQGYPSVFYGDYYGIPTHGVPAMKSKIDPIFEARQKYAYGKQNDYLDHHNMIGWTREGNTAHPNSGLATIMSDGPGGNKWMYVGRNKAGQVWRDITGNRSGTVTINADGWGNFSVNGGSVSIWVN

SEQ ID NO: 19968 - protein, 484 aa, Synthetic construct
HHNGTNGTMMQYFEWYLPNDGNHWNRLRSDASNLKDKGITAVWIPPAWKGASQNDVGYGAYDLYDLGEFHQKGTVRTKYGTRNQLQAAVTALKSNGIQVYGDVVMNHKGGADATEWVRAVEVNPSNRNQEVSGDYTIEAWTKFDFPGRGNTHSNFKWRWYHFDGVDWDQSRQLQNRIYKFRGDGKGWDWEVDTENGNYDYLMYADIDMDHPEVVNELRNWGVWYTNTLGLDGFRIDAVKHIKYSFTRDWLTHVRNTTGKNMFAVAEFWKNDIGAIENYLSKTNWNHSVFDVPLHYNLYNASRSGGNYDMRQIFNGTVVQRHPTHAVTFVDNHDSQPEEALESFVEEWFKPLAYALTLTRDQGYPSVFYGDYYGIPTHGVPAMKSKIDPILEARQKYAYGKQNDYLDHHNMIGWTREGNTAHPNSGLATIMSDGPGGNKWMYVGRNKAGQVWRDITGNRSGAVTINADGWGNFSVNGGSVSIWVN

SEQ ID NO: 19969 - protein, 484 aa, Bacillus sp. 7-7
HHKGTNGTMMQYFEWYLPNDGNHWNRLRSDASNLKDKGITAVWIPPAWKGASQNDVGYGAYDLYDLGEFNQKGTVRTKYGTRNQLQAAVTALKSNGIQVYGDVVMNHKGGADATEWVRAVEVNPSNRNQEVSGDYTIEAWTKFDFPGRGNTHSNFKWRWYHFDGVDWDQSRQLQNRIYKFRGDGKGWDWEVDTENGNYDYLMYADIDMDHPEVVNELRNWGVWYTNTLGLDGFRIDAVKHIKYSFTRDWLTHVRNTTGKNMFAVAEFWKNDIGAIENYLSKTNWNHSVFDVPLHYNLYNASRSGGNYDMRQIFNGTVVQRHPTHAVTFVDNHDSQPEEALESFVEEWFKPLAYALTLTRDQGYPSVFYGDYYGIPTHGVPAMKSKIDPILEARQKYAYGKQNDYLDHHNMIGWTREGNTAHPNSGLATIMSDGPGGNKWMYVGRNKAGQVWRDITGNRSGTVTINADGWGNFSVXGGSVSIWVN

SEQ ID NO: 19970 - protein, 484 aa, Bacillus sp. 7-7
HHDGTNGTMMQYFEWYLPNDGNHWNRLRSDASNLKDKGITAVWIPPAWKGASQNDVGYGAYDLYDLGEFNQKGTVRTKYGTRNQLQAAVTALKSNGIQVYGDVVMNHKGGADATEWVRAVEVNPSNRNQEVSGDYTIEAWTKFDFPGRGNTHSNFKWRWYHFDGVDWDQSRQLQNRIYKFRGDGKGWDWEVDTENGNYDYLMYADIDMDHPEVVNELRNWGVWYTNTLGLDGFRIDAVKHIKYSFTRDWLTHVRNTTGKNMFAVAEFWKNDIGAIENYLSKTNWNHSVFDVPLHYNLYNASRSGGNYDMRQIFNGTVVQRHPTHAVTFVDNHDSQPEEALESFVEEWFKPLAYALTLTRDQGYPSVFYGDYYGIPTHGVPAMKSKIDPILEARQKYAYGKQNDYLDHHNMIGWTREGNTAHPNSGLATIMSDGPGGNKWMYVGRNKAGQVWRDITGNRSGTVTINADGWGNFSVXGGSVSIWVN

SEQ ID NO: 19971 - protein, 484 aa, Synthetic construct
HHNGTNGTMMQYFEWYLPNDGNHWYRLRSDASNLKDKGITAVWIPPAWKGASQNDVGYGAYDLYDLGEFNQKGTVRTKYGTRNQLQAAVTALKSNGIQVYGDVVMNHKGGADATEWVRAVEVNPSNRNQEVSGDYTIEAWTKFDFPGRGNTHSNFKWRWYHFDGVDWDQSRQLQNRIYKFRGDGKGWDWEVDTENGNYDYLMYADIDMDHPECVNELRNWGVWYTNTLGLDGFRIDAVKHIKYSFTRDWLTHVRNTTGKNMFAVAEFWKNDIGAIENYLSKTNWNHSVFDVPLHYNLYNASRSGGNYDMRQIFNGTVVQRHPTHAVTFVDNHDSQPEEALESFVEEWFKPLAYALTLTRDQGYPSVFYGDYYGIPTHGVPAMKSKIDPILEARQKYAYGKQNDYLDHHNMIGWTREGNTAHPNSGLATIMSDGPGGNKWMYVGRNKAGQVWRDITGNRSGTVTINADGWGNFSVNGGSVSIWVN

SEQ ID NO: 19972 - protein, 484 aa, Bacillus sp. 7-7
HHEGTNGTMMQYFEWYLPNDGNHWNRLRSDASNLKDKGITAVWIPPAWKGASQNDVGYGAYDLYDLGEFNQKGTVRTKYGTRNQLQAAVTALKSNGIQVYGDVVMNHKGGADATEWVRAVEVNPSNRNQEVSGDYTIEAWTKFDFPGRGNTHSNFKWRWYHFDGVDWDQSRQLQNRIYKFRGDGKGWDWEVDTENGNYDYLMYADIDMDHPEVVNELRNWGVWYTNTLGLDGFRIDAVKHIKYSFTRDWLTHVRNTTGKNMFAVAEFWKNDIGAIENYLSKTNWNHSVFDVPLHYNLYNASRSGGNYDMRQIFNGTVVQRHPTHAVTFVDNHDSQPEEALESFVEEWFKPLAYALTLTRDQGYPSVFYGDYYGIPTHGVPAMKSKIDPILEARQKYAYGKQNDYLDHHNMIGWTREGNTAHPNSGLATIMSDGPGGNKWMYVGRNKAGQVWRDITGNRSGTVTINADGWGNFSVXGGSVSIWVN

SEQ ID NO: 19973 - protein, 484 aa, Synthetic construct
HHNGTNGTMMQYFEWYLPNDGNHWNRLRSDASNLKDKGITAVWIPPAWKGASQNDVGYGAYDLYDLGEFNQKGTVRTKYGTRNQLQAAVTALKMNGIQVYGDVVMNHKGGADATEWVRAVEVNPSNRNQEVSGDYTIEAWTKFDFPGRGNTHSNFKWRWYHFDGVDWDQSRQLQNRIYKFRGDGKGWDWEVDTENGNYDYLMYADIDMDHPEVVNELRNWGVWYTNTLGLDGFRIDAVKHIKYSFTRDWLTHVRNTTGKNMFAVAEFWKNDIGAIENYLSKTNWNHSVFDVPLHYNLYNASRSGGNYDMRQIFNGTVVQRHPTHAVTFVDNHDSQPEEALESFVEEWFKPLAYALTLTRDQGYPSVFYGDYYGIPTHGVPAMKSWIDPILEARQKYAYGKQNDYLDHHNMIGWTREGNTAHPNSGLATIMSDGPGGNKWMYVGRNKAGQVWRDITGNRSGTVTINADGWGNFSVNGGSVSIWVN

SEQ ID NO: 19974 - protein, 484 aa, Synthetic construct
HHNGTNGTMMQYFEWYLPNDGNHWNRLRSDASMLKDKGITAVWIPPAWKGASQNDVGYGAYDLYDLGEFNQKGTVRTKYGTRNQLQAAVTALKSNGIQVYGDVVMNHKGGADATEWVRAVEVNPSNRNQEVSGDYTIEAWTKFDFPGRGNTHSNFKWRWYHFDGVDWDQSRQLQNRIYKFRGDGKGWDWEVDTENGNYDYLMYADIDMDHPEVVNELRNWGVWYTNTLGLDGFRIDAVKHIKYSFTRDWLTHVRNTTGKNMFAVAEFWKNDIGAIENYLSKTNWNHSVFDVPLHYNLYNASRSGGNYDMRQIFNGTVVQRHPTHAYTFVDNHDSQPEEALESFVEEWFKPLAYALTLTRDQGYPSVFYGDYYGIPTHGVPAMKSKIDPILEARQKYAYGKQNDYLDHHNMIGWTREGNTAHPNSGLATIMSDGPGGNKWMYVGRNKAGQVWRDITGNRSGTVTINADGWGNFSVNGGSVSIWVN

SEQ ID NO: 19975 - protein, 484 aa, Synthetic construct
HHNGTNGTMMQYFEWYLPNDGNHWNRLRSDASNLKDKVITAVWIPPAWKGASQNDVGYGAYDLYDLGEFNQKGTVRTKYGTRNQLQAAVTALQSNGIQVYGDVVMNHKGGADATEWVRAVEVNPSNRNQEVSGDYTIEAWTKFDFPGRGNTHSNFKWRWYHFDGVDWDQSRQLQNRIYKFRGDGKGWDWEVDTENGNYDYLMYADIDMDHPEVVNELRNWGVWYTNTLGLDGFRIDAVKHIKYSFTRDWLTHVRNTTGKNMFAVAEFWKNDIGAIENYLSKTNWNHSVFDVPLHYNLYNASRSGGNYDMRQIFNGTVVQRHPTHAVTFVDNHDSQPEEALESFVEEWFKPLAYALTLTRDQGYPSVFYGDYYGIPTHGVPAMKSKIDPILEARQKYAYGKQNDYLDHHNMIGWTREGNTAHPNSGLATIMSDGPGGNKWMYVGRNKAGQVWRDITGNRSGTVTINADGWGNFSVNGGSVSIWVN

SEQ ID NO: 19976 - protein, 484 aa, Bacillus sp. 7-7
HHSGTNGTMMQYFEWYLPNDGNHWNRLRSDASNLKDKGITAVWIPPAWKGASQNDVGYGAYDLYDLGEFNQKGTVRTKYGTRNQLQAAVTALKSNGIQVYGDVVMNHKGGADATEWVRAVEVNPSNRNQEVSGDYTIEAWTKFDFPGRGNTHSNFKWRWYHFDGVDWDQSRQLQNRIYKFRGDGKGWDWEVDTENGNYDYLMYADIDMDHPEVVNELRNWGVWYTNTLGLDGFRIDAVKHIKYSFTRDWLTHVRNTTGKNMFAVAEFWKNDIGAIENYLSKTNWNHSVFDVPLHYNLYNASRSGGNYDMRQIFNGTVVQRHPTHAVTFVDNHDSQPEEALESFVEEWFKPLAYALTLTRDQGYPSVFYGDYYGIPTHGVPAMKSKIDPILEARQKYAYGKQNDYLDHHNMIGWTREGNTAHPNSGLATIMSDGPGGNKWMYVGRNKAGQVWRDITGNRSGTVTINADGWGNFSVXGGSVSIWVN

SEQ ID NO: 19977 - protein, 484 aa, Synthetic construct
HHNGTNGTMMQYFEWYLPNDGNHWNRLRSDASNLKDKGITAVWIPPAFKGASQNDVGYGAYDLYDLGEFNQKGTVRTKYGTRNQLQAAVTALKDNGIQVYGDVVMNHKGGADATEWVRAVEVNPSNRNQEVSGDYTIEAWTKFDFPGRGNTHSNFKWRWYHFDGVDWDQSRQLQNRIYKFRGDGKGWDWEVDTENGNYDYLMYADIDMDHPEVVNELRNWGVWYTNTLGLDGFRIDAVKHIKYSFTRDWLTHVRNTTGKNMFAVAEFWKNDIGAIENYLSKTNWNHSVFDVPLHYNLYNASRSGGNYDMRQIFNGTVVQRHPTHAVTFVDNHDSQPEEALESFVEEWFKPLAYALTLTRDQGYPSVFYGDYYGIPTHGVPAMKSKIDPILEARQKYAYGKQNDYLDHHNMIGWTREGNTAHPNSGLATIMSDGPGGNKWMYVGRNKAGQVWRDITGNRSGTVTINADGWGNFSVNGGSVSIWVN

SEQ ID NO: 19978 - protein, 484 aa, Synthetic construct
HHNQTNGTMMQYFEWYLPNDGNHWNRLRSDASNLKDKGITAVWIPPAWKGASQNDVGYGAYDLYDLGEFNQKGTVRTKYGTRNQLQAAVTALKSNGIQVYGDVVMNHKGGADATEWVRAVEVNPSNRNQEVSGDYTIEAWTKFDFPGRGNTHSNFKWRWYHFDGVDWDQSRQLQNRIYKFRGDGKGWDWEVDTENGNYDYLMYADYDMDHPEVVNELRNWGVWYTNTLGLDGFRIDAVKHIKYSFTRDWLTHVRNTTGKNMFAVAEFWKNDIGAIENYLSKTNWNHSVFDVPLHYNLYNASRSGGNYDMRQIFNGTVVQRHPTHAVTFVDNHDSQPEEALESFVEEWFKPLAYALTLTRDQGYPSVFYGDYYGIPTHGVPAMKSKIDPILEARQKYAYGKQNDYLDHHNMIGWTREGNTAHPNSGLATIMSDGPGGNKWMYVGRNKAGQVWRDITGNRSGTVTINADGWGNFSVNGGSVSIWVN

SEQ ID NO: 19979 - protein, 484 aa, Synthetic construct
HHNGTNGTMMQYFEWYLPNDGNHWNRLRSDASNLKDKGITAVWIPPAWKGASQNDVGYGAYDLYDLGEFNQKGTVRTKYGTRNQLQAAVTALKSNGIQVYGDVVMNHKGGADATEWVRAVEVNPSNRNQEVSGDYTIEAWTKFDFPGRGNTHSNFKWRWYHFDGVDWDQSRQLQNRIYKFRGDGKEWDWEVDTENGNYDYLMYADYDMDHPEVVNELRNWGVWYTNTLGLDGFRIDAVKHIKYSFTRDWLTHVRNTTGKNMFAVAEFWKNDIGAIENYLSKTNWNHSVFDVPLHYNLYNASRSGGNYDMRQIFNGTVVQRHPTHAVTFVDNHDSQPEEALESFVEEWFKPLAYALTLTRDQGYPSVFYGDYYGIPTHGVPAMKSKIDPILEARQKYAYGKQNDYLDHHNMIGWTREGNTAHPNSGLATIMSDGPGGNKWMYVGRNKAGQVWRDITGNRSGTVTINADGWGNFSVNGGSVSIWVN

SEQ ID NO: 19980 - protein, 484 aa, Synthetic construct
HHNGTNGTMMQYFEWYLPNDGNHWNRLRSDASNLKDKGITAVWIPPAWKGASQNDVGYGAYDLYDLGEFNQKGTVRTKYGTRNQLQAAVTALKSNGIQVYGDVVMNHKGGADATEWVRAVEVNPSNRNQEVSGDYTIEAWTKFDFPGRGNTHSNFKWRWYHFDGVDWDQSRQLQARIYKFRGDGKGWDWEVDTENGNYDYLMYADIDMDHPEVVNELRNWGVWYTNTLGLDGFRIDAVKHIKYSFTRDWLTHVRNTTGKNMFAVAEFWKNDIGAIENYLSKTNWNHSVFDVPLHYNLYNASRSGGNYDMRQIFNGTVVQRHPTHAVTFVDNHDSQPEEALESFVEEWFKPLAYALTLTRDQGYPSVFYGDYYGIPTHGRPAMKSKIDPILEARQKYAYGKQNDYLDHHNMIGWTREGNTAHPNSGLATIMSDGPGGNKWMYVGRNKAGQVWRDITGNRSGTVTINADGWGNFSVNGGSVSIWVN

SEQ ID NO: 19981 - protein, 484 aa, Bacillus sp. 7-7
HHPGTNGTMMQYFEWYLPNDGNHWNRLRSDASNLKDKGITAVWIPPAWKGASQNDVGYGAYDLYDLGEFNQKGTVRTKYGTRNQLQAAVTALKSNGIQVYGDVVMNHKGGADATEWVRAVEVNPSNRNQEVSGDYTIEAWTKFDFPGRGNTHSNFKWRWYHFDGVDWDQSRQLQNRIYKFRGDGKGWDWEVDTENGNYDYLMYADIDMDHPEVVNELRNWGVWYTNTLGLDGFRIDAVKHIKYSFTRDWLTHVRNTTGKNMFAVAEFWKNDIGAIENYLSKTNWNHSVFDVPLHYNLYNASRSGGNYDMRQIFNGTVVQRHPTHAVTFVDNHDSQPEEALESFVEEWFKPLAYALTLTRDQGYPSVFYGDYYGIPTHGVPAMKSKIDPILEARQKYAYGKQNDYLDHHNMIGWTREGNTAHPNSGLATIMSDGPGGNKWMYVGRNKAGQVWRDITGNRSGTVTINADGWGNFSVXGGSVSIWVN

SEQ ID NO: 19982 - protein, 484 aa, Synthetic construct
HHNGTNGTMMQYFEWYLPNDGNHWNRLRSDASNLKDKGITAVWIPPAWKGASQNDVGYGAYDLYDLGEFNQKGTVRTKYGTRNQLQAAVTALKMNGIQVYGDVVMNHKGGADATEWVRAVEVNPSNRNQEVSGDYTIEAWTKFDFPGRGNTHSNFKWRWYHFDGVDWDQSRQLQNRIYKFRGDGKGWDWEVDTENGNYDYLMYADIDMDHPEVVNELRNWGVWYTNTLGLDGFRIDAVKHIKYSFTRDWLTHVRNTTGKNMFAVAEFWKNDIGAIENYLSKTNWNHSVFDVPLHYNLYNASRSGGNYDMRQIFNGTVVQRHPTHAVTFVDNHDSQPEEALESFVEEWFKPLAYALTLTRDQGYPSVFYGDYYGIPTHGAPAMKSKIDPILEARQKYAYGKQNDYLDHHNMIGWTREGNTAHPNSGLATIMSDGPGGNKWMYVGRNKAGQVWRDITGNRSGTVTINADGWGNFSVNGGSVSIWVN

SEQ ID NO: 19983 - protein, 484 aa, Synthetic construct
HHNGTNGTMMQYFEWYLPNDGNHWNRLRSDASNLKDKGITAVWIPPAWKGASQNDVGYGAYDLYDLGEFNQKCTVRTKYGTRNQLQAAVTALKSNGIQVYGDVVMNHKGGADATEWVRAVEVNPSNRNQEISGDYTIEAWTKFDFPGRGNTHSNFKWRWYHFDGVDWDQSRQLQNRIYKFRGDGKGWDWEVDTENGNYDYLMYADIDMDHPEVVNELRNWGVWYTNTLGLDGFRIDAVKHIKYSFTRDWLTHVRNTTGKNMFAVAEFWKNDIGAIENYLSKTNWNHSVFDVPLHYNLYNASRSGGNYDMRQIFNGTVVQRHPTHAVTFVDNHDSQPEEALESFVEEWFKPLAYALTLTRDQGYPSVFYGDYYGIPTHGVPAMKSKIDPILEARQKYAYGKQNDYLDHHNMIGWTREGNTAHPNSGLATIMSDGPGGNKWMYVGRNKAGQVWRDITGNRSGTVTINADGWGNFSVNGGSVSIWVN

SEQ ID NO: 19984 - protein, 484 aa, Synthetic construct
HHNGTNGTMMQYFEWYLPNDGNHWNRLRSDASNLKDKGITAVWIPPAWKGASQNDVGYGAYDLYDLGEFNQKGTVRTKYGLRNQLQAAVTALKSNGIQVYGDVVMNHKGGADATEWVRAVEVNPSNRNQEVSGDYTIEAWTKFDFPGRGNTHSNFKWRWYHFDGVDWDQSRQLQNRIYKFRGDGKGWDWEVDTENGNYDYLMYADIDMDHPEVVNELRNWGVWYTNTLGLDGFRIDAVKHIKYSFTRDWLTHCRNTTGKNMFAVAEFWKNDIGAIENYLSKTNWNHSVFDVPLHYNLYNASRSGGNYDMRQIFNGTVVQRHPTHAVTFVDNHDSQPEEALESFVEEWFKPLAYALTLTRDQGYPSVFYGDYYGIPTHGVPAMKSKIDPILEARQKYAYGKQNDYLDHHNMIGWTREGNTAHPNSGLATIMSDGPGGNKWMYVGRNKAGQVWRDITGNRSGTVTINADGWGNFSVNGGSVSIWVN

SEQ ID NO: 19985 - protein, 484 aa, Synthetic construct
HHNGTNGTMMQYFEWYLPNDGNHWHRLRSDASNLKDKGITAVWIPPAWKGASQNDVGYGAYDLYDLGEFNQKGTVRTKYGTRNQLQAAVTALKSNGIQVYGDVVMNHKGGADATEWVRAVEVNPSNRNQEVSGDYTIEAWTKFDFPGRGNTHSNFKWRWYHFDGVDWDQSRQLQNKIYKFRGDGKGWDWEVDTENGNYDYLMYADIDMDHPEVVNELRNWGVWYTNTLGLDGFRIDAVKHIKYSFTRDWLTHVRNTTGKNMFAVAEFWKNDIGAIENYLSKTNWNHSVFDVPLHYNLYNASRSGGNYDMRQIFNGTVVQRHPTHAVTFVDNHDSQPEEALESFVEEWFKPLAYALTLTRDQGYPSVFYGDYYGIPTHGVPAMKSKIDPILEARQKYAYGKQNDYLDHHNMIGWTREGNTAHPNSGLATIMSDGPGGNKWMYVGRNKAGQVWRDITGNRSGTVTINADGWGNFSVNGGSVSIWVN

SEQ ID NO: 19986 - protein, 484 aa, Synthetic construct
HHNGTNGTMMQYFEWYLPNDGNHWNRLRSDASNLKDKGITAVWIPPAWKGASQNDVGYGAYDLYDLGEFNQKGTVRTKYGTRNQLQAAVTALKSNGIQVYGDVVMNHKGGADATEWVRAVEVNPSNRNQEVSGDYTIEAWTKFDFPGRGNTHSNFKWRWYHFDGVDWDQSRQLQNRIYKFRGDGKGWDWEVDTENGNYDYLMYADIDMDHPEVVNELRNWGVWYTNTLGLDGFRIDAVKHIKYSFTRDWLTHVRNTTGKNMFAVAEFWKNDIGAIENYLSKTNWNHSVFDVPLHYNLYSASRSGGNYDMRQIFQGTVVQRHPTHAVTFVDNHDSQPEEALESFVEEWFKPLAYALTLTRDQGYPSVFYGDYYGIPTHGVPAMKSKIDPILEARQKYAYGKQNDYLDHHNMIGWTREGNTAHPNSGLATIMSDGPGGNKWMYVGRNKAGQVWRDITGNRSGTVTINADGWGNFSVNGGSVSIWVN

SEQ ID NO: 19987 - protein, 484 aa, Synthetic construct
AAAPFNGTMMQYFEWYLPDDGTLWTKVANEANNLSSLGITALWLPPAYKGTSRSDVGYGVYDLYDLGEFNQKGAVRTKYGTKAQYLQAIQAAHAAGMQVYADVVFNHKAGADSTEWVDAVEVNPSNRNQETSGTYQIQAWTKFDFPGRGNTYSSFKWRWYHFDGTDWDESRKLNRIYKFRGTGKAWDWEVDTENGNYDYLMFADLDMDHPEVVTELKNWGKWYVNTTNIDGFRLDAVKHIKFSFFPDWLSYVRSQTGKPLFTVGEYWSYDINKLHNYIMKTNGTMSLFDAPLHNKFYTASKSGGTFDMRTLMTNTLMKDQPTLAVTFVDNHDTEPGQALQSWVDPWFKPLAYAFILTRQEGYPCVFYGDYYGIPQYNIPSLKSKIDPLLIARRDYAYGTQHDYLDHSDIIGWTREGVTEKPGSGLAALITDGPGGSKWMYVGKQHAGKVFYDLTGNRSDTVTINSDGWGEFKVNGGSVSVWVPR

SEQ ID NO: 19988 - protein, 484 aa, Synthetic construct
AAAPFNGTMMQYFEWYLPDDGTLWTKVANEANNLSSLGITALWLPPAYKGTSRSDVGYGVYDLYDLGEFNQKGAVRTKYGTKAQYLQAIQAAHAAGMQVYADVVFNHKAGADGTEFVDAVEVNPSNRNQETSGTYQIQAWTKFDFPGRGNTYSSFKWRWYHFDGTDWDESRKLNRIYKFRGTGKAWDWEVDTENGNYDYLMFADLDMDHPEVVTELKNWGKWYVNTTNIDGFRLDAVKHIKFSFFPDWLSYVRSQTGKPLFTVGEYWSYDINKLHNYIMKTNGTMSLFDAPLHNKFYTASKSGGTFDMRTLMTNTLMKDQPTLAVTFVDNHDTEPGQALQSWVDPWFKPLAYAFILTRQEGYPCVFYGDYYGIPQYNIPSLKSKIDPLLIARRDYAYGTQHDYLDHSDIIGWTREGVTEKPGSGLAALITDGPGGSKWMYVGKQHAGKVFYDLTGNRSDTVTINSDGWGEFKVNGGSVSVWVPR

SEQ ID NO: 19989 - protein, 481 aa, Bacillus sp.
HNGTNATMMQYFEWHLPNDGNHWNRLRDDASNLRNRGITAIWIPPAWKGTSQNDVGYGAYDLYDLGEFNQKGTVRTKYGTRSQLESAIHALKNNGVQVYGDVVMNHKAGADGTEFVDAVEVDPSNRNQETSGTYQIQAYTKFDFPGRGNTYSSFKWRWYHFDGTDWDESRKLNRIYKFTGKQWDWEVDTEFGNYDYLMFADVDMDHPEVVNELRRWGEWYTNTLNLDGFRIDAVKHIKFSFTRDWLTHVRNATGKGMFAVAEYWKNDLGALENYLSKTNWNHSVFDVPLHYNLYNASNSRGNYDMAKLLNGTVVQKHPMHAVTFVDNHDSQPGESLESFVQEWFKPLAYALILTREQGYPSVFYGDYYGIPTHSVPAMKAKIDPILAARQNFAYGTQHDYFDHHNIIGWTREGNTTHPNSGLATIMSDGPGGEKWMYVGQNKAGQVWHDITGNKPGTVTINADGWANFSVNKGSVSIWVKR

SEQ ID NO: 19990 - protein, 481 aa, Bacillus sp.
HNGTNATMMQYFEWHLPNDGNHWNRLRDDASNLRNRGIGAIWIPPAWKGTSQNDVGYGAYDLYDLGEFNQKGTVRTKYGTRSQLESAIHALKNNGVQVYGDVVMNHKAGADGTEFVDAVEVDPSNRNQETSGTYQIQAYTKFDFPGRGNTYSSFKWRWYHFDGTDWDESRKLNRIYKFTGKAWDWEVDTEFGNYDYLMFADYDMDHPEVVNELRRWGEWYTNTLNLDGFRIDAVKHIKFSFTRDWLTHVRNATGKGMFAVAEFWKNDLGALENYLSKTNWNHSVFDVPLHYNLYNASNSRGNYDMAKLLNGTVVQKHPMHAVTFVDNHDSQPGESLESFVQEWFKPLAYALILTREQGYPSVFYGDYYGIPTHSVPAMKAKIDPILAARQNFAYGTQHDYFDHHNIIGWTREGNTTHPNSGLATIMSDGPGGEKWMYVGQNKAGQVWHDITGNKPGTVTINADGWANFSVNKGSVSIWVKR

SEQ ID NO: 19991 - protein, 481 aa, Bacillus sp.
HNGTNATMMQYFEWHLPNDGNHWNRLRDDASNLRNRGITAIWIPPAWKGTSQNDVGYGAYDLYDLGEFNQKGTVRTKYGTRSQLESAIHALKNNGVQVYGDVVMNHKAGADGTEFVDAVEVDPSNRNQETSGTYQIQAYTKFDFPGRGNTYSSFKWRWYHFDGTDWDESRKLNRIYKFTGKAWDWEVDTENGNYDYLMFADLDMDHPEVVNELRRWGEWYTNTLNLDGFRIDAVKHIKFSFTRDWLTHVRNATGKGMFAVAEYWKNDLGALENYLSYTNWNHSVFDVPLHYNLYNASNSRGNYDMAKLLNGTVVQKHPMHAVTFVDNHDSQPGESLESFVQEWFKPLAYALILTREQGYPSVFYGDYYGIPTHSVPAMKAKIDPILAARQNFAYGTQHDYFDHHNIIGWTREGNTTHPNSGLATIMSDGPGGEKWMYVGQNKAGQVWHDITGNKPGTVTINADGWANFSVNKGSVSIWVKR

SEQ ID NO: 19992 - protein, 481 aa, Bacillus sp.
HNGTNATMMQYFEWHLPNDGNHWNRLRDDASNLRNRGITAIWIPPAWKGTSQNDVGYGAYDLYDLGEFNQKGTVRTKYGTRSQLESAIHALKNNGVQVYGDVVMNHKAGADGTEFVDAVEVDPSNRNQETSGTYQIQAYTKFDFPGRGNTYSSFKWRWYHFDGTDWDESRKLNRIYKFDGKQWDWEVDTENGNYDYLMFADLDMDHPEVVNELRRWGEWYTNTLNLDGFRIDAVKHIKFSFTRDWLTHVRNATGKGMFAVAEFWKNDLGALENYLSYTNWNHSVFDVPLHYNLYNASNSRGNYDMAKLLNGTVVQKHPMHAVTFVDNHDSQPGESLESFVQEWFKPLAYALILTREQGYPSVFYGDYYGIPTHSVPAMKAKIDPILAARQNFAYGTQHDYFDHHNIIGWTREGNTTHPNSGLATIMSDGPGGEKWMYVGQNKAGQVWHDITGNKPGTVTINADGWANFSVNKGSVSIWVKR

SEQ ID NO: 19993 - protein, 481 aa, Bacillus sp.
HNGTNATMMQYFEWHLPNDGNHWNRLRDDASNLRNRGITAIWIPPAWKGTSQNDVGYGAYDLYDLGEFNQKGTVRTKYGTRSQLESAIHALKNNGVLVYGDVVMNHKAKADGTEFVDAVEVDPSNRNQETSGTYQIQAWTKFDFPGRGNTYSSFKWRWYHFDGTDWDESRKLNRIYKFTGKAWDWEVDTENGNYDYLMFADLDMDHPEVVNELRRWGEWYTNTLNLDGFRIDAVKHIKFSFTRDWLTHVRNATGKGMFAVAEFWKNDLGALENYLSKTNWNHSVFDVPLHYNLYNASNSRGNYDMAKLLNGTVVQKHPMHAVTFVDNHDSQPGESLESFVQEWFKPLAYALILTREQGYPSVFYGDYYGIPTHSVPAMKDKIDPILAARQNFAYGTQHDYFDHHNIIGWTREGNTTHPNSGLATIMSDGPGGEKWMYVGQNKAGQVWHDITGNKPGTVTINADGWANFSVNKGSVSIWVKR

SEQ ID NO: 19994 - protein, 481 aa, Bacillus sp.
HNGTNATMMQYFEWHLPNDGNHWNRLRDDASNLRNRGITAIWIPPAWKGTSQNDVGYGAYDLYDLGEFNQKGTVRTKYGTRSQLESAIHALKNNGVQVYGDVVMNHKAGADGTEFVDAVEVDPSNRNQETSGTYQIQAWTKFDFPGRGNTYSSFKWRWYHFDGTDWDESRKLNRIYKFTGKAWDWEVDTENGNYDYLMFADLDMDHPEVVNELRRWGEWYTNTLNLDGFRIDAVKHIKFSFTRDWLTHVRNATGKGMFAVAEFWKNDLGALENYLSKTNNNHSVFDVPLHYNLYNASNSRGNYDMAKLLNGTVVQKTPMAAVTFVDNHDSQPGESLESFVQEWFKPLAYALILTREQGYPSVFYGDYYGIPTHSVPAMKAKIDPILAARQNFAYGTQHDYFDHHNIIGWTREGNTTHPNSGLATIMSDGPGGEKWMYVGQNKAGQVWHDITGNKPGTVTINADGWANFSVNKGSVSIWVKR

SEQ ID NO: 19995 - protein, 481 aa, Bacillus sp.
HNGTNHTMMQYFEWHLPNDGNHWNRLRDDASNLRNRGITAIWIPPAWKGTSQNDVGYGAYDLYDLGEFNQKGTVRTKYGTRSQLESAIHALKNNGVLVYGDVVMNHKAGADGTEFVDAVEVDPSNRNQETSGTYQIQAWTKFDFPGRGNTYSSFKWRWYHFDGTDWDESRKLNRIYKFTGKAWDWEVDTENGNYDYLMFADLDMDHPEVVNELRRWGEWYTNTLNLDGFRIDAVKHIKFSFTRDWLTHVRNATGKGMFAVAEFWKNDLGALENYLSKTNWNHSVFDVPLHYNLYNASNSRGNYDMAKLLNGTVVQKHPMHAVTFVDNHDSQPGESLESFVQEWFKPLAYALILTREQGYPSVFYGDYYGIPTHSVPAMKDKIDPILAARQNFAYGTQHDYFGHHNIIGWTREGNTTHPNSGLATIMSDGPGGEKWMYVGQNKAGQVWHDITGNKPGTVTINADGWANFSVNKGSVSIWVKR

SEQ ID NO: 19996 - protein, 481 aa, Bacillus sp.
HNGTNATMMQYFEWHLPNDGNHWNRLRDDASNLRNRGITAIWIPPAWKGTSQNDVGYGAYDLYDLGEFNQKGTVRTKYGTRSQLESAIHALKNNGVQVYGDVVMNHKAGADGTEFVDAVEVDPSNRNQETSGTYQIQAYTKFDFPGRGNTYSSFKWRWYHFDGTDWDESRKLNRIYKFTGKAWDWEVDTEFGNYDYLMFADYDMDHPEVVNELRRWGEWYTNTLNLDGFRIDAVKHIKFSFTRDWLTHVRNATGKGMFAVAEFWKNDLGALENYLSKTNWNHSVFDVPLHYNLYNASNSRGNYDMAKLLNGTVVQKHPMHAVTFVDNHDSQPGESLESFVQEWFKPLAYALILTREQGYPSVFYGDYYGIPTHSVPAMKAKIDPILAARQNFAYGTQHDYFDHHNIIGWTREGNTTPPNSGLATIMSDGPGGEKWMYVGQNKAGQVWHDITGNKPGTVTINADGWANFSVNKGSVSIWVKR

SEQ ID NO: 19997 - protein, 481 aa, Bacillus sp.
HNGTNATMMQYFEWHLPNDGNHWNRLRDDASNLRNRGITAIWIPPAWKGTSQNDVGYGAYDLYDLGEFNQKGTVRTKYGTRSQLESAIHALKNNGVQVYGDVVMNHKAGADGTEFVDAVEVDPSNRNQETSGTYQIQAYTKFDFPGRGNTYSSFKWRWYHFDGTDWDESRKLNRIYKFTGKAWDWEVDTEFGNYDYLMFADYDMDHPEVVNELRRWGEWYTNTLNLDGFRIDAVKHIKFSFTRDWLTHVRNATGKGMFAVAEFWKNDLGALENYLSKTNWNHSVFDVPLHYNLYNASNSRGNYDMAKLLNGTVVQKHPMHAVTFVDNHDSQPGESLESFVQEWFKPLAYALILTREQGYPSVFYGDYYGIPTHSVPAMKAKIDPILAARQNFAYGTQHDYFDHHNIIGWTREGNTTHPVSGLATIMSDGPGGEKWMYVGQNKAGQVWHDITGNKPGTVTINADGWANFSVNKGSVSIWVKR

SEQ ID NO: 19998 - protein, 481 aa, Bacillus sp.
HNGTNATMMQYFEWHLPNDGNHWNRLRDDASNLRNRGITAIWIPPAWKGTSQNDVGYGAYDLYDLGEFNQKGTVRTKYGTRSQLESAIHALKNNGVQVYGDVVMNHKAGADGTEFVTAVEVDPSNRNQETSGTYQIQAYTKFDFPGRGNTYSSFKWRWYHFDGTDWDESRKLNRIYKFDGKQWDWEVDTEFGNYDYLMFADYDMDHPEVVNELRRWGEWYTNTLNLDGFRIDAVKHIKFSFTRDWLTHVRNATGKGMFAVAEFWKNDLGALENYLSKTNWNHSVFDVPLHYNLYNASNSRGNYDMAKLLNGTVVQKHPMHAVTFVDNHDSQPGESLESFVQEWFKPLAYALILTREQGYPSVFYGDYYGIPTHSVPAMKAKIDPILAARQNFAYGTQHDYFDHHNIIGWTREGNTTHPNSGLATIMSDGPGGEKWMYVGQNKAGQVWHDITGNKPGTVTINADGWANFSVNKGSVSIWVKR

SEQ ID NO: 19999 - protein, 481 aa, Bacillus sp.
HNGTNATMMQYFEWHLPNDGNHWNRLRDDASNLRNRGITAIWIPPAWKGTSQNDVGYGAYDLYDLGEFNQKGTVRTKYGTRSQLESAIHALKNNGVQVYGDVVMNHKAGADGTEFVDAVEVDPSNRNQETSGTYQIQAYTKFDFPGRGNTYSSFKWRWYHFDGTDWDESRKLNRIYKFDGKQWDWEVDTEFGNYDYLMFADVDMDHPEVVNELRRWGEWYTNTLNLDGFRIDAVKHIKFSFTRDWLTHVRNATGKGMFAVAEYWKNDLGALENYLSKTNWNHSVFDVPLHYNLYNASNSRGNYDMAKLLNGTVVQKHPMHAVTFVDNHDSQPGESLESFVQEWFKPLAYALILTREQGYPSVFYGDYYGIPTHSVPAMKAKIDPILAARQNFAYGTQHDYFDHHNIIGWTREGNTTHPNSGLATIMSDGPGGEKWMYVGQNKAGQVWHDITGNKPGTVTINADGWANFSVNKGSVSIWVKR

SEQ ID NO: 20000 - protein, 481 aa, Bacillus sp.
HNGTNATMMQYFEWHLPNDGNHWNRLRDDASNLRNRGITAIWIPPAWKGTSQNDVGYGAYDLYDLGEFNQKGTVRTKYGTRSQLESAIHALKNNGVQVYGDVVMNHKAGADGTEFVTAVEVDPSNRNQETSGTYQIQAYTKFDFPGRGNTYSSFKWRWYHFDGTDWDESRKLNRIYKFDGKAWDWEVDTEFGNYDYLMFADYDMDHPEVVNELRRWGEWYTNTLNLDGFRIDAVKHIKFSFTRDWLTHVRNATGKGMFAVAEYWKNDLGALENYLSKTNWNHSVFDVPLHYNLYNASNSRGNYDMAKLLNGTVVQKHPMHAVTFVDNHDSQPGESLESFVQEWFKPLAYALILTREQGYPSVFYGDYYGIPTHSVPAMKAKIDPILAARQNFAYGTQHDYFDHHNIIGWTREGNTTHPNSGLATIMSDGPGGEKWMYVGQNKAGQVWHDITGNKPGTVTINADGWANFSVNKGSVSIWVKR

SEQ ID NO: 20001 - protein, 481 aa, Bacillus sp.
HNGTNATMMQYFEWHLPNDGNHWNRLRDDASNLRNRGITAIWIPPAWKGTSQNDVGYGAYDLYDLGEFNQKGTVRTKYGTRSQLESAIHALKNNGVQVYGDVVMNHKAGADGTENVDAVEVDPSNRNQETSGTYQIQAYTKFDFPGRGNTYSSFKWRWYHFDGTDWDESRKLNRIYKFTGKAWDWPVDTEFGNYDYLMFADYDMDHPEVVNELRRWGEWYTNTLNLDGFRIDAVKHIKFSFTRDWLTHVRNATGKGMFAVAEFWKNDLGALENYLSYTNWNHSVFDVPLHYNLYNASNSRGNYDMAKLLNGTVVQKHPMHAVTFVDNHDSQPGESLESFVQEWFKPLAYALILTREQGYPSVFYGDYYGIPTHSVPAMKAKIDPILAARQNFAYGTQHDYFDHHNIIGWTREGNTTHPNSGLATIMSDGPGGEKWMYVGQNKAGQVWHDITGNKPGTVTINADGWANFSVNKGSVSIWVKR

SEQ ID NO: 20002 - protein, 481 aa, Bacillus sp.
HNGTNATMMQYFEWHLPNDGNHWNRLRDDASNLRNRGITAIWIPPAWKGTSQNDVGYGAYDLYDLGEFNQKGTVRTKYGTRSQLESAIHALKNNGVQVYGDVVMNHKAGADGTEFVDAVEVDPSNRNQETSGTYQIQAYTKFDFPGRGNTYSSFKWRWYHFDGTDWDESRKLNRIYKFTGKAWDWEVDTEFGNYDYLMFADYDMDHPEVVNELRRWGEWYTNTLNLDGFRIDAVKHIKLSFTRDWLTHVRNATGKGMFAVAEFWKNDLGALENYLSKTNWNHSVFDVPLHYNLYNASNSRGNYDMAKLLNGTVVQKHPMHAVTFVDNHDSQPGESLESFVQENFKPLAYALILTREQGYPSVFYGDYYGIPTHSVPAMKAKIDPILAARQNFAYGTQHDYFDHHNIIGWTREGNTTHPNSGLATIMSDGPGGEKWMYVGQNKAGQVWHDITGNKPGTVTINADGWANFSVNKGSVSIWVKR

SEQ ID NO: 20003 - protein, 481 aa, Bacillus sp.
HNGTNATMMQYFEWHLPNDGNHWNRLRDDASNLRNRGITDIWIPPAWKGTSQNDVGYGAYDLYDLGEFNQKGTVRTKYGTRSQLESAIHALKNNGVQVYGDVVMNHKAGADGTEFVDAVEVDPSNRNQETSGTYQIQAYTKFDFPGRGNTYSSFKWRWYHFDGTDWDESRKLNRIYKFTGKAWDWEVDTEFGNYDYLMFADYDMDHPEVVNELRRWGEWYTNTLNLDGFRIDAVKHIKFSFTRDWLTHVRNATGKGMFAVAEFWKNDLGALENYLSKTNWNHSVFDVPLHYNLYNASNSRGNYDMAKLLNGTVVQKHPMHAVTFVDNHDSQPGESLESFVQEWFKPLAYALILTREQGYPSVFYGDYYGIPTHSVPAMKAKIDPILAARQNFAYGTQHDYFDHHNIIGWTREGNTTHPNSGLATIMSDGPGGEKWMYVGQNKAGQVWHDITGNKPGTVTINADGWANFSVNKGSVSIWVKR

SEQ ID NO: 20004 - protein, 481 aa, Bacillus sp.
HNGTNATMMQYFEWHLPNDGNHWNRLRDDASNLRNRGITAIWIPPAWKGTSQNDVGYGAYDLYDLGEFNQKGTVRTKYGTRSQLESAIHALKNNGVQVYGDVVMNHKAGADGTEFVDAVEVDPSNRNQETSGTYQIQAYTKFDFPGRGNTYSSFKWRWYHFDGTDWDESRKLNRIYKFTGKAWDWEVDTEFGNYDYLMFADYDMDHPEVVNELRRWGEWYTNTLNLDGFRIDAVKHIKFSFTRDWLTHVRNATGKGMFAVAEFWKNDLGALENYLSKTNWNHSVFDVPLHYNLYNASNSRGNYDMAKLLNGTVVQKHPMHAVTFVDNHDSQPGESLESFVQEWFKPLAYALILTREQGYPSVFYGDYSGIPTHSVPAMKAKIDPILAARQNFAYGTQHDYFDHHNIIGWTREGNTTHPNSGLATIMSDGPGGEKWMYVGQNKAGQVWHDITGNKPGTVTINADGWANFSVNKGSVSIWVKR

SEQ ID NO: 20005 - protein, 481 aa, Bacillus sp.
HNGTNSTMMQYFEWHLPNDGNHWNRLRDDASNLRNRGINAIWIPPAWKGTSQNDVGYGAYDLYDLGEFNQKGTVRTKYGTRSQLESAIHALKNNGVLVYGDVVMNHKAGADGTEFVDAVEVDPSNRNQETSGTYQIQAWTKFDFPGRGNTYSSFKWRWYHFDGTDWDESRKLNRIYKFTGKAWDWEVDTENGNYDYLMFADLDMDHPEVVNELRRWGEWYTNTLNLDGFRIDAVKHIKFSFTRDWLTHVRNATGKGMFAVAEFWKNDLGALENYLSKTNWNHSVFDVPLHYNLYNASNSRGNYDMAKLLNGTVVQKHPMHAVTFVDNHDSQPGESLESFVQEWFKPLAYALILTREQGVPSVFYGDYYGIPTHSVPAMKAKIDPILAARQNFAYGTQHDYFDHHNIIGWTREGNTTHPNSGLATIMSDGPGGEKWMYVGQNKAGQVWHDITGNKPGTVTINADGWANFSVNKGSVSIWVKR

SEQ ID NO: 20006 - protein, 481 aa, Bacillus sp.
HNGTNATMMQYFEWHLPNDGNHWNRLRDDASNLRNRGITAIWIPPAWKGTSQNDVGYGAYDLYDLGEFNQKGTVRTKYGTRSQLESAIHALKNNGVQVYGDVVMNHKAGADGTEFVTAVEVDPSNRNQETSGTYQIQAWTKFDFPGRGNTYSSFKWRWYHFDGTDWDESRKLNRIYKFSGKAWDWPVDTEFGNYDYLMFADYDMDHPEVVNELRRWGEWYTNTLNLDGFRIDAVKHIKFSFTRDWLTHVRNATGKGMFAVAEFWKNDLGALENYLSYTNWNHSVFDVPLHYNLYNASNSRGNYDMAKLLNGTVVQKHPMHAVTFVDNHDSQPGESLESFVQEWFKPLAYALILTREQGYPSVFYGDYYGIPTHSVPAMKAKIDPILAARQNFAYGTQHDYFDHHNIIGWTREGNTTHPNSGLATIMSDGPGGEKWMYVGQNKAGQVWHDITGNKPGTVTINADGWANFSVNKGSVSIWVKR

SEQ ID NO: 20007 - protein, 481 aa, Bacillus sp.
HNGTNATMMQYFEWHLPNDGNHWNRLRDDASNLRNRGITAIWIPPAWKGTSQNDVGYGAYDLYDLGEFNQKGTVRTKYGTRSQLESAIHALKNNGVQVYGDVVMNHKAGADGTEFVDAVEVDPSNRNQETSGTYQIQAYTKFDFPGRGNTYSSFKWRWYHFDGTDWDESRKLNRIYKFTGKAWDWEVDTEFGNYDYLMFADYDMDHPEVVNELRRWGEWYTNTLNLDGFRIDAVKHIKFSFTRDWLTHVRNATGKGMPAVAEFWKNDLGALENYLSKTNWNHSVFDVPLHYNLYNASNSRGNYDMAKLLNGTVVQKHPMHAVTFVDNHDSQPGESLESFVQEWFKPLAYALILTREQGYPSVFYGDYYGIPTHSVPAMKAKIDPILAARQNFAYGTQHDYFDHHNIIGWTREGNTTHPNSGLATIMSDGPGGEKWMYVGQNKAGQVWHDITGNKPGTVTINADGWANFSVNKGSVSIWVKR

SEQ ID NO: 20008 - protein, 481 aa, Bacillus sp.
HNGTNATMMQYFEWHLPNDGNHWNRLRDDASNLRNRGITAIWIPPAWKGTSQNDVGYGAYDLYDLGEFNQKGTVRTKYGTRSQLESAIHALKNNGVQVYGDVVMNHKAGADGTEFVTAVEVDPSNRNQETSGTYQIQAYTKFDFPGRGNTYSSFKWRWYHFDGTDWDESRKLNRIYKFSGKAWDWPVDTEFGNYDYLMFADYDMDHPEVVNELRRWGEWYTNTLNLDGFRIDAVKHIKFSFTRDWLTHVRNATGKGMFAVAEFWKNDLGALENYLSKTNWNHSVFDVPLHYNLYNASNSRGNYDMAKLLNGTVVQKHPMHAVTFVDNHDSQPGESLESFVQEWFKPLAYALILTREQGYPSVFYGDYYGIPTHSVPAMKAKIDPILAARQNFAYGTQHDYFDHHNIIGWTREGNTTHPNSGLATIMSDGPGGEKWMYVGQNKAGQVWHDITGNKPGTVTINADGWANFSVNKGSVSIWVKR

SEQ ID NO: 20009 - protein, 481 aa, Bacillus sp.
HNGTNATMMQYFEWHLPNDGNHWNRLRDDASNLRNRGITAIWIPPAWKGTSQNDVGYGAYDLYDLGEFNQKGTVRTKYGTRSQLESAIHALKNNGVQVYGDVVMNHKAGADGTEFVTAVEVDPSNRNQETSGTYQIQAYTKFDFPGRGNTYSSFKWRWYHFDGTDWDESRKLNRIYKFSGKAWDWPVDTEFGNYDYLMFADYDMDHPEVVNELRRWGEWYTNTLNLDGFRIDAVKHIKFSFTRDWLTHVRNATGKGMFAVAEFWKNDLGALENYLNYTNWNHSVFDVPLHYNLYNASNSRGNYDMAKLLNGTVVQKHPMHAVTFVDNHDSQPGESLESFVQEWFKPLAYALILTREQGYPSVFYGDYYGIPTHSVPAMKAKIDPILAARQNFAYGTQHDYFDHHNIIGWTREGNTTHPNSGLATIMSDGPGGEKWMYVGQNKAGQVWHDITGNKPGTVTINADGWANFSVNKGSVSIWVKR

SEQ ID NO: 20010 - protein, 481 aa, Bacillus sp.
HNGTNATMMQYFEWHLPNDGNHWNRLRDDASNLRNRGITAIWIPPAWKGTSQNDVGYGAYDLYDLGEFNQKGTVRTKYGTRSQLESAIHALKNNGVQVYGDVVMNHKAGADGTENVDAVEVDPSNRNQETSGTYQIQAYTKFDFPGRGNTYSSFKWRWYHFDGTDWDESRKLNRIYKFTGKAWDWPVDTEFGNYDYLMFADLDMDHPEVVNELRRWGEWYTNTLNLDGFRIDAVKHIKFSFTRDWLTHVRNATGKGMFAVAEFWKNDLGALENYLSYTNWNHSVFDVPLHYNLYNASNSRGNYDMAKLLNGTVVQKHPMHAVTFVDNHDSQPGESLESFVQEWFKPLAYALILTREQGYPSVFYGDYYGIPTHSVPAMKAKIDPILAARQNFAYGTQHDYFDHHNIIGWTREGNTTHPNSGLATIMSDGPGGEKWMYVGQNKAGQVWHDITGNKPGTVTINADGWANFSVNKGSVSIWVKR

SEQ ID NO: 20011 - protein, 481 aa, Bacillus sp.
HNGTNATMMQYFEWHLPNDGNHWNRLRDDASNLRNRGITAIWIPPAWKGTSQNDVGYGAYDLYDLGEFNQKGTVRTKYGTRSQLESAIHALKNNGVQVYGDVVMNHKAGADGTENVDAVEVDPSNRNQETSGTYQIQAYTKFDFPGRGNTYSSFKWRWYHFDGTDWDESRKLNRIYKFDGKAWDWPVDTEFGNYDYLMFADLDMDHPEVVNELRRWGEWYTNTLNLDGFRIDAVKHIKFSFTRDWLTHVRNATGKGMFAVAEFWKNDLGALENYLSYTNWNHSVFDVPLHYNLYNASNSRGNYDMAKLLNGTVVQKHPMHAVTFVDNHDSQPGESLESFVQEWFKPLAYALILTREQGYPSVFYGDYYGIPTHSVPAMKAKIDPILAARQNFAYGTQHDYFDHHNIIGWTREGNTTHPNSGLATIMSDGPGGEKWMYVGQNKAGQVWHDITGNKPGTVTINADGWANFSVNKGSVSIWVKR

SEQ ID NO: 20012 - protein, 481 aa, Bacillus sp.
HNGTNATMMQYFEWHLPNDGNHWNRLRDDASNLRNRGITAIWIPPAWKGTSQNDVGYGAYDLYDLGEFNQKGTVRTKYGTRSQLESAIHALKNNGVQVYGDVVMNHKAGADGTEFVDAVEVDPSNRNQETSGTYQIQAYTKFDFPGRGNTYSSFKWRWYHFDGTDWDESRKLNRIYKFDGKAWDWPVDTEFGNYDYLMFADVDMDHPEVVNELRRWGEWYTNTLNLDGFRIDAVKHIKFSFTRDWLTHVRNATGKGMFAVAEFWKNDLGALENYLSYTNWNHSVFDVPLHYNLYNASNSRGNYDMAKLLNGTVVQKHPMHAVTFVDNHDSQPGESLESFVQEWFKPLAYALILTREQGYPSVFYGDYYGIPTHSVPAMKAKIDPILAARQNFAYGTQHDYFDHHNIIGWTREGNTTHPNSGLATIMSDGPGGEKWMYVGQNKAGQVWHDITGNKPGTVTINADGWANFSVNKGSVSIWVKR

SEQ ID NO: 20013 - protein, 481 aa, Bacillus sp.
HNGTNATMMQYFEWHLPNDGNHWNRLRDDASNLRNRGITAIWIPPAWKGTSQNDVGYGAYDLYDLGEFNQKGTVRTKYGTRSQLESAIHALKNNGVQVYGDVVMNHKAGADGTEFVTAVEVDPSNRNQETSGTYQIQAYTKFDFPGRGNTYSSFKWRWYHFDGTDWDESRKLNRIYKFSGKAWDWPVDTEFGNYDYLMFADYDMDHPEVVNELRRWGEWYTNTLNLDGFRIDAVKHIKFSFTRDWLTHVRNATGKEMFAVAEFWKNDLGALENYLSYTNWNHSVFDVPLHYNLYNASNSRGNYDMAKLLNGTVVQKHPMHAVTFVDNHDSQPGESLESFVQEWFKPLAYALILTREQGYPSVFYGDYYGIPTHSVPAMKAKIDPILAARQNFAYGTQHDYFDHHNIIGWTREGNTTHPNSGLATIMSDGPGGEKWMYVGQNKAGQVWHDITGNKPGTVTINADGWANFSVNKGSVSIWVKR

SEQ ID NO: 20014 - protein, 481 aa, Bacillus sp.
HNGTNATMMQYFEWHLPNDGNHWNRLRDDASNLRNRGITAIWIPPAWKGTSQNDVGYGAYDLYDLGEFNQKGTVRTKYGTRSQLESAIHALKNNGVQVYGDVVMNHKAGADGTEFVDAVEVDPSNRNQETSGTYQIQAYTKFDFPGRGNTYSSFKWRWYHFDGTDWDESRKLNRIYKFDGKAWDWPVDTEFGNYDYLMFADYDMDHPEVVNELRRWGEWYTNTLNLDGFRIDAVKHIKFSFTRDWLTHVRNATGKGMFAVAEFWKNDLGALENYLSKTNWNHSVFDVPLHYNLYNASNSRGNYDMAKLLNGTVVQKHPMHAVTFVDNHDSQPGESLESFVQEWFKPLAYALILTREQGYPSVFYGDYYGIPTHSVPAMKAKIDPILAARQNFAYGTQHDYFDHHNIIGWTREGNTTHPNSGLATIMSDGPGGEKWMYVGQNKAGQVWHDITGNKPGTVTINADGWANFSVNKGSVSIWVKR

SEQ ID NO: 20015 - protein, 481 aa, Bacillus sp.
HNGTNATMMQYFEWHLPNDGNHWNRLRDDASNLRNRGITAIWIPPAWKGTSQNDVGYGAYDLYDLGEFNQKGTVRTKYGTRSQLESAIHALKNNGVQVYGDVVMNHKAGADGTEFVDAVEVDPSNRNQETSGTYQIQAYTKFDFPGRGNTYSSFKWRWYHFDGTDWDESRKLNRIYKFTGKAWDWEVDTENGNYDYLMFADLDMDHPEVVNELRRWGEWYTNTLNLDGFRIDAVKHIKFQFTRDWLTHVRNATGKGMFAVAEFWKNDLGALENYLSYTNWNHSVFDVPLHYNLYNASNSRGNYDMAKLLNGTVVQKHPMHAVTFVDNHDSQPGESLESFVQEWFKPLAYALILTREQGYPSVFYGDYYGIPTHSVPAMKAKIDPILAARQNFAYGTQHDYFDHHNIIGWTREGNTTHPNSGLATIMSDGPGGEKWMYVGQNKAGQVWHDITGNKPGTVTINADGWANFSVNKGSVSIWVKR

SEQ ID NO: 20016 - protein, 481 aa, Bacillus sp.
HNGTNATMMQYFEWHLPNDGNHWNYLRDDASNLRNRGITAIWIPPAWKGTSQNDVGYGAYDLYDLGEFNQKGTVRTKYGTRSQLESAIHALKNNGVQVYGDVVMNHKAGADGTEFVDAVEVDPSNRNQETSGTYQIQAYTKFDFPGRGNTYSSFKWRWYHFDGTDWDESRKLNRIYKFTGKAWDWEVDTEFGNYDYLMFADYDMDHPEVVNELRRWGEWYTNTLNLDGFRIDAVKHIKFSFTRDWLTHVRNATGKGMFAVAEFWKNDLGALENYLSKTNWNHSVFDVPLHYNLYNASNSRGNYDMAKLLNGTVVQKHPMHAVTFVDNHDSQPGESLESFVQEWFKPLAYALILTREQGYPSVFYGDYYGIPTHSVPAMKAKIDPILAARQNFAYGTQHDYFDHHNIIGWTREGNTTHPNSGLATIMSDGPGGEKWMYVGQNKAGQVWHDITGNKPGTVTINADGWANFSVNKGSVSIWVKR

SEQ ID NO: 20017 - protein, 481 aa, Bacillus sp.
HNGTNATMMQYFEWHLPNDGNHWNRLRDDASNLRNRGITAIWIPPAWKGTSQNDVGYGAYDLYDLGEFNQKGTVRTKYGTRSQLESAIHALKNNGVQVYGDVVMNHKAGADGTEFVDAVEVDPSNRNQETSGTYQIQAWTKFDFPGRGNTYSSFKWRWYHFDGTDWDESRKLNRIYKFTGKAWDWEVDTENGNYDYLMFADLDMDHPEVVNELRRWGEWYTNTLNLDGFRIDAVKHIKFSFTRDWLTHVRNATGKGMFAVAEFWKNDLGALENYLSKTNWNHSVFDVPLHYNLYNASNSRGNYDMAKLLNGTVVQKHPGHAVTFVDNHDSQPGESLESFVQEWFKPLAYALILTRWWGYPSVFYGDYYGIPTHSVPAMKAKIDPILAARQNFAYGTQHDYFDHHNIIGWTREGNTTHPNSGLATIMSDGPGGEKWMYVGQNKAGQVWHDITGNKPGTVTINADGWANFSVNKGSVSIWVKR

SEQ ID NO: 20018 - protein, 481 aa, Bacillus sp.
HNGTNATMMQYFEWHLPNDGNHWNRLRDDASNLRNRGITAIWIPPAWKGTSQNDVGYGAYDLYDLGEFNQKGTVRTKYGTRSQLESAIHALKNNGVQVYGDVVMNHKAGADGTEFVDAVEVDPSNRNQETSGTYQIQAYTKFDFPGRGNTYSSFKWRWYHFDGTDWDESRKLNRIYKFDGKAWDWEVDTEFGNYDYLMFADYDMDHPEVVNELRRWGEWYTNTLNLDGFRIDAVKHIKFSFTRDWLTHVRNATGKGMFAVAEYWKNDLGALENYLSKTNWNHSVFDVPLHYNLYNASNSRGNYDMAKLLNGTVVQKHPMHAVTFVDNHDSQPGESLESFVQEWFKPLAYALILTREQGYPSVFYGDYYGIPTHSVPAMKAKIDPILAARQNFAYGTQHDYFDHHNIIGWTREGNTTHPNSGLATIMSDGPGGEKWMYVGQNKAGQVWHDITGNKPGTVTINADGWANFSVNKGSVSIWVKR

SEQ ID NO: 20019 - protein, 481 aa, Bacillus sp.
HNGTNATMMQYFEWHLPNDGNHWNRLRDDASNLRNRGITAIWIPPAWKGTSQNDVGYGAYDLYDLGEFNQKGTVRTKYGTRSQLESAIHALKNNGVQVYGDVVMNHKAGADGTEFVTAVEVDPSNRNQETSGTYQIQAYTKFDFPGRGNTYSSFKWRWYHFDGTDWDESRKLNRIYKFSGKAWDWPVDTEFGNYDYLMFADYDMDHPEVVNELRRWGEWYTNTLNLDGFRIDAVKHIKFSFTRDWLTHVRNATGKGMFAVAEFWKNDLGALENYLSYTNWNHSVFDVPLHYNLYNASNSGGNYDMAKLLNGTVVQKHPMHAVTFVDNHDSQPGESLESFVQEWFKPLAYALILTREQGYPSVFYGDYYGIPTHSVPAMKAKIDPILAARQNFAYGTQHDYFDHHNIIGWTREGNTTHPNSGLATIMSDGPGGEKWMYVGQNKAGQVWHDITGNKPGTVTINADGWANFSVNKGSVSIWVKR

SEQ ID NO: 20020 - protein, 481 aa, Bacillus sp.
HNGTNATMMQYFEWHLPNDGNHWNRLRDDASNLRNRGITAIWIPPAWKGTSQNDVGYGAYDLYDLGEFNQKGTVRTKYGTRSQLESAIHALKNNGVQVYGDVVMNHKAGADGTEFVDAVEVDPSNRNQETSGTYQIQAYTKFDFPGRGNTYSSFKWRWYHFDGTDWDESRKLNRIYKFTGKAWDWEVDTEFGNYDYLMFADYDMDHPEVVNELRRWGEWYTNTLNLDGFRIDAVKHIKFSFTRDWLTHVRNATGKGMFAVAEFWKNDLGALENYLSKTNWNHSVFDVPLHYNLYNASNTRGNYDMAKLLNGTVVQKHPMHAVTFVDNHDSQPGESLESFVQEWFKPLAYALILTREQGYPSVFYGDYYGIPTHSVPAMKAKIDPILAARQNFAYGTQHDYFDHHNIIGWTREGNTTHPNSGLATIMSDGPGGEKWMYVGQNKAGQVWHDITGNKPGTVTINADGWANFSVNKGSVSIWVKR

SEQ ID NO: 20021 - protein, 481 aa, Bacillus sp.
HNGTNATMMQYFEWHLPNDGNHWNRLRDDASNLRNRGITAIWIPPAWKGTSQNDVGYGAYDLYDLGEFNQKGTVRTKYGTRSQLESAIHALKNNGVQVYGDVVMNHKAGADGTEFVDAVEVDPSNRNQETSGTYQIQAWTKFDFPGRGNTYSSFKWRWYHFDGTDWDESRKLNRIYKFTGKAWDWEVDTENGNYDYLMFADLDMDHPEVVNELRRWGEWYTNTLNLDGFRIDAVKHIKFSFTRDWLTHVRNATGKGMFAVAEFWKNDLGALENYLSKTNWNHSVFDVPLHYNLYNASNSRGNYDMAKLLNGTVVQKHHYHAVTFVDNHDSQPGESLESFVQEWFKPLAYALILTREYGYPSVFYGDYYGIPTHSVPAMKAKIDPILAARQNFAYGTQHDYFDHHNIIGWTREGNTTHPNSGLATIMSDGPGGEKWMYVGQNKAGQVWHDITGNKPGTVTINADGWANFSVNKGSVSIWVKR

SEQ ID NO: 20022 - protein, 481 aa, Bacillus sp.
HNGTNATMMQYFEWHLPNDGNHWNRLRDDASNLRNRGITAIWIPPAWKGTSQNDVGYGAYDLYDLGEFNQKGTVRTKYGTRSQLESAIHALKNNGVQVYGDVVMNHKAGADGTEFVDAVEVDPSNRNQETSGTYQIQAYTKFDFPGRGNTYSSFKWRWYHFDGTDWDESRKLNRIYKFTGKAWDWEVDTEFGNYDYLMFADYDMDHPEVVNELRRWGEWYTNTLNLDGFRIDAVKHIKFSFTRDWLTHVRNATGKGMFAVAEFWKNDLGALENYLSKTNWNHSVFDVPLHYNLYNASNSRGNYDMAKLLNGTVVQKHPMHAVTFVDNHDSQPGESLESFVQEWFKPLAYALILTREQGYPSVFYGDYYGIPTHSVPAMKAKIDPILAARQNFAYGTQHDYFDHHNIIGWTREGNTTHPNSGLATIMSDGPGGEKWMYVGQNKAGQVWHDITGNKPGTVTINADGWAAFSVNKGSVSIWVKR

SEQ ID NO: 20023 - protein, 481 aa, Bacillus sp.
HNGTNATMMQYFEWHLPNDGNHWNRLRDDASNLRNRGITAIWIPPAWKGTSQNDVGYGAYDLYDLGEFNQKGTVRTKYGTRSQLESAIHALKNNGVQVYGDVVMNHKAGADGTEFVDAVEVDPSNRNQETSGTYQIQAYTKFDFPGRGNTYSSFKWRWYHFDGTDWDESRKLNRIYKFTGKAWDWEVDTEFGNYDYLMFADYDMDHPEVVNELRRWGEWYTNTLNLDGFRIDAVKHIKFSFTRDWLTHVRNATGKGMFAVAEYWKNDLGALENYLSKTNWNHSVFDVPLHYNLYNASNSRGNYDMAKLLNGTVVQKHPMHAVTFVDNHDSQPGESLESFVQEWFKPLAYALILTREQGYPSVFYGDYYGIPTHSVPAMKAKIDPILAARQNFAYGTQHDYFDHHNIIGWTREGNTTHPNSGLATIMSDGPGGEKWMYVGQNKAGQVWHDITGNKPGTVTINADGWANFSVNKGSVSIWVKR

SEQ ID NO: 20024 - protein, 481 aa, Bacillus sp.
HNGTNSTMMQYFEWHLPNDGNHWNRLRDDASNLRNRGINAIWIPPAWKGTSQNDVGYGAYDLYDLGEFNQKGTVRTKYGTRSQLESAIHALKNNGVLVYGDVVMNHKAGADGTEFVDAVEVDPSNRNQETSGTYQIQAWTKFDFPGRGNTYSSFKWRWYHFDGTDWDESRKLNRIYKFTGKAWDWEVDTENGNYDYLMFADLDMDHPEVVNELRRWGEWYTNTLNLDGFRIDAVKHIKFSFTRDWLTHVRNATGKGMFAVAEFWKNDLGALENYLSKTNWNHSVFDVPLHYNLYNASNSRGNYDMAKLLNGTVVQKTPMHAVTFVDNHDSQPGESLESFVQEWFKPLAYALILTREQGYPSVFYGDYYGIPTHSVPAMKAKIDPILAARQNFAYGTQHDYFDHHNIIGWTREGNTTHPNSGLATIMSDGPGGEKWMYVGQNKAGQVWHDITGNKPGTVTINADGWANFSVNKGSVSIWVKR

SEQ ID NO: 20025 - protein, 481 aa, Bacillus sp.
HNGTNATMMQYFEWHLPNDGNHWNRLRDDASNLRNRGITAIWIPPAWKGTSQNDVGYGAYDLYDLGEFNQKGTVRTKYGTRSQLESAIHALKNNGVQVYGDVVMNHKAGADGTEFVTAVEVDPSNRNQETSGTYQIQAYTKFDFPGRGNTYSSFKWRWYHFDGTDWDESRKLNRIYKFSGKAWDWPVDTEFGNYDYLMFADVDMDHPEVVNELRRWGEWYTNTLNLDGFRIDAVKHIKFSFTRDWLTHVRNATGKGMFAVAEFWKNDLGALENYLSYTNWNHSVFDVPLHYNLYNASNSRGNYDMAKLLNGTVVQKHPMHAVTFVDNHDSQPGESLESFVQEWFKPLAYALILTREQGYPSVFYGDYYGIPTHSVPAMKAKIDPILAARQNFAYGTQHDYFDHHNIIGWTREGNTTHPNSGLATIMSDGPGGEKWMYVGQNKAGQVWHDITGNKPGTVTINADGWANFSVNKGSVSIWVKR

SEQ ID NO: 20026 - protein, 481 aa, Bacillus sp.
HNGTNATMMQYFEWHLPNDGNHWNRLRDDASNLRNRGITAIWIPPAWKGTSQNDVGYGAYDLYDLGEFNQKGTVRTKYGTRSQLESAIHALKNNGVQVYGDVVMNHKAGADGTENVDAVEVDPSNRNQETSGTYQIQAYTKFDFPGRGNTYSSFKWRWYHFDGTDWDESRKLNRIYKFTGKQWDWEVDTEFGNYDYLMFADYDMDHPEVVNELRRWGEWYTNTLNLDGFRIDAVKHIKFSFTRDWLTHVRNATGKGMFAVAEYWKNDLGALENYLSKTNWNHSVFDVPLHYNLYNASNSRGNYDMAKLLNGTVVQKHPMHAVTFVDNHDSQPGESLESFVQEWFKPLAYALILTREQGYPSVFYGDYYGIPTHSVPAMKAKIDPILAARQNFAYGTQHDYFDHHNIIGWTREGNTTHPNSGLATIMSDGPGGEKWMYVGQNKAGQVWHDITGNKPGTVTINADGWANFSVNKGSVSIWVKR

SEQ ID NO: 20027 - protein, 481 aa, Bacillus sp.
HNGTNATMMQYFEWHLPNDGNHWNRLRDDASNLRNRGITAIWIPPAWKGTSQNDVGYGAYDLYDLGEFNQKGTVRTKYGTRSQLESAIHALKNNGVQVYGDVVMNHKAGADGTEFVDAVEVDPSNRNQETSGTYQIQAYTKFDFPGRGNTYSSFKWRWYHFDGTDWDESRKLNRIYKFTGKAWDWPVDTEFGNYDYLMFADVDMDHPEVVNELRRWGEWYTNTLNLDGFRIDAVKHIKFSFTRDWLTHVRNATGKGMFAVAEFWKNDLGALENYLSYTNWNHSVFDVPLHYNLYNASNSRGNYDMAKLLNGTVVQKHPMHAVTFVDNHDSQPGESLESFVQEWFKPLAYALILTREQGYPSVFYGDYYGIPTHSVPAMKAKIDPILAARQNFAYGTQHDYFDHHNIIGWTREGNTTHPNSGLATIMSDGPGGEKWMYVGQNKAGQVWHDITGNKPGTVTINADGWANFSVNKGSVSIWVKR

SEQ ID NO: 20028 - protein, 481 aa, Bacillus sp.
HNGTNATMMQYFEWHLPNDGNHWNRLRDDASNLRNRGITAIWIPPAWKGTSQNDVGYGAYDLYDLGEFNQKGTVRTKYGTRSQLESAIHALKNNGVQVYGDVVMNHKAGADGTEFVDAVEVDPSNRNQETSGTYQIQAYTKFDFPGRGNTYSSFKWRWYHFDGTDWDESRKLNRIYKFDGKQWDWEVDTEFGNYDYLMFADYDMDHPEVVNELRRWGEWYTNTLNLDGFRIDAVKHIKFSFTRDWLTHVRNATGKGMFAVAEFWKNDLGALENYLSKTNWNHSVFDVPLHYNLYNASNSRGNYDMAKLLNGTVVQKHPMHAVTFVDNHDSQPGESLESFVQEWFKPLAYALILTREQGYPSVFYGDYYGIPTHSVPAMKAKIDPILAARQNFAYGTQHDYFDHHNIIGWTREGNTTHPNSGLATIMSDGPGGEKWMYVGQNKAGQVWHDITGNKPGTVTINADGWANFSVNKGSVSIWVKR

SEQ ID NO: 20029 - protein, 481 aa, Bacillus sp.
HNGTNATMMQYFEWHLPNDGNHWNRLRDDASNLRNRGITAIWIPPAWKGTSQNDVGYGAYDLYDLGEFNQKGTVRTKYGTRSQLESAIHALKNNGVQVYGDVVMNHKAGADGTEFVTAVEVDPSNRNQETSGTYQIQAYTKFDFPGRGNTYSSFKWRWYHFDGTDWDESRKLNRIYKFTGKAWDWEVDTEFGNYDYLMFADYDMDHPEVVNELRRWGEWYTNTLNLDGFRIDAVKHIKFSFTRDWLTHVRNATGKGMFAVAEYWKNDLGALENYLSKTNWNHSVFDVPLHYNLYNASNSRGNYDMAKLLNGTVVQKHPMHAVTFVDNHDSQPGESLESFVQEWFKPLAYALILTREQGYPSVFYGDYYGIPTHSVPAMKAKIDPILAARQNFAYGTQHDYFDHHNIIGWTREGNTTHPNSGLATIMSDGPGGEKWMYVGQNKAGQVWHDITGNKPGTVTINADGWANFSVNKGSVSIWVKR

SEQ ID NO: 20030 - protein, 481 aa, Bacillus sp.
HNGTNATMMQYFEWHLPNDGNHWNRLRDDASNLRNRGITAIWIPPAWKGTSQNDVGYGAYDLYDLGEFNQKGTVRTKYGTRSQLESAIHALKNNGVQVYGDVVMNHKAGADGTEFVDAVEVDPSNRNQETSGTYQIQAYTKFDFPGRGNTYSSFKWRWYHFDGTDWDESRKLNRIYKFTGKQWDWEVDTEFGNYDYLMFADYDMDHPEVVNELRRWGEWYTNTLNLDGFRIDAVKHIKFSFTRDWLTHVRNATGKGMFAVAEFWKNDLGALENYLSKTNWNHSVFDVPLHYNLYNASNSRGNYDMAKLLNGTVVQKHPMHAVTFVDNHDSQPGESLESFVQEWFKPLAYALILTREQGYPSVFYGDYYGIPTHSVPAMKAKIDPILAARQNFAYGTQHDYFDHHNIIGWTREGNTTHPNSGLATIMSDGPGGEKWMYVGQNKAGQVWHDITGNKPGTVTINADGWANFSVNKGSVSIWVKR

SEQ ID NO: 20031 - protein, 481 aa, Bacillus sp.
HNGTNATMMQYFEWHLPNDGNHWNRLRDDASNLRNRGITAIWIPPAWKGTSQNDVGYGAYDLYDLGEFNQKGTVRTKYGTRSQLESAIHALKNNGVQVYGDVVMNHKAGADGTENVDAVEVDPSNRNQETSGTYQIQAYTKFDFPGRGNTYSSFKWRWYHFDGTDWDESRKLNRIYKFDGKQWDWEVDTEFGNYDYLMFADYDMDHPEVVNELRRWGEWYTNTLNLDGFRIDAVKHIKFSFTRDWLTHVRNATGKGMFAVAEYWKNDLGALENYLSKTNWNHSVFDVPLHYNLYNASNSRGNYDMAKLLNGTVVQKHPMHAVTFVDNHDSQPGESLESFVQEWFKPLAYALILTREQGYPSVFYGDYYGIPTHSVPAMKAKIDPILAARQNFAYGTQHDYFDHHNIIGWTREGNTTHPNSGLATIMSDGPGGEKWMYVGQNKAGQVWHDITGNKPGTVTINADGWANFSVNKGSVSIWVKR

SEQ ID NO: 20032 - protein, 481 aa, Bacillus sp.
HNGTNATMMQYFEWHLPNDGNHWNRLRDDASNLRNRGITAIWIPPAWKGTSQNDVGYGAYDLYDLGEFNQKGTVRTKYGTRSQLESAIHALKNNGVQVYGDVVMNHKAGADGTEFVDAVEVDPSNRNQETSGTYQIQAYTKFDFPGRGNTYSSFKWRWYHFDGTDWDESRKLNRIYKFTGKAWDWEVDTEFGNYDYLMFADYDMDHPEVVNELRRWGEWYTNTLNLDGFRIDAVKHIKFSFTRDWLTHVRNATGKGMFAVAEFWKNDLGALENYLSKTNWNHSVFDVPLHYNLYNASNSRGNYDMAKLLNGTVVQKHPMHAVTFVDNHDSQPGESLESFVQEWFKPLAYALILTREQGYPSVFYGDYYGIPTHSVPAMKAKIDPILAARQNFAYGTQHDYFDHHNIIGWTREGNTTHPNSGLATIMSDGPGGEKWMYVGQNKAGQVWHDITGNKPGTVTINADGWANFSVFKGSVSIWVKR

SEQ ID NO: 20033 - protein, 481 aa, Bacillus sp.
HNGTNATMMQYFEWHLPNDGNHWNRLRDDASNLRNRGITAIWIPPAWKGTSQNDVGYGAYDLYDLGEFNQKGTVRTKYGTRSQLESAIHALKNNGVQVYGDVVMNHKAGADGTEFVTAVEVDPSNRNQETSGTYQIQAYTKFDFPGRGNTYSSFKWRWYHFDGTDWDESRKLNRIYKFSGKAWDWEVDTEFGNYDYLMFADYDMDHPEVVNELRRWGEWYTNTLNLDGFRIDAVKHIKFSFTRDWLTHVRNATGKGMFAVAEFWKNDLGALENYLSYTNWNHSVFDVPLHYNLYNASNSRGNYDMAKLLNGTVVQKHPMHAVTFVDNHDSQPGESLESFVQEWFKPLAYALILTREQGYPSVFYGDYYGIPTHSVPAMKAKIDPILAARQNFAYGTQHDYFDHHNIIGWTREGNTTHPNSGLATIMSDGPGGEKWMYVGQNKAGQVWHDITGNKPGTVTINADGWANFSVNKGSVSIWVKR

SEQ ID NO: 20034 - protein, 481 aa, Bacillus sp.
HNGTNATMMQYFEWHLPNDGNHWNRLRDDASNLRNRGITAIWIPPAWKGTSQNDVGYGAYDLYDLGEFNQKGTVRTKYGTRSQLESAIHALKNNGVQVYGDVVMNHKAGADGTEFVDAVEVDPSNRNQETSGTYQIQAWTKFDFPGRGNTYSSFKWRWYHFDGTDWDESRKLNRIYKFTGKAWDWEVDTENGNYDYLMFADLDMDHPEVVNELRRWGEWYTNTLNLDGFRIDAVKHIKFSFTRDWLTHVRNATGKGMSAVAEFWKNDLGALENYLSKTNWNHKVFDVPLHYNLYNASNSRGNYDMAKLLNGTVVQKHPMHAVTFVDNHDSQPGESLESFVQEWFKPLAYALILTREQGVPSVFYGDYYGIPTHSVPAMKAKIDPILAARQNFAYGTQHDYFDHHNIIGWTREGNTTHPNSGLATIMSDGPGGEKWMYVGQNKAGQVWHDITGNKPGTVTINADGWANFSVNKGSVSIWVKR

SEQ ID NO: 20035 - protein, 481 aa, Bacillus sp.
HNGTNATMMQYFEWHLPNDGNHWNRLRDDASNLRNRGITAIWIPPAWKGTSQNDVGYGAYDLYDLGEFNQKGTVRTKYGTRSQLESAIHALKNNGVQVYGDVVMNHKAGADGTEFVTAVEVDPSNRNQETSGTYQIQAYTKFDFPGRGNTYSSFKWRWYHFDGTDWDESRKLNRIYKFTGKAWDWEVDTEFGNYDYLMFADLDMDHPEVVNELRRWGEWYTNTLNLDGFRIDAVKHIKFSFTRDWLTHVRNATGKGMFAVAEFWKNDLGALENYLSYTNWNHSVFDVPLHYNLYNASNSRGNYDMAKLLNGTVVQKHPMHAVTFVDNHDSQPGESLESFVQEWFKPLAYALILTREQGYPSVFYGDYYGIPTHSVPAMKAKIDPILAARQNFAYGTQHDYFDHHNIIGWTREGNTTHPNSGLATIMSDGPGGEKWMYVGQNKAGQVWHDITGNKPGTVTINADGWANFSVNGASVSIWVKR

SEQ ID NO: 20036 - protein, 481 aa, Bacillus sp.
HNGTNATMMQYFEWHLPNDGNHWNRLRDDASNLRNRGITAIWIPPAWKGTSQNDVGYGAYDLYDLGEFNQKGTVRTKYGTRSQLESAIHALKNNGVQVYGDVVMNHKAGADGTEFVDAVEVDPSNRNQETSGTYQIQAYTKFDFPGRGNTYSSFKWRWYHFDGTDWDESRKLNRIYKFDGKAWDWEVDTENGNYDYLMFADLDMDHPEVVNELRRWGEWYTNTLNLDGFRIDAVKHIKFQFTRDWLTHVRNATGKGMFAVAEFWKNDLGALENYLSYTNWNHSVFDVPLHYNLYNASNSRGNYDMAKLLNGTVVQKHPMHAVTFVDNHDSQPGESLESFVQEWFKPLAYALILTREQGYPSVFYGDYYGIPTHSVPAMKAKIDPILAARQNFAYGTQHDYFDHHNIIGWTREGNTTHPNSGLATIMSDGPGGEKWMYVGQNKAGQVWHDITGNKPGTVTINADGWANFSVNKGSVSIWVKR

SEQ ID NO: 20037 - protein, 481 aa, Bacillus sp.
HNGTNATMMQYFEWHLPNDGNHWNRLRDDASNLRNRGITAIWIPPAWKGTSQNDVGYGAYDLYDLGEFNQKGTVRTKYGTRSQLESAIHALKNNGVQVYGDVVMNHKAGADGTENVDAVEVDPSNRNQETSGTYQIQAYTKFDFPGRGNTYSSFKWRWYHFDGTDWDESRKLNRIYKFDGKAWDWPVDTEFGNYDYLMFADYDMDHPEVVNELRRWGEWYTNTLNLDGFRIDAVKHIKFSFTRDWLTHVRNATGKGMFAVAEFWKNDLGALENYLSYTNWNHSVFDVPLHYNLYNASNSRGNYDMAKLLNGTVVQKHPMHAVTFVDNHDSQPGESLESFVQEWFKPLAYALILTREQGYPSVFYGDYYGIPTHSVPAMKAKIDPILAARQNFAYGTQHDYFDHHNIIGWTREGNTTHPNSGLATIMSDGPGGEKWMYVGQNKAGQVWHDITGNKPGTVTINADGWANFSVNKGSVSIWVKR

SEQ ID NO: 20038 - protein, 481 aa, Bacillus sp.
HNGTNATMMQYFEWHLPNDGNHWNRLRDDASNLRNRGITAIWIPPAWKGTSQNDVGYGAYDLYDLGEFNQKGTVRTKYGTRSQLESAIHALKNNGVQVYGDVVMNHKAGADGTEFVDAVEVDPSNRNQETSGTYQFQAWTKFDFPGRGNTYSSFKWRWYHFDGTDWDESRKLNRIYKFTGKAWDWEVDTENGNYDYLMFADLDMDHPEVVNELRRWGEWYTNTLNLDGFRIDAVKHIKFSFTRDWLTHVRNATGKGMSAVAEFWKNDLGALENYLSKTNWNHSVFDVPLHYNLYNASNSRGNYDMAKLLNGTVVQKHPMHAVTFVDNHDSQPGESLESFVQEWFKPLAYALILTREQGVPSVFYGDYYGIPTHSVPAMKAKIDPILAARQNFAYGTQHDYFDHHNIIGWTREGNTTHPNSGLATIMSDGPGGEKWMYVGQNKAGQVWHDITGNKPGTVTINADGWANFSVNKGSVSIWVKR

SEQ ID NO: 20039 - protein, 481 aa, Bacillus sp.
HNGTNATMMQYFEWHLPNDGNHWNRLRDDASNLRNRGITAIWIPPAWKGTSQNDVGYGAYDLYDLGEFNQKGTVRTKYGTRSQLESAIHALKNNGVQVYGDVVMNHKAGADGTENVDAVEVDPSNRNQETSGTYQIQAYTKFDFPGRGNTYSSFKWRWYHFDGTDWDESRKLNRIYKFSGKAWDWPVDTEFGNYDYLMFADYDMDHPEVVNELRRWGEWYTNTLNLDGFRIDAVKHIKFSFTRDWLTHVRNATGKGMFAVAEFWKNDLGALENYLSYTNWNHSVFDVPLHYNLYNASNSRGNYDMAKLLNGTVVQKHPMHAVTFVDNHDSQPGESLESFVQEWFKPLAYALILTREQGYPSVFYGDYYGIPTHSVPAMKAKIDPILAARQNFAYGTQHDYFDHHNIIGWTREGNTTHPNSGLATIMSDGPGGEKWMYVGQNKAGQVWHDITGNKPGTVTINADGWANFSVNKGSVSIWVKR

SEQ ID NO: 20040 - protein, 481 aa, Bacillus sp.
HNGTNGTMMQYFEWHLPNDGNHWNRLRDDASNLRNRGITAIWIPPAWKGTSQNDVGYGAYDLYDLGEFNQKGTVRTKYGTRSQLESAIHALKNNGVQVYGDVVMNHKAGADGTEFVTAVEVDPSNRNQETSGTYQIQAYTKFDFPGRGNTYSSFKWRWYHFDGTDWDESRKLNRIYKFSGKAWDWPVDTEFGNYDYLMFADYDMDHPEVVNELRRWGEWYTNTLNLDGFRIDAVKHIKFSFTRDWLTHVRNATGKGMFAVAEFWKNDLGALENYLSYTNWNHSVFDVPLHYNLYNASNSRGNYDMAKLLNGTVVQKHPMHAVTFVDNHDSQPGESLESFVQEWFKPLAYALILTREQGYPSVFYGDYYGIPTHSVPAMKAKIDPILAARQNFAYGTQHDYFDHHNIIGWTREGNTTHPNSGLATIMSDGPGGEKWMYVGQNKAGQVWHDITGNKPGTVTINADGWANFSVNKGSVSIWVKR

SEQ ID NO: 20041 - protein, 481 aa, Bacillus sp.
HNGTNATMMQYFEWHLPNDGNHWNRLRDDASNLRNRGITAIWIPPAWKGTSQNDVGYGAYDLYDLGEFNQKGTVRTKYGTRSQLESAIHALKNNGVQVYGDVVMNHKAGADGTEFVTAVEVDPSNRNQETSGTYQIQAYTKFDFPGRGNTYSSFKWRWYHFDGTDWDESRKLNRIYKFTGKQWDWEVDTEFGNYDYLMFADYDMDHPEVVNELRRWGEWYTNTLNLDGFRIDAVKHIKFSFTRDWLTHVRNATGKGMFAVAEFWKNDLGALENYLSKTNWNHSVFDVPLHYNLYNASNSRGNYDMAKLLNGTVVQKHPMHAVTFVDNHDSQPGESLESFVQEWFKPLAYALILTREQGYPSVFYGDYYGIPTHSVPAMKAKIDPILAARQNFAYGTQHDYFDHHNIIGWTREGNTTHPNSGLATIMSDGPGGEKWMYVGQNKAGQVWHDITGNKPGTVTINADGWANFSVNKGSVSIWVKR

SEQ ID NO: 20042 - protein, 481 aa, Bacillus sp.
HNGTNATMMQYFEWHLPNDGNHWNRLRDDASNLRNRGITAIWIPPAWKGTSQNDVGYGAYDLYDLGEFNQKGTVRTKYGTRSQLESAIHALKNNGVQVYGDVVMNHKAGADGTEFVTAVEVDPSNRNQETSGTYQIQAYTKFDFPGRGNTYSSFKWRWYHFDGTDWDESRKLNRIYKFSGKAWDWPVDTENGNYDYLMFADYDMDHPEVVNELRRWGEWYTNTLNLDGFRIDAVKHIKFSFTRDWLTHVRNATGKGMFAVAEFWKNDLGALENYLSYTNWNHSVFDVPLHYNLYNASNSRGNYDMAKLLNGTVVQKHPMHAVTFVDNHDSQPGESLESFVQEWFKPLAYALILTREQGYPSVFYGDYYGIPTHSVPAMKAKIDPILAARQNFAYGTQHDYFDHHNIIGWTREGNTTHPNSGLATIMSDGPGGEKWMYVGQNKAGQVWHDITGNKPGTVTINADGWANFSVNKGSVSIWVKR

SEQ ID NO: 20043 - protein, 481 aa, Bacillus sp.
HNGTNATMMQYFEWHLPNDGNHWNRLRDDASNLRNRGITAIWIPPAWKGTSQNDVGYGAYDLYDLGEFNQKGTVRTKYGTRSQLESAIHALKNNGVLVYGDVVMNHKAGADGTEFVDAVEVDPSNRNQETSGTYQIQAWTKFDFPGRGNTYSSFKWRWYHFDGTDWDESRKLNRIYKFTGKAWDWEVDTENGNYDYLMFADLDMDHPEVVNELRRWGEWYTNTLNLDGFRIDAVKHIKFSFTRDWLTHVRNATGKGMKAVAEFWKNDLGALENYLSKTNWNHSVFDVPLHYNLYNASNSRGNYDMAKLLNGTVVQKHPMHAVTFVDNHDSQPGESLESFVQEWFKPLAYALILTREQGVPSVFYGDYYGIPTHSVPAMKAKIDPILAARQNFAYGTQHDYFDHHNIIGWTREGNTTHPNSGLATIMSDGPGGEKWMYVGQNKAGQVWHDITGNKPGTVTINADGWANFSVNKGSVSIWVKR

SEQ ID NO: 20044 - protein, 481 aa, Bacillus sp.
HNGTNATMMQYFEWHLPNDGNHWNRLRDDASNLRNRGITAIWIPPAWKGTSQNDVGYGAYDLYDLGEFNQKGTVRTKYGTRSQLESAIHALKNNGVQVYGDVVMNHKAGADGTEFVDAVEVDPSNRNQETSGTYQIQAYTKFDFPGRGNTYSSFKWRWYHFDGTDWDESRKLNRIYKFSGKAWDWPVDTEFGNYDYLMFADYDMDHPEVVNELRRWGEWYTNTLNLDGFRIDAVKHIKFSFTRDWLTHVRNATGKGMFAVAEFWKNDLGALENYLSKTNWNHSVFDVPLHYNLYNASNSRGNYDMAKLLNGTVVQKHPMHAVTFVDNHDSQPGESLESFVQEWFKPLAYALILTREQGYPSVFYGDYYGIPTHSVPAMKAKIDPILAARQNFAYGTQHDYFDHHNIIGWTREGNTTHPNSGLATIMSDGPGGEKWMYVGQNKAGQVWHDITGNKPGTVTINADGWANFSVNKGSVSIWVKR

SEQ ID NO: 20045 - protein, 481 aa, Bacillus sp.
HNGTNATMMQYFEWHLPNDGNHWNRLRDDASNLRNRGITAIWIPPAWKGTSQNDVGYGAYDLYDLGEFNQKGTVRTKYGTRSQLESAIHALKNNGVQVYGDVVMNHKAGADGTEFVTAVEVDPSNRNQETSGTYQIQAYTKFDFPGRGNTYSSFKWRWYHFDGTDWDESRKLNRIYKFSGKAWDWPVDTEFGNYDYLMFADYDMDHPEVVNELRRWGEWYTNTLNLDGFRIDAVKHIKYSFTRDWLTHVRNATGKGMFAVAEFWKNDLGALENYLSYTNWNHSVFDVPLHYNLYNASNSRGNYDMAKLLNGTVVQKHPMHAVTFVDNHDSQPGESLESFVQEWFKPLAYALILTREQGYPSVFYGDYYGIPTHSVPAMKAKIDPILAARQNFAYGTQHDYFDHHNIIGWTREGNTTHPNSGLATIMSDGPGGEKWMYVGQNKAGQVWHDITGNKPGTVTINADGWANFSVNKGSVSIWVKR

SEQ ID NO: 20046 - protein, 481 aa, Bacillus sp.
HNGTNATMMQYFEWHLPNDGNHWNRLRDDASNLRNRGITAIWIPPAWKGTSQNDVGYGAYDLYDLGEFNQKGTVRTKYGTRSQLESAIHALKNNGVQVYGDVVMNHKAGADGTEFVTAVEVDPSNRNQETSGTYQIQAYTKFDFPGRGNTYSSFKWRWYHFDGTDWDESRKLNRIYKFTGKAWDWEVDTEFGNYDYLMFADLDMDHPEVVNELRRWGEWYTNTLNLDGFRIDAVKHIKFSFTRDWLTHVRNATGKGMFAVAEFWKNDLGALENYLSYTNWNHSVFDVPLHYNLYNASNSRGNYDMAKLLNGTVVQKHPMHAVTFVDNHDSQPGESLESFVQEWFKPLAYALILTREQGYPSVFYGDYYGIPTHSVPAMKAKIDPILAARQNFAYGTQHDYFDHHNIIGWTREGNTTHPNSGLATIMSDGPGGEKWMYVGQNKAGQVWHDITGNKPGTVTINADGWANFSVNKGSVSIWVKR

SEQ ID NO: 20047 - protein, 481 aa, Bacillus sp.
HNGTNATMMQYFEWHLPNDGNHWNRLRDDASNLRNRGITAIWIPPAWKGTSQNDVGYGAYDLYDLGEFNQKGTVRTKYGTRSQLESAIHALKNNGVQVYGDVVMNHKAGADGTEFVTAVEVDPSNRNQETSGTYQIQAYTKFDFPGRGNTYSSFKWRWYHFDGTDWDESRKLNRIYKFSGKAWDWPVDTEFGNYDYLMFADYDMDHPEVVNELRRWGEWYTNTLNLDGFRIDAVKHIKFSFTRDWLTHVRNATGKGMFAVAEFWKNDLGALENYLSYTNWNHSVFDVPLHYNLYNASNSRGNYDMAKLLNGTVVQKHPMHAVTFVDNHDSQPGESLESFVQEWFKPLAYALILTREQGYPSVFYGDYYGIPTHSVPAMKAKIDPILAARQNFAYGTQHDYFDHHNIIGWTREGNTTHPNSGLATIMSDGPGGEKWMYVGQNKAGQVWHDITGNKPGTVTINADGWANFSVNGGSVSIWVKR

SEQ ID NO: 20048 - protein, 481 aa, Bacillus sp.
HNGTNATMMQYFEWHLPNDGNHWNRLRDDASNLRNRGITAIWIPPAWKGTSQNDVGYGAYDLYDLGEFNQKGTVRTKYGTRSQLESAIHALKNNGVQVYGDVVMNHKAGADGTENVDAVEVDPSNRNQETSGTYQIQAYTKFDFPGRGNTYSSFKWRWYHFDGTDWDESRKLNRIYKFSGKAWDWPVDTEFGNYDYLMFADLDMDHPEVVNELRRWGEWYTNTLNLDGFRIDAVKHIKFSFTRDWLTHVRNATGKGMFAVAEFWKNDLGALENYLSYTNWNHSVFDVPLHYNLYNASNSRGNYDMAKLLNGTVVQKHPMHAVTFVDNHDSQPGESLESFVQEWFKPLAYALILTREQGYPSVFYGDYYGIPTHSVPAMKAKIDPILAARQNFAYGTQHDYFDHHNIIGWTREGNTTHPNSGLATIMSDGPGGEKWMYVGQNKAGQVWHDITGNKPGTVTINADGWANFSVNKGSVSIWVKR

SEQ ID NO: 20049 - protein, 481 aa, Bacillus sp.
HNGTNATMMQYFEWHLPNDGNHWNRLRDDASNLRNRGITAIWIPPAWKGTSQNDVGYGAYDLYDLGEFNQKGTVRTKYGTRSQLESAIHALKNNGVQVYGDVVMNHKAGADGTEFVTAVEVDPSNRNQETSGTYQIQAYTKFDFPGRGNTYSSFKWRWYHFDGTDWDESRKLNRIYKFSGKAWDWPVDTEFGNYDYLMFADYDMDHPEVVNELRRWGEWYTNTLNLDGFRIDAVKHIKFSFTRDWLTHVRNATGKGMFAVAEFWKNDLGALENYLSYTNWNHSVFDVPLHYNLYNASNSRGNYDMAKLLNGTVVQKHPMHAVTFVDNHDSQPGESLESFVQEWFKPLAYALILTREQGYPSVFYGDYYGIPTHSVPAMKAKIDPILEARQNFAYGTQHDYFDHHNIIGWTREGNTTHPNSGLATIMSDGPGGEKWMYVGQNKAGQVWHDITGNKPGTVTINADGWANFSVNKGSVSIWVKR

SEQ ID NO: 20050 - protein, 481 aa, Bacillus sp.
HNGTNATMMQYFEWHLPNDGNHWNRLRDDASNLRNRGITAIWIPPAWKGTSQNDVGYGAYDLYDLGEFNQKGTVRTKYGTRSQLESAIHALKNNGVLVYGDVVMNHKAKADGTEFVDAVEVDPSNRNQETSGTYQIQAWTKFDFPGRGNTYSSFKWRWYHFDGTDWDESRKLNRIYKFTGKAWDWEVDTENGNYDYLMFADLDMDHPEVVNELRRWGEWYTNTLNLDGFRIDAVKHIKFSFTRDWLTHVRNAAGKGMFAVAEFWKNDLGALENYLSKTNWNHSVFDVPLHYNLYNASNSRGNYDMAKLLNGTVVQKHPMHAVTFVDNHDSQPGESLESFVQEWFKPLAYALILTREQGYPSVFYGDYYGIPTHSVPAMKAKIDPILAARQNFAYGTQHDYFDHHNIIGWTREGNTTHPNSGLATIMSDGPGGEKWMYVGQNKAGQVWHDITGNKPGTVTINADGWANFSVNKGSVSIWVKR

SEQ ID NO: 20051 - protein, 483 aa, Synthetic construct
HHGTNGTMMQYFEWYLPNDGNHWNRLRSDASNLKDKGITAVWIPPAWKGASQNDVGYGAYDLYDLGEFNQKGTVRTKYGTRNQLQAAVTALKSNGIQVYGDVVMNHKGGADATEWVRAVEVNPSNRNQEVSGDYTIEAWTKFDFPGRGNTHSNFKWRWYHFDGVDWDQSRQLQNRIYKFRGDGKGWDWEVDTENGNYDYLMYADIDMDHPEVVNELRNWGVWYTNTLGLDGFRIDAVKHIKYSFTRDWLTHVRNTTGKNMFAVAEFWKNDIGAIENYLSKTNWNHSVFDVPLHYNLYNASRSGGNYDMRQIFNGTVVQRHPTHAVTFVDNHDSQPEEALESFVEEWFKPLAYALILTRDQGYPSVFYGDYYGIPTHGVPAMKSKIDPILEARQKYAYGKQNDYLDHHNMIGWTREGNTAHPNSGLATIMSDGPGGNKWMYVGRNKAGQVWRDITGNRSGTVTINADGWGNFSVNGGSVSIWVN

SEQ ID NO: 20052 - protein, 483 aa, Synthetic construct
HHGTNGTMMQYFEWYLPNDGNHWNRLRSDASNLKDKGITAVWIPPAWKGASQNDVGYGAYDLYDLGEFNQKGTVRTKYGTRNQLQAAVTALKSNGIQVYGDVVMNHKGGADATEWVRAVEVNPSNRNQEVSGDYTIEAWTKFDFPGRGNTHSNFKWRWYHFDGVDWDQSRQLQNRIYKFRGDGKGWDWEVDTENGNYDYLMYADIDMDHPEVVNELRNWGVWYTNTLGLDGFRIDAVKHIKYSFTRDWLTHVRNTTGKNMFAVAEFWKNDIGAIENYLSKTNWNHSVFDVPLHYNLYNASRSGGNYDMRQIFNGTVVQRHPTHAVTFVDNHDSQPEEALESFVEEWFKPLAYALVLTRDQGYPSVFYGDYYGIPTHGVPAMKSKIDPILEARQKYAYGKQNDYLDHHNMIGWTREGNTAHPNSGLATIMSDGPGGNKWMYVGRNKAGQVWRDITGNRSGTVTINADGWGNFSVNGGSVSIWVN

SEQ ID NO: 20053 - protein, 480 aa, Bacillus sp.
HNGTNATMMQYFEWHLPNDGNHWNRLRDDASNLRNRGITAIWIPPAWKGTSQNDVGYGAYDLYDLGEFNQKGTVRTKYGTRSQLESAIHALKNNGVQVYGDVVMNHKAGADGTEFVTAVEVDPSNRNQETSGTYQIQAYTKFDFPGRGNTYSSFKWRWYHFDGTDWDESRKLNRIYKFSGKAWDWPVDTEFGNYDYLMFADYDMDHPEVVNELRRWGEWYTNTLNLDGFRIDAVKHIKFSFTRDWLTHVRNATGKGMFAVAEFWKNDLGALENYLYTNWNHSVFDVPLHYNLYNASNTGGNYDMAKLLNGTVVQKHPMHAVTFVDNHDSQPGESLESFVQEWFKPLAYALILTREQGYPSVFYGDYYGIPTHSVPAMKAKIDPILAARQNFAYGTQHDYFDHHNIIGWTREGNTTHPNSGLATIMSDGPGGEKWMYVGQNKAGQVWHDITGNKPGTVTINADGWANFSVNKGSVSIWVKR

SEQ ID NO: 20054 - protein, 480 aa, Bacillus sp.
HSGTNATMMQYFEWHLPNDGNHWNRLRDDASNLRNRGITAIWIPPAWKGTSQNDVGYGAYDLYDLGEFNQKGTVRTKYGTRSQLESAIHALKNNGVLVYGDVVMNHKAKADGTEFVDAVEVDPSNRNQETSGTYQIQAWTKFDFPGRGNTYSSFKWRWYHFDGTDWDESRKLNRIYKFTGKAWDWEVDTENGNYDYLMFADLDMDHPEVVNELRRWGEWYTNTLNLDGFRIDAVKHIKFSFTRDWLTHRNATGKGMFAVAEFWKNDLGALENYLSKTNWNHSVFDVPLHYNLYNASNSRGNYDMAKLLNGTVVQKHPMHAVTFVDNHDSQPGESLESFVQEWFKPLAYALILTREQGYPSVFYGDYYGIPTHSVPAMKAKIDPILAARQNFAYGTQHDYFDHHNIIGWTREGNTTHPNSGLATIMSDGPGGEKWMYVGQNKAGQVWHDITGNKPGTVTINADGWANFSVNKGSVSIWVKR

SEQ ID NO: 20055 - protein, 513 aa, Geobacillus sp
LLAFLLTVSLFCPTGQPAKAAAPFNGTMMQYFEWYLPDDGTLWTKVANEANNLSSLGITALWLPPAYKGTSRSDVGYGVYDLYDLGEFNQKGTVRTKYGTKAQYLQAIQAAHAAGMQVYADVVFDHKGGADGTEWVDAVEVNPSDRNQEISGTYQIQAWTKFDFPGRGNTYSSFKWRWYHFDGVDWDESRKLSRIYKFRGIGKAWDWEVDTENGNYDYLMYADLDMDHPEVVTELKNWGKWYVNTTNIDGFRLDAVKHIKFSFFPDWLSYVRSQTGKPLFTVGEYWSYDINKLHNYITKTDGTMSLFDAPLHNKFYTASKSGGAFDMRTLMTNTLMKDQPTLAVTFVDNHDTEPGQALQSWVDPWFKPLAYAFILTRQQGYPCVFYGDYYGIPQYNIPSLKSKIDPLLIARRDYAYGTQHDYLDHSDIIGWTREGVTEKPGSGLAALITDGPGGSKWMYVGKQHAGKVFYDLTGNRSDTVTINSDGWGEFKVNGGSVSVWVPRKTTVSTITRP

SEQ ID NO: 20056 - protein, 512 aa, Geobacillus thermoleovorans
LAFLLTASLFCPTGQPAKAAAPFNGTMMQYFEWYLPDDGTLWTKVANEANNLSSLGITALWLPPAYKGTSRSDVGYGVYDLYDLGEFNQKGTVRTKYGTKAQYLQAIQAAHAAGMQVYADVVFDHKGGADGTEWVDAVEVNPSDRNQEISGTYQIQAWTKFDFPGRGNTYSSFKWRWYHFDGVDWDESRKLSRIYKFRGIGKAWDWEVDTENGNYDYLMYADLDMDHPEVVTELKNWGKWYVNTTNIDGFRLDAVKHIKFSFFPDWLSYVRSQTGKPLFTVGEYWSYDINKLHNYITKTNGTMSLFDAPLHSKFYTASKSGGAFDMRTLMTNTLMKDQPTLAVTFVDNHDTEPVQALQSWVDPWFKPLAYAFILTRQEGYPCVFYGDYYGIPQYNIPSLKSKIDPLLIARRDYAYGTQHDYLDHSDIIGWTREGVTEKPGSGLAALITDGPGGSKWMYVGKQHAGKVFYDLTGNRSDTVTINSDGWGEFKVNGGSVSVWVPRKTTVSTIAWP

SEQ ID NO: 20057 - protein, 510 aa, Geobacillus stearothermophilus
LALGLSLTFGLFSPAQAAAPFNGTMMQYFEWYLPDDGTLWTKVANEANNLSSLGITALWLPPAYKGTSRSDVGYGVYDLYDLGEFNQKGTVRTKYGTKAQYLQAIQAAHAAGMQVYADVVFDHKGGADGTEWVDAVEVNPSDRNQEISGTYQIQAWTKFDFPGRGNTYSSFKWRWYHFDGVDWDESRKLSRIYKFRGIGKAWDWEVDTENGNYDYLMYADLDMDHPEVVTELKNWGKWYVNTTNIDGFRLDAVKHIKFSFFPDWLSYVRSQTGKPLFTVGEYWSYDINKLHNYITKTNGTMSLFDAPLHNKFYTASKSGGAFDMRTLMTNTLMKDQPTLAVTFVDNHDTEPGQALQSWVDPWFKPLAYAFILTRQEGYPGVFYGDYYGIPQYNIPSLKSKIDPLLIARRDYAYGTQHDYLDHSDIIGWTREGVTEKPGSGLAALITDGPGGSKWMYVGKQHAGKVFYDLTGNRSDTVTITSDGWGEFKVNGGSVSVWVPRKTTVSTITRP

SEQ ID NO: 20058 - protein, 493 aa, Geobacillus stearothermophilus
AAPFNGTMMQYFEWYLPDDGTLWTKVADEANNLSSLGITALWLPPAYKGTSRSDVGYGVYDLYDLGEFNQKGTVRTKYGTKAQYLEAIQAAHAAGMRVYADVVFDHKGGADGTEWVDAVEVNPSDRNQEISGTYQIQAWTKFDFPGRGNTYSSFKWRWYHFDGVDWDESRQLSRIYKFRGIGKAWDWEVDTENGNYDYLMYADLDMDHPEVVTELKNWGKWYVDTTNIDGFRLDAVKHIKFSFFPDWLSYVRSQTGKPLFTVGEYWSYDIDKLHNYITKTDGTMSLFDAPLHNKFYTASKSGGAFDMQTLMTNTLMKDRPTLAVTFVDNHDTEPGQALQSWVDPWFKPLAYAFILTREEGYPCVFYGDYYGIPQYNIPSLKSQIDPLLIARRDYAYGTQHDYLDHSDIIGWTREGVTEKPGSGLAALITDGPGGSKWMYVGKEHAGQVFYDLTGNRSDTVTINSDGWGEFKVNGGSVSVWVPQKTTVSTIARP

SEQ ID NO: 20059 - protein, 458 aa, Geobacillus stearothermophilus
LAFLLTASLFCPTGQPAKAAAPFNGTMMQYFEWYLPDDGTLWTKVANEANNLSSLGITALWLPPAYKGTSRSDVGYGVYDLYDLGEFNQKGTVRTKYGTKAQYLQAIQAAHAAGMQVYADVVFDHKGGADGTEWVDAVEVNPSDRNQEISGTYQIQAWTKFDFPGRGNTYSSFKWRWYHFDGVDWDESRKLSRIYKFRGIGKAWDWEVDTENGNYDYLMYADLDMDHPEVVTELKNWGKWYVNTTNIDGFRLDAVKHIKFSFFPDWLSYVRSQTGKPLFTVGEYWSYDINKLHNYITKTDGTMSLFDAPLHNKFYTASKSGGAFDMRTLMTNTLMKDQPTLAVTFVDNHDTEPGQALQSWVDPWFKPLAYAFILTRQEGYPCVFYGDYYGIPQYNIPSLKSKIDPLLIARRDYAYGTQHDYLDHSDIIGWTREGVTEKPGSGLAALITDGPGGSKWMY

SEQ ID NO: 20060 - protein, 489 aa, Bacillus sp.
AAPFNGTMMQYFEWHLPDDGTLWTKLANDANNLSSLGITALWIPPAWKGTSRSDVGYGVYDLYDLGEFNQKGTVRTKYGTKAQYLQAIQAAHAAGIQVYADVVFDHKGGADGTEWVDAVEVNPSDRNQEISGTYQIQAWTKFDFPGRGNTHSSFKWRWYHFDGVDWDESRQKLSKIYKFRGIGKAWDWEVDTENGNYDYLMYADIDMDHPEVITELKNWGKWYVNTTNIDGFRIDAVKHIKFSFFPDWLSHVRSQTGKPLFTVAEFWSYDINKIHNYITKTNGTMSLFDAPLHNKFYTASKSGGAFDMRTILTNSLMKDQPTLAVTFVDNHDSEPGQALQSFVDPWFKPLAYAFILTRQEGYPCVFYGDYYGIPQHNIPSLKSKIDPLLIARRDYAYGTQHDYLDHSDIIGWTREGVSEKPGSGLAAIISDGPGGSKWMYVGKQHAGKVFYDITGNRSDTVTINADGWGEFKVNGGAVSVWVPRKTTVS

SEQ ID NO: 20061 - protein, 485 aa, Anoxybacillus flavithermus
FNGTMMQYFEWYLPDDGTLWTKVANEANNLSSLGITALWLPPAYKGTSRSDVGYGVYDLYDLGEFNQKGTVRTKYGTKAQYLQAIQAAHAAGMQVYADVVFDHKGGADGTEWVDAVEVNPSDRNQEISGTYQIQAWTKFDFPGRGNTYSSFKWRWYHFDGVDWDESRKLSRIYKFRGKAWDWEVDTEFGNYDYLMYADLDMDHPEVVTELKNWGKWYVNTTNIDGFRLDAVKHIKFSFFPDWLSYVRSQTGKPLFTVGEYWSYDINKLHNYITKTDGTMSLFDAPLHNKFYTASKSGGAFDMRTLMTNTLMKDQPTLAVTFVDNHDTEPGQALQSWVDPWFKPLAYAFILTRQEGYPCVFYGDYYGIPQYNIPSLKSKIDPLLIARRDYAYGTQHDYIDSADIIGWTREGVAEKANSGLAALITDGPGGSKWMYVGKQHAGKTFYDLTGNRSDTVTINADGWGEFKVNGGSVSIWVPKISTTSQI

SEQ ID NO: 20062 - protein, 484 aa, Synthetic construct
HHNGTNGTMMQYFEWYLPNDGNHWNRLRSDASNLKDKGITAVWIPPAWKGASQNDVGYGAYDLYDLGEFNQKGTVRTKYGTRNQLQAAVTALKSNGIQVYGDVVMNHKGGADATEWVRAVEVNPSNRNQEVSGDYTIEAWTKFDFPGRGNTHSNFKWRWWHFDGVDWDQSRQLQNKIYKFRGDGKGWDWEVDTENGNYDYLMYADYDMDHPEVVNELRNWGVWYTNTLGLDGFRIDAVKHIKYSFTRDWLTHVRNTTGKNMFAVAEFWKNDIGAIENYLSKTNWNHSVFDVPLHYNLYNASRSGGNYDMRQIFNGTVVQRHPTHAVTFVDNHDSQPEEALESFVEEWFKPLAYALTLTRDQGYPSVFYGDYYGIPTHGVPAMKSKIDPILEARQKYAYGKQNDYLDHHNMIGWTREGNTAHPNSGLATIMSDGPGGNKWMYVGRNKAGQVWRDITGNRSGTVTINADGWGNFSVNGGSVSIWVN

SEQ ID NO: 20063 - protein, 484 aa, Synthetic construct
HHNGTNGTMMQYFEWYLPNDGNHWNRLRSDASNLKDKGITAVWIPPAWKGASQNDVGYGAYDLYDLGEFNQKGTVRTKYGTRNQLQAAVTALKSNGIQVYGDVVMNHKGGADATEWVRAVEVNPSNRNQEVSGDYTIEAWTKFDFPGRGNTHSNFKWRWYHFDGVDWDQSRQLQNRIYKFRGDGKEWDWEVDTENGNYDYLMYADYDMDHPEVVNELRNWGVWYTNTLGLDGFRIDAVKHIKYSFTRDWLEHVRNTTGKNMFAVAEFWKNDIGAIENYLSKTNWNHSVFDVPLHYNLYNASRSGGNYDMRQIFNGTVVQRHPGHAVTFVDNHDSQPEEALESFVEEWFKPLAYALTLTRDQGYPSVFYGDYYGIPTHGVPAMKSKIDPILEARQKYAYGKQNDYMDHHNMIGWTREGNTAHPNSGLATIMSDGPGGNKWMYVGRNKAGQVWRDITGNRSGTVTINADGWGNFSVNGGSVSIWVN

SEQ ID NO: 20064 - protein, 484 aa, Synthetic construct
HHNGTNGTMMQYFEWYLPNDGNHWHRLRSDASNLKDKGITAVWIPPAWKGASQNDVGYGAYDLYDLGEFNQKGTVRTKYGTRNQLQAAVTALKSNGIQVYGDVVMNHKGGADATEWVRAVEVNPSNRNQEVSGDYTIEAWTKFDFPGRGNTHSNFKWRWYHFDGVDWDQSRQLQNKIYKFRGDGKEWDWEVDTENGNYDYLMYADIDMDHPEVVNELRNWGVWYTNTLGLDGFRIDAVKHIKYSFTRDWLTHVRNTTGKNMFAVAEFWKNDIGAIENYLSKTNWNHSVFDVPLHYNLYNASRSGGNYDMRQIFNGTVVQRHPTHAVTFVDNHDSQPEEALESFVEEWFKPLAYALTLTRDQGYPSVFYGDYYGIPTHGVPAMKSKIDPILEARQKYAYGKQNDYLDHHNMIGWTREGNTAHPNSGLATIMSDGPGGNKWMYVGRNKAGQVWRDITGNRSGTVTINADGWGNFSVNGGSVSIWVN

SEQ ID NO: 20065 - protein, 484 aa, Synthetic construct
HHNGTNGTMMQYFEWYLPNDGNHWNRLRSDASNLKDKGITAVWIPPAWKGASQNDVGYGAYDLYDLGEFNQKGTVRTKYGTRNQLQAAVTALKSNGIQVYGDVVMNHKGGADATEWVRAVEVNPSNRNQEVSGDYTIEAWTKFDFPGRGNTHSNFKWRWYHFDGVDWDQSRQLQNKIYKFRGDGKGWDWEVDTENGNYDYLMYADYDMDHPEVVNELRNWGVWYTNTLGLDGFRIDAVKHIKYSFTRDWLEHVRNTTGKNMFAVAEFWKNDIGAIENYLSKTNWNHSVFDVPLHYNLYNASRSGGNYDMRQIFNGTVVQRHPTHAVTFVDNHDSQPEEALESFVEEWFKPLAYALTLTRDQGYPSVFYGDYYGIPTHGVPAMKSKIDPILEARQKYAYGKQNDYMDHHNMIGWTREGNTAHPNSGLATIMSDGPGGNKWMYVGRNKAGQVWRDITGNRSGTVTINADGWGNFSVNGGSVSIWVN

SEQ ID NO: 20066 - protein, 484 aa, Synthetic construct
HHNGTNGTMMQYFEWYLPNDGNHWNRLRSDASNLKDKGITAVWIPPAWKGASQNDVGYGAYDLYDLGEFNQKGTVRTKYGTRNQLQAAVTALKSNGIQVYGDVVMNHKGGADATEWVRAVEVNPSNRNQEVSGDYTIEAWTKFDFPGRGNTHSNFKWRWYHFDGVDWDQSRQLQNKIYKFRGDGKGWDWEVDTENGNYDYLMYADYDMDHPEVVNELRNWGVWYTNTLGLDGFRIDAVKHIKYSFTRDWLTHVRNTTGKNMFAVAEFWKNDIGAIRNYLSKTNWNHSVFDVPLHYNLYNASRSGGNYDMRQIFNGTVVQRHPTHAVTFVDNHDSQPEEALESFVEEWFKPLAYALTLTRDQGYPSVFYGDYYGIPTHGVPAMKSKIDPILEARQKYAYGKQNDYLDHHNMIGWTREGNTAHPNSGLATIMSDGPGGNKWMYVGRNKAGQVWRDITGNRSGTVTINADGWGNFSVNGGSVSIWVN

SEQ ID NO: 20067 - protein, 484 aa, Synthetic construct
HHNGTNGTMMQYFEWYLPNDGNHWHRLRSDASNLKDKGITAVWIPPAWKGASQNDVGYGAYDLYDLGEFNQKGTVRTKYGTRNQLQAAVTALKSNGIQVYGDVVMNHKGGADATEWVRAVEVNPSNRNQEVSGDYTIEAWTKFDFPGRGNTHSNFKWRWYHFDGVDWDQSRQLQNRIYKFRGDGKEWDWEVDTENGNYDYLMYADYDMDHPEVVNELRNWGVWYTNTLGLDGFRIDAVKHIKYSFTRDWLTHVRNTTGKNMFAVAEFWKNDIGAIENYLSKTNWNHSVFDVPLHYNLYNASRSGGNYDMRQIFNGTVVQRHPTHAVTFVDNHDSQPEEALESFVEEWFKPLAYALTLTRDQGYPSVFYGDYYGIPTHGVPAMKSKIDPILEARQKYAYGKQNDYLDHHNMIGWTREGNTAHPNSGLATIMSDGPGGNKWMYVGRNKAGQVWRDITGNRSGTVTINADGWGNFSVNGGSVSIWVN

SEQ ID NO: 20068 - protein, 484 aa, Synthetic construct
HHNGTNGTMMQYFEWYLPNDGNHWNRLRSDASNLKDKGITAVWIPPAWKGASQNDVGYGAYDLYDLGEFNQKGTVRTKYGTRNQLQAAVTALKSNGIQVYGDVVMNHKGGADATEWVRAVEVNPSNRNQEVSGDYTIEAWTKFDFPGRGNTHSNFKWRWYHFDGVDWDQSRQLQNKIYKFRGDGKEWDWEVDTENGNYDYLMYADYDMDHPEVVNELRNWGVWYTNTLGLDGFRIDAVKHIKYSFTRDWLTHVRNTTGKNMFAVAEFWKNDIGAIENYLSKTNWNHSVFDVPLHYNLYNASRSGGNYDMRQIFNGTVVQRHPTHAVTFVDNHDSQPEEALESFVEEWFKPLAYALTLTRDQGYPSVFYGDYYGIPTHGVPAMKSKIDPILEARQKYAYGKQNDYLDHHNMIGWTREGNTAHPNSGLATIMSDGPGGNKWMYVGRNKAGQVWRDITGNRSGTVTINADGWGNFSVNGGSVSIWVN

SEQ ID NO: 20069 - protein, 484 aa, Synthetic construct
HHNGTNGTMMQYFEWYLPNDGNHWNRLRSDASNLKDKGITAVWIPPAWKGASQNDVGYGAYDLYDLGEFNQKGTVRTKYGTRNQLQAAVTALKSNGIQVYGDVVMNHKGGADATEWVRAVEVNPSNRNQEVSGDYTIEAWTKFDFPGRGNTHSNFKWRWYHFDGVDWDQSRQLQNRIYKFRGDGKEWDWEVDEENGNYDYLMYADYDMDHPEVVNELRNWGVWYTNTLGLDGFRIDAVKHIKYSFTRDWLEHVRNTTGKNMFAVAEFWKNDIGAIENYLSKTNWNHSVFDVPLHYNLYNASRSGGNYDMRQIFNGTVVQRHPTHAVTFVDNHDSQPEEALESFVEEWFKPLAYALTLTRDQGYPSVFYGDYYGIPTHGVPAMKSKIDPILEARQKYAYGKQNDYLDHHNMIGWTREGNTAHPNSGLATIMSDGPGGNKWMYVGRNKAGQVWRDITGNRSGTVTINADGWGNFSVNGGSVSIWVN

SEQ ID NO: 20070 - protein, 484 aa, Synthetic construct
HHNGTNGTMMQYFEWYLPNDGNHWNRLRSDASNLKDKGITAVWIPPAWKGASQNDVGYGAYDLYDLGEFNQKGTVRTKYGTRNQLQAAVTALKSNGIQVYGDVVMNHKGGADATEWVRAVEVNPSNRNQEVSGDYTIEAWTKFDFPGRGNTHSNFKWRWWHFDGVDWDQSRQLQNRIYKFRGDGKEWDWEVDTENGNYDYLMYADIDMDHPEVVNELRNWGVWYTNTLGLDGFRIDAVKHIKYSFTRDWLTHVRNTTGKNMFAVAEFWKNDIGAIENYLSKTNWNHSVFDVPLHYNLYNASRSGGNYDMRQIFNGTVVQRHPGHAVTFVDNHDSQPEEALESFVEEWFKPLAYALTLTRDQGYPSVFYGDYYGIPTHGVPAMKSKIDPILEARQKYAYGKQNDYMDHHNMIGWTREGNTAHPNSGLATIMSDGPGGNKWMYVGRNKAGQVWRDITGNRSGTVTINADGWGNFSVNGGSVSIWVN

SEQ ID NO: 20071 - protein, 484 aa, Synthetic construct
HHNGTNGTMMQYFEWYLPNDGNHWHRLRSDASNLKDKGITAVWIPPAWKGASQNDVGYGAYDLYDLGEFNQKGTVRTKYGTRNQLQAAVTALKSNGIQVYGDVVMNHKGGADATEWVRAVEVNPSNRNQEVSGDYTIEAWTKFDFPGRGNTHSNFKWRWYHFDGVDWDQSRQLQNRIYKFRGDGKEWDWEVDTENGNYDYLMYADIDMDHPEVVNELRNWGVWYTNTLGLDGFRIDAVKHIKYSFTRDWLTHVRNTTGKNMFAVAEFWKNDIGAIENYLSKTNWNHSVFDVPLHYNLYNASRSGGNYDMRQIFNGTVVQRHPTHAVTFVDNHDSQPEEALESFVEEWFKPLAYALTLTRDQGYPSVFYGDYYGIPTHGVPAMKSKIDPILEARQKYAYGKQNDYMDHHNMIGWTREGNTAHPNSGLATIMSDGPGGNKWMYVGRNKAGQVWRDITGNRSGTVTINADGWGNFSVNGGSVSIWVN

SEQ ID NO: 20072 - protein, 484 aa, Synthetic construct
HHNGTNGTMMQYFEWYLPNDGNHWNRLRSDASNLKDKGITAVWIPPAWKGASQNDVGYGAYDLYDLGEFNQKGTVRTKYGTRNQLQAAVTALKSNGIQVYGDVVMNHKGGADATEWVRAVEVNPSNRNQEVSGDYTIEAWTKFDFPGRGNTHSNFKWRWYHFDGVDWDQSRQLQNRIYKFRGDGKEWDWEVDTENGNYDYLMYADIDMDHPEVVNELRNWGVWYTNTLGLDGFRIDAVKHIKYSFTRDWLTHVRNTTGKNMFAVAEFWKNDIGAIENYLSKTNWNHSVFDVPLHYNLYNASRSGGNYDMRQIFNGTVVQRHPTHAVTFVDNHDSQPEEALESFVEEWFKPLAYALTLTRDQGYPSVFYGDYYGIPTHGVPAMKSKIDPILEARQKYAYGKQNDYLDHHNMIGWTREGNTAHPNSGLATIMSDGPGGNKWMYVGRNKAGQVWRDITGNRSGEVTINADGWGEFSVNGGSVSIWVN

SEQ ID NO: 20073 - protein, 484 aa, Synthetic construct
HHNGTNGTMMQYFEWYLPNDGNHWNRLRSDASNLKDKGITAVWIPPAWKGASQNDVGYGAYDLYDLGEFNQKGTVRTKYGTRNQLQAAVTALKSNGIQVYGDVVMNHKGGADATEWVRAVEVNPSNRNQEVSGDYTIEAWTKFDFPGRGNTHSNFKWRWYHFDGVDWDQSRQLQNKIYKFRGDGKEWDWEVDTENGNYDYLMYADIDMDHPEVVNELRNWGVWYTNTLGLDGFRIDAVKHIKYSFTRDWLEHVRNTTGKNMFAVAEFWKNDIGAIENYLSKTNWNHSVFDVPLHYNLYNASRSGGNYDMRQIFNGTVVQRHPTHAVTFVDNHDSQPEEALESFVEEWFKPLAYALTLTRDQGYPSVFYGDYYGIPTHGVPAMKSKIDPILEARQKYAYGKQNDYMDHHNMIGWTREGNTAHPNSGLATIMSDGPGGNKWMYVGRNKAGQVWRDITGNRSGTVTINADGWGNFSVNGGSVSIWVN

SEQ ID NO: 20074 - protein, 484 aa, Synthetic construct
HHNGTNGTMMQYFEWYLPNDGNHWNRLRSDASNLKDKGITAVWIPPAWKGASQNDVGYGAYDLYDLGEFNQKGTVRTKYGTRNQLQAAVTALKSNGIQVYGDVVMNHKGGADATEWVRAVEVNPSNRNQEVSGDYTIEAWTKFDFPGRGNTHSNFKWRWYHFDGVDWDQSRQLQNRIYKFRGDGKEWDWEVDTENGNYDYLMYADYDMDHPEVVNELRNWGVWYTNTLGLDGFRIDAVKHIKYSFTRDWLTHVRNTTGKNMFAVAEFWKNDIGAIRNYLSKTNWNHSVFDVPLHYNLYNASRSGGNYDMRQIFNGTVVQRHPTHAVTFVDNHDSQPEEALESFVEEWFKPLAYALTLTRDQGYPSVFYGDYYGIPTHGVPAMKSKIDPILEARQKYAYGKQNDYLDHHNMIGWTREGNTAHPNSGLATIMSDGPGGNKWMYVGRNKAGQVWRDITGNRSGTVTINADGWGNFSVNGGSVSIWVN

SEQ ID NO: 20075 - protein, 484 aa, Synthetic construct
HHNGTNGTMMQYFEWYLPNDGNHWNRLRSDASNLKDKGITAVWIPPAWKGASQNDVGYGAYDLYDLGEFNQKGTVRTKYGTRNQLQRAVTALKSNGIQVYGDVVMNHKGGADATEWVRAVEVNPSNRNQEVSGDYTIEAWTKFDFPGRGNTHSNFKWRWYHFDGVDWDQSRQLQNRIYKFRGDGKEWDWEVDTENGNYDYLMYADIDMDHPEVVNELRNWGVWYTNTLGLDGFRIDAVKHIKYSFTRDWLTHVRNTTGKNMFAVAEFWKNDIGAIENYLSKTNWNHSVFDVPLHYNLYNASRSGGNYDMRQIFNGTVVQRHPTHAVTFVDNHDSQPEEALESFVEEWFKPLAYALTLTRDQGYPSVFYGDYYGIPTHGVPAMKSKIDPILEARQKYAYGKQNDYLDHHNMIGWTREGNTAHPNSGLATIMSDGPGGNKWMYVGRNKAGQRWRDITGNRSGTVTINADGWGNFSVNGGSVSIWVN

SEQ ID NO: 20076 - protein, 484 aa, Synthetic construct
HHNQTNGTMMQYFEWYLPNDGNHWNRLRSDASNLKDKGITAVWIPPAWKGASQNDVGYGAYDLYDLGEFNQKGTVRTKYGTRNQLQAAVTALKSNGIQVYGDVVMNHKGGADATEWVRAVEVNPSNRNQEVSGDYTIEAWTKFDFPGRGNTHSNFKWRWYHFDGVDWDQSRQLQNRIYKFRGDGKEWDWEVDTENGNYDYLMYADYDMDHPEVVNELRNWGVWYTNTLGLDGFRIDAVKHIKYSFTRDWLTHVRNTTGKNMFAVAEFWKNDIGAIENYLSKTNWNHSVFDVPLHYNLYNASRSGGNYDMRQIFNGTVVQRHPTHAVTFVDNHDSQPEEALESFVEEWFKPLAYALTLTRDQGYPSVFYGDYYGIPTHGVPAMKSKIDPILEARQKYAYGKQNDYLDHHNMIGWTREGNTAHPNSGLATIMSDGPGGNKWMYVGRNKAGQVWRDITGNRSGTVTINADGWGNFSVNGGSVSIWVN

SEQ ID NO: 20077 - protein, 484 aa, Synthetic construct
HHNGTNGTMMQYFEWYLPNDGNHWNRLRSDASNLKDKGITAVWIPPAWKGASQNDVGYGAYDLYDLGEFNQKGTVRTKYGTRNQLQAAVTALKSNGIQVYGDVVMNHKGGADATEWVRAVEVNPSNRNQEVSGDYTIEAWTKFDFPGRGNTHSNFKWRWYHFDGVDWDQSRQLQNRIYKFRGDGKEWDWEVDTENGNYDYLMYADIDMDHPEVVNELRNWGVWYTDTLGLDGFRIDAVKHIKYSFTRDWLTHVRNTTGKNMFAVAEFWKNDIGAIENYLSKTNWNHSVFDVPLHYNLYNASRSGGNYDMRQIFEGTVVQRHPTHAVTFVDNHDSQPEEALESFVEEWFKPLAYALTLTRDQGYPSVFYGDYYGIPTHGVPAMKSKIDPILEARQKYAYGKQNDYLDHHNMIGWTREGNTAHPNSGLATIMSDGPGGNKWMYVGRNKAGQVWRDITGNRSGTVTINADGWGNFSVNGGSVSIWVN

SEQ ID NO: 20078 - protein, 484 aa, Synthetic construct
HHNGLNGTMMQYFEWYLPNDGNHWNRLRSDASNLKDKGITAVWIPPAWKGASQNDVGYGAYDLYDLGEFNQKGTVRTKYGTRNQLQAAVTALKSNGIQVYGDVVMNHKGGADATEWVRAVEVNPSNRNQEVSGDYTIEAWTKFDFPGRGNTHSNFKWRWYHFDGVDWDQSRQLQNRIYKFRGDGKGWDWEVDTENGNYDYLMYADIDMDHPEVVNELKNWGVWYSNTLGLDGFRIDAVKHIKYSFTRDWLTHVRNTTGKNMFAVAEFWKNDIGAIENYLSKTNWNHSVFDVPLHYNLYNASRSGGNYDMRQIFNGTVVQRHPTHAVTFVDNHDSQPEEALESFVEEWFKPLAYALTLTRDQGYPSVFYGDYYGIPTHGVPAMKSKIDPILEARQKYAYGKQNDYLDHHNMIGWTREGNTAHPNSGLATIMSDGPGGNKWMYVGRNKAGQVWRDITGNRSGTVTINADGWGNFSVNGGSVSIWVN

SEQ ID NO: 20079 - protein, 484 aa, Synthetic construct
HHNGTNGTMMQYFEWYLPNDGNHWNRLRSDASNLKDKGITAVWIPPAWKGASQNDVGYGAYDLYDLGEFNQKGTVRTKYGTRNQLQAAVTALKSNGIQVYGDVVMNHKGGADATEWVRAVEVNPSNRNQEVSGDYTIEAWTKFDFPGRGNTHSNFKWRWYHFDGVDWDQSRQLQNRIYKFRGDGKEWDWEVDTENGNYDYLMYADYDMDHPEVVNELRNWGVWYTNTLGLDGFRIDAVKHIKYSFTRDWLEHVRNTTGKNMFAVAEFWKNDIGAIRNYLSKTNWNHSVFDVPLHYNLYNASRSGGNYDMRQIFNGTVVQRHPTHAVTFVDNHDSQPEEALESFVEEWFKPLAYALTLTRDQGYPSVFYGDYYGIPTHGVPAMKSKIDPILEARQKYAYGKQNDYLDHHNMIGWTREGNTAHPNSGLATIMSDGPGGNKWMYVGRNKAGQVWRDITGNRSGTVTINADGWGNFSVNGGSVSIWVN

SEQ ID NO: 20080 - protein, 484 aa, Synthetic construct
HHNGTNGTMMQYFEWYLPNDGNHWNRLRSDASNLKDKGITAVWIPPAWKGASQNDVGYGAYDLYDLGEFNQKGTVRTKYGTRNQLQAAVTALKSNGIQVYGDVVMNHKGGADATEWVRAVEVNPSNRNQEVSGDYTIEAWTKFDFPGRGNTHSNFKWRWYHFDGVDWDQSRQLQNRIYKFRGDGKEWDWEVDTENGNYDYLMYADYDMDHPEVVNELRNWGVWYTNTLGLDGFRIDAVKHIKYSFTRDWLEHVRNTTGKNMFAVAEFWKNDIGAIENYLSKTNWNHSVFDVPLHYNLYNASRSGGNYDMRQIFNGTVVQRHPTHAVTFVDNHDSQPEEALESFVEEWFKPLAYALTLTRDQGYPSVFYGDYYGIPTHGVPAMKSKIDPILEARQKYAYGKQNDYMDHHNMIGWTREGNTAHPNSGLATIMSDGPGGNKWMYVGRNKAGQVWRDITGNRSGTVTINADGWGNFSVNGGSVSIWVN

SEQ ID NO: 20081 - protein, 484 aa, Synthetic construct
HHNGTNGTMMQYFEWYLPNDGNHWHRLRSDASNLKDKGITAVWIPPAWKGASQNDVGYGAYDLYDLGEFNQKGTVRTKYGTRNQLQAAVTALKSNGIQVYGDVVMNHKGGADATEWVRAVEVNPSNRNQEVSGDYTIEAWTKFDFPGRGNTHSNFKWRWYHFDGVDWDQSRQLQNKIYKFRGDGKGWDWEVDTENGNYDYLMYADYDMDHPEVVNELRNWGVWYTNTLGLDGFRIDAVKHIKYSFTRDWLTHVRNTTGKNMFAVAEFWKNDIGAIENYLSKTNWNHSVFDVPLHYNLYNASRSGGNYDMRQIFNGTVVQRHPTHAVTFVDNHDSQPEEALESFVEEWFKPLAYALTLTRDQGYPSVFYGDYYGIPTHGVPAMKSKIDPILEARQKYAYGKQNDYLDHHNMIGWTREGNTAHPNSGLATIMSDGPGGNKWMYVGRNKAGQVWRDITGNRSGTVTINADGWGNFSVNGGSVSIWVN

SEQ ID NO: 20082 - protein, 484 aa, Synthetic construct
HHNGTNGTMMQYFEWYLPNDGNHWHRLRSDASNLKDKGITAVWIPPAWKGASQNDVGYGAYDLYDLGEFNQKGTVRTKYGTRNQLQAAVTALKSNGIQVYGDVVMNHKGGADATEWVRAVEVNPSNRNQEVSGDYTIEAWTKFDFPGRGNTHSNFKWRWYHFDGVDWDQSRQLQNKIYKFRGDGKGWDWEVDTENGNYDYLMYADYDMDHPEVVNELRNWGVWYTNTLGLDGFRIDAVKHIKYSFTRDWLEHVRNTTGKNMFAVAEFWKNDIGAIENYLSKTNWNHSVFDVPLHYNLYNASRSGGNYDMRQIFNGTVVQRHPTHAVTFVDNHDSQPEEALESFVEEWFKPLAYALTLTRDQGYPSVFYGDYYGIPTHGVPAMKSKIDPILEARQKYAYGKQNDYLDHHNMIGWTREGNTAHPNSGLATIMSDGPGGNKWMYVGRNKAGQVWRDITGNRSGTVTINADGWGNFSVNGGSVSIWVN

SEQ ID NO: 20083 - protein, 484 aa, Synthetic construct
HHNQTNGTMMQYFEWYLPNDGNHWNRLRSDASNLKDKGITAVWIPPAWKGASQNDVGYGAYDLYDLGEFNQKGTVRTKYGTRNQLQAAVTALKSNGIQVYGDVVMNHKGGADATEWVRAVEVNPSNRNQEVSGDYTIEAWTKFDFPGRGNTHSNFKWRWYHFDGVDWDQSRQLQNKIYKFRGDGKGWDWEVDTENGNYDYLMYADYDMDHPEVVNELRNWGVWYTNTLGLDGFRIDAVKHIKYSFTRDWLTHVRNTTGKNMFAVAEFWKNDIGAIENYLSKTNWNHSVFDVPLHYNLYNASRSGGNYDMRQIFNGTVVQRHPTHAVTFVDNHDSQPEEALESFVEEWFKPLAYALTLTRDQGYPSVFYGDYYGIPTHGVPAMKSKIDPILEARQKYAYGKQNDYLDHHNMIGWTREGNTAHPNSGLATIMSDGPGGNKWMYVGRNKAGQVWRDITGNRSGTVTINADGWGNFSVNGGSVSIWVN

SEQ ID NO: 20084 - protein, 484 aa, Synthetic construct
HHNQTNGTMMQYFEWYLPNDGNHWNRLRSDASNLKDKGITAVWIPPAWKGASQNDVGYGAYDLYDLGEFNQKGTVRTKYGTRNQLQAAVTALKSNGIQVYGDVVMNHKGGADATEWVRAVEVNPSNRNQEVSGDYTIEAWTKFDFPGRGNTHSNFKWRWYHFDGVDWDQSRQLQNRIYKFRGDGKEWDWEVDTENGNYDYLMYADIDMDHPEVVNELRNWGVWYTNTLGLDGFRIDAVKHIKYSFTRDWLTHVRNTTGKNMFAVAEFWKNDIGAIENYLSKTNWNHSVFDVPLHYNLYNASRSGGNYDMRQIFNGTVVQRHPTHAVTFVDNHDSQPEEALESFVEEWFKPLAYALTLTRDQGYPSVFYGDYYGIPTHGVPAMKSKIDPILEARQKYAYGKQNDYMDHHNMIGWTREGNTAHPNSGLATIMSDGPGGNKWMYVGRNKAGQVWRDITGNRSGTVTINADGWGNFSVNGGSVSIWVN

SEQ ID NO: 20085 - protein, 484 aa, Synthetic construct
HHNGTNGTMMQYFEWYLPNDGNHWNRLRSDASNLKDKGITAVWIPPAWKGASQNDVGYGAYDLYDLGEFNQKGTVRTKYGTRNQLQAAVTALKSNGIQVYGDVVMNHKGGADATEWVRAVEVNPSNRNQEVSGDYTIEAWTKFDFPGRGNTHSNFKWRWYHFDGVDWDQSRQLQNRIYKFRGDGKEWDWEVDTENGNYDYLMYADIDMDHPEVVNELRNWGVWYTNTLGLDGFRIDAVKHIKYSFTRDWLTHVRNTTGKNMFAVAEFWKNDIGAIENYLSKTNWNHSVFDVPLHYNLYNASRSGGNYDMRKIFKGTVVQRHPTHAVTFVDNHDSQPEEALESFVEEWFKPLAYALTLTRDQGYPSVFYGDYYGIPTHGVPAMKSKIDPILEARQKYAYGKQNDYLDHHNMIGWTREGNTAHPNSGLATIMSDGPGGNKWMYVGRNKAGQVWRDITGNRSGTVTINADGWGNFSVNGGSVSIWVN

SEQ ID NO: 20086 - protein, 484 aa, Synthetic construct
HHNGTNGTMMQYFEWYLPNDGNHWNRLRSDASNLKDKGITAVWIPPAWKGASQNDVGYGAYDLYDLGEFNQKGTVRTKYGTRNQLQAAVTALKSNGIQVYGDVVMNHKGGADATEWVRAVEVNPSNRNQEVSGDYTIEAWTKFDFPGRGNTHSNFKWRWYHFDGVDWDQSRQLQNKIYKFRGDGKGWDWEVDTENGNYDYLMYADYDMDHPEVVNELRNWGVWYTNTLGLDGFRIDAVKHIKYSFTRDWLTHVRNTTGKNMFAVAEFWKNDIGAIENYLSKTNWNHSVFDVPLHYNLYNASRSGGNYDMRQIFNGTVVQRHPTHAVTFVDNHDSQPEEALESFVEEWFKPLAYALTLTRDQGYPSVFYGDYYGIPTHGVPAMKSKIDPILEARQKYAYGKQNDYMDHHNMIGWTREGNTAHPNSGLATIMSDGPGGNKWMYVGRNKAGQVWRDITGNRSGTVTINADGWGNFSVNGGSVSIWVN

SEQ ID NO: 20087 - protein, 484 aa, Synthetic construct
HHNQTNGTMMQYFEWYLPNDGNHWNRLRSDASNLKDKGITAVWIPPAWKGASQNDVGYGAYDLYDLGEFNQKGTVRTKYGTRNQLQAAVTALKSNGIQVYGDVVMNHKGGADATEWVRAVEVNPSNRNQEVSGDYTIEAWTKFDFPGRGNTHSNFKWRWYHFDGVDWDQSRQLQNRIYKFRGDGKEWDWEVDTENGNYDYLMYADIDMDHPEVVNELRNWGVWYTNTLGLDGFRIDAVKHIKYSFTRDWLTHVRNTTGKNMFAVAEFWKNDIGAIRNYLSKTNWNHSVFDVPLHYNLYNASRSGGNYDMRQIFNGTVVQRHPTHAVTFVDNHDSQPEEALESFVEEWFKPLAYALTLTRDQGYPSVFYGDYYGIPTHGVPAMKSKIDPILEARQKYAYGKQNDYLDHHNMIGWTREGNTAHPNSGLATIMSDGPGGNKWMYVGRNKAGQVWRDITGNRSGTVTINADGWGNFSVNGGSVSIWVN

SEQ ID NO: 20088 - protein, 484 aa, Synthetic construct
HHNGTNGTMMQYFEWYLPNDGNHWHRLRSDASNLKDKGITAVWIPPAWKGASQNDVGYGAYDLYDLGEFNQKGTVRTKYGTRNQLQAAVTALKSNGIQVYGDVVMNHKGGADATEWVRAVEVNPSNRNQEVSGDYTIEAWTKFDFPGRGNTHSNFKWRWYHFDGVDWDQSRQLQNRIYKFRGDGKEWDWEVDTENGNYDYLMYADIDMDHPEVVNELRNWGVWYTNTLGLDGFRIDAVKHIKYSFTRDWLEHVRNTTGKNMFAVAEFWKNDIGAIRNYLSKTNWNHSVFDVPLHYNLYNASRSGGNYDMRQIFNGTVVQRHPTHAVTFVDNHDSQPEEALESFVEEWFKPLAYALTLTRDQGYPSVFYGDYYGIPTHGVPAMKSKIDPILEARQKYAYGKQNDYLDHHNMIGWTREGNTAHPNSGLATIMSDGPGGNKWMYVGRNKAGQVWRDITGNRSGTVTINADGWGNFSVNGGSVSIWVN

SEQ ID NO: 20089 - protein, 484 aa, Synthetic construct
HHNGTNGTMMQYFEWYLPNDGNHWNRLRSDASNLKDKGITAVWIPPAWKGASQNDVGYGAYDLYDLGEFNQKGTVRTKYGTRNQLQAAVTALKSNGIQVYGDVVMNHKGGADATEWVRAVEVNPSNRNQEVSGDYTIEAWTKFDFPGRGNTHSNFKWRWWHFDGVDWDQSRQLQNRIYKFRGDGKEWDWEVDTENGNYDYLMYADYDMDHPEVVNELRNWGVWYTNTLGLDGFRIDAVKHIKYSFTRDWLEHVRNTTGKNMFAVAEFWKNDIGAIENYLSKTNWNHSVFDVPLHYNLYNASRSGGNYDMRQIFNGTVVQRHPTHAVTFVDNHDSQPEEALESFVEEWFKPLAYALTLTRDQGYPSVFYGDYYGIPTHGVPAMKSKIDPILEARQKYAYGKQNDYLDHHNMIGWTREGNTAHPNSGLATIMSDGPGGNKWMYVGRNKAGQVWRDITGNRSGTVTINADGWGNFSVNGGSVSIWVN

SEQ ID NO: 20090 - protein, 484 aa, Synthetic construct
HHNGTNGTMMQYFEWYLPNDGNHWNRLRSDASNLKDKGITAVWIPPAWKGASQNDVGYGAYDLYDLGEFNQKGTVRTKYGTRNQLQAAVTALKSNGIQVYGDVVMNHKGGADATEWVRAVEVNPSNRNQEVSGDYTIEAWTKFDFPGRGNTHSNFKWRWWHFDGVDWDQSRQLQNRIYKFRGDGKEWDWEVDTENGNYDYLMYADIDMDHPEVVNELRNWGVWYTNTLGLDGFRIDAVKHIKYSFTRDWLEHVRNTTGKNMFAVAEFWKNDIGAIRNYLSKTNWNHSVFDVPLHYNLYNASRSGGNYDMRQIFNGTVVQRHPTHAVTFVDNHDSQPEEALESFVEEWFKPLAYALTLTRDQGYPSVFYGDYYGIPTHGVPAMKSKIDPILEARQKYAYGKQNDYLDHHNMIGWTREGNTAHPNSGLATIMSDGPGGNKWMYVGRNKAGQVWRDITGNRSGTVTINADGWGNFSVNGGSVSIWVN

SEQ ID NO: 20091 - protein, 484 aa, Synthetic construct
HHNGTNGTMMQYFEWYLPNDGNHWNRLRSDASNLKDKGITAVWIPPAWKGASQNDVGYGAYDLYDLGEFNQKGTVRTKYGTRNQLQAAVTALKSNGIQVYGDVVMNHKGGADATEWVRAVEVNPSNRNQEVSGDYTIEAWTKFDFPGRGNTHSNFKWRWYHFDGVDWDQSRQLQNRIYKFRGDGKEWDWEVDTENGNYDYLMYADIDMDHPEVVNELRNWGVWYTNTLGLDGFRIDAVKHIKYSFTRDWLTHVRNTTGKNMFAVAEFWKNDIGAIENYLSKTNWNHSVFDVPLHYNLYNASRSGGNYDMRQIFNKTVVQRHPTHAVTFVDNHDSQPEEALESFVEEWFKPLAYALTLTRDQGYPSVFYGDYYGIPTHGVPAMKSKIDPILEARQKYAYGKQNDYLDHHNMIGWTREGNTEHPNSGLATIMSDGPGGNKWMYVGRNKAGQVWRDITGNRSGTVTINADGWGNFSVNGGSVSIWVN

SEQ ID NO: 20092 - protein, 484 aa, Synthetic construct
HHNGTNGTMMQYFEWYLPNDGNHWNRLRSDASNLKDKGITAVWIPPAWKGASQNDVGYGAYDLYDLGEFNQKGTVRTKYGTRNQLQAAVTALKSNGIQVYGDVVMNHKGGADATEWVRAVEVNPSNRNQEVSGDYTIEAWTKFDFPGRGNTHSNFKWRWDHFDGVDWDQSRQLQNRIYKFRGDGKEWDWEVDTENGNYDYLMYADIDMDHPEVVNELRNWGVWYTNTLGLDGFRIDAVKHIKYSFTRDWLTHVRNTTGKNMFAVAEFWKNDIGAIENYLSKTNWNHSVFDVPLHYNLYNASRSGGNYDMRQIFNGTVVQRHPTHAVTFVDNHDSQPEEALESFVEEWFKPLAYALTLTRDQGYPSVFYGDYYGIPTHGVPAMKSKIDPILEARQKYAYGKQNDYLDHHNMIGWTREGNTEHPNSGLATIMSDGPGGNKWMYVGRNKAGQVWRDITGNRSGTVTINADGWGNFSVNGGSVSIWVN

SEQ ID NO: 20093 - protein, 484 aa, Synthetic construct
HHNGTNGTMMQYFEWYLPNDGNHWNRLRSDASNLKDKGITAVWIPPAWKGASQNDVGYGAYDLYDLGEFNQKGTVRTKYGTRNQLQAAVTALKSNGIQVYGDVVMNHKGGADATEWVRAVEVNPSNRNQEVSGDYTIEAWTKFDFPGRGNTHSNFKWRWWHFDGVDWDQSRQLQNRIYKFRGDGKEWDWEVDTENGNYDYLMYADIDMDHPEVVNELRNWGVWYTNTLGLDGFRIDAVKHIKYSFTRDWLTHVRNTTGKNMFAVAEFWKNDIGAIENYLSKTNWNHSVFDVPLHYNLYNASRSGGNYDMRQIFNGTVVQRHPTHAVTFVDNHDSQPEEALESFVEEWFKPLAYALTLTRDQGYPSVFYGDYYGIPTHGVPAMKSKIDPILEARQKYAYGKQNDYMDHHNMIGWTREGNTAHPNSGLATIMSDGPGGNKWMYVGRNKAGQVWRDITGNRSGTVTINADGWGNFSVNGGSVSIWVN

SEQ ID NO: 20094 - protein, 484 aa, Synthetic construct
HHNGTNGTMMQYFEWYLPNDGNHWNRLRSDASNLKDKGITAVWIPPAWKGASQNDVGYGAYDLYDLGEFNQKGTVRTKYGTREQLQAAVTALKSNGIQVYGDVVMNHKGGADATERVRAVEVNPSNRNQEVSGDYTIEAWTKFDFPGRGNTHSNFKWYWYHFDGVDWDQSRQLQNRIYKFEGDGKGWDWEVDTENGNYDYLMYADIDMDHPEVVNELRNWGVWYTNTLGLDGFRIDAVKHIKYSFTRDWLTHVRNTTGKNMFAVAEFWKNDIGAIENYLSKTNWNHSVFDVPLHYNLYNASRSGGNYDMRQIFNGTVVQRHPTHAVTFVDNHDSQPEEALESFVEEWFKPLAYALTLTRDQGYPSVFYGDYYGIPTHGVPAMKSKIDPILEARQKYAYGKQNDYLDHHNMIGWTREGNTAHPNSGLATIMSDGPGGNKWMYVGRNKAGQVWRDITGNRSGTVTINADGWGNFSVNGGSVSIWVN

SEQ ID NO: 20095 - protein, 484 aa, Synthetic construct
HHNGTNGTMMQYFEWYLPNDGNHWNRLRSDASNLKDKGITAVWIPPAWKGASQNDVGYGAYDLYDLGEFNQKGTVRTKYGTRNQLQAAVTALKSNGIQVYGDVVMNHKGGADATEWVRAVEVNPSNRNQEVSGDYTIEAWTKFDFPGRGNTHSNFKWRWYHFDGVDWDQSRQLQNRIYKFRGDGKEWDWEVDTENGNYDYLMYADYDMDHPEVVNELRNWGVWYTNTLGLDGFRIDAVKHIKYSFTRDWLTHVRNTTGKNMFAVAEFWKNDIGAIENYLSKTNWNHSVFDVPLHYNLYNASRSGGNYDMRQIFNGTVVQRHPTHAVTFVDNHDSQPEEALESFVEEWFKPLAYALTLTRDQGYPSVFYGDYYGIPTHGVPAMKSKIDPILEARQKYAYGKQNDYMDHHNMIGWTREGNTAHPNSGLATIMSDGPGGNKWMYVGRNKAGQVWRDITGNRSGTVTINADGWGNFSVNGGSVSIWVN

SEQ ID NO: 20096 - protein, 484 aa, Synthetic construct
HHNGTNGTMMQYFEWYLPNDGNHWNRLRSDASNLKDKGITAVWIPPAWKGASQNDVGYGAYDLYDLGEFNQKGTVRTKYGTRNQLQAAVTALKSNGIQVYGDVVMNHKGGADATEWVRAVEVNPSNRNQEVSGDYTIEAWTKFDFPGRGNTHSNFKWRWYHFDGVDWDQSRQLQNRIYKFRGDGKEWDWEVDTENGNYDYLMYADYDMDHPEVVNELRNWGVWYTNTLGLDGFRIDAVKHIKYSFTRDWLTHVRNTTGKNMFAVAEFWKNDIGAIENYLSKTNWNHSVFDVPLHYNLYNASRSGGNYDMRQIFNGTVVQRHPGHAVTFVDNHDSQPEEALESFVEEWFKPLAYALTLTRDQGYPSVFYGDYYGIPTHGVPAMKSKIDPILEARQKYAYGKQNDYMDHHNMIGWTREGNTAHPNSGLATIMSDGPGGNKWMYVGRNKAGQVWRDITGNRSGTVTINADGWGNFSVNGGSVSIWVN

SEQ ID NO: 20097 - protein, 484 aa, Synthetic construct
HHNQTNGTMMQYFEWYLPNDGNHWNRLRSDASNLKDKGITAVWIPPAWKGASQNDVGYGAYDLYDLGEFNQKGTVRTKYGTRNQLQAAVTALKSNGIQVYGDVVMNHKGGADATEWVRAVEVNPSNRNQEVSGDYTIEAWTKFDFPGRGNTHSNFKWRWYHFDGVDWDQSRQLQNKIYKFRGDGKGWDWEVDTENGNYDYLMYADYDMDHPEVVNELRNWGVWYTNTLGLDGFRIDAVKHIKYSFTRDWLEHVRNTTGKNMFAVAEFWKNDIGAIENYLSKTNWNHSVFDVPLHYNLYNASRSGGNYDMRQIFNGTVVQRHPAHAVTFVDNHDSQPEEALESFVEEWFKPLAYALTLTRDQGYPSVFYGDYYGIPTHGVPAMKSKIDPILEARQKYAYGKQNDYLDHHNMIGWTREGNTAHPNSGLATIMSDGPGGNKWMYVGRNKAGQVWRDITGNRSGTVTINADGWGNFSVNGGSVSIWVN

SEQ ID NO: 20098 - protein, 484 aa, Synthetic construct
HHNGTNGTMMQYFEWYLPNDGNHWNRLRSDASNLKDKGITAVWIPPAWKGASQNDVGYGAYDLYDLGEFNQKGTVRTKYGTRNQLQAAVTALKSNGIQVYGDVVMNHKGGADATEWVRAVEVNPSNRNQEVSGDYTIEAWTKFDFPGRGNTHSNFKWRWYHFDGVDWDQSRQLQNKIYKFRGDGKEWDWEVDTENGNYDYLMYADIDMDHPEVVNELRNWGVWYTNTLGLDGFRIDAVKHIKYSFTRDWLTHVRNTTGKNMFAVAEFWKNDIGAIENYLSKTNWNHSVFDVPLHYNLYNASRSGGNYDMRQIFNGTVVQRHPTHAVTFVDNHDSQPEEALESFVEEWFKPLAYALTLTRDQGYPSVFYGDYYGIPTHGVPAMKSKIDPILEARQKYAYGKQNDYMDHHNMIGWTREGNTAHPNSGLATIMSDGPGGNKWMYVGRNKAGQVWRDITGNRSGTVTINADGWGNFSVNGGSVSIWVN

SEQ ID NO: 20099 - protein, 484 aa, Synthetic construct
AAAPFNGTMMQYFEWYLPDDGTLWTKVANEANNLSSLGITALWLPPAYKGTSRSDVGYGVYDLYDLGEFNQKGAVRTKYGTKAQYLQAIQAAHAAGMQVYADVVFNHKAGADGTEFVDAVEVNPSNRNQETSGTYQIQAWTKFDFPGRGNTYSSFKWRWYHFDGTDWDESRKLNRVYKFRGTGKAWDWEVDTENGNYDYLMFADLDMDHPEVVTELKNWGKWYVNTTNIDGFRLDAVKHIKFSFFPDWLSYVRSQTGKPLFTVGEYWSYDINKLHNYIMKTNGTMSLFDAPLHNKFYTASKSGGTFDMRTLMTNTLMKDQPTLAVTFVDNHDTEPGQALQSWVDPWFKPLAYAFILTRQEGYPCVFYGDYYGIPQYNIPSLKSKIDPLLIARRDYAYGTQHDYLDHSDIIGWTREGVTEKPGSGLAALITDGPGGSKWMYVGKQHAGKVFYDLTGNRSDTVTINSDGWGEFKVNGGSVSVWVPR

SEQ ID NO: 20100 - protein, 481 aa, Bacillus sp.
HNGTNATMMQYFEWHLPNDGNHWNRLRDDASNLRNRGITAIWIPPAWKGTSQNDVGYGAYDLYDLGEFNQKGTVRTKYGTRSQLESAIHALKNNGVQVYGDVVMNHKAGADGTEFVDAVEVDPSNRNQETSGTYQIQAYTKFDFPGRGNTYSSFKWRWYHFDGTDWDESRKLNRIYKFDGKAWDWPVDTEFGNYDYLMFADYDMDHPEVVNELRRWGEWYTNTLNLDGFRIDAVKHIKFSFTRDWLTHVRNATGKGMFAVAEFWKNDLGALENYLSYTNWNHSVFDVPLHYNLYNASNSRGNYDMAKLLNGTVVQKHPMHAVTFVDNHDSQPGESLESFVQEWFKPLAYALILTREQGYPSVFYGDYYGIPTHSVPAMKAKIDPILAARQNFAYGTQHDYFDHHNIIGWTREGNTTHPNSGLATIMSDGPGGEKWMYVGQNKAGQVWHDITGNKPGTVTINADGWANFSVNKGSVSIWVKR

SEQ ID NO: 20101 - protein, 481 aa, Bacillus sp.
HNGTNATMMQYFEWHLPNDGNHWNRLRDDASNLRNRGITAIWIPPAWKGTSQNDVGYGAYDLYDLGEFNQKGTVRTKYGTRSQLESAIHALKNNGVQVYGDVVMNHKAGADGTEFVTAVEVDPSNRNQETSGTYQIQAYTKFDFPGRGNTYSSFKWRWYHFDGTDWDESRKLNRIYKFSGKAWDWPVDTEFGNYDYLMFADLDMDHPEVVNELRRWGEWYTNTLNLDGFRIDAVKHIKFSFTRDWLTHVRNATGKGMFAVAEFWKNDLGALENYLSYTNWNHSVFDVPLHYNLYNASNSRGNYDMAKLLNGTVVQKHPMHAVTFVDNHDSQPGESLESFVQEWFKPLAYALILTREQGYPSVFYGDYYGIPTHSVPAMKAKIDPILAARQNFAYGTQHDYFDHHNIIGWTREGNTTHPNSGLATIMSDGPGGEKWMYVGQNKAGQVWHDITGNKPGTVTINADGWANFSVNKGSVSIWVKR

SEQ ID NO: 20102 - protein, 481 aa, Bacillus sp.
HNGTNATMMQYFEWHLPNDGNHWNRLRDDASNLRNRGITAIWIPPAWKGTSQNDVGYGAYDLYDLGEFNQKGTVRTKYGTRSQLESAIHALKNNGVQVYGDVVMNHKAGADGTEFVTAVEVDPSNRNQETSGTYQIQAYTKFDFPGRGNTYSSFKWRWYHFDGTDWDESRKLNRIYKFSGKAWDWPVDTEFGNYDYLMFADLDMDHPEVVNELRRWGEWYYNTLNLDGFRIDAVKHIKFSFTRDWLTHVRNATGKEMFAVAEFWKNDLGALENYLSYTNWNHSVFDVPLHYNLYNASNSRGNYDMAKLLNGTVVQKHPMHAVTFVDNHDSQPGESLESFVQEWFKPLAYALILTREQGYPSVFYGDYYGIPTHSVPAMKAKIDPILAARQNFAYGTQHDYFDHHNIIGWTREGNTTHPNSGLATIMSDGPGGEKWMYVGQNKAGQVWHDITGNKPGTVTINADGWANFSVNGASVSIWVKR

SEQ ID NO: 20103 - protein, 481 aa, Bacillus sp.
HNGTNATMMQYFEWHLPNDGNHWNRLRDDASNLRNRGITAIWIPPAWKGTSQNDVGYGAYDLYDLGEFNQKGTVRTKYGTRSQLESAIHALKNNGVQVYGDVVMNHKAGADGTEFVTAVEVDPSNRNQETSGTYQIQAYTKFDFPGRGNTYSSFKWRWYHFDGTDWDESRKLNRIYKFSGKAWDWPVDTEFGNYDYLMFADYDMDHPEVVNELRRWGEWYTNTLNLDGFRIDAVKHIKFSFTRDWLTHVRNADGKEMFAVAEFWKNDLGALENYLSYTNWNHSVFDVPLHYNLYNASNSRGNYDMAKLLNGTVVQKHPMHAVTFVDNHDSQPGESLESFVQEWFKPLAYALILTREQGYPSVFYGDYYGIPTHSVPAMKAKIDPILAARQNFAYGTQHDYFDHHNIIGWTREGNTTHPNSGLATIMSDGPGGEKWMYVGQNKAGQVWHDITGNKPGTVTINADGWANFSVNKGSVSIWVKR
